United States Patent Application Publication US 2014/0057251 A1 - sequence listing, part 111

SEQ ID NO: 202560 - DNA, 890 bp, Cannabis indica
caaaaaataaaataagattaaattaatgtactctctctttgtttgttctttttttttgttggaaagaaaaattttaatactcatttagttttgaaaataaacaaaactataacgccgagctataaaataaatttttgattttgtcatgtcgattcattaagtcaagttctaattatattaatattagtatatgaaaagttccaattgtcatgtaaaaagaaaattctcagagagtgcactttctctttgtccacgactagagaaggctctccgacaaccctgatgtggtttgagattttccttgagactgggaggttggaaagtattcacattttggaaacacaaagttggttattcattctcttgagaagatgtgcgatgggaaggtttaagggaatgaagggatcattaaatttttttcaaatgatgctaatgctattgggcataagaattcttcatccgctggatttaacatttgattgtctcagttgaagtaaaaagtaggccatagagacccgtttgttccccttaacgatggtgtgaatgtggatgatgctagctcttgattctctatccaaaatgatacccctatgtaggaggataactcatctcctctacaagaggcatgaaaggtgtggcttggaattgtagagggttggtacagacctctacagttctagagctaaagtccctagttcggatgtccttgccatatttcattttttttaactgaactaaaagtggatgcaaatttgtggtacctattctaaaatgattacatttttattttaatatttatgttcctactgttggaaccacaggttgtttaaacttaacctggaaagatggtttagtttttgaaagcattattacttctcgtaaccaaatta

SEQ ID NO: 202561 - DNA, 629 bp, Cannabis indica
ttgaagcgggaacgttacaaaaaataacaatatgtgtaacaaaataagtaaattttactttgagcatattttattcatttcaaaactataataataatatatacacatatctcatacaaaaaataaatagtattcatgtagagcataaatagtaaatttaaaaaaaacaaaaaaaatagaacattattttcttaataccattctttcaaaagttattgtgagtgagtttttttaaaaaaagaaaataaaataaaatgtagtgtaaggggtataaagaggttagagtgtggtgtagcacagatgataatatgtgagggaagatgtatgtatgttggattgtttttggaaggtagggtttccagtgactctgacgtagcgtgtgttgaatggtgtgcagagcatcctatcggataataccctttttttatatttttttatttttattttctaatttcctctttccaatttattcctttcactaattttataattaattcccttttaatttttcatggctttgcattctttatatccactcaattaatatctcattatttaccatctttcggactattttaacccttaagtccccaccaatttggatgataagtttgagattaaacaataat

SEQ ID NO: 202562 - DNA, 602 bp, Cannabis indica
tttagtattttaattggatattaattgatggaaccactaaaaaaaaggagaatcatatatatgcagataaattaaaggttgtccaaatacatatatatattaaatagaaaaacaaaatagtaaaagtgagaaggtagactaaaattgttgatagatctggagtttgagatgtaataaaagggaatgaaagttggctttggaaataatagtatcgcattcagctaccttgagtttactccaaagattgaacaaattgtccttctgaaactcatccagccaatccaatttcaactcattcttctctaaatattcttcaaaactggctggcagcaacattatcacttcatcttctaagttcattacacccctctccctttccctttctccatcaatatatatatatttcatatatatttattatatatcaatctctattctctattaacgtatgtatgcatgtgtgattacctaattctaggaccttgcctgtatggaaatgttcagtacttccttttatttgtgaacgaagcctaaatttacatacatacatgtttatcaaaagagaaaataggaaagtaaatactaatgttaaaaaggaaaac

SEQ ID NO: 202563 - DNA, 772 bp, Cannabis indica
agacatttgtgggccaaaattaattttctacacagcccagtcattcttcactaggcccacttaccgtccttgttgtcgggagccaatttattattttatttgttttgtgattttttttatatatataatatattagttttcccacaaattttttctctctacgtttctaattttttttttctttacagaactggaaacttttcttgtaggaggaaggaatattactcttttgaagtaatatactcgaaccgaacttcaagttgaagttgattaatagtagggacggaggccaaagtgcaaagaaataatttaaggagggtcatttaacaaatttgtataaaaaataataaaaaaaaacttggaaaaagatattataagataaccgagttgtatttgtatctcacaaaattataagtgcatccctaatcttaaaaaataatttaaaaaaatcactgttaatatatattttttttgttaattttttttcaatcaccatattattttattattttatgttaacttcagtacttataataattttattttaggtcattttttattataattttataattaatttttaattttatttttattttttcttaagaaaattttatataatttttgttttttttgttattaacatttaaaatataatttatttttatttgattaggtatatttttaagaatgctttttttttaaaagaaaaactattataaatcaaagacatatattttatataaaataaaaattataaaaatagtgtatc

SEQ ID NO: 202564 - DNA, 645 bp, Cannabis indica
caaaatgataggggattcctatcaaaattctcagctcatgtgagtcagctgattagtttggagctattgggtcccgctcttccatcttgttgggtcaccacctccccttaactcccatattagtatgatataagctctcaatgtgttccacagatattaagaattttagatggttctcacatgtctccatgaatgagagagaagggttgagaagtttgcaaggccttggggcgaaagaatgacaagtgtttagaaaatggacaaatatcaaagagagattgagggttattattgacaaatagggatgagattaagcgtttgaggtacataaaatttgaatgaccaagacggtaatgccataatgtgattgtattgattttattggattggtttactgatgtaagagattgacattgaaggagagaacaatgatttcttgtagtgctgttgtacaattcctgtttgttttcttaataggattttgttttctttgtatggtgggtggtttaatatttgtacaccctttggccttttgtattattctacttattaataatagagtattggcagcagtgctaactagacgtgttaccttgtaattggttagtgatacttttttaaggttactatattaaattatataga

SEQ ID NO: 202565 - DNA, 1134 bp, Cannabis indica
gatactacagaataatttcatataatctataagtcttggatggtatgacagaaagttttcagagaacattggaaatatttgtagctctacattatttggatcagttgacatgttaagattttaagaaaagaaaagagttaaacgtcttttttccccactggagataacatagaaaggaagcagtgagtgtggggtcacaaattagagagaaccttcaagtatttttgtagcaactattgtcaaggattgaggaagttgtagaaatggacagtaatttactggtctttgaaacaagaagactttgttggatgtagcttcccttgctattctttggggtgtataattggaaagatacaatagaatactcaattacgtagaaaaaaaaaagttggaaaatagtggagaaaagatataggaaaaattttcctaaatttttatatcagttgaatagaagttttggttttgattcaaaaagaaaggaggaaaaaatgaatatgtttaataaagtttccaaacttatacaattatatgaaatttctaagaagagattctatccttttcatatatatttatatatatattttaatccaaacaaaagaaaataaattctacagaatggcaatttctattcttactgaaaacattcaagttccatacaatgggatagtgaatggaactttttgcagttacatgtgataatcttgttttttgtgttagactgtattgatctactagtgtttttttggttgtaaatagaatggtattcgaccttctcttattagtacaatgtgtgttttgatagacatccacaatatggtggattagaaaattgtttgagtatgtattgctggggcacattggtatgtgtaaggagattagtagttgagcaatcatggttgttattttactcgggtgtgttatcttttaggaagggaagtaagaattttatgtaggattttggagagtaatagctctagctgggagagatccacaccaaaagtttaaaactttatttataatttcagaatttatatcatcattgatagagaagaaattcctaccgtgtttcttatatgaacaacaaaataaaatatatactgaacggtaaaagaaaaaaaaatgtatagtagcgtg

SEQ ID NO: 202566 - DNA, 607 bp, Cannabis indica
aaaaaagttgtgaaaattgaatatagaaagaaaagataaaaattaaaaagatcatgcagaagtatacatttcgctattcaattcaacagcctgttgaataattttagatttaacccatctgtaaatttctagtgacacagcagtaagaaccaaataactagaattgctacacaactccatttccatttggtaggttgattttgattaaggatgaccccttcaaaaatatctgctattattaggactattatcacataacccagaagccgatgataaatcccccagcttttccagccacaatgatcatactcctcttcctttttcggctgccaaaaaatggcaaccatctgatgaaattaatcaaataaatcatattataaaaagaaaaatatttctcaatagaaaatttagtcaataaaatgattaattagtacatgcattttacctgtatagttgtgagtgtaaaaataatgataccaagaatttgatgtgatctaagctcatgagaatgttgcttggaagtatggtctataagtattccaataagccatcccaatgtccccaaaacatatccaatgctttgacacattatgtgatatgaatacca

SEQ ID NO: 202567 - DNA, 1086 bp, Cannabis indica
tttaatgaattaaatgcaaatattgagatttgagatgcattattagagatattacttttattttgatggacactatatttggtggcttgttactctttttcttcttgaggttttatctactgggttttctctagaagttttaaaaatgtcatgttattcaataatttatttccacacattaacaatatagaactaactctaataaacttagattctcagaattgaaaacaatgctgaaatgtaactacattacaggaaaatcataaagacttgttgattgatatttccctttaatttacaaattgatgtatatttaaatagtatggccttaccctgcagtgacttcttgttgaagaacacaaggagacagagatctatgttataactaaaacaagaaaaaatgaattatattatttgttcttataagaactgcctagattgaacctcctcatttcacatgtccttctacttcaagcatgtcaaatcttgaggtttcatagagtacctctttatttttgttcactatctgctgttgcttgtacttgagttgcatactgcaaattccaaagtatgtcttcaaaagatggacgacttgcatctggagatatgcatttctgcattatggagatcacaatcgacagtgactcttgtgagcttgtagctagaacaattggttcaactattcgctttcgcccatcttggctctgcagagttgtctagacaaatatgcattgatatatcagtgtttattgcacaaatatgatcagaatcagattatgttactcttgaaacacataccatttctttgagcagaaatgcctctctgctagcagattgggaaggcccaactactgcttctaatattatatagccaaagctgtatgcatcatcttctaaacttgtcatttgcctgaaaattaagatttcccattgttaaatgttaaaccgaaaattggttacatacaaaactgcatccagtttagatagttgagagtttatacgaagttttcctcaagtgaataacaattaatacatgagaataaacatttgggtgaataaactagtttacatgagagaaaatcctta

SEQ ID NO: 202568 - DNA, 1216 bp, Cannabis indica
ataatatttttgtatgcagcatactaattattaatgctttttcatttttactatatttaaaactaattaaaaatatatatgtatgttgaattcaaattccatctggatttaaaaatatctgtaaccctactcaaccattttttctttattatttataaaatagcattaaataatcaataacaaactacttttcaaatatccactatataaatagcattaactaattataagttcaattcttatcatatataattatatcaacctatatttcaaatatcatcacatcgtaattctaaggatgaggaaaattaattgtattttcttcttatttttgctttcattaatttgtactgaatttgaattgagtgagggtctccgttttggtgattatagattttgctttaaagaagttgcaaatgtagcaccatgtgcattcgaaatatctagttttaatctttggaaacgtccaataagttcatcttgttgttccaaaatctcaaaggcggttgctactaattgtgctcttccgttaccttattattggtttgtaaatagccaaacttattgtactgctgctctttcgtcaccaccaccaccaccaccatcacagccatctccacttctaccaccaccaccatcacgaccctccccaatacttccaccaccaccaccgtcacggccaacgccaataatacttcctgagcaacccgccaattatcacatgaaaaattgtccagagttcaacatcttgccacaattgtgtattcaacagttttatgactactatattcacgatcagccgatcagttcttcatgttgcacgacctatcttagtgtcttcaacacgtgtactaaaactccatggtcgaagatcagcctcaaatgccatgattattgccaacgccaactctcatcaccatgaaatgctcaactagcacacactacctagctagggtttcatatcttttaagtttttaattttttaatcttggtagctattattattatagattttgctttattattattattattatctatttatgatttcttgatagaaattttcattattaattagttaagaaacgttttttttttttgtaagaattttattttattgtatttgtgatagcataaattaaatcaaattgaaaattgatgcatttgcaacgtgtctaaagcaaaatctatagagtgctagtacaaattaatgaaa

SEQ ID NO: 202569 - DNA, 722 bp, Cannabis indica
aatatgctgtaagctatcaaaccagatgtaacatcaactttttgtttggagctcagttttgaaaatcttttgatctgttaagataaatttaactttcaattttgataagagatatggacgaaatgctattagcaagttcttctgtatatctggcatgttcaggaaagtgaacttaaaagactttcaggatcattaaaatggataggagaagttatttttggagaaacgtaggtgctttctatctaccttatttctaaattgtgttgaaactctatgctgtcaaaacactaaggcgctcttgcaatatacttgcaatgtgcttggtaatataccaatatgagtaaattcatgttctttaacttagtgaatgtagttgtagcttcagtcgtgtgctaagctctcttcattttaaatgttagttgtggtttgcatattgtttgttaataatgcattgttgccaaatatattgtcaaaattacttaagactgtgtcaatgtaagtgcaagtgattgctttcaaatatttattcccattttctctatgctttgcagtgccttggggtcaaataatttttctggaccacttcccccagaaattggtaatttgttgaaacttgagcaaatgtaagtcccttgtcttattttaagataaaggccaatatatttactttctgcaattttctccttgtttaagtatttgcatttgaacttagtgttaatttt

SEQ ID NO: 202570 - DNA, 2302 bp, Cannabis indica
taaataaataaattagcaaattttattaaaatattagcattaagagtacgaaagaattagtctaaatatcatgttcaaaaatactacgctcgaaaaaattaagaatgtctctttgccacaacatgagaaactcgatttgatgatcacttaataaaatataaccaaacattttgttttcaagtgtaggttccactttttagttttatttgatagtaatcgtataaattcttaacacttgagtttctttttcttttagggttgtttggtacggtgaaatgtcgatcttcgtgggaattatagtgatattttttgttttaagcctaaatattcttatgcacaatcaatataagtttctagataaaataatcatattatctacttatagggtcggttctataagtgtacaagatgggttattgcacaggtcctaaaaataaaagatatctaatatattttttctttaatgctttttaggttttttttgtatgaacccaactttctaaagggttatcaacttgtcgttagtaactctcatgcaaaaaattaaaaatatatccattactgctatttattattattttttttttcaaacctttcattttctttttaggctgtattaaaattaataataatttaataaaatagttcgaaattttcgatgttttataagatatataaccataagataaaatatttaaaaatattattaataaattgcacttttcttttttgtaagggcctaatttttataattaaaatagagcctcaaaaatattaatttaagacggccctccgcttataacttccagttaatcaaattttttaaagggatttttacgtacatactgaaatttctattttttttactcttttactatgagcggaattttttttaaaaatactgtgtaagttttatactgtaaactgtgttgagttttcactattattccacggacgttgttttttaattgttccactgttattttaattgttttgttttgttcttttacggttgttttataaaaatagtatttttgtaaaaaaattgtgtgacagtaaaattactcaaaattcaatatttttgtaaaaaatccctttcttttaaagggagaagttgaagaatacccttttttttatacattaaccaaatttatcttcaaataaaatttaatttaaatatacatttttttataagtattataaccaaattattctcacactctcacataactaagacataattttaaatataatagatttgtgttctttggagatggatgtgtaggtgtgtataggaaagttaattaggataaaattttaattagagaagattggagactatcgttaagttataggagtaaaattggtagaatgattaaaaaaaaaaggcaaaattaatagattttaaaagaggaggtaaaaattaaaaagatcattttaaaagatgtatagagtataattttctcttttttaaacttctcgtaccaaatgccctttaatttaaacaatctttaagtactttactcccttcaaccctaacgggcacaacaatatatatttgatagagtgttttagtctaattttttgaatggttgcctacgttgtaattatttagaaaatcttataaaattttaagaaattcagaaaaatttaatacgtcgaaaatagggttcaaatagtttattttatacacgcgtgtaaaataaaagagtctcgcatgcaacagactgtttgaaccttatattcggcatgttaaattttttttaatctctcaaaattttgcacaatgtcttaaataattacaacgtaaatgaccataaaaaaattagattaattttttttttaaaatgcccaaacagtttgggagtacattagtagttcccttttaggggtggaattatccaataaatttttttgttaagaagaaatgtcaatatatataataaatataattacattaataattattagcttataattaagctgatcatcaatgtaagtttttcctaattaaacaataattgcttctaatattctaattattacattccgacaaaagataactaagtttggaatattttttttttcagtgggtacaaatgtgaagtttattcaacaattgagtaaatatcatttactatttatatatatgtttttttcaaaggaatacatttgagtcatcattgataacatacaatatacttacctaaatattcaaacattttgcaactaagcttattgaatgcgtaattttatgaatgtaaacacattactcttgtttaaatttgtcaaaaaaaaaaaa

SEQ ID NO: 202571 - DNA, 927 bp, Cannabis indica
gcctccgacttctcgcactcgtgcccgaccctttcgccgccgacgacccacttgaggtgctgctaatattaacggagatttcatcttcgccgctaacaaaattcccattggaaggagaagctgcagatatgaaaagggtcggaggctgctgtggaggtgagaacaaggacttttgggaagagggaaaaaggctgatgttgttcttgttccattgccaagaagaagaagaagtagaaaaatgggagtgtggtgtagctatggcagcgtttgcgtacatctatatggagtgagtatgtatatatgtgcaccgtcgaatttaaaatcggccggggtttaagtctgttgcttttcgttttcttttttttttcttctcagataagtcctaacaaaattactatgtaccccttcacctgaaaaatgcttggcaataactacgattctacgagtaaagtactaaaactaattaatagcgttttttatagaatcattagcaattttttctaaggaatcattgattttgtcttctaaaatttcatatttacataaatttagtcattatgttagatttcgtcttattaaatgttgacgtgtctttgtaaattaataattttatctccctaaactttgacaattattaaatagtactccttcaaaataaaaatgaaaaagattcaacttctttctcttattatcacagacactaagaggcgtaggcccaataataatgggccagtgaaatggaagaagagcttgaggttactgatgagcttccaaaaaatagggtttcgatgggttttggtatccaggcccaccaaaaattatgactgttcttggttagaattatcgtgggcttgagaactcacgggtctctaaattcctaaaggaccttgtggtttagaagaagccaaattttgtgtttttatgtga

SEQ ID NO: 202572 - DNA, 708 bp, Cannabis indica
ccttgggcagttgcccttcttgctcatagcttgggccggcactgcttgtgagtatgttcaaggaatgaaaacgacttcaaaacaatattttatatgagcattgagatcttcgcaaacaagccgtggcatcccatttttatatataaatgtatttatacataagaatgttagaatttgggataaggttgcttctcaaaactaattggtaataggagcagtagtccattcatcttatatatggtaatttatttttatacattagcaatatatgactaactctaatacaccatcctcacgtttgggtctaaaaagtttgagtataacgaacaacctttaagagactacaagaccgaacgtgatatttgaaagaatctcacaagatcaaatatcaagaaatttgtaaattttgaaataggtcaagaaccccaacacttaacactggtacgtatggatcgaaaagtcccaaataaagattaaaagcataaacattttaagaacttttgtgtaattttttctttctaaaattaagtttttgattccacggccaatcaagcctaaataaatttgtaatgtaataacgtgtgatgttgccacataatatttattcttttttatttttcagcatgatctcaaaattctgccctacttttataagtaccacagttgccataatgtcattggtcagacaatctcaaaaaaaaaaaaaaa

SEQ ID NO: 202573 - DNA, 705 bp, Cannabis indica
tgtgtactttagcaactgcaaggacttcttttagagttatttatttaagatacagcttacatcaacatttatatggaagttggcctttatatgtagtcactggtttgcttcttttcgatacacatataattgttttttttttctcaagaaaattaaatgtggttaaattgaggacttgtgcattgcttcttgcatatgtgtcactattgagtctgcaaatttttaacatggacaacgtttttgatgctctgccccagatatttgggattccaaaggaacacaggaagtctaagccgtatcatgatcatgtctttgtattctccatcgttgatgatcacatttggttccgtaattatcaggttgtttaccatttaaactttgaaattctattttatattgatgaagaaatatgatgcatgtagcatcttcttttgcattgttaataattccagattaataagagcatttggttagcatggaaagaatttaattgtaacaaaatatgaaagagttagagaaagcattctcattttactggctcataaaagaatcattgcaatgataaatgctagtgtgagcttttgaatagctgaagcacaaatttttgggactactgtttcgattttttaaattgcatctgacaaaatttatattctcccggtgctttcagatatcagttcctcataatgaatcagacaaaatagc

SEQ ID NO: 202574 - DNA, 798 bp, Cannabis indica
ttttcattttattcttaatttaaattcaaatatttattcaacgaaaataataaaaaagttcaagtaacttctttaatattttcttttctttgagtctctagcctaatttttccctcagatttctattctttgctttggcgattctattgctctcaactttttccttcttctttttcttttatttgcattttgcagtaatgacttcgagaaagagaggtcctctcttgtggttgatcctaaatatttgtccgagtatgaattagcttttaatgacacttgtacccgataccttgttctagaagggtgactttttgcatgttatcgaaggatgaattggacaagagcttggaagagcttcaaatggttaatggcgagactttaatgagcaggaagcacatgggatggaactcttgtgattccttattgtcaactttgattcctatattgtaacctttagagagattcttcagatcccatttctatagtgatctgattagtattatctcttagtatcaatactgttgtgtccgacaacaacctcagcaagcaatcaaccaataccagcaaaaccagatattaatcaatgtattgcagaaataaaaatgatagaatataaagaacacaacaagattatagaggttcgaacttccttcacaaaagtgaagagcttagtcctctttgaactcccttaggattagtctttattatgaatcaaatggcaagattacaaactgtttagttgtacaaatcatagaacacaaagatgatgaattactccccttgttttagctttaatcc

SEQ ID NO: 202575 - DNA, 506 bp, Cannabis indica
attagtgtgttttgatagagtcttgatgggtggacgccagctaaaatatgataactgataagaacagtgccggcatgtatcgttttcattcacaagcccctttaccaattatgtttgtataattgtaactcttgtggactccgcagctcaaggacagaaggagtaactgactcacttgtttgcttctgcctatctcgaagtgggttttgatagatctacagacggctccttcttcaatttatcaattattgtgaaaaataagtgagatgtgaatgtggaccacaaatactatatttgttaagagacaaaagcatcattgctaaagatattcttctcatgatttttttttctttttgacaagcctttttggggaaggaaattaactctctgcttacagttttatgagcattcactcacagttcatacagaaaggatcatttagaaatgacccaaaaaaaaaggatgttgaataaggaaatgttgtacagtaaaaaaaaaaaaaaaaa

SEQ ID NO: 202576 - DNA, 984 bp, Cannabis indica
cttacatatgaagacactgaagctgtcccaaaagaaacaaatgaatcaaatgttgaaaaattactacacattgagcaagctgtgatattaacgaggatcaaacatttaattttaaagattaacataataatagacatatctcctgaaatttcgttttttataagtattaatttattatttaattaatttttaattaaatacaaaataataaaatttgtactagaatagttatttggtagctacagaatataattttgtaattgtagaataaatcagaaaataaatagtgcaaaaacctaaagtgcacaaagtttttgtacatggaattaacaatccttgcagattgttactagtctacggggtcacgcctaagataaaatttatttgataaatctcaaaaaatacaaaataattgatttatgcataaatagattatatcttattgtatgcataaacttgatgtatttactttttaatcaaatcttgttgaaattttaagtgctcgaagtcccttcaacctccttcaagagtgcaagaattgaaaagttatttcttgaaagcttgtagaacattctcctgaaggtaccatttttttttttttttttgtagacttgattaactcaagacaatacaaaatacatatacacaaagaaagggacaaatacactttctctacaaaacaaacactctcttttctaaaagtatgaagacaattcaaagtgaataaaagagatactaaacctaactaatataatatgtatttataatcaatatacaccttataaacagcttacacggtaaacaaggcaacttacaaaaaaacttccctaaaaaaagatgttcagctagtccaggaatttttgcttttgtatttacagatcatgaacaataactgtgacttttttttttatggaaaaggaaaatcttacttaggttttctttacaaaaaaatgtgaccaaacaaattaaaaaactcacatagga

SEQ ID NO: 202577 - DNA, 1231 bp, Cannabis indica
ttgttaaacagaccttaatagaaaaacgtttctttctcctttattgtctgtataagagaaatgagatctagtagttgggacttggggggctgctactttgaaaatgtcttattaagtcgttgttgctctactttgttttgactaaactaatacaagtaatgaaatccaaaactagatatatataaatattaatggtattaggtatgggttatgtacagaaataattatttataacgaaaatgcacattatcctataactttatttatatataaatttatgtcacaattctataaatttgctacatcaagtttttaattgtatactgcagcacaatattacaaaattgatgtaaatatatcataaaatcaatttttttttgttgtacatagcatatttttatatctttaattaaaaatagttcaattggtgaaaaattctaaatttgaaatggtgaacatgttccatctttgaaattaaaaagttgatccctaaaaaagaaacaacctgagactcgaacccaggacctccaatacacacgcaccccctatggccacttgagctagcctcaagtggttaactttataattattgtaaattacactaagttccagtttcataataattttctaaatgtgccctcatctaaaaaactttagcggaactatgattttacttaattaatataaattagtaaattcgtaaagttttattgtattaatttaatatggccaatatagtcaattttgatttattaggcctattcaatttaggtttatgtagtaagtatgttcttggtttagggaaaactgagagggaaatttaattaattatacatttattagataattttttttttcaaaaccaaaactatttaatattagtaaaatatgtcattttttcctaaaaccccattctattcctctcatttgaacaaccatctctctctttcccccttctctctcttgctctctacaacacgcacatggaggagcacacaatcgacccacaaccacaaacttggtcccttctttccacgaccaccatgaccactaggatccacggacccaatgaccaccgcggacccaacgacttctccatcaaccacggcttcacaattggcaatgttatcaaagaaataaattttatgatcaatgtttgttatgtgtgagtagatgttagatttagggtttaaaatggccaaatttaggttttgggcaaaaaattagtttt

SEQ ID NO: 202578 - DNA, 512 bp, Cannabis indica
tggtcagtattatatatttataacaataataaaatatatcattccatcaagatagggttgagagagaaccggaggttggggactcgggatgttggggggttcgtggggttcgcgagaccacaggtggggtcggtatccaccgtctgcggccggaaacggtgcgtcgaggctggacagagtgatcgcgcgaaggacaacaaacggagcattccgcccctgattcgcaggccgccgagaagagagggaggacggaaacggagctgtggtaatctcgggatgctacgttgtggctggtggccggcgacgacccaagtgagctgagcaggagggctacgcgaagaaggagagcgagagagtaatggagaggaaggcggaacagattcgaaggggagagagaaagcagtttagccgacttcattttcttttacaaaccctaatcatttaaattagggtagcatagtcggcttgggttttttttttaacaataacggcttagtttttttttttttttt

SEQ ID NO: 202579 - DNA, 706 bp, Cannabis indica
aatttaaatttacagtgtgcttaaaagtaaaagaagcaaccactaaaaaataaataatggaaataaaaataccaaaagagattaataagatcgccaaacaccgacaaatcagaattagggtactgccacaaccacacatatcaactataccaccaagaggagttgcatcccagacccaaggacaaaggcactcccaaatctcaccatgaagcccaaccccaacgaatcaccaacgtccatctaagattgccgctgctggaccaccgtaatggaagcaaaaaaaatgagttctaaacaggagggaaaccaaccacgatggttagacaagaagcaggcccccatcagcaaacatccttgacccaaatcagaaacctcaccgtggaacccaccccacaccagaagcaaccaaagccaaactttatgaccaccaagtgaaaaccctaaaatccaataccaaaaggtgttaatcctccatcagagaactttgtcaaatgcacaatcaaatactcccccccaaccatggccactacaaaacccacaagtcggcccacaaatcggcgagctatgactggagagggaaaaaagaatctcaaatggcgaaaggctctcaacccctaaagagaaactctagactctcttgtaacatgatataatgttgagagtatattattgtttttcttttccttaattttcaattttcttttaa

SEQ ID NO: 202580 - DNA, 1332 bp, Cannabis indica
tttttttttcttgtgaagttgaaggaattataagagagaaaaaatgataatgattttttccattttacttttttctaattgcttttgcatgcaaaattgattctagtctatctaattaaggatagttgcggcataacatcttaaaattttacttttgtaattaatagagatccaataattttttttagtcccaaaactacctcaaattactaaaactataattttatatgtttttgtctgtgagcttccattaagtaatgactaaaatatttgtgtcattacctataattgaaccgcgtctcataattatttatgatgtgacctaattaaattgtgacacatgttattatagtcaccacttattaaaaattaatcgataattttgccgctaaagaaatatattagatttttttcggttagagtatctctaacttatacattaaatttagtgtcacactaacactaaattaatactaaatttagtgtcaaaacttatttttactccaaccacaacactaaaaacatattctttattattataataattttttaataaaataaaatattatctttaatgtgtgttaaaatttataatatttttattgtgtaatattttttctttaaaaagaaatacaaaatgcaataattttttacttaaatctaattgaaaataataataattgatattcacatttaaattaacacacaataataataatggacaaaagtccttaaatttaaccatctcaatagttcaggaaaaatttttaacggccaaaaaagtttagagggacgaattagtatatgtcaaaattgagggagaaaaattactaattaggctaaaatcaattcctgcctccatcccacgtcaagtggagcagattttacaacatagaaggcatccatgacttgttcatattcaatgaacattaatttctctttatgtactaaactaattgtttaaaagagaaaaaaaaaatataaaaaacaaaataggagtaaaaaaggaaaaagaaaaagggaaacacattcacatgatgagattacaaaaaagaaaagaaaaaggccgaagatttggctcttcctctcgaaatagtacttttctacctaaatctgatggcatatattccataatatatcacggctaacattatggcattccgcgtcttattatattaactctcacacactttcaccaaatatacaataaatgataaatatgtaaataataatttctaaataaaaatcaaaattagcagggagggaggggcatccaggcattgccatctgtcgtatgtactcggctccattcgcaaccttaacagattttat

SEQ ID NO: 202581 - DNA, 673 bp, Cannabis indica
tatcagccagcttggccttagccccgtcaacggcctcatggtcaggccggtcgccgatggttttgagcacggatcgggtctgggccacatcggtcacagcacgggtcatggcctcgattaacttcgggtcggtcaaacggggcatctgctcgactaactcgtactgacctgcccccgatgaagaagaagaacacgacggatcagagtgggcttcggccggcaaaggttgctcgatatcgaccggaggatcatcgggcctgggcccaaaggtggggatccggcccatgatgtacgataggatagggaaggttttcgggttcggatccatgttttcggatgttgttcttgttcttctagattcttttgtctttgattaaagacagagagtgaaactgagtgagtttgttggtatcggatatgagaggggttttcttcttgggtggatgtggggccctactagggaacggaatagagatttataatttatttatttatttgtttagcttccacgtgtacaaaacgacaacgtatgactcgggctacatagtcagtttaatctttctcggatccggaaaacaagaagaaaagggcttttctagaatggaggatgaaatgaaatatgggactcggaggaatctgttctggccatttattttatatatagatatacata

SEQ ID NO: 202582 - DNA, 846 bp, Cannabis indica
ttactacacgcaaagcaatataatatacatttggaaacaatgaaaaagaagaaaagtctatgaatctaaagatatgttcaatttaatacactcaagcattgtaagaactactagataccttctaaagttcctaaatttggattctaggcacttatcattaacaacataattctctgcaaaatattacagcaatatgcacaagaatagctacaataagatatgatgatgtaaaagtcgccaattataaacttgcatttactgattaccttgatatgcgcatctcattattggtgtcaccaattatagttggctcataaaaggtcatgcctagattatgccttttccctcccagtattacttttgctcccttcaaataacaaaaataatccatttcaaaataaaagaataacaaaaaataataatgaggaacgagtaaaattacttgttaaatattaatactatctcttcactaaattgaggattctgagacatatagaacgaagtggtaactcaccaagttggccacaattagacacaataaagcaaagaaaaagtttgcatgaaagcaaatgaaagaaatcccaaaaggctaaccttcgatacggcatcttgtacaagagattctacctaaatgcaaaatcccaaagtagccatcaatatatatacatatatataaaataggttgctatactttgatcaaggaaataacagaatccggaaagtaagagaaaccttagttactgcagcttcatttatgagaggaccctgaaaggacaaaaagaattaggtaagaagtgatgtcgttgatgttatgcagctttctctgatgggattaaaagttatcaa

SEQ ID NO: 202583 - DNA, 689 bp, Cannabis indica
aaaatattttgatcaattttcccaaagccctagaccttattctcgcttgttgagtgtcaatcctctagacaggtacttacatatataaatataatatatatgaatggatttttttaaaattatttatttatagaaaaatcaaatgtttgtgttgttcaaataaatatgaataaaatttacagaaccttctagactcttcaaagatcaacctccaagatttttttaagtagactgttagatatttgtagtttagtttgatataaattaaattagaatattttatgttaatttaaaatttattaataacaaaatataattataaagactaaaaatcaatgagacgtacgccattctaattaataattattttacacaccattattctaatagtgggtattaattattctgtcaaatccatctccattgctcgtgatatataaggtattctactccagctcatctagaggaatatataaaaggcactcttaataatttctaatgaaattccttttcaaaaaaatggattaattgattcgattcattgcttaattacatttggttttaggttagtactttgccttaattgctgttattattacacattactcattgtgtttgatgagaaagaataaaaaaaaaaagagaatttcgaaaagatagagggtatgattgtttcgtcatcatcatga

SEQ ID NO: 202584 - DNA, 644 bp, Cannabis indica
ttatcaatacaaaataaaatatttaaatattcttaaaggtagatatggaattatgatgtcatattaattttatttattgaatatacactacatcttttttcgcaaaattaaatcacataaaactaaaacaaactcaacccaattgaaatagttcacacatcaatttgacatttcaagatctgatgagttcatgtagttcatgttttttgaattgaggtgtagtttatgttttttgaattgagttcatgtagtttattgtttttttttttttttgtagttcacacatcaatttatttaaatattcataaatttggttatgaattgaggtgtacgttctcccataaagcttaatttttataaactccaaaccatttgcgtgcaagtctgcagtacttccaaattctaacacaaattttcaatgaaaaacattatagagtatttacaattcctctttctttcaagtaaaatggttgtaattcttttcaatgaaaatgaagatttcagagatatatatacacagcatgcgtactcatcggactggtgttttggcgaagttgcaatattggaagatgaagaagaagaggaagaagaaagacaagcttatgatcgatcgggagatgcagaggaagaagaaagacgaagct

SEQ ID NO: 202585 - DNA, 511 bp, Cannabis indica
tttatattaatgtatacacacaaatgagaacttggtgcatagcacaccagtggactgtttacctttatttacatgtgcagataaattaaccccaacttattttaatttaatggctgatgtgcttgcctgctgggcgagagtgcacaaggccgaggccactggtctcttaagggatgtagccccctcatgtggttactagttttctttgctttcaataaaagtttttacccataaaaaaaaacttaattttaatttaataaaactacagtaatgtcaagacatcctaaaaccaaacataaaatatcaaatcatatgatatttgttaacgaaaaataattattattatcattgattggatttttagttaaccgatacggagttgtcataaatgagttttaaactaaaattgtaacaataaatgtaaataatgatatcagaattcacattaaatgtaaagaaagacataggaatttaaagagattcggccctagatgttggtaatagtctactc

SEQ ID NO: 202586 - DNA, 669 bp, Cannabis indica
catgggtgtccgttaagatctcttttggcttagcagtgttttgcatggaggagtgtatttacttttgtcaatcaagggtagcaaatccttgacaacttaggaagatttcttttgactcatatccttgccgcccaagtgtacagtgccatttatggcgttgtatacttgagttctccgtttatttctaaaggaaaggaattatcaacttagaaatgtaaacatgatagttttaatgaaacattcattcatccatatagttttcttggttacacctcgatactcaaaaaaaaggaaaaacaaaagaagttacactactggagtcgccccaagggtccttccttgattcttacggatcgtgctcaaaggacacataagttttcttgtgtgatggtgcctccttacttttttatggactccactccactaccttcaactggcccttccaagattgtcaattccattggctccttagctttggtggcgacgtacagtaagacattgtagcactcccttgcttctttatgctcctacttcagtgtagtgactcccctttcggttgggaacttcatggccaaatggtaaactaagtttatagccttcaaggaattgagcgacggtttccccatcactgtgttgaatgcagcttgacaatccaccaccaaaaatgtt

SEQ ID NO: 202587 - DNA, 893 bp, Cannabis indica
tcaataagatcacccacttccattgcaatgaacctagctagatcatgagacttacacataaaagggattccatacactcaaacccaaaaaaggaacatagtgtaaattatcaggggtaagagggaaagagctatcaggagcagcaaaaatagttatgctctgagcaaaatgccagggctgaccatctaacactctacccttatcaccctcacagccaaaagtgaccaagaacgtaccatctgcatgttcaaagacaacaatcgagaattgacattgcaatgaccacataccagaaagggttttgatcagagaaggacgattataaggcctaatagtctgaagcttaaggataagactaataggagcatgagaagaactagacgaaccaacctcataagtaaagacagtacactcatcaggagggaaagctaaggcactagacacagtattttaaaattcatccatatttgtagaagaaaacactacaaagacagagacaactaaaggaaagattaacactaagagatgacagaaataatacctgagtttggatatatatagaaaaaaaccataatccacgaaggattttcctcaacgccgccttagtcacttccctaatcccatccattggagccacaatgatgaagagaagctgaagcttcgaaatcccagtcgtctgcctccatattacaatcttcaagggtgtttcgcagagggaagatttgagaaatctgcaataaatgaggagaagcaaaaaaaagatgatggagaagagagagggatgacgaaaatagagaacggaagcaattaatactctgaagaggattaatgagatgggaaggaatgtaataataacccccagagcaataaatgctcgaaaaagagagagaaac

SEQ ID NO: 202588 - DNA, 939 bp, Cannabis indica
tgatcgggacaatatttaatcaaataaggatcatcccaaatgaatgttttggtctcagaatagaatttagatttatcatgtttaaaccaatgagaagttatttcaccagtaaccaaataatttacaatatctgcataccatggcaaagaggatacatgcatgagttgttcatcaggaaaagtttcaatgataggagtatactcattaatagttttgacaactaatctagaaaagttatcaacaataacatttttatatccctttttatcacgtatttctaagtcaaattcttgaaaaagcaggatccaacgaattaagcgagctttagcatcttttttagacaacaaatacttcaatgcagcatgatcataatagacaataattttagatcctagaagataagatctaaatttctccaaggcaataacaacaacacgcaattctttttcagttgtgcaataattcaattgagagtcatttaaagatttgctagcatagttaatcacatgaggtattctttcaagtctttgtcctaaggcagcaccaatagcataatcagaagcatcacacataatttctgaaggaagattccaatcaagaggtcgaataatgggtgcaatggtcaaaagagtttctagtttattgaaggcagcatgacatttattattaaagacaaaagcattttttttccaagtaaatgacataaagggcgtgaaattttactaaagtcttttataaatcttctataaaagccagcatggcctaagaatgatctaacttcttttactatttttggaggaagaagttttgaaataagatctgccatggatttatcaacttctattccttcagatgaaattacatgacctaaagtagctccttttttaaccataaaatgagattttcccaattaaggactaaattcttttctttgcaacg

SEQ ID NO: 202589 - DNA, 512 bp, Cannabis indica
ctccccaactgcctccggtctcgaccatgttatcctaactctttgtattatgtggggcgtccatttaataggactagcctgcgaactcataagttaagtaggtcagatagtgatcacataaactctatgtactgcacttatggattttaagacaatgcacttaaataaattatttaaaactagcatgcttcctaacattgttttctaatacataaattgctaaacaagtaaaggcttactgaaccatgagtcaagcttttctctgatgatgattgtacatgtcttgacgatcctcggtagacacgttggtggctttgataccgaaattgtgatgccctgatacttagactcgttataataattttttaatcaatgtaccacctcttctaatcaaaaggttttcctcaaaaatatgcaaatttatataaactttatagacatatatatttttttacataaaccgagatctcgtgtataaatttttacaatctttgcaaaaatacttttacaaa

SEQ ID NO: 202590 - DNA, 703 bp, Cannabis indica
cttctacattttatattaactattacgtgaattgctaaaatatattattagtgtctaacacgttccttagtattaaatgttattgatgtaattaaatattgggtctcatataacttaaaaaaataatttttaaaaaatattgctaattaattatgggatactacctataaaaaatactaatactactggtacccaataacaatactcatatattatatgtacaagtagaaatattatataagttgatttgaggtttgaggtttgtatgattagcaaataaaatataattagctaattaataataaagcttgcattattgccattttaattaatatatataatatatatttgggttcccctcccccaccaatattgatgatgagaaatcaagcttagatttttggacagtttaaggatttatatatatgatgtccaagtaaggactcatcaacttaaagtgaaagctacacacatgaaataaaataaaataaaataaaaagaagtactacaaggttttctttttttcctttatttttaaggaataaatttaacaatcgaatttcaaaataaaaataataaggcttcaaaattctttgtgattgattatttaatatatatatgaaattcatgaaatttatgagggtgtagatcctttatctattttaacatttaatatatatatgaaatttatgagggtgtagat

SEQ ID NO: 202591 - DNA, 1171 bp, Cannabis indica
gctaggagtctcattaatctgccaatccagggcgataagttaccctgagataaccaccgatctggggcaaaccatgttaaatctgctctcaacaaatgatagtcaatggtgcttggattaggttgttcccaagagttgtactgtgctcctcccagacttgcaattcggatcaccgtcctctgtgcctgttttccggcagtttggaagaaaaattcaaaaggtgctttaagtttgaggaatgctggactagggatgaaaggagcaaattggtagttgattctgcctggaaatctgtaagttatccttgggctctggccagggtctttaagaaaattggggctgctcgagtcgctcttatgcattggaatagagcccaatttggtaaaattgaaactttaatcaaagatctggaaaggaggctcaacctcattcgaagtttgtcgacgggatctagagagcgagctactgaaagtggtatccgccgctctcttaatgaggcccggatgagaaaagagttgtattggaagcaaagagccagggtctcttggctgaaggaaggtgataaatgttctaagttcttttttctttcgaagactattagaggaagaaggaatgtcattgagagcatcctgaataaaggcaatatgtggatcaccaaaagagagttaattgacaatgaatttatggaattctttaaaggaatttttatagagacgaacattggtcacgaccttaattgcaactacttaatccaggataaaatctcttagggcgaccaagcagagcatattagaagcccctccaatgacgaaatcatgtgtactctgtttaccatgggtaacaacaaagccccaggccctgatggtatgtctgtactcttctttaaacactattgggggtctgttgggaaggatttttgtgaagccgtcttagatttcttccggactggtattatgcacaagggggtcaacgcaactaatattgttctaatacccaaagtccaaaacttgaaaagatctaatcactataggtcgatctctctttgcaatgtggtttacaaggtcatctctaaaatcattgccaacagaactaagctgcttctacccactctaatctatcccacccaatctgcctttgtgccaagtagaaatattcaggataataatgtgat

SEQ ID NO: 202592 - DNA, 617 bp, Cannabis indica
agtcgttttttgagcccacttgagaattgggtctctgtatggtattttcactagcatcctcttgcataacttcatgagaaggcccatcaaaatttcctttgtgtgactcagcatgagtcggatcacttgggacagtgatatcctccaatctcgtgcgtctccttttagaatcagtgatcacactatcctccatttcctcctcaagatcttccaactgtatgatttttgaattaatggaattatttccatttataggcctcattgtaattgcagattccactactccttttgatttgccaagattgatactaggccgagtaaatgccccatgatttcctgcggctggttccttaatcagtggagattgattggtgtctgaagtcttgttcacaccagtgggagttcgaatggaattttctggttcatcttcatcgccgttccgcagccactgacttccaataaggttatgcctacgccgtggttgagctcgcatccatgctccataaggttgagaaagttggtctgctggagtgtcgaaatgttgtgggcagagtctttcggagtgtccgagtataccacacacgaagcagaaagttgggaggaattcgtatttaaac

SEQ ID NO: 202593 - DNA, 1071 bp, Cannabis indica
tcataattatctccctaaccctaattagtgtcccactaattaacagccaactcagctatttaccagtcttagaatcactccttttcctagcataagtgtacctaaaatgaatcttttgaaaacaatagcaactacttcaaagaagaaagcgtgttaagccttcccattcaaatcaattctttgggtagttagcatttttctaatgttataaatactaatttttcttgtgatgaggcccgtataggatttacccaactcccaaaatcaaagcaatcacactagaatagagagtggagtccggactgttattcaaaatgaaaacagaaaagtcacaactgagtattcgagatactaagcattctctcaagagcttactctctatatttgggcgctgagaaaatgcatgcaccttcaaatatcaatgatttcatctgattttcaattacacttaagacctgaattccagaatatccaatggccaatagaataccctaaaccctaaatgcaatcaactctccacccaaaagaaaataataataaatagtaacggaaagaacgcaatgctatcaccttcgttcagacgattgaagaagtttaagcttggtccgaagccacactgctaccgaatctttccaagatatcttcaatggccggaggtgatcggagtagaagaacgatctcctctctacaattttgaggttttctaagtagtgagtgtagactgtctagttatttcaaagttaaataaccctaagattcacttttgtgtaataacccgcttaataaaattaaaaattaatttatttataggtagttttatttgaaaaaaaaaaaaatcttattttaattttttttttaagaaaattataatttttattttatttaaaatggcgctatgtaaaagaattattagtttaaagatattttttgaatttctaagttaatagaatatcttagggaaatttgaaattccatgcttacaataccctaaatttttttttctaaatgcatagttattaaaattggtcatatatgaccactaatgctttaatccgtgatcaagtgtgtagt

SEQ ID NO: 202594 - DNA, 925 bp, Cannabis indica
gttttatccgtgtacagaagattctgcagctccatggtccctgaaataaatatacctactctactccaaaagccatctctactaataaattcactcccacaaaacacatcttctgatacacttatttttatctgaactctgaaactgtctctctctctctatctctttctttcttttactgcactgttttaagtctgaaacaagttttcttttggttggagtttagttttaatttctgtttgtagctaaggatgatgagtggaaagaccaggtttcccttcactgcatctcaatggcaagagcttgaacaccaagctctaatctttaagtatatggtttcaggaattcccatcccacctgatcttctcttcacccttaaaagaagttacttggactctacagcagtactaccttcaaagcttttccctcaccattctcaacatggtaatggtaacttaccttcatttctctctttttttttctctttattacatttttagataaaaagtgctgaaagggttaatgggttttgattctttttgaattttgtttatggtgaattagttgggtggaactgtttccaaatggggttaggaagaaagatagaccctgagccagggaggtgcagaagaacagatggcaaaaaatggagatgttctaaagaagcttttcctgattcaaaatattgtgaaaggcacatgcatagaggaaaaaaccgttcaagaaagcctgtggaagttttgaaaacaactgggacaaactccaatctctcaaatccatcaacacttgtctcatcaaacagaatctgtctaatattcactttcttcactgacatcacttccatctgaatcccaaaaccgccatcttcacccttatcataacccccatcttgatcatcaacaacagccttttagtgtttataacc

SEQ ID NO: 202595 - DNA, 1229 bp, Cannabis indica
ttttttttttgaaaatgaaattaataaaattcgaaatttagtttcaatttcaatctcaatctcctccatgatttttttttgagatattattatcccaaacaaaagtagtgggtgggtgggtgtgtggggaatgggttgggagaatcatatcaatcaaagcaggtatataacataagatgttgatgtgtttggttacgatgataactgtggtttggttcgggattattcgctctgatttctctgtttggttttagctttattacgatcatcatcatcaattaatcaactaagagcattgtcgaaccgaacaagcaaccacctgagcccactgccttagccttgttttcactgtttggggcgtatcatcttattttcccaacaaccaaacacaaaccaaaataaaaataaaaaaactaaataaacaattaaaactaataatcaatagagatagaattggggaaaatacctgggccaaacatggtgtgaggacttccagaaggagacggagtttcgcaatccgaagctgttgatgacgtagacgctgttaacgtcatcggaggaagcggcggaggcggcggaggcggtggaggaggaggaggaggaggagggagagtaaacggtttggagagagaatcgtaatagtgtttgttgacggcgtaatagagaccaagagctggtaaagtatcggagagtcgttgatgatcggcctcgggagagtcgaatccgaatccgagttcgatacaggctttgagctcgtcaacgtcttcgtcagtaacgctcttgctcctctgcttcttcctattgttgctcttctttctcctcagccaagcttcgtctctgtaagcgtccggagaccacgatcgctgcttgtggagggaaaggggaggcggcgcgtgtggatcgtgcgcgacgggacgaaagaccatgtggagagggagagcagagtaggaggcagaggcatggtcttgaagaggaggatcttggtcgtgagaattatcagacatggctgatgatggcgtaggccggtggtggtggtgatcggagaggcgcggaggtcggaggacctcgcgcagtggttgttggtttgctatggtttttgggttttgatatttgaaattaaaaaaagaagaggcattttaaatggggtgttaagggggggagagagagaatattaagggcaagtggaggtggacccctttcacagactttgttttggttggtccacgtca

SEQ ID NO: 202596 - DNA, 1328 bp, Cannabis indica
ccacatttttttttttcttctctttttctccttaatccttacttttgtctactaagttttattttttctacttataaaaaaccgcagttacaccattttttctaatagtgttatttgatgtactataggaatatattatatatgaaaaaccagcatcttgtttaaaacaaattcatctatgattttactataattagaatgagcatatccatgcattttagtgcatatgtacacataaattatagtagggtcactagggaacttatttataataacccaattattattatttatagtatagttatattttggaattttatttgtttttttcaaattaattaataattttataataccaaaaataaaatttaaaaaagttaattacacataaaaataggcattgctatattaagcaccatagtgctccttggcaccaccttaaagtaccctataaatgattagcaattttttataataagtattaaaataaaataagtgaaactttaatattaaattgtattagtaacggtataacatctcataaggtatttgataacatatcataaatgaaccatttgaggctagctcaagtggccataagtgggtgtgtgagtgttggaggtcctgggttcgagagtcccaggtaaaacatggttctaatatataaacgcttaaataaaaaaaaaaaaaaagaataacatctcataaatgtggtgccctttaaatgactagcgattttctttagagatataacacctcttataagggtgctacacactatgattcgctcttatgaaaagcattaatattaggtaccatagtgcaccttagcactaccataaggtgactctctacaaatggctagcagttttttatattcaaataaaatacatgagatgagggttggccctttattaatttgggccttaggcaaaaataaaaataaagacccagtgaaaaaatgaagttattgggattcaaactctcaacttcttagttgatcaattaattaaattactactaaactgcaacacatatttaatgttatgagtattattatttcttctattactaactctattttaatttttcttttcgaaatgggagccagagcagcgggagacttaaggcagccgtctcctttattttacttcaagcctagccttacattcaatattatattgtattagtagtgatataatatctcataaaagagttagacacaacaaatgaaatgacttttactttagtattaatttcccaaaaaaaaattgagattctaagtactaaatctaaaaaggttcataccaagaaattttccaatatat

SEQ ID NO: 202597 - DNA, 572 bp, Cannabis indica
tctgcaacagctctgaatccacagcccgaaaaaagcatagctctcatcaatgtgttcatagatttcaaggttgaagcactcaaagttaaaacctcccagtccagtgatatttttgaagttgatgtttgaaataaatgaaactctactgcaatcttgctcaagcatcgagtaatgaggagcaaatccaaaaccagataaattagcttggtctgggtgtatcattggtaaccaattttcggtttcttccagctgcaaatagtgaaatatgtaagcaagtcgcaacttgtcacatccatcaattgcagggtatacaacagaggaaattgtttggatggtctcgatagcattgccaattgtttcttctttacactctgacatttcacgcataatatcgtcattggtccaaaactcaaaaacaagcaaaggaaattgagaaaattgatgacttcaatggatcaaaatggtttatgtatgtaccttccccatttaaaacttgcacatattcataatacctttgtccggctcaactgtacagactcaattagagagaggaccttcacactcgaccccgt

SEQ ID NO: 202598 - DNA, 1715 bp, Cannabis indica
ttaattgcttgttcaattctgagtacattaaccagtttcttcttctttcactttttttttctattattttttaaaaaacatatattttcctttgttacctttttccatttctttctctctctaaaacctttatcgttcaacacttctgcttctttctctctctttctctttcctctccttcctcctcatcctcttcctctaatctctctctctctctcttctttcttccttcaaaaccaagcaacctactgtagaagaagtggaaaagagagaggggagagcagaaaaaggaagagtgagtgagtgagtgagcaagagagagacattaaaagacgaaaatgcccccaactcccaccgccaacggagatcatcagagacccagaccaccctcaaacgacaaccatcacagaactcgaccgcccccaaacgacaatcaccacagaatccgacctccacccataaacgacaacaacaacaacaaccatcagagaagccgatcaactcaaaacgacaacaatcaccagttctactacccaacgacaccttattcttcttcgtcttcttcctcagcctcctttagaggttgctgctgttgcctcttcctactcttctccttcctagctcttctcgtcctggccgtagtgctcgtcgttttcctagctgtgaagcccaaaaaacctcagtttgatctccaacaggttggggttcagtacatgggcattacagcccccaatccctcccaaaccgcaaccacaacaaccgaccctaacttaaatccgaatccaaacccgactaccaccgcatcgctctctctcagcattcggatgctgttcaccgccgtgaaccctaacaaagtggggatcaagtacggcgagtcgaggttcaccgtcatgtacagaggtattcctttggggaaagcttcggtgcctggattttaccaagaggcacacagcacgaggcaagtggtagccaccatagccgtcgatcgagtcaatcttctccaggccgacgccgtggatttgatcaaagacgcttcgcttaacgacagggtcgagctcagagtcctcggcgatgttggtgccaagatccgcgtcctgaacttcgattcccctggtgttcaggtcagcattatacatatatgcatttatactcacacaattcattacgcactttctttaaataaatcacttgcattctgaaaattttgaagaccctcatttcaaaactgttgtttggttgccgagaaaatttatgtctacgagacagtaaagggtaccgtcgggaatgtgtgactctgggtttgtgaggcaactcgcccctgtaactgcctaacccactaccttctgtcccactcactctgctttatttattttattttttcttttttttttttaattttcttttctttcaattattattattattattattattattattacaagcggtgacacatttcatagtgtgataattttagtgttgcgtgtttaaccttattgctcttatttttcccatatttttacttttatggattttcattttctggactcatctagtcaaggtagaatttgagtataaaaaatatctgatgttgttgctgttaaaatttaaaataattaaatttagaaattgctttgtttttacgcacacttttataaaacgcgccaataggctcgctccaatatgggaagcaaaaaaaaaaacctttttctatc

SEQ ID NO: 202599 - DNA, 1278 bp, Cannabis indica
atctttggagaccttgagatttgagggtttggatagtctccaagagtggtcatttattgaaggtggagtttttccaagtctcaagaaactttatttcgatagatgtagaagactcaaagtatcattgtttccagatcattttccattgcttagaaagcttgtgattagaggatgtgagcaactattgcctaatttactagctggaagtgctgctcacaccccatttcctaatcttgagaagttgaaaatgtttgattgtggaggtcaagaatgctttctagaagggggattgcctttgagtttaaagagcattgaaattaaatgttgtgacaatctcaagtacttagatgagggagcctttcagagactcatttttcttgagaaattggtaatttatggctgtgaaaaactccaatgcttgcctaaagaattaccagcttctctttctcatctacacattcagatttgtaaattgctaacacgacgagtcgagagggagacaggggaggactggccagtcattgctcacattcccaatatctatattacaacttagagatggaaaataactccatccccaataaatatggtatgtttgtttgtttgttaaatttcttttttatacaatttagagtggcatatatagctacaatattttgatattagtttattctcattttggttgcaggatgtcaagatttcacagattaatatattgtgtgtgtgtttgctttagctcacgagttagtatttggagtctcttagtcgcggtcaagagagtttatgttgggacgttggtatgatattattgtccgctttgggcgtaaatcttcatatgttattgttcatttttatgtacatgattttttttagccaatgcgagactttagttggaaatctgataatttagtttgatgaaaagaaatagtgtgaagtagagagcaaaaaactcttaatttgtttgttactttttccatcagtttagaatattttgatattttatattctcatttggaaacagcttaacttttcagtactttcattattaatttactttgattgtccattgcttttttattattattattattttatttttattttgtgtgtgtggaaaatgattgataattgcaagagcaaatgaaaataaatctttctttttcaaaaaataaaaataaatcttttgcttctattttttattcaaacattaattcttgattatcatgacaatgatatgaaaactcacatacttctcataatcttatacattcttacgag

SEQ ID NO: 202600 - DNA, 1247 bp, Cannabis indica
aaaaaaaaaaaaaatacacatatggactaaaatataaaaatatgtatttttttcaggatgtatttttttcaggagatattacgcttacgaccacaaatatatataaaaatatgtaatagtttttaaaagaaacaaaattgattgagtggggcatgcagctacccctcgtctcaccgtatcacagaagtcacactgctactcttccaacatagatgtttaattctttcatattcattccaataacaaaagatgacttatttaatgcatgtaatctatttgggttcaaggccatgtttggaagatttgagaactagcaaaacttttctagggtctctataatttttttttttcatttttaatttagaattaattatataaatttagatataaactgaatgaaaaattaacattttttcctttaaaagtgtttacaatgcatgagattgatatatatttatattacctgcacattatttttttcaccagatacagcaccatattttgtgacatcaaaaacatcaccacctgatgcaccaccagcagctggtgctttatcatcacccgatggagcctcagcatctgacgctttaccatcacctgatgatgatggactctcagcatctgctgctttaccatcacctgatgatgatggactctcagcatctgatgctttattatcacctgatgatgatggactcttaccatctgatgatttactatcaccatctgatgatttactatcaccatctgatttactatcagcaagcacgcgacgaaggttgcctatcagagctggatcgtggaatttttcagccactgcataacaaattagccaaccaaaactaagcaacaacacaatacccaccatctcaattcttctaattcttgttgttttgtccatttttgaactcgtcaaaaaccctcaatcaacaattattattcaagtactctactctcctcctttgtctcatccaaccccccctctctttattattattattattttctttttctaaactagttattgacttctatgatccatctaaccgtgattttataattctaataatttttcagatttatttccagtctaggatcatacccaaaatttgaaaaccacacaatactgtgttattttcttgttatgaaatctatttttaggttttggttagtactatatgagcctatatatttaccgaatcatggtcatgtttaaaaatagtgaatgtaacaatgcaaacatatat

SEQ ID NO: 202601 - DNA, 1388 bp, Cannabis indica
gaactaataacatgaacaagagttcatgattactaggatttaagccgatatactattgatcattgttatgatatagatttaagctttatagtaaaactgcatgttagataaaagcaaacttcattcatataagtcattgtcatatataatttatattatatacaacacatttactttgatgtcatactacatcagtaatcataaccaaaattacttgcattaatgaaccgtactagcaaccattgattaaaaatttaataactttaatatgttgctgactgttttattcataggtaagtgatcttagttctttgtagaactacaaattacatccttatatgaataagaaattttctgatatttatgtataaattattcaataataaatattaataatttaatatttatgtatacattaaaatatttaactctttattaataattaaaaatatttttatataatttttagggcataaattctaaaaatcttctacttgtcctaaaagtgaaaagtgaactgggcatttcccttatatagggttgagattttaggtcgttgggccgaccaaccaagctaacccaatctgtttttgggccaaaacagttctatttttattgggcttaaactaattgagtttaaaagccttgaactcgtggttattaagttggtaacaggctgatttctttgtaacccgtataatctaaccgggccgacccatttattttcatatatatatatatatattataaaatatttaaaatatattttatttaatatgtatttttttgaaacaaattatttaatatgtattttttttggagagaaattatttaatatgtatttgattctattattaatatgtaaaacaagtggaaattactgacaactgaattgttggtttgtgggacccaaagacagtggagaacagttgtagttggggtacagttggtatttgttaggtacaaacaggagcacgtgtttctacatacgtacacagtttcttttttttttttcttttttctttttgctaaaattcattcgtactggaccactggtacagagttaatttacatggtatactaacttttgtcattttcttacaaaaatactgttaggcggaatttttaacttttttactgtgttttttcataagtttcatactgcagtatactgtattaagttttcactggtgttctactggtgttttactagtgttctactgttgttttgagttgttctgctttgtgttttactggtgttttacaaaaacacagtatttttgaaaagatttccgtgtgacagtatttttgtaaaagttaactcaaattccagtatttttgtaaatttcccaaaatttttccagttacatattaggttcataattctg

SEQ ID NO: 202602 - DNA, 1100 bp, Cannabis indica
aaacctcatcttcaccaaaaattgataattttcattttcttaattatagaatgtgaataattaatagtaatgctattgccatgctatcttatttgaccaatatgtgtaaatgtttaccacatcttctgaaaatttggcccatgctatcttttgtgccaaacagaaattaaggaagctcgtcttttttgaccaatatgtgtaaatgttccgaaaataaaaagtaaatatggcaaaccaatcgcggccaattggcttgctgatgtatgttacaaggcgcgtttatcgatatggaagtcgagtttcgatgacccttgtaatgggaatttttcttatgtgattgatcttgaactattcatccatagggtctgcaaaaatttgattagaatctctatttgtttattagttgattgattttgatggtgtgtttgtaacactttttttaattttttgttaagttacaaaatacataaatgtcaataacttgtcaaaaatcaacctttaaacaaggtttgttggttcaacattgtggtgacatgacccttatagaaaatgactaaagctctttgagaacaacgaaggaactccctaaaatttatgggaccaaaaattttctaacttcaatagtttgcatattaatcttctgcgagtgtggatttgttcaacttgcacatatctcttactccattatatatacttgtgtacttttcttcatgacaaaaattccatcatcaacagtttgtgatgtaactaaagaaacttcatcgttttgtcatttagaactgtccatattatcttagtttgatcatttgggtattgggaccaaattatcttagtttgattgctttattaacgttgcctttgggatcacatatgttggacttaaattttaaggaaattgtttgtcaattaatttatggtaacagaataatcaacacgtatcaactaatcaaatttgttgttctctccaaatatagctaatacaagacaaaacaaaatatagctagttcactaccacatgcatgtatttttccacaatgaccaagacttttccgcaaacaagacagaaaactgatcaccccttgtatcttattaagcttaat

SEQ ID NO: 202603 - DNA, 827 bp, Cannabis indica
ttctaattatgatattatgatctagtttattataatagcaaacatatataaaataattatgttatctaaaatttttattttttattacagttgagtcttctctttgagttaacagatattctattttccttttaaaaaattaataataataattttctatgtctttattttattatcttttttttttctcaaagtgtatttatatgcattaaataaaagggtaaagagttttttcgttcgtcccccttttataaaaagataaaggggggtttatataggcttagagtcggattaggcaaacatgcattgcatgtttactaatacctagtatatatatataaaagtttttcttaaaaattttgtaaactgaacgttaaatctaatataaaattaattaataaataataataaaatttatttaattatatatgataatagtagaaataaaatttgaatataatttgatctaaaatttaagtgaaatttaatttcagccactcataatcaattatcttattattttatttaaataaacatttaaactaagcctactaaaattcttatatataaaagaaaaagatgcaactagaattaggttaatcactccattcacctttttagctataagaaaataagagaatcaagtctcttctctctttctacatagaaatagaaattagcctctatctttctcataaatttaagtcatcactatcatcttaatgagttgagtgattgcccacacttgtcgtgtgtatactcaggactttgaggaagattatatagaacatagtcacatatttagagaaaagaagattcaagttcag

SEQ ID NO: 202604 - DNA, 829 bp, Cannabis indica
aatttcaattttcagcccccacacaaagaaggtcagaaacatgtgatccgaaacaccagtgacccttgtcattagttcctcaaattcagcacgaaattgagttacagtacccgtttgagtgagcttcgcaagccgacccaatggatcttcgtaaatcgaagccccaaagcgcagtcgaagtgcccgaaggaatgaatgccaatcaatgaatccaccagccttttccatccactgaaaccaagccaaaggtgcgccatctaagtggaaagacaccactgccaaccgaatggaatgctccacctgatgaatataaaaaaacttgttaatttcataaatctaattatccacatctgtaccatcgaatctgggaattttgactcggagagtcttgagaacattatggacttcactgccaatcatcggagaagtgggtcgaggctccctcgttcggtgatgatctcggatagaactggtgtcccctgtgccaccattcggaggttgcagcgatacctgagctaaacgctcctccgcctcagccacgtgtttcgtcatccagtcctccgattgagcaattcgctgttccagcatcgattgcagctccgacgcgtgatcacctttgaactgctcaaatttcgcatccaaacgagcatccaatttggaatgcaattcctgcatcaacgctgctagttcctcgttcttcatagtgaggaagaagcaatgaaagcacccgtgttagtaaaaagccttcttcgagacaaggcaaatctccaatagcaatttgctaattcatcaagcataagcaattgtttacattgttctcttttatatg

SEQ ID NO: 202605 - DNA, 620 bp, Cannabis indica
ggataaaacaggggtcccgaatgcttttggcgcagctagtggaatcaatcaaagtgatagttctgcaagaggggaagagagtgaagactatggtaaaagacatcgcattgacttgagcaatctgagatcggtcgagggttctttcgggtcaggaattgggggacaagagcctcggttggtgggtgacaagaatgtggatacagaggataggcaggggagggtgacggagtcggctcctgctcggttggtagtcactggaggagagacggagtctcttatgtctgatgctcgaatttttgaaaaggagttgggtacccatgctgggatcggcccggttgtgcgggatttttctttggccgaggaggcgggccgtatcatgccccccaaatccccatgaaaatgttatcatggaactgtcggggcttgggacaggctcgggcagtatcttcccttaggggattggtagggaatgaaaacccagatgttctctttctgatggaaactaaggttaacttgtctcgaatgaattgggtttggcgtcaactgggatttgctaatgcgattgtagtggaagctatgggttcggctggtggtctctgtttgtgttggaaacagggagt

SEQ ID NO: 202606 - DNA, 606 bp, Cannabis indica
atatatatatactaattaagaatgaaactccatgacacagcttatgcatggttgaagtgcctaagaaaagaagaagaaaaagattgctatgaaactatgagagcagcaaatatattgggttgtagaggaagcaattatggtgcacaagaaaagtatgtaagacttagccttattcgaagccaagatgactttgatcatctattacaccaactcaacattttgatctcacaagagcaaaattacactgccaaatctatatcataattaatcaaattactattgctattactaagtgattagtagtatttgtaatttttcatattcactattacaaattaaaagtttttacagtgcttttatttatgtcggtttgtagaaacatgaaacatgatacttaattacttattcctgttaaacttagagtcggcttttagattggatgtgttttagaaaaataaaataaaattattgatctctttcagtatttttgaatactgctaaaagtatgtatatttttaaaagaatgtatattttttggactcctagacgcaggtctagcccatcgttagtgtcagactctaacccgctttaattagtcgcaatgtc

SEQ ID NO: 202607 - DNA, 855 bp, Cannabis indica
agatggttcagtttagagtgacttacacgaaactatggtgcacaaagttaaatagcacaagaaaattaattgccaggtaatagctttattagcaactactttgttttagaacaaaatttacctctttataggaaggtttggagtagctgaacatttgtaaaatcatctttagttgttagtttttgaattctaaataagtaaatacatgaggctttaaacaatggaaataaaaaatacgagttttaggagtttcaggtttcagtaatgagatgggagaattttgaaaaatcaagttgagaactgatgatataattaacagggcagagatttacttaagaatcagaattataattccaagtgaataaatagaaacaggaaaagataggaaatgggttagatcaagagagatattaacgagagaatgtaagaacttgtgtggggttttatgtgtgaaatgaacttgttgggaatcgtcctcaatctcacacaggaagaacctcaatgaacaatccaaaaacaaccacagaactcaaaagcaacaataattcatgagttgaatctgtttctaaagctttattaatctgtacaagcttattacaatctgagatagaggctacaaacaaataagagtagaagctatatttatatgcatcaatggcactaactgtcattaactaactctgagatgaatctgcctaaccaatatgctaggcagattcaactaactaatatgacacctcaactaagcctagagtacaagtgtgagacattgcttacatggacatacacgtggacacactactaagcacaatatctaacagaactgatattagagtatgagaaataaagttgtta

SEQ ID NO: 202608 - DNA, 731 bp, Cannabis indica
ccttccatgtggcagcttaattgaaatttgtttctaatcttccttctcttaatttttctgatttagtttaattttaattctatttttgcattttagttttgattattattatttaaggtcattaattgtactttcttctgaaaagtcattatcatttggtttttaataagtttttaccgattaagcttcccaatttatttccctgtagctgattataattattctaacctattctaccatttttcttttttattagtcaatattaattattaattaatatcaataaatacaccaatatacagtagttcgttacaaaattgcataaccttacatatataatcaaaaaaaaaaaaaaataacatttcaacttttcccttccactgatagttctttttttttgtcttgccataggaacccctctgtctctcgatctctccctcccagccactccactgcactcacggagaccaggtaaggtctctcaatctattgtgttttatatttttaatttattatcgttttatcttatctaatttatggttgagagacctacatttgtacagttattttctcttcatgcaacaatgtatacgctagggtgtgttcgaagttctatatatgagtattgttatgttccattttattcatattaattcaatttcaaatagtaaatgatgatattttcttagagtaattgttatttttgtgaacgccaacacattctcattgtc

SEQ ID NO: 202609 - DNA, 1004 bp, Cannabis indica
ttggtagtcctcttcattactgaacaatggaggttcttgccttggattggcccttagttccctttgttggatagcatcagccaacctcttgctagatcttgaggagggattggatgaggaagccattgatgtgaagaacaaaactttgtatgttgttggtagggatgaaggttaggttgaaagtaagaaaagagagaaaagtagaatgggactattaaattaggctaataaatcagaatgagaattgaaaatttgatggtaggatttttaagttgtaaaaattgcatttgaaaagaccaaaaagtccctggaattcagttcctatgccatgcagaattccagatggtttgtgcacagacaaccagagtttcggttggtgcagaaacaagccagattttcagaaaaaaccaaaaaagctatattttttgtccaaataacccaaaacttttctaatccttaagtatgataaaacagaaatgctcaaacaagaaaaatataaaaatgttgaaaactgacgatttacggtaagcttttcaaatttggcaggaaaactagaaccttactgaaaatgagttttatgcaacaaaattaaaaaattccatttccaataatttaatgatgtgaaatgttagctttaaaaacttacataattgaaaaatattgaaaaatgagaaattttggcgaaagacactcttttaggcctaaaaacttataaaatgaacaagtagaacgccaaaaatttgttcaaagcgtatttcagttaaagcaaacctataggcagactaaatacactaaatttgacatgttcaaacatatattcacacaaaatagtaaaaagttcaaaaaatcacatgttcacttgtttgaaaacaagtgcaaaccttatagttcaccaaaaatccacataatgacctacaatttcgagttttcagcaagtatagttgatgtaggtcaagtgtcaagaaattttttcatctatgcatatagaacacataaatatgatc

SEQ ID NO: 202610 - DNA, 673 bp, Cannabis indica
acttaaaaaaaaaaaaacaaaatgtgcagaactcaacagagtgagttttgtgtgtttcatgaagtgaggtgaagtgggttgtgttcctaagacattttaggataaatcactttcaaagtgatctagtgatcaactattgcaagttgcaatgcaaagccccttttgggaaattaggatttctttcttggaccagatggtactacgtgtatcgtttctcctttcattacagccatatatattatattttcttttcttatattatgttctcaaagataatgtccaaagtgtcaacatcggtatgtgactactgactagtgagcctgaacttaaatttcatgactaagtttgcataaggacctacttgcctagcttcccaatcttatctacccctttatttcattatacaataaattcataacattttatatttttatagctttatgctaacaaaagataacttccactgccaatattctttaacaaattagatagttaattcaataatctgattaatatcttattatgaaaacgaacatatttgtacaaataaacctagctatcgtattttaacttctttttttttgttaattaatgtgtaaatattgtccagaaattcaaaccaatacaaagtaatataatatatatacattaatataataaatttttaaaaaac

SEQ ID NO: 202611 - DNA, 731 bp, Cannabis indica
gatttattaagtgagataggtatactaggttgcaaacctgctaaaactcctattgaacccaacatcaaagtacagcctatagaattagttaatgtgaaggaacgagagcgttatcaaagattggttggaagacttacctatttatcccacactcgtccccatatagaatttattgtgaatatggttaatcaatttatgcattcaccataagaccgtgtcatgagcaatcacacccacacatttcatggagaaaaccatgagtttcacctctctacccaaccctcacaggattcttttctcaacttatcccaggcacaatagaaaatcacttattaaattaacagaaactatttccagcactagaatattgaacccccaaaagacgcaaccagagtcacacaatgaaaacatgatcttgattacaccagtcacttaccaaatgcagcatagagtagtcatcagatacaagacaaacgggagtgaaataatataaaatttactagagcttaaaatcaacatgaacacaaaccttgttctagaatgtcatgtgctagccttgatagtctatcactacatctattcatggatagttcaaatctaaggctatccatttcccgaatgtagagatccatagccatccacctggataaaagagagacatcttttgtaacctgaaaataaataaccaacaaatatgattatgtatcacagaaaaagatattaataataat

SEQ ID NO: 202612 - DNA, 1570 bp, Cannabis indica
ttttgattttgctgagagaatccggaaagaattgcgttccacgaaaccatagtttgttcatcagttctatgatgtagcttttctgcttcttctattgttccacacttacagtacatatcaacaagggcacctcctacaaatgagtcccatcccaatccagatttgataattcttccatggatctctgtcccatgatttaaaacttgttgagctgcacaagctttgagaacactaccatatgtaaactgatcaggttccattctcgaacggagcatgcaaacaaaaatttgaagggtttcatctctgttatcattctgttcatgagccgaaattattgcattccaggagacagcatctcttataaccatctcagaaaacatgcaagaagcatcaatcagatatccacattttccatacatgtctaaaatggcatttgaaacacatatattggaccttaaatgactcttaactgccaacccatgtagttgaagtccttctacatgccctttcatcaccgcacaagcaccaagtgcaccggataaagatatttcatcataaccaagaccagacttcaacaacagcaagaataagtacaaagcttcattgccttgcccacttcgagcatatcctataataatggcattataagattgcaaattatggttcggcattgagttaaacagtttcctagcatcagacatactgccacattttgcatacatgtccaaagtggcagttcctactatcacatcagaactaaaacgtgcctttattacatgtccatgcaactgactcccaaaaccgtaggcagacaatccagcacaggacctgaaaacactagcataggtagattggctaactccaattccagcaatctgcatcttcttgaacatttctaaggccttgagtaaatgattattttgaacacaaccagcaataacagcactccacgaaacccagtttttttcaggtaattcatgaaaaacctgaagagaaaactctagtttgttacacttagcatacatatctaacaaagagcttcctgtcacaacatcaacatcaaaacccatcttcacagcaacacaatgaatctgaattcccaaatcataatcttctattgcagagcaagcttttgaaaagacagctaatgaagtagggtcaaaagccatgccggaactcctcatttgcacacaaacaccaaataaacttcatatagttgccattctgcaagtaccctgaaaccaaagaattccaagagaccacatcccttgtcggcataacatcaaaaaatttctgcgcaaactccatcttgccacaccaagcatacgcaaaaatcatggtgttccaagacactgtgtctttgtcagttagtccatcaaacaccttggtagcataatccaaattgcaacacttgacatacatctgaatcaaacagttcactacaaagaccgtgggcttgaactcagatacgatcatctgagagtgggcttgtttgccctgattcaaggctcttccaatggagcattgttggtaaatgcgggaaaaggttttgaaagtcttggcaggtgta

SEQ ID NO: 202613 - DNA, 624 bp, Cannabis indica
taaatgtagagctcttcttattacttctaagcatttgaaccaaaatagtatttatctattaaacaaaacttacttcaaaaagtaaaattaagttggtttatgagtacataatacctaaagaataaaaaacataatctatcaatgcaacatgtatttggcattggatatgtattaagcaatttctaccaaattcaagcttatacatattatcatcttcaacaaaatgtacataaccaaaagataataagaaataaagaaaagaagttattataagactaaaacagtagtgttatctatttcacttcctaaatgagaagtgagataaggaaattttgacctcattttgttgtgaggaggagctttgttcctgaaccattgggtgtccttcctcacttatatccttctcaacttcatagttattcatttgtatttcacttgctgtagctggtccattgttgggagatggtgtcccttcaggctcatagtagtcgttttcgacattagacatcctcggagaaccatagtatccatcagttgctgtgcttctgtaattttgcagcagatgaactggggacatgccatatgttggagttgcaggcctacttgagaatggcgagtttgtct

SEQ ID NO: 202614 - DNA, 869 bp, Cannabis indica
cattaggcagggaagggtgtgtccttttgttcgaggaacctggttagactttttgtccactgtctacatgtctatagaccctacctaatctatctatgagcctcccttgcaaaggctctcttatgagatcctgaccttttctaacaactctctcattgaactgccttgtcaggtcattggcctctcgcttaaggttgttcaactctgcctaacgagctcggaggatggcctcctattcatccatccaccttaagaatttgcatctctactaggtgaaagcatcgcatccaacaatgcatggttcttcttatcctctaaggaatttgcgtatcagctaggcaaaagcattgcaaccagtagcgcgtggttcttcttgtcctatttgagtgacctggcctatagcttctacgggcctggctagctcaatatcatctcccagtgccaagtgaggctcaccaataactggtttgccaatttctggccctgtttctcctgcgtagcactgtggaacaaccccaattgtgctttgtggaggttgttccatgttgatctgctcttctatatgagattttgtgggatgttccagccctagaggaatggcaagatcaacaagattcacatgattaactggattgacagtgttatctagatcggtaggaccctctatggtgggaggaacactagcattaggatttcccatcataggatcctgaggaggatccaaggggaagttcttctatttagaaccatggtgattgatcagaaaaaggctctcaatgaaagcaccaaaatgttgactcaaaatttggtcaactagcagcgaagccttatttatgattgagaacaaccacgtgtaaataagaacagta

SEQ ID NO: 202615 - DNA, 1591 bp, Cannabis indica
aaaggcaagctgatgcttttgatatgttgggattctttgggcatggcactgctgacttcagattccatgttctgaccactgacatctgcatccacttcatttgatgatgcgggttcggtgtttagggacttagtaagagtgttaggatacacttgggtaggcttagtggtgattgatccaggtttagactaaacaggggcatcatcctcaacactcacttcttcactactttctaagtcatcaaactttacgtttaatgattctaatacagagtgagttcttttattgaataccctgtaagcacgactgttggtagagtaaccaagaaatatcccctcatcacttcgaggatcgaacttaccttagtgatcacggtcatttagaacataacacgtacagccaaaaatgtgcatgtggctaacatttggggccctccctttccatagctcatatgcagtttgtgacatcccaatgcggagatgaactctattgcacacgtagcaggcagtgttgacagcttctgcccagaaacgttttgatatgtccttggcttgcatcataacacgagccatttcttgcagagttttgttttttctctcaacaactccattctggtgaggggttttgggggctgaaaattcgtgacgtattcccattccattgcaaaactctgagaatatggaatttttgaattccttcccatggtcacttcttagccgaaatacttttccaactttggagtcttgctcagtttgcagtctcaatattagagcagagaatagtccaaaggtctcaaatttctctctaaggaactcaacccaggtaaaccaagaataatcatccaccaggaccattacatatctctttccactgagactttcattttgcatgggtcccatcaagtccacatgcattagttccaacactcaggttaatagtctgttgataggagggtgagatgctctattctatttccctagctgacatggtccacaaattctatctctggatactttcatcttaggattaattccccttactgcttgaagcttcatcagtcttcggaggtctctgtaattcaagtgccccagcctgtagtgccacaagtcgggtttatccaagaaactccgattgcacaaaatggtattgcataatgcatagcactgatctacaatcttgtttcctgttatgacaacacacctattaattgaaactaaacactgagttttagaaaaacttacagagaagttgttgtcacacagttgaccaatgctgatgagattggctttgaacccttttacatacaggacatctgttaactgagccactccattcaggtttacatcaccattaccaacaatctgtcctttgtttccatcaccaaatgtcacagccccctcattttcctctttgtaattaaccaacaattttttatttgcagtcatgtgtcgagagcattcactatcaaaataccactacccctcaacaaaagcagacagagacaacttagccaccaatccaaaatttagactgaagttatattttattttccattctcaacgaggtttgcgcccttgaggtttatttggtt

SEQ ID NO: 202616 - DNA, 538 bp, Cannabis indica
atggttaattaagattggttatcatgtttctttatggctaaattatataaccttgaggtgagcacctctgattattgtcctattcttttaattcttagtcctgctattctttttacctcaaaatgcaattttatatttgaaaatgcttggttaaaggacccaatgtggctccaaattatccaagattgctgggagattcaagagggtcaaattttgaaagaaaaatttagattttgtggtgagaagttagctatttggggttatgagataactagaaatttaaagagtcaaattgctttgtgcaaaaaggaaataaaaaaatacaaggaaaagagagatgttgatttgtgccatttgttcaaagaagctaatgagaatttgtctaagtttcttagcatgaaggagtcttactggcggtaaagaacaaaataactttggctcaaagaaggggatcaaaacaccaaatatctccatgcttcaacaagtgtcaggagacgtaataattatattacaatcctttgtaataattatggagacc

SEQ ID NO: 202617 - DNA, 1952 bp, Cannabis indica
ctgtagttattatgatatatattatatatataatgttataaataaacccttttatataatcctataaaatagaagatagtatttattttaaatttaaattcaaatttaaagttttaaatataaatatcatataactgattaaaaaaaatatcagttataatctttatttaatatatttttttaattttaaatacattgtctaataatatatttaatataataattaaaagataattattaatttaatttgatttattttaataataaaataatcaaacaaaattctcatgcgcttttatatgtcaccttacacgtgtggactatattttaagttccaaaattgattcttaattttaccataaataataaaacttccttatccatgtccctcatattccaattatttgacttcatgactaagccaaaaaaaaaaaagatccgatcacacactaaaactagaacactaaatcaaaagtcaagactttaaaatttatttttatttatttgtttattacttataaaattaattagacctattaaactgaaatgtggagattagaatacaaaatctttctttcaaccataaagcttcaatccgaagaaagaagaatgacaacaaagacttgctagatcaatttggtatttggcaaaatgaaaaattcattgttaagaacatcattgagaattatttcaacactttgtttccttcatctgagctgaacgaagttgtgcttgcagcggttatagaaacaattccaagaagagttattgatgccatgaatgctgaattagaacgtccctttcaagaggaggagataattgttgcagttaaaagcatggcccctgcaaaagccctaggtactgatgatctaccagtgcttttttatcaaaaattccgatccaagttaagtggagatgtgatagctgtgtgcctgaatattttgaacgatagaggagatgtcattggcttgaatgacaccattattgctttggtactgaaagtggataaatcaaagagagtagaagaattctgtccgattagcttatgcaatgttatttacaaaattgtgtcgaaatgcatagcaaaccggttgaggctcatgcttgaggatgtgatttcagaatctcaaagtgcttttgttaaaggaaggctcatacatgacaatgctattattggctttgaaggacttcacaccatgaggaaaaatcagtttcggaatgggtctaaattggcattgaggttggatatggctaaagcgtatgatagagtggagtggagatttattaattctatgatgagacgtcttggatattcaaatacttggatggataaagttatgtcttgtgtcacttcagtacattattcttttttgctgaatgggaaagttgttgggaaggttatccctcaacggggactaaggtaaggtgatcattcatcacctttttgttccttttttgtgttgaggctttctctagtttaatatacaaagtggagagggacaatagattgcgggggctggtctttggacgcaagagctttgggtttctcacttattttttgtcgacaatagtttggtattttttgaagccactgaagatgagtgcatgtgttttaaagaggtgttagacatgtactccacggcatcagggcaagtagtcaatttttagaaatcaaagatgtgctttggtgctacggtggatgatagcgatagaatgtgtcttgcgtccctaatggaaatgaaggttgtcgataactacgggaagtacttgggactgccttcctttgttgggagaactaagaaagagctcttcgagacaattaagaacagagtttggaataaggtgaagggatggaaaatttctatgttctctttagccgggaaagaggttctcattaaagtaattcttcaagcgatgcctacttatacaatgagttgtttcaagatcactaa

SEQ ID NO: 202618 - DNA, 900 bp, Cannabis indica
tcttaaatatcactcacaaatatctgtgcaggaacattaggactcaaagataccgaggcaaccttgtagatctcctctactgtctgcatagaaagacatgaactacaatgattaatgataatcgagtttggaagtctaatagatgaaaacaacaaatgatcctagccatgctgaatttcattctctacaagtcaattaaaggatttaagaacataaaccatgaattataattagaaaaatggaggatttaaattaatccgacaataaaatttgtattataatccgtaaactgttggtaaagtcttgtttctatttggttattatctcaatataattgtgatatttctaacctttggagggatgttggtcatctcaaaatatccaccccgctgaccgcattcaccccaatatcctttggatacagtgtggaaagaaacaagctggacttccttgcttattggtgctcccatattcgacaaaacctttcattgttatcaaagttggacgaaaagtagaaaacaaaacaatttaagctggtagtcaagcaattactcttacaattagatgatagaacttaaagttatagatacctttcttgcactgatgaaagggcgcgcatcctggtatatgttttgctgataaacctcatctccaagcagcaccagactttcttggaaacagaagcttaagatttctttcaaattagcttcactaagacattgaccagtaggattcccggggttaataatcaccattgctcttacctgctcatatatcacagtagttttagcacatattgaagataaacgatgaggggttaaagggatcagtgaatcttgaaggaaattagaaacttaatagcctattcagattgaaatagactttgccaaatgccaatcc

SEQ ID NO: 202619 - DNA, 1922 bp, Cannabis indica
taattaactttaactaaaagagaaaatataatcagcccctaattccactacaagacaaacttcaattaagagaaagacctatttaacctttgaccaagttaacataaataaaaactcccaaggggtaatttagtcactttccaaaccccaaaaattccaacaccgctaaaacctaacaatgatactccgatattattctataacatataaaatacgactctctaaaggcccaacgtcgctgtccacagcttccgaacaccatcacagaaattaggtaatttacattaaatagcatactaacatatataatattaaatatatttctaaaatatacatttcataattattaattaatctcatacataaaccttaattatttaataatacaaggtattaatcatatgcggtctttacaccattgatcgatctacacatttacgaagagtagggaccattctcttttcttattatcttattagttatttgttcccaagaaccttacaacctaaaactgattagatttgtgaatattgagtctcccatgagtcttgtattcataagtctcgattgagatttcacctagaaattttttgttgtattattgtccacacactcttgaaaacataactctggtgtgttagatctaatcaataaaagcaaaagtagacgtagtcccattaccatcacgacatggggtgaagtattataaatccttgttgtccattttatttattttggtttcatttactcaaattaattcattgcagtcctctttatattaatgatcttcttagatcagtttatgaaaatcgcgtcaacaataggcttccctacagtactaaggcactaaggcttttgctcccccaggagccttaggtcatgaagtcaaatccatagaggaattgatctgactaattttaaaaagttcaaatcagcagaccagggcctaactatgatcggtttcctatcaaatttgatcacccctacttccaacacatccttggttgcctcatcattaaatttaaccatgatcaaacccatggacattctaacaatccgagctatcccaagatgcccccaaattcgcttgatgaaaccctcaaatatagccatgcataggtggatttgcaccaagaatcatacaaataatagcagagttagaagccacaacttgttctttgacttcgtcatgatccactagagcaatccttaatccatttttatcagagattcggtgtaggtcagtttcaaatcacgataaatctttttctctttagcaaaagaattctagagattcttagcagattcctagattaatagatcttgttctttatcctcttcttgctctagctccacttctttgacccaactcgtgctaaccggaggagtaaggaactccgattcatgttgagtttgtcgactattgctcatacaaatttcctccgcaatagtttcttctactatcaaattctgctccaagatggaacccaaatttccttcctctccttttctgtcttgcacaacatagatggaatcaagatcaagcaatctataaactgactttcaaaccattctctttttcttctccataggaaaaaaaaaaaaaaagaaaaagaaacgcgggcaaaagaatatatattataataattaaaacatatacatttttccttatctttttcaaggacttacgattgccttttctcgcctttatgtgggtctgcatttactttcgttttagctttattattgttgtttggtttttattttaataattcgcaccctgttgtccctcataaaaaattgtgactctttccattttagtttggtcaaatcattttcttgctcaaaacattcttggttttgtacaccttggtgttttgcagttgaaacggtttgaataccattgtttattaattagtaat

SEQ ID NO: 202620 - DNA, 838 bp, Cannabis indica
ctctctctctctctctctctctctctctctctctctctctctctctctctctctctctctctaatgagagagaatgtaggggcttaagggtttctctgtgaatttagaaacagtgattgtttaagaaaccatgggatataaaaaatacagataagactgagagtgagatcaactgaacaaacaatatctcctatatcatcaaatcagttggatagtactaaacaaatcattttgtgagagaaatacacactataccaaatttcaatataaagtctacataattttgaggaaaaaaaaagaactaatttcagtgattgatacacattcaatgatgaatcaaaatcatataaactaacccaaataaatggaaggtaaaaaaacacccagaaaatgaagaagatggaggaggaagggcgaacctgacaatgctttttagttttaggattttgggatgtaatgagcgagttaggtaggacaacaaacaacctattccgaatctaattactgcctcgtcatcatttcagagtcccacatcgattttgaagtaaatccttattgaaataaaacctataagaataagattgggggctcaattaaaagttgccttaaactaatgagtaaggaaaacaaagcgagcggtgggagctgctcgccgcgcctatcacattttgtgcgcagtaatttgtggaggggttataggctggccgagtgttgacgctgcttactttgcagaactcacttgtgcgggcctcccaacacccaaccccacaatacaagttaaaatattattacaagaataattagaatttttgctttttaaaatatattttttgttttt

SEQ ID NO: 202621 - DNA, 1476 bp, Cannabis indica
tttttttttaataacaatatagttacacatttatttttcacatattaaattattcgatatttttaaaaaatttataataagtatagcaaagcaccaaaaaattaatgaaataattgtaatagaaacgaaagcattctcaacaaacatttttggatagggtataacaaaacaactttgaaaggtgtactacagttttttttagtactctcatcagttctgtttatacaccttattttgcttatctcatgatgtgtctattaagtataattttgtattgagcattgctattaggtatcttcttgatatgttacgttgcgattgactagcgacactttcgaaaagcttttatattaaattatggttagaccagtaaaagcttttatattaaattatggttagaccaataacgatactaacaaagagttctaagcatcaccactttagcatttctcttttgaattttcaagacttttatgaaaaaaaaaatcattaatggatattgagactttcttaattctttgttttaactaaaatgggttggtacttggtgttaggagactttagtaaaatgacttttatgagaaatatttaataataataattaataataatatatttttaatttttaattttgttattatttaaaaaaatctttttgattttgatccaaatgagaatgaaatgattggaattaaaaagacaaaaaaaaaaggattgaaatatgaatatccgaatattcccgctacaaaatacaaccaaattctcaagcagacccattcaaatcagattcaaaacgttaaagatttatatatataaaacagtaataaagattttcgatcatatcatcaatcctaactgtaaatttaatagaagaaagtttctactgatatttttctatatacaaaaaacttcatagttctaaaactgattatataaattgaaaaaaaagaagaagagaaaaacagagcttccataaatcaagccttatcttgtaaagttgtaattacacgattcaatttccgagcagagagatcggtcgttcagctaatccgagaggagatctcgtgtgtctctgaaacttcgtgcacgcgttgcgaagaagacgaactcgtttcatttccggttcttgaagcgatggctgtctgatcttctcgatttctttcttgattttcactacttggctgtgaatcggaatctgcgcagcttcttcttcttgttcttcatgttcatcgtcaaatcgattgaaatcgttaactgtagcgatcttgtactggttctccattgattttcaaaccttgataatcagtcttatctatttctttctttatctttttactatggaattaaggctatttatatatgagacccttttcatggatacggggcaaaaatgtaattttcaaccctagaaaacaagggaaaagatatttttttaatatttcttttttttttctgccaaatggagaagattttatt

SEQ ID NO: 202622 - DNA, 758 bp, Cannabis indica
gcttgtgttggaatgattggaagagtatgaatgttgccgtactacaaaaagtaagtgtgccgtacttgtgtttgcatgtgtacggcttaggttttaactagttgagtgcgtgcttacagtgcttagatattaattaattattttttactaaaattaaccaattcatcaaatctcggcctcccttccaaccgtggcatgctacaattaaggggaaagtaacgatatcacgccgcctacctctacctctctacccgacgacgatcgacgtcgaaagccgaggcacgcagttgctagtaaaaattagaaaaccagagaatgtacgtcatacgccattctatgatcgatttctccttatagggtttcgatttttctgtccccaaatccaaaggtattatcccatatccaatatcaatacgaattcaataatcatttaatcaattcattcttctcctaaggctttactctgtttttaatgtatccttacggagaagaggaaagaaaaaccagactagagaaaccgaccaagggtggcaatttgtttgtggagtagcgttggtttagattttgtgtttagcttcaccaatccatttttcttttttgggttctttataataaataaccttatatgtgttttgtatgtataatcaccctcgaaaaagtctccatctcctcaatggcacagcaatcagattgtgagaagctcacttatctctatttgattccagctctctcactttcattcaaattatttatttttg

SEQ ID NO: 202623 - DNA, 1005 bp, Cannabis indica
agaaattggtgaattatatgagttgtacacgagtacaaaaactaacagaattgaattgggtactaacaaatactaacagagtagacattgtgtactttacaactaaaaaaaattgggtatttaagttatataatatgaaactttgggtacttatgccgctattttcccttaataaaatggtcttacaatatgaacgtacgtgggtaagaaataaggcttgattagttggtttcttactatatatgtttttggaatctacgcaatatatatttcttcttttatattaaagtctcacacattaacaaaaatattaaatattattatttgtagaagcttatcaatacaaggctatcactgaacacaatgaaaaatatttagttacaaagtcttgtaaaagcttgagccatataatgagctcttgatctttatttataggcataaaacactttaaagagttgttacaaagtcacaactgtaactaactctgacaaaataaaacaaaaaataataaaataaaattaatcatattctgtagtatcctcaaacgaaatggtgtgggacacattagagtttggttttgaggtagagaaatctgtctttggtcaatgcctttctcaagataatcaagatatcaaccacttggtctattgaagggacatatcgagcttcaattgtcttggccagaattagatctcgtacaaaatgtaagtctatatcaatgtatttagatcgtgcgtggaacacaggattagttgcaagacttgcagttccttgattgtcgacccatattataggagcagatggcagaggaacatgaagttcagagagaatagaggttatccattttacttcaacagcagagtttgccaaggcacgaaactcactttctgtgcttgaacgagcgaccacaggttgtttcttagctgaccaggagacaagatttcctccataaaaaacagcatatctgtaatacccgacaaaaatgttatgcaaagccttgcatga

SEQ ID NO: 202624 - DNA, 891 bp, Cannabis indica
taaacaaggaagaaacattctccttataagacgaatttctcaggccccgtcgacatcctcattctcgctggcctcatccgaatctgaggaagactccacaagatcctcatccttcttaaactcgacatatttcttgaagaactcgtccaaatcccaggaagtagatttaccttctttaaactcagactacaacttgaaggcagactgataacttccactaagaaatgtcttcttaacttgactagtcaggacctcgatctcttttgtcaaagatcctttttcttctgccagagttttttgggcttgctctgctgccttctcagcttcggacaacttgtcatttagagaagagattttgtccttaaccacctcggcctcaaaaaggagggtattgcgctcttaggacaaggcaaccttttccagaatcatcccggacaagctagcctctaaggaagcaaccttgtcgctcaaagcctggttcttcaattccagaacagagcgggtgagatcccaacctcttttcttcgactcgagaccgtcaaccttactcttcaagagcttattatcaacttccatggcgctaactttagtaagagcggccgccttcgcagcaacgaccacctcataattcttcttataacgagaatagcccttggccaagctttccttctccctatctgtctgtggggaaaacttcatggcgtgggcacacctcaaggctgtctgatgcacatgtatataaaaaaaaacacacacacttagcaaaggaaaaaaaataaaagggaggaggagaatgtacacttgagaaactaccttcattcccgagatagcagtgtccttcaaaattgaatcccgtccttgggaaatatagaaatcatcatcaggtttttt

SEQ ID NO: 202625 - DNA, 696 bp, Cannabis indica
gttcgaggttataaaagtaataaaaaatatacttgcagtgtaaaagacattgtattgtacgtgccaacgttacaaaaacacataatgataatatgacacatgtttacacattcataactgtccccaaaaacaaaaaacaaaaacttataattaatgaatcaaacttagctaaggcatcttcaacacaacattccaatatatatatgtagtatcatgatgaattcatatataaattattagtgtatatagcatatatatatgtataatattcccttaactcatcatcatcacttaatttctacatggagatcatcacccaaccttctttattccaaatcatcttctccttagtttttctgttcatgatagtaataaatttactattgaaaagtagcccaaaccaacaactcaacttcaaaactaccaccagggccatggagattacctttggtgggaaacatgcaccaactaatctcattattaggctcaaaatcattattaccccatcatacatttagagacttagcccaaaaaacatggaccactcatgtacctcaaaacttggacaaattccaactcttatagtttcatcaccagagtatgctaaagaggtcttgagaacccatgatgtgtttttgcatcaaggcctcaaactcttgctgcaagatcatagcatatgattgtaccaaccttgca

SEQ ID NO: 202626 - DNA, 631 bp, Cannabis indica
tttctgtcttctaactcacctcaggaggaaccaccaacaatacagtcgcttgtacaacttagtaagaatgaattggaagttagcccattttttgaaaagtttttggaccaaattcaaactccagagattaaactacgttttgaaaatcttgtgaattctaccaatggtagtaagataaagatggtgatatattgtattgggagcataaaaacagaggaacaatcaaggttgcagctaagtttggcacttttgttgaaggaaaaattggatcggatatttaatggtaacatagaaatatttgatccaattctcactgctgaagagaagcaagctttgagtgatatgggttttaaagtgttgcggaaggatgagaaaggagggcgaaaggtgaataaaccaacagtgttcttcatgccttgttgttcactgccattgtatgtgaatctagcgaaaaaaaatcaaggagccaaattgaaaaatgtagtgatattagggaatggcttcaaaaagtggaaatttgatgttatctcagagaagttaaatgaatatgttaagcctcttatttttttggctgaaaaatttgctgatgagtttgaagttgattctaaatccttagaagcatttaatcaat

SEQ ID NO: 202627 - DNA, 2135 bp, Cannabis indica
atccttctctatttatatggtacgtccttttgatttcatggatgatctatcatctccctattctgttgtcaacatgtgtttttcttctttattctttttgccatgctacgtgtccgtgtttcaacgggtagctttaatgctactgttttccttcgatttgacggtatcatatcctcaaaaatattgatttttcccttcgtacccagagtcttcttcttccgtcggaactcctatttgagacaatccgagtttccttcggtcgggcgtgtttgcccttatcattgtaccatcccgacgttcctttttttttgttgtatttcagatacttccctcgtccgcaggttatttgggatcctccttgggttctcatttgtaatacctcctataatcaactttttactccgtcggccaattattttgctcccttcttccttcaacttccgtcggtgcttacttattgtctttgtcgtttagcacttccttttcttttttgtccgtaatgttcccttgaggctcaatacttgagccacaccgggttgggccttccctgatgttctatcagatcttgggcttttatgcattcaacctgtgtgggccttttgacattttcattttaatttattgggccttttgcttccgcgctcgatttttacctcccaaacactactcacccctgttccagttacaattttataacttggaactgtttttgataactgctccctctttttttttagacagggaaatctacgtttatatttttaccttgtgtgtatatatacatattttttttacttgtcacttcttatatcagtttttatgtcagttttcgttcatcattactggttttataattattatatatatatattttgcttttgaatttttcaattttatagaaactggcagtttttctcgatgtgatggtggtgtctcgagaatcactccttcttataaattccctactaatcctctatcttccctttgtgttttggcggcgcactctcgagtataagaccctcaattttgaaaatcctttacatgtttttttctctgttgctcgtttcaacttctctgtgctagatctcattgcctttaggtatatatactctactcttttaacttaattatatttctttccatcctctttttttttatctctcttttttatttataccctctgtatatatgttatatttatttttttgtattttcgtccttcccactattttccctccttcctatttttctctgggatcttctcttcatttccctcttcttcttcttcttcccttagcgttgcgatacttagggtttcttgataattggggtataattcttatttctaggtccacccttccttcgccatttgctttaactttggcattccccctactacgtcctttccgggggttgcggtctcgcctttcccctgttatgaataggtagagggggtggttatttttagggttagccctttttccttgggtagattctgggtgtcgattattactttgtttgtagtataatggcgaatgtggattgtccaggcatctctccttcggttttcaactctctttcttcaagtatagctcctggattcgtggagtccctgctggtttctgacactcctcccatggaggccgagaatgtcgatgtccctgatgacccggaggtggagtgtctaggtagtgtctccattattccccgttctcgctccgggggttaagcgggtgttagtggtcaagccgtcccttccgacggggttactctggcggttccccgttaaagaaatccaagaggaaaaaacaggccctggggagttcctatttggacgttaagtcaagttgtccatcggttctgacccagcatgagatcgattccctagttttgtcctgcggttttccgtcaggggtcgaagttagacttcccaaaccgcatgagagggtagattcctctcaagatgagtgggtgtgtctacattcttattagttcgaatcgaaaatcagactgagactacccatccctaaattaatcaaggaattccttctacattattcgattgcttctgcccatctacttcctaacgcgtgggctatccttttaggtctgattgttttaggggataaggcggg

SEQ ID NO: 202628 - DNA, 893 bp, Cannabis indica
tgaagatcaactcggccaaggtatactcaggcccaacacttgaagatattgagaatgctttgtgtgtcacctctccaaaattatcccaaccccaacaaacactttttcttcttcttcacctgccccggccagcaggtatatatacctttattattattattatactattaattttcttctatatatatatataatatgtgtgttcggttaaataaatattgttaatttaatttgcaggaattcattattggagagaggattgatgatgagtagtaagagtattgataataagtatactttgaagattaagagctctgctactaacaacggaatgactgatgatggatataaatggaggaagtatggacagaagtctattaagaatactccaaatcctaggtaactattataattatttttattattatttgagatgttatattattattattattaaagtagttttaattccactctatgtgggaaataaataaaatataaagtatgcttcttttctaaagaatttattattattatcattattattattattattattattattattattattaagtagcttaatttaattccactatgggaaataaaatataaaatatgctcattttctaaagaatttacagcactcatattaagttattttactgattcatcctttaaaatatttgacaaaaattatattttcttcactttacttcacatatttatataaacaccccatgagtctctttatattaatttatttacatcatttaaataatatatttataaataaaatatgaatgtgttatattttacaagaagcatattgtagcagccttctcatctccagtaggaaaaaaaaaaacaagatctcttttttctttaaaatt

SEQ ID NO: 202629 - DNA, 954 bp, Cannabis indica
aagtactaacgaaaagtttaaagttttaacgttaaaaactttaaaacttacctaaacctttaaacttttaaattttaacttttccgttttcggttaagtaacctacccgaccgactaagtaaacgttaaacgttaaagttaagttcgacctaccttcctacgtaagttaattaagtaaagtaagtcgtccttacttaattagtttccgttaccccaacctaattaagtaacggaccaactactacttaagttttaagtttacctaccttaattttaatttaaattaaccttaaccttaagttggtagtactaactaagtagtaccttcccttacttaattagtaagtaagtagtacttacctaacctacgttaaaggggtaaaagggttaaaatttttaaaccgtttttacccgttaaccctaaccctaaactaagttagttttaatttttaccttttaaaacccttaaaaaccttacgttaccccggtaaccccgttaaaattaaagtagtaattttactttacgacgttactttagttggtaaagtaaagtaggaagtacttccctaccccaacctttattttttacgttttttcgggtttcggtaacgaacgtccgtaacggaagggatacactactttcgttcgctactattcgccagatagaagctatagattccatgtttatgctagcgctcccactcaattgcactaccgtgttcccaaaatgtacgtatcaccctgacctaaaagtaggcttaactaacaaatcaaagaacacgaatagcctttcaagattgagcctaatcataacaggattaagatcatttgatctaggatcaacttggcgatattgacttgaatagattttacggtaagtttaattaaatctaagtcaaagttcaatatcggtcccttccgatgcatactccatgcatccaacctgagctttac

SEQ ID NO: 202630 - DNA, 880 bp, Cannabis indica
tgtagaatggctggtcccttatgatcaatctttaactccttcaaaacagacaacaaccaaactatttcacatgttgcgtttgccatagctcggtattctgcctctgcagatgaccttgatatggtgtgttgcttcttactcttccaagacactatagaagtcccaaggaaaatgcaaaagcctgtagtagatcttctagtatcgaggcatgcggcccaatctaagtcggcataagcttcaagcttaatttctgttgttgatgacagcataattccttgtccaggagtagccttgacatactgcaataatctttgagctgctgtcatgtggctaacctttggaacagcaagaaattggctaagcttattgaatgaaaatgatagatcgggccttgtaatggttaggtattgcagcttaccaaccatttttctgtatagtgtaggatcggccaacccttatttgctatcttaagattagcttccatgggaatactcactggtttgctccccaagtagccaagatcttctaaaagttgaacggcataccccctttgagaaacaaatatcccttgtttagatcctgctatttccaacccaacgaaataccttaactccccaagatctttgagtttaaacttattgtttaacctaactttcaaagcttctagttcttgtgcatgattactcaccaaaattacatcatcgacatacacaagcagtagaatgaacttgtcaccaaaatacttgatgaagagagagtgatcggttgcagaatgatgaaaaccttcatgctctaaagctgtagaaaacttctcaaaccattgtctcgaagcttgttttaaaccatataatgatttatttaatttgcatactgcattggg

SEQ ID NO: 202631 - DNA, 712 bp, Cannabis indica
gtttagatcccagtaagatagaaaagtagacagttaaaaattccaaaaaaaagaaatagttacaagaaacaactgacacagacccaattcagacacgcacatataatattacattgtattcgaagattagttatacatataatatgtacaaattgaaagtttctatcattaccaataagatattattttttcttcgggagttcagtggcaacttcttttcattctcatgtggcggagataataactctcttaaatgagttgttgtgctgttgttttgattttagtatcatagtttataatattttacacgtttgactttttctatttttcttactcattttactcgttgtaaaagaattcaaaatgttatagttcattctcttatacggttgactttatcttttatttttggatatggtgacctaatttatctccttgacctctaatctcttactattttgtattaatctttatgattttgtaccttttaatgaattttccttcttttaaaaaaaatctatgaataagatattactttttcttctcaactattttgataaaaactttaaaagagaatatatatgtatattttttttatgagaaaaaggaaaagaaaataatttataacaaataattgagtgctttaatttttgtagcatttcattattattgttgcaatgtcggtagacagatagatataatatatatatat

SEQ ID NO: 202632 - DNA, 1235 bp, Cannabis indica
attatattatctataataagtatcccaggtataaaggcgctttgatattccgacactactttatccatccatggcttcattctatttgcaataaccttcatgattactttgtataaaacattacacagagaaatggggcgaaggtcagacatgttttcggggtgttttttcttagggattaaaaccacattagcttcattacaaccctcctcaaaatcaccatcttgcataaacttttaaactgccagaacaacatcagagccaaccgtggaccaaattttttggaagaaagtcggtgtcatgccatcgggaccaggactattgtcaggatgcatttgaaatactgcacatttaacctcttcttttgtgactggttgtctaaggctgcaattcatttcttctgagacactttgtgggacacaatcaataatttcctagaaattactcccagaagcagcaaaaatagaagtaaaaataacttactaccaaatatggcaaacccgattcccaatccaaccatcttctttgttcatatttcagcttctgaatattgtttgtttttcctccttgtacttgcagccgcatggaaataacggctattttgatccccttctttcagccagaattgcttcgaacgctgcttccaaaaaatttctcgttgctccaatacctcaaacaaatgcttcttagtctccttatacctctgtactgaagcttcatctcttttgtttttcaagagattcagctcctttttgcaattcttgattcttcctttaaagtcactagttattgatttaccccaaactacaagcttctcagcacaattatggattttactagaaatactcaaccccgaagacgaaacccaactgtcactaacaatggtttgacacaaaggctcttttagccatgcattttcaaatttaaacttccggttacacacatcaaccagctgtccaacaggctccaagaaaataggagagtgatctgatgatgaatgtgcaagattaaataattttacaagaggaaattttaatgcccaggaagaactaaccaatgctcgatcaagacggacctctatccaatttgcttcaccccgattccactcccacttgaaaggatgcccaatcaaatctacatccaccaagtcacaatcatccaacacctgctaaaaaccctctaacagcctcctcgggtagggaagaccacccctcttgtctgcttggttgacgacg

SEQ ID NO: 202633 - DNA, 744 bp, Cannabis indica
ctttatttgttcatcattcaaagtatttgtaagaatttataatatgaactaaacttattcatatctcaaggattattctatttcaaacctttggttttcactaatatctataacaatatttaattagatcattaaaatcaaacatacaaaaaaaatatcaacctagctaacaacgatcatcttttggaacatcgacatcttcttttctttttattttttccttgttttttttaatttaaaacatatattacttcaatttttaacaaaagtttaatattcctttagttatgattttttcggccctttagcttcaattttcgagaaattcgtaatcgtaagcgttacaggtataactaaatgggtcgaaaaaaatcaaaggcaaaacagactttatgactggagttatttagctaataattgaagtcatagagggtcgtatatgcagatccacgaccaaagccataaggagtcgtatatgaagatccacgatattgaatatagaatagtgaaagaaaagaattcattgcattaatttagaagagcagagctctttatatacaagtacaatattggaagttagttagagaaaagcttaactaacatgacagttaattaaccaaaataactaactttaattaactacttaacacacccgtcaaattaagcatggataaggaagccaggcttagtttgtcacacaatagtttgaatcgaggtccagaaagagccttagttagtatgtct

SEQ ID NO: 202634 - DNA, 2393 bp, Cannabis indica
ctgaagctgttgctataggtgatggtaagaagcttctaattactcatgttggctctacatccttaccatcttatcactctaatgtccttcatctaaattctgtccttaaagtccctcaaatgaaaaagaatttagttagtgtctctaaactcactaatgataatgatatctttcttgaatttcacaagagttgttgttttgtcaaggacaagtcaactggggcaattcttctgaaaggaccagttagagatggattgtatgtgctaggagcatccaagaactccccgtatactctgcaatgcaatctcaccaccacttcccacttaaatgagtcaagttgtcctgttaataccatttcgaattgtaataagttcactgttaatacagtgcaccattgtaattctcacttagacattaataaagattctccttctcattccaattatattggccattctaatgtctttatgtctactatcagtcaagatgtcaatacttggcatcaaaagttgggtcatcccaactcggctgtccttagcaggttaattaagcaactcccacattcaggcactttaaaagatttgcaactttgtgttgcatgtcaaaagggaaaagccataaacaaccttatcctttatctcttcgaaatgccaaacaaccacttgaactcattcatagtgatttatggggtccatctcatgaaccctctaaagaaggctttagatattacatccatttcatggatgatcacactcgatatacctggatttttcctttaactcttaagtccgaagcctttgatgtattcattaaatacaagagcatggtggaaaaacaattcaatctccctattaaaaatgtgcaagctgattggggaggggaatatagaccttttgctaggtttctaagagatcaaggaatagggtttcaacatccatgtccacatgaccatgaacaaaatggaagagcggaaagaaaacatagacatatcactgaaactgggctcactctcttggcacaatctggtttatctcttgaatattggtggtttgcatttcaaagtggtgtttttacaataaatagaatgcctacagctgtgcttgattacaaaactccatatgaatgtctatttggttctcaacctgattacaaaattctcaagaattttggttgtgcttgcttccctcatttgaggccatatagatcacacaaacttgatttcagatctgaacaatgcatttttattggctactctccccatcataaaggatacatgtgtgagaactctcaaggcagaatatacattgcaagaaatgttgttttcaatgaacaacacttccctgcactctctgctactactgcatcatctcaggtacctatatctcaacctcaaaatttccctactgctactttttcctttcctgctgctgcaactaattcttctctttctgctggttttggtgcttcctcatctacaactcccacccgtgagcatgttccaacacccacaccacctcaaaatgcctctgtaccaacacccacaaccacccttccccaaccaaacactcaacctattcccataatcaccaacctcacaccagaaaacattactacagactcacatactgccaacataccaccacaaaattgccccagcaacccctccaatcttgcaccagcaaccgcctgtattgaaaaaccagcagctgtccctgagaccactaacacctctcgcactcacaccatgacaacaagatctcaaagtgggattcgtaagcctaaagcatacctttcaactaagcatcctctccaagaatctctactgccaagtgaacccagaactctcaagcaagcactcaaagatcccaaatggttccaatctatgcaaactgaaaacaaagccttagttaaggctaagacatggactttagttcctcatgagccttacatgactgtgattgataacaagtgggtctataggataaagcttaatgctgatggatctctaacacctataaatcacgacttgttgctaaaggctatctacaaacacctggcatcgattatcaagaaacctatagtcctgtggtaaaaccaacaacagtgagggctgttctaactcttgctgtgacttctcattgggatgtcaaacaacttgatgtaagcaacgcttttcttaatggtgatcttcaagaaactgtttacatgaggcaaccccatggttttgaagaccctacaaagcctaatcatgtttgccgtctacacaaagcgatttatggtttaaaacaagctcctcgggcttggaatgacaagttgagaaacacattattggagtggggttttgtggcttcaaaatctgacacctctctcttcacttttggctcgggcagcaa

SEQ ID NO: 202635 - DNA, 898 bp, Cannabis indica
gcacagaatagtttcaatgtaataaaacatgggtctttttgctgtggcagaaccccacagaaaagtaaaaaaatgcataatctatcgtgaggtaactaattattttattttccttttttcttaagagattttggtattggcagaagaataatatgacatttgttttcttctcatacacagactaatatttcacaactagaagaattttggaaagaatagttgtctaacatcttttcccacaaatggcatggaatcttttaaaaaggtatgtatacacacataaaaataatttataaaattaatattgtgagaaactaatggatgtactgtaattaataacaagtgttctgaaattagccacactctgctgggaaatgtcttattttgttttatttgtcaaagttggtaaaacaactttaagtagctaacattaaattttactattaattttacgcttcttgtgttaattaagcattattatgtcttagattttgttttctaattggtacttaatgtgttgttaagctagacatgttgtaagagttgcagctttagggagtgtttaagtttggattgtgttttgcaaattcatgagttgtttgctgaatatgaaagaagaggagagtaatgaagttaaaggtgttgggaaacaaattaaagttctaaaaaaaagaaactttagctgtactacaatcaaatgttgagcatcactagattttgtttcaatttggatcataaattaatttagtattattttgtcccatcacctagtcattggatatgtaagtaactacctttgtttattgaggtagttatgtctgttttctcctctattttttctagtttttagctaaaatagatcatgaacaatcaatttttttagtccaaaaaaagtagt

SEQ ID NO: 202636 - DNA, 381 bp, Cannabis indica
tatatatataatcactacacacatacttaattgcgtgataaattaagcccttcttttgtgaagtgatgaaagcgatgtatcacattattatggtacatacatttttgcaacttttaagttgtcactacacaacttgtcaaaagtcctatcttgtgacgacctcatcatcaaccaaagagttattcatttttagagtttttcttttggtttttttttcaagggttttaatttaaagtatgttcataataataatgaatgaaccaatgaatgttatattatatattgtaatagactacatcaacaactacatctacaagcacaattgttggtttagtgtagtcatcgaactctatagaaaatatataaatatgtgtagaagat

SEQ ID NO: 202637 - DNA, 1067 bp, Cannabis indica
aagagttggggaagccattttcttgctggatttttgacagagggaaactaatcactttcaaagaagaacatggtattattcctctttcatacttgctattttttagaaaagagctactgcaatttttgtgggagtcatctaatgctctaaattcaaaagatggttcaataccagatttcttattgcaaaattgcgatcctgagtttctaattactcctaagagacttttggagtttattcctttgaaggttgttaatactaaagatgattcgtgactgcttattgcatggctccttgacaatggaggaaatatcaccaatagcaaagttgagaagtatcaattgatactgccaagtattttgaacggaatagatacttttctatcttttatatggctaattggtgatatgtggggctattttttattgagaatgactgtagaaatcaaacaaattacacaatcaagttcaatctcgggtgctcttcctacactgatggggattaatggcaagtattactggtttggccaccagaattatcctgtagaaccagccataattgcatatatacatggtacttttgtagttctcaattggagagtcatcaaggctgctgaatattattttcagcaatgggataagcttaacttagcttatgaagattttattacaaaggggagggagacatttcctattgcacaaaacttcttcaacaaaacagcagaagatttagttcgtttagtgagggagcacagtggagttcagcttaatgtattctatttggaaggtagccacaacaacccacttactccaacaagcacgatctccaacattcgggggtatgataagaaattgttgtgtaaattgcatttactagactggttcttcgataggggtcgacaggataattggtttgggaacacgagatcggacgggtggaggcgagttgctgaaacttggcgtttttttcttacaatgccaacaatacgcattgctggcggggttctgtgacagaggacgagcaaggttggcagttgaagactttatgttcttcaccttgaggacaag

SEQ ID NO: 202638 - DNA, 547 bp, Cannabis indica
ctctctctctctctcactacaatctagggttcaagaacctttatctcatttctctcttggcttactttcaacagagctagagacctttatatataggctgactagctttacatgttaggactcaactaacataacaaacacctaacaaaccaagaacccgaacaaataaacaaacttaagtaaaaacatgggcaagaatgacgtggcccatagacaagttgggtctgatccaacaaattccaccttagacgtaacttgactatgcaaaacaacaatgatgcctcgggagttcaggtcttcaagttgacttcattagccaactccaatcttaagtagtgacttgcaatggttgaacttgtttagagacgctacttttgttcccatatcaggtgggttctcttctgatatgcaaaccaacaatgatgcctcaggagttcaggtctccaacttgacttcattagccaactccaatcctaagtagtgacttgcaatggttgaacttgtttagagtcgctactttggttcccatatcagatgggttctcttt

SEQ ID NO: 202639 - DNA, 681 bp, Cannabis indica
tatataaattttcaaaaatattaatttatgtaattgataaacatttaataatttttttatagcgcttaaaatacttatagtaaaattgtaatttcgttcaatttcgtcaatacatgcatgtgataggccttaattaataaataaaagggtataaagataatagaactattgctcttgacttgggagagcactgggtctctggaatacccaatagcttgttcacttcaattattagctactatttaactctatttttctttttttcactactgtctatacttaaaaaataggagattcctatcaatatgttagtgttttaaataaatcacatataagatttaaattttaaattattacaccttgacgaaaacgtgtaacatcggttactttcaaatcttttttcaacaaattcaaaaactaaaatttagttacaaattttaagacaccaacaaaacttatagtggaggaacgagacaaaattacaattttatatcattgagtactttacctgctaaaaaagtcataaatctatgttaattacaaactcaaaattttaagtacatatactgcaaatattcttatttttttgtattactttaacaatactaaaaaattaagactaaataaaacactagatactatgttcaaaacatatatttatttatataaaaaagaataaat

SEQ ID NO: 202640 - DNA, 935 bp, Cannabis indica
ctgaattattaataaaaaaaattaaaaaagaaaaaaagaaaataaggtccttatacgcgtgtatatacaacccttctctcattttcattcaaattgcaataaattaaaaaccctaactttttttactagtatctctctttctcgcctctgtctctctctctctctagtaaatttctttcagccaagccagataacctctgtccgttcaccataaccgaagctccaactccgcccctcgtcgtcgattgcagctccacgaatctgtcgtcgttgtcgtcgaccctcctcacgcgcctaactcctcctccgtctacaagcatagacaagtagtgcaccatttctcttatatttatctctcccgatctccctctctctctctctcttgctcatctcccactctaacttttagtcttagatttaatggtttttccttctcaagtgacttcaggaatggattgagaaactttcaagtttagggcgcacgcgaggaggatcgattactgatatagggtggttttgagcttgtagacatggtggtaacttagaatggggataaattggatctgaaatttgttgtttttccttgaaattttattttttatgttattttttaggtttagttttttattttgtgttcatatatgttaatttttaagggattagctagatctttaatttatattgtatttgtctatctgtgaaattttattggattttttatttatgatgaatgaaattgatgtttataccttataaaaattaatttggaatttggaatttttatttagttattttgaaattttgccccaataacataaataagcaaagaaaaaaataaattattaatatcagtacaataaaaataaacaaataaataaatatttttaaataaaaatataaaatcctatatccaaaaaaatattaaaataaataaa

SEQ ID NO: 202641 - DNA, 558 bp, Cannabis indica
ttttagggagcgcaaaagagtaaaaatctcaagatcaagatccgctgttatgtgtatatatatatatatatagagagagagagcttgttaatgtaaaataactaagatagcaacttaattagataggaaagtagggtttgttgtggagttgcttagttccatttgaagggtatttatagcatcaattaagggtcccactccagtcctgctcctttggaactctctctctctctctttctctctcttttatctgactaaatacaatagtcaaccaataatctgcgcatggcccatgcatataatataatattttatgtgtatatatatagtgcagcccacgttcagaaactgcttgtttctcttcaactcaatctaaccacccaaattaattaatctaataccttcatcactacttccaattaattaataaaaagaaaacccacaaattaactggaactagtactactactactagactactagtttagtgataataataataataaaaaaaaaaatagtcacttgcactgactgaccatgcatatatgactaaatttc

SEQ ID NO: 202642 - DNA, 1558 bp, Cannabis indica
aatctggtagactcgaaatttctcgatttgtgactaattttcagatattccactttgcaaacatggtacaaaattaaagtgtgaattttacttgtcacaagtcgtagctctcttttactaggaaaaatagttatatgctcgagacgaagctagaattggataagcagagaacacaccaattcacatgtcaacctgggagttgggtgctcttcagagagcttcccgggactcgtttttgtacttttatcagagtattgtaagagcgacgttagattttctatgttgttaacaaggtttctcgtttatgcaaacccctcttgaggaacattagaaatttgtcaagaaaatactaaggctatttgaatttgactatggcttacatctcaaaacagcacctactctatccttaacaagatttggtgatgttgattggacattggaccctaatgacagaagaagcactctagggttttgcattttcttgagttctaatctcatctcttaggcctccacgaaccaaaggaaaatttttagatctagtacagaggctaaatataaaagtcttactcatgccacaacatactgtcttactatttggtatgataaccacgtactgtcttaatgtctgccaactcgattcttcactcaagaacaaaatagaagagttagatctgtattttgtacgaaaacaagttctcaacaagtaactgttagttaaacacaaacctgttcgtgattcaaatagtagacattcaaaccaaagctaacttaaatatcgatcttatgctctaattaccaataacaaaatcattcactcaattttttaagccttgaatcttatcacaactaacttaaaaaaattgttgtggaatgatttttatgattctaggggcaagttgcaggactagaagctagtttgggtcaattgcaatttcaattttatggctcataatctaacaaggtgggctaggatctccaagacacatggaagcctacaggaacttctcctacctcctcacctgttggatgattatgtggaatagaatcttgacaatgcataaagagatttgtgagtggcgctcatgtgtcccaccttttgatggataggttgtcctttttattttagtttagctagttttctctttgctttctcctttttgtttggtaataagaaatttaggagttgtttgacttcatatcttaaaaattattttaaattttaaaaattaatagaggtcatttggccaaattttttaaaaacattttttcaaaaattgaattttaaaaaattagaaaaagaaaacatcaaaatgttgttttttattttcaaaaataatttttttttaatatattatattttatatttttgttcacatacccggaccttggactcggagtcagatttagaccctggaattagaccccgactctagaccccgaccaagactcgaatcccgaatcccaaatcccggactcgaacccaaacccgggcattcaagttcgagatctgggttcgagttaagtctgaatctggtccaatataagatgggttcatgtc

SEQ ID NO: 202643 - DNA, 744 bp, Cannabis indica
caaaacctagcagagccacactagccccctcgaaacccagcagacagccgcaccagccccctcaaaacccagcagacagtcgcgccagaagctctcctcttcttcttcgtttcgaaagatcacgtaccgaccaccattcaccgcccttctctttctctattgcgttgtgcactactgcaactcttgctctctctttatgtcggtacgtagctctcttctccctctctttcgtctgaaacactctcttactttctctcgtctaaaattctttctcatttgaatagagcatcaagggaaattaaaaagcatcaagggtttaagctggatttgtaggttcatttttgaaacgggggttctttttctttcatcaatccttaaaatgccttcatactcgattttcttgaaggttctttctaatcaaaataatatatatgttttcttgtattgatttgcttccatgcctttctccttgtagagtaaagataaagagcgaagccataaaaggcataagcatatagtaaaagaggtaggcccgctctatcgttctttttcctcatgggcaaactatgtgatatttataacttctaatgtactgttgcacttagttcatggtatttctttaaggtagtgtttgaaatttttgagtttgggcatatgaaatgtgttgttcttaggcttttaggcatgcataggtaacaatacacatcaatttattttttgaataaagcttttgctaactggcaa

SEQ ID NO: 202644 - DNA, 913 bp, Cannabis indica
attaacccaaattttagtattttatttgtaagttttcctaatttatttatattaatattattatttgattgaaatgattgttatttaatctgtgaacatggtttagacggaagattgacttcttgttacatgggctttgactcagcctctaaggcctccacatatgggcctataattggaagaaggttgtagaaaactcaccataaattttcaatgcaaaatcttctacaaatatatatatttacttatcaacaattttacaaaaatattgttttttttttcttttatgaaaaaatatatgaaaaaattatatttatcctaatgacctttaagaataattggttaggggttaccttaatgacctttaagaataattggttaccctaaactttttatcctatatttatatatatttttttaatttttcccataaaataatattttttaaaagaaaaaattatatttttacacacataaaaaactcataaaatgtataatttttattaatttattgtgcacatcatttatttgtttgtctcactaaatttgataaatatgaggttttaaataatgtgatatatttttgtttataattgggcaaataccattttgaattttatgttttgcaaaaattactaattgaatcttctgttttgttaaatgaaaaaaatagaccctatattttccaaaatagtaaaaataaaacactgagctcaattttcaacaatttcattttttaatataaccaactttaagacaatttctaacacgaacagatacaaaaaatacaaccaattttgtcataacatttccagatcaagttattattaagttttattttgataaaaaattagttcaaagtcctatttgtataatgttagaaaatacacggtccatattgtcatttaacaaa

SEQ ID NO: 202645 - DNA, 894 bp, Cannabis indica
aattaattaatatatggaggaacattcgaacgtggtttaatgaagaataataagttgggacaaattcatgcatgtgatatatgtatcgtacgtactttttaataattagatcgcatgataaaaacaaattaaataaattaatcattgaattattgaaaatattcctctaagccaaaacaaatatataatgaagaggtatatatgattttgatcaattagaaataatgaataagaatgaaattacttaatagtgatttgcatatatatatatgccatttgagtatggccttttggtacattgtaggatcatgaaattaattacttaatttttgtaatgtattatgttttttttcaaggacaacaaaatcacttattatattgcgtgtagctcttgttattcttctgatcgtgtaatttgagagcaaaatatatcttctaaattgtgttttatactgtataatgaaagagttttttctatcaaaaatattatttattctatatatgttgcatcagactaattttaattatcttgttaataaagtgctatttctattcaaatatatattttaatgtgaagtattggaattattaaacatttaaaatgtattttttttatactatgaaaatagcgtaaaggctcattaatttattagtaattgtaagtggtatataaaatctataaatatgtaattgtgtaattataaatggatttgaaattgaaaaatagaattttaattcaattagaagattaacaccttctcaaagagtaaattttatgctggaagagaactcgttacccatcatactttgtgaataaaacatataaataataaaaagttacaagatcatttataaatattaaagtggcagtagaatcactcatttttattaatt

SEQ ID NO: 202646 - DNA, 907 bp, Cannabis indica
gttgtgtggttgcctcccgaaggcggggtagagatggcagaggaaggcgggacgccactaatggtaggtgaaggcgacccaaaagtgggtggagttggcgcgtagccatggaaggtgggcggctgggccatcggtgagccggggtaaggcgttttagggggaggttttgaatagggcttgggtggctgagccgaaggagagttcttttctggcttagagggataatgaggttttggtggctgaaccggtggagtagtcttgcttggtttaggtgggtttgcataattatttggtggtgaggcattattaggaggtgatgactttggtggatatgaaggttttggaggagaataagtatctttttgtggtggtgggggtggtttttgataaccatattgaggtggttgtgatgaggggcttggcggtggtggagattgggaagagtagctcatttttttcaaatgattattagtgatgtatgaagtatatttatgtagaaattagaggacagattaagattagaatcgatgatatgattgtggagagtaatatggagctatttgtactagtttgtgagggcaccaaatcatgaaagcctccagatatatgacccaggagtcattataattatttaatctactatatttttaaattgaattgaaataataatatataaaagaattggaattgtcgtgggtcaatgttgagtctatagtagttgtaaatgtatgtacctaagcaataaacaaatacaaaatccaactgtttgagaatttaaaaatcagtacttattagttgttgatgatatatatttatatatatattccacaaggggctgctatatataacatttgaaatcctagtatatgtacatattcagaaaaatgcacatgaaggttgtataaag

SEQ ID NO: 202647 - DNA, 1375 bp, Cannabis indica
ttttttcggatcttattcaggtctcgggaccgggttcgggtccaggtcccgagtttgagtctcggtccgagtctcgagattgggtttgggtccgggtccaagtctcgagtttgagttcgggtccggtcccaagtctgggtctaggtccaggtccgatcccaggtctaggtccgggttcgattccagtccgagccccgggtttggtcccggtccagctcttgtctaagtcctgagtctcgagtctaggttcaggttcgggtccgggtctgggtttaggttcgagttcgagtttaagtatgaattcaagtccaggtctaggtcccggtctcagtccgggttcgggtcccaatccaggtccgggtccaggtccaggttcgtgctgggttcgggtccagtcccggttctaggtctgggtccggggtctggggcccgagtccgggtcatgagtctcgggtttgggttcaggtccagtcccgagtttgggttgggtccgagttcggatccagtctcgggtctaggtctggtctcgagtccgagtccgatcccaagttagggtttgggttcggcttcagtcccaggtccgagtttgggttcgtctacgggtctgagtctagtcagggtcctgggtcccaagtcccgatctgggtccgagtttgggtcccaagtcctaggtttgggtttgattttgggtcgaggtctaggttcgaatcttgaattaagtttatttttaatatatcaaaattggattagattagattcaatccgaaaaaaataaatgggacgacggatctaatctgagatccaataagtatccaaatgtttcggatcataaataattcatcgaatcgtagctctgaccctatctaactaaatgaatctttttgatataactacattatttttggcatgtcatatactaaatcgaatgtataggaagaagaataatatctctctatgtgagttattttaaagtgtaagttatcttgtatattgcaagagcaccaacttataaaaatgagataagtagaaaattattattttttattatacatttattaaatataactctaaaataattttaattgataaatactctctttcataatcaaagtacgaaatataacctcacatatcttatcaacattagaatctctaatgcacataatgaggatatgacctataaaattgggtataaattaaaaaaaataaaataaaagtaaaaattaaaataaaaaataaaaagtcggtatataatgtaattttctctataaaaataaagttggttcctaaccggcccgaccctaggcatagggggttaggcctgtgcctaggcctcacccaccccatgggccaaaaaaaaaaaatctttttaaga

SEQ ID NO: 202648 - DNA, 1250 bp, Cannabis indica
tttatatagaatagatatagtagtaagagaaatacaataaaatactcaaagatagaatgataataaaaaaagccaaacctcattttcaaaaacatacaaagccaaaaagaagtataataatacagcaaacactaatattaatctcgtctctctcctaattttttttttgccctctcaatatcaatctcaaagaaaaaagaatgttattttaaaatgattctcctaatagatttttgatgagattactcttttttatctctaagtatctataaaaataaatacaaaataaaggtcataatattttcaaagaatttgcttaatttagaagttctctttgtggaaaacaaatttggtgcttcctttaagagaaaagtctaaacataatttctttagatctggaactacggaaattggaccgcaataaaatactcctgcaataattaaaaagtctaaaattaatagtccttcataaaaaataaatagatgaattaataataaataaaataatattaagaatatatattaatatttaagagagttatgtcacgtagtttctcatttaattaattgggtcacgactggttagagagtgtggtagtcgggccaaggccccacaattttaggagccaaaataattaacattgttatatatatacataaaaaaaaataatgttatatataaatatttaattgatataattacataagaacttatagcacaaagaataagtattggtttctgacaatggtgaggtaaatggttcgatcctaccttctctcatttttttagtaattttgaaaattaaaaggtgtgtatatataatatttagtagtatttcaaggtcttaaataaaaataaaaaattgtcaagataataataaataaattaaatattttttaaaaataaaatatttatacaatatatattataacttaattattcgtattaaagtgtttcttaggatattaataatgtggtcatagacataatctaataatttcataattcttacaaagaagagatcttatatatgttcgattctcccatctcttaatgtaaagaaaaaaaaaaccatgctactaatgataaataaaatgtatatttattatacacgttatttttttaaatcaaaatgttagcatatgttaaaaaaaatatgtataatttctaacacattattattattattattattattattattatttgcaaaagtactaaaatatgtatcaattcaaaagagatgatc

SEQ ID NO: 202649 - DNA, 664 bp, Cannabis indica
ataatatatattataattattaatgcatgaaagaatatattcatgatgataaccaaattatcaacaaagatgggagattatatatagagggcttgatgatctgaacccagtgagatctccacaccaataatatatatatattatttaattatatacataagatttcttaagtatatatatatagtactgtttttggtacttttaagtacgtttttccaatgcatgtagtcactaactatactaaaaccttctccatatatatatatcaaagttaaatctcactataatatatatttatatttatataagtagctagttccattatatatatattgattttgttttgtctgtataggtagagatatatagtaactgaagtaatgttggagtagtaagcatacatgacagattatcaaaccccaacatagatcacagattggatttcttacagcaatagacaaatacacacattattaatttattaacaatttatatatatacaaaaaatattcaacatagccttagttgtcacccccatcctcatgtttcttctattatagaccaatatattgaagtggaccatatatgtatatatatatataattcattattattatgagattgattttgatgaagtttaagtagctctacttaaggtcttctt

SEQ ID NO: 202650 - DNA, 1171 bp, Cannabis indica
gttttttgaaatgaaatgaatataagagattggatgggataaaattaaattaaaattttgatcatattatcaaatttattcaatctaatcttacattactcgattttattattagagaatttgttgtcgtgatcaatagcggagctagactgaaattcatggaaaagaaatatttaatttatttttttattattttttacatatagttcttttaaaaaaattaaaaaacttgggaggccatgacatcccccaactccctagcttttcagtgttcgtgatatatgcatttatttatgagcattgcttttgaacaccagtggtgtctagcacttctagacatgtcattttacgattgactatcgatactccttaaaagttattatattaaactatatgacccgatatttagttggaccattaacgatattcacacataggaatgtgctaaacactactagtgccctttaatatttctctttatttatttatttattcgattttctttttagaaaaataggacaatcaattaataaaaacagtttagattttaaatcaatctagtattttgacaaattaagagaatttgtgatagtcaaagtttagtgattcgtaaagagaaagactaggtaagttgtgcaatcccacatcgtttgaaaaaatgtcaagtgatgattctaaagactatataaataataggactacataaatcaaagaggacttaaaatggattgatgaatactacttcccttaataagatgtttcttttttttttcgatatactcatcgcttctagaacttcaaaaataaagtgtgcttttgagagacacatttaataattgtgttatatttgaattttcgacacctttaataatcatttcatgtcacaatgtcataaattttttccttaattatcgtatttgttttgtaccatgacattaatcgagttattgtgtctatatttgagttattaatatgtttcacaattgtgttacatttgtatttatcttaatggtatcataatcgtgttgacatgaaaacaaaactataacacgaattactaaccttattgaatgtcaatggcatgaattagtaaaattctagcatttctctccaatttagtttaagtattattgatattattatacatgtagatagaagctaggagacaaac

SEQ ID NO: 202651 - DNA, 623 bp, Cannabis indica
aaaaaaaaaaaaaacaagatataactagaaatttttcttaaaaaaatatgcgatggtattattataattacattaattttttttttatgaatttataaaaagatctaaataatttaagatgtatgtttggcaacttttatattttcaaacacccaataaataatttggtgagagaatgttaattctaaatttagctttaaaaatcctgcatgtccaatgaaaatatcaaaaaagtaatatattattatattttagcacacttaataaaaattactattccaatattgttttaaaaaatgtactaaaattaataggtgctaaatttaactagaaaataaaaaatattttattaaaataagtatgcaaaaaatatttacaaaattgtatcctttgcataattttatttattttttggaatatttgctgcacgaattttttatatttttaatttcatacactttgataatttatcttataaatatagataatttatgtattaatatttttaaattaattatttaaatgattgattagtatgatttttacttgttaggacttttatgaaggataatcatacatttggaatcatttggaaggaatttaacatattttggtgaaaaata

SEQ ID NO: 202652 - DNA, 578 bp, Cannabis indica
tcctacatatttactttaataaaaaatataaaaaactcctaaatcaattatagaacaccactaagcaccaaggtgtctcatagctagcaactcttatactatcgtataattaatttagttcatacaaataaatatgatattatatgattcaaaattttaaattagtatttaaaaaaaaaaaaaaaaaaaaaaaaaaaaaaataacaaatcacatgtggtatagtggtagggaagcctttactggcctcctctcttgcttgggtcaaaaattcgattgtcaccaagcaattgtgaggaattatgtttagcccttgaaaactagcgttgtggtagactatatttaggatagaaactgaggtttaagtaccgatgaagtataagactcctatagctagcacgtggtcgccagaactgccataggccaaagagatgggaacagaatctgcaccacatgatcccttatttctcagcaaaaaaacttattctttcttttgttttgtccaccattcacacaaccaaaaacagaaatagaaggaagacaaaaatatatagtagcttcgtctgtacataatatagcc

SEQ ID NO: 202653 - DNA, 667 bp, Cannabis indica
taaagaacttgatcatggttgaggtgatcatggtattgtgtagctgcaacacatattcagggtaatcttggtctcaattgattgatttcatcccagattgttgtgaactttgtgaaataggagctcacagagtcatctccttgatgaagataggtcagggtttcattaagttcgaagatccttcgcccattcccttgcttaaaacgattgtataaaacgatccacatctcagcagctgtgtctaaatacattatgatgctcttgatctcaggggagaccaaatgcaaaatccaagacataaccatttggttacatctaatccaagaactaaaaagagaatcatttggaggaggttgaggaagggtaccttcaagaaacagggttttgttttgggctccaattaaaatcttgaagtctcgtcaccatggttggaaatttcgatctgtgagaattggagtggcaagaactaagactagatgatcatcattacttagatagtacggactacgaatgtcctcgtatgaaaagcgatcgatctgaggttgcttgattggtggagctagcgatggagctcaattgtcattgtcaatagaagtttgagatgggagaggatcgatcggagcagtggcatcaaccacaggatcgatggtagtagcagagttagttg

SEQ ID NO: 202654 - DNA, 586 bp, Cannabis indica
tctagcaaaaatccttccaaaataggcagaggagggttggcccctaaaacatagcatacaatggatggcttccaaaattctacttcctcatggatatcatcttttctaattttgactttgtttaaagaattcgaccgagataaagacttctctagatttctttgaacattgctagatcgtagtataggggaactagtgatgttaccttgtgaattgtgagtagagcatcttcgattttcttccaggaggtgtccgaaatccttttgtatatcttcctactgcctaatcgatcggagagataacctaggcgacattggatctaggaaaagatcttgaacatctggaagttgaataccgtgccctgaattatattcccctatttccccaatgtcttcactatcaaagaaaataaccgattatattccaagaatagcacccagtgatttagtcttcctaacatcagagcttgaatttggacccttcttcttcttcaagatcgctgagttaagcttcccctaccccttggacctcgttttggccatggccccaactcgtgagctacaaggttaagagagagagagagaga

SEQ ID NO: 202655 - DNA, 706 bp, Cannabis indica
tgagaattgtcaatgccaattcatagagttaacatcgggttaaccgttgactaatcttgaaaattatctttgctaatttttaggattaacacttccacctccaatctataataactctttttaagtgcttctgtagactaagtttggtaagcatcgtacctccacaaccacatgtccatctactagaggcaaagctagactggagggtatgggtttcccgcacctagagctagtacagctactatagccggagctggcagagcagggagtactagaagttgtgattcaggagcttgagggtgacatactccttctggaggatttatggtaccctgctcccctggaacaattagatattcgtgagtcacctcctatctgagatatataatgcgaatccaggcccattgccccaagtgtcttctcttgcaaacattttgatctcatgatctttcaaatagccacattcattggtggagtatcctacttttgtgattgtaatgattgctttgttttattttgtgaactagcagataattatggcttattttgaaaagtaggcttttaattattacttttgcaattatgaagatatatttgaattttgggtgtgatatgtataaaatttcatgattttcatatttttatgcccagtaacagtgaaatgcaacgtttggcctataaggtcacttagacaaggtttggtatc

SEQ ID NO: 202656 - DNA, 930 bp, Cannabis indica
atattaagtgtccaattttttttagtttttaagattcatttcaactcaagccgcgtgaatagagattaaaaaaataataaagattgagatgttaattgattaagacagtacatttaatatttttgttcttcccctcaatttattccattgacatagtaaacaaaaaagaaaatcagattgaatttttatagttttattagataagaaatttaatcattacattctataattcagatatcaatttcttaaatcatccaataggctgctaaaagatcctatatatatatatacatactatatataatgaatatataatgaaagaattgaccaatataaactgagaaatttatataatcttgaccattgagaataatatgagactgaagaatataaatgcaaataaaggcactacattataagaagtagaagaagaagaagaagttcctttaaaaacctttctcttcttatttgttcttctacatttcttacccaatttcaaatctccaaagtagaaatgaactccaggatctctcatttcaactttactctcagacaaaactgagttgttagctccttgaatgttgttgtttatgtaaatattaatgcaacaacagccatcatgggaccccgatccattgcctcggtgcagcgaaaacgatgcacccgtgttcttcccttcgaggttgatatgttcggagaattcggggccagtttccgagaacatttctgaaacttgttgttcttgtttggaatgaaagagtttctttcttgaatagtaaaaactgtgtttatcaatagggttctttgcttgtactatgagtttggtatatatgttttactttatctatgatatgactaataatatcccttttgcctttttctttaaattcctaaaatcaaaagctatactcttacattgactgaaattct

SEQ ID NO: 202657 - DNA, 904 bp, Cannabis indica
agatataaatttcccccaataataattaaaaaaaaaggagtgaattttcattcctaattgaatatttaactccataatcaagatttcaagatcatcaaggtcgtcgttgtcgtagttacttagtaccttagcttattggccgtcgatttgttccagaatcctcgattaactttccggcgatgatcgtaagactgtgaagcatgtcttcggcttcgtaagctttaattaacctcaattcgccattgaaatcgtagtcttcttcttcttcttcttcagatgccgttgctaagaacctctgtaactctgcgacgtcgtttttcagatcccaaagttgggcgatcttttgtagggttggagaagataaggcattgaagaatagtttgaggagagaggattcgattgtgttcgccattgataaaccaaattggaaaaatcaagctttgaaggtttgagtgagagaatatatatatatagaaatatttttaattaggtaataaagactaattagaacaaaaaagaaattaaaattatttaatgatgttgatttgtttattttagttgacttataagtcaatgcaatttttatgtattaataaatattttttaatgttcaagaaaaaacattataatattcaatggaatcttccttccctcatttgaccacaagacattattgttttttttattaattaagctaatttgaatttgtgatatctaaatttgagataataaattatgctcgtaaattttttagactgtaaaattttttattgaattattgaaattgttggaataatttttgtctaatttcattcaattttactaatataatgattatttttgtaccaaattgtactctcgaattttgatatgcactaatttgtactctcgaaacttctattag

SEQ ID NO: 202658 - DNA, 621 bp, Cannabis indica
agccgatcacaagcccaattgaagttcccactccaaaaccaaaaatgcccattatagcactcaaaatacccatctcagatcttcagtcttttcaaagggaaaaaaagcacagaagaaaaatatatcaaaccagttgtaagaaaacccagaaaactcacaatcaacgaaacaaataagaggagagaaaacccacaaatatttgtgtataaagttttaatctttcccttagcagaaggataaaagttgcattaaatgaagcaattaaaatcttggtggccaaggattttgtgatgaacgagaaaagagaaacgatcacagaacagaacagaacaacggatgcgaaaggaaagtttagaatgttttgtgggattagtaagtgtcggtaacgcttagttggcacattttcattggtccaatgctttttgaaatattattattttattacaattagagagggaagggatattagaagagaacgaccaatataaaattttctgctatatttattttatttgtttattttccgtggatgtaagatattgggataataataatattaatagttgaattaaaaacgtgtataggacttctgaaattcggcttttttctctctagaatgtt

SEQ ID NO: 202659 - DNA, 588 bp, Cannabis indica
gtcgcggagttgctaccgacgccagaaaagctgttagaaatgcattgtcgtcgaaaaaattaccgaaaaaaatcaccaagaatccagtttcttcatcaagaaagatgaagaagccagtttcgcgactatgccaattccgacgagttttttgaagttttgttgtcggtgtcggaaaagacgccggagtagctaccgatgttagaaaattcctcgtaattgacattgttgctggaaaaattaccaagaaagtggtttcttcatcgagaaacacgtttctgggtaatttttctgacgactttcctggcatcagcaacaacttcgactactttttcgataccgataactactctgctggtttttctggtgccaacaacaaactccggtaacttttccgacatcagtgacaaataaaattgcctaaacaattaaaaatattaaatatggaatttgaaaacctaatttatatgtatatgacatattaaatactataaaaatacttaaaaaaatactatataaattggtcaaatttaaaagtactatatttatgtaaacaatttttaaaattccatagtgagtataattttctct

SEQ ID NO: 202660 - DNA, 1203 bp, Cannabis indica
ttttaaaaaaaaaagttaataatcatataatataaatttaaaatatctctataaaagctcaaaccagctagctacccatgagtatacttaagaactttaaaattaattattcaatctaaaagagagttattgtttgaattttcatcggttattggttggtaattaattacattttttttaatagttatggatctgtaagaaaaaggatagtttttgttgattaatgtttgtttgtatttgtatgtgtgtttcaatgtcacgtttaaggaaccggacttagtttaagccaacgcacactgcaaaactggccttgtcttattcactggtcctcactcttgcgcccacgtcttcacaccctctaacccccctactctcccaataaaatacatatattttaatcacttcatttattatttagactcctcatgttccaacaactataaatattacatatccatctaaaaataaaataaaataaaataaaaaccctattatttaaaagtcatgttactattgttaccaaaaaaaacctttttaaactatttttattatttgcaactctttaattataagtaatgaagatgatgaggatgatactaatacacatacgctaattttttttataataataagttccattttgaataaatataattggatgaaagaaaaatgtcatttggaatatgtacaatcattacttttcgaagacattaatatttgaatgaatggaagtaagtactgcgagcacatttgagtactatcatttaattattttgtcatttttcttttatttttttataaaatatatggttgtattatttttattaaatattatatttataatcgtaactttttaaatatttacaatatatatagtaggacctttgtgtcatgatcgatagaatatgtataagtaaaagtttatatataataaaaagaaataaaaaaggataggggttttaagagagggatcaccctttccaagggaaaagtagtaaaatccaaaatagggttacctgtaaatcccaggcagctttggctctatctatggaactatttgttaaatacgccttgcctgccgtcttctcttcgcctgtactgctctctctctctctctccctcttgttttggctaccttcattcatgctttcatctttctacactagctaccacttcttttgttatatatatattgtatttaac

SEQ ID NO: 202661 - DNA, 559 bp, Cannabis indica
ttagtatgtcaactaataagggtaaaatacaatgtttattttagatcaattgagtgagacctaattcacaagatgatgattgtacgtacaagcagggaccatttaaggatgtcaagtgtcatgcaaagtcgcgtctgtaatgagaatatcagagaacatgtcattggacacgctctgatagtctggtgtacaggacaaactctgacattgtgggggtccgtgtggagagttccctattggttgaggttctaagctatttgagtgactcttcaattacccgctttgagattacctcttgaaggtatccagattggtcatgataaacttttcatttcgtggcccatatggcttttttcggactagggttaggggtgtgcataaatcatccaattcaatgataatcgaccgattaaattacgtataaccgaccgccaaacattgaacatccaattgtgatcggaccgaattggatgttatttttgaatatctaattggatcggattagatgttggatggcgtgtctaaaaattcaataaatctaacatctaatcgaactaat

SEQ ID NO: 202662 - DNA, 1307 bp, Cannabis indica
acttggactgcttctaccgctgtgtatatttacgattttgtccaggctcagtggcgacgtggcactgacatgccaggtgtaccgagatcgttctttggttgcgtggcttctgaatccatggtcttcgttgcgggtggacacgatgatcagaaaaatgcgttgaaatcagcgatggcgtatgacgtggcgaaagatgagtggttgttgatgcctgacatggcaagagagcgtgacgagtgcaaaggagtgttccaccatggcaaagtccacgtcatcggagggtaccgaaccgagatgcaagggcaatttgagagcagtgctgaagtttttgatgtttccacgtggaagtgggacccaatctgcgaagacttcttggaagccagctcatgccccaggacatgtgtctcgggtggtaacaacggactcttgtacatgtgtcgtactggtgaggtggcggcgttagagaacgacacgtggaaagtgattggcagtttgcctaatgagatgcgagaaatcgcttatgtggttacctggcaagataagctactggtgattggctccccgagtttcggtgagccccacattgcttacgtgtttgacacgaagaattacacgtggacaaaacagctgtgcccgaagaatctcgactcatgttcaatcagggtgtgtttagagctttaaagaaaaaaaagaaaaagaaaatggtttttagaatgtaacatgtttttagttgttgacatttgaagtttgtgagttttttttttctttttctttttttatgtgtacatacgaagaattttgttttgaactgaataatagttgttcaattttagctttcaaaaaagcatttaattcaactataaattaatacttctcgatcttgagtacataaaacatttatttgtttctaatttggtaactattactaatgacttttggtggtagtgaataaatacaagtaataagaattaatacaagtaattcaaaaagtcaaaaaagaaaagaaaggcgttcagtgatagtcgttggatgattatggggggaatcaatactatgggccgtccattttgggcccattgtcgttttctcgtggcatgtttcatgttggagctgaaatccctcatcaatgtatgtaagaaaaaacaaaatatgggctctttttcctcgcgtgtaggaaaaaagacagaccaagtcaccacaataattaattcatgtgaattatcattttattgctattggccataagtgcttaacttctaaaaatattgtgttgaagattagtttgtaatattttttaaaaattatta

SEQ ID NO: 202663 - DNA, 1047 bp, Cannabis indica
taattagaagatgagctacattactcatggttaagagttgaggtatttaagagaagttgtcttgttttttacttcctacatatatttctcatttcaatctctcaaaagaagatttgtaatggattttgtttttcttgtctcttcgatcgatgggatagcattggtctttgttcgatgattaatatctctctcaattattctcatcatatctttactttataatatctctctctcttcatataattggagttgtattgtcacttaataagaaatattataaatattataacaccgacggcttgactaactcatcttctcgaattgtttattatgtaaaatataattaagtagtttccaatctcacaaggcatttttagccgaaatattaatatcaccaagatataaaaaatataatatatatgttaattaatcaattaatagatcatgtacgtagaatcatcaactgcaacaatattttctatctaaaatatattattatatatattctcccccaatttgagtgagttgaccttataattttctctaaatggaaatattttcgtggccttatctcttaagctagtatactatattcaaacacttttatgattaatattctaattactaattcaatttttattttcgggtaatatgtatatatataataatgttggggtccatatgcagatattatatttttgtgtgataatgtgtaaaatgaacgatggacatagagtgttactaaatctaatcaaaatctttaataaatttttattagaaagtggaactagagagggggcaagttgtttgatgctgactactcctttggagccatccctctatatttatttaagaacattggttttggattagaatttctcttttgagttacacgtgttgagatatgagtggaagatgcttaacacaaaggtgatttggttttaaaagcaaaggtagagagccacgtcaagtggcttcctgtgttgataccttctccacaataaggaatttgggataaagagctataaatgaatatttatttttctt

SEQ ID NO: 202664 - DNA, 725 bp, Cannabis indica
atatttggcaaaaaaaaaaaaaactcagccatatatttggtcaaaaaaaaaaaaaaaagagacacgtttgacaatgtcttaagattaataattgcatataattgttatcttacattttagcatgtatgacatgcaatcaaaattataacatgtagcaagatagattatcataaaattatatctcgtcgacacattaagattgcacagagaagtattttccttgttgaatgcttatattaaaggatcgatatatgcttgaccaatatatatatatatttacaaagttaatggtttagcgagacaattgtttctttggttcccacaatcccgacgatgacatactcaattcaaatccaatattagttcaggattccagaagattcactttttataatgttctttttaattttgaaattaatttaaattaattaaagtattttaaacttttatgatagtatattaattgaacttgttattatgggaaaaactcttatactattttttaatttaaaaaaatttttaatacaaataatcttctcaaggtactttattctaaagagggttgtcagcgcctaagtatagtttaagttataacttctcgtgtccttccataagtgttgggcaaaatctaacgcaaaacaccattaaagtataataattccgagatgagttcatctcaccaactacttacaattggtagtgattattcatagcttgcccttatc

SEQ ID NO: 202665 - DNA, 1011 bp, Cannabis indica
tatacaatatcacatgaattaaattaagctaaacttactaacacttgtgagagagaagatacagtggttataaatttgatcgaaaatgacaacatgaaaagccccatgaaccaaatcaccatcactggcagcaggtgtcacaataatgataacaaagagacgcaatattataactttgctaatacacaaataatgactttaattcataaaccattcccagcaaaatctcaaacatcttattaccaaaatagattttcagagcattagcaagatttgaaatttgaattttcattgttgtgaatatgaatcgttttttgtaaccatcaaaaagctcaaaagttacagaaaccaaccaacaacctcaaacttacaagagttattattgtttgtttttgttataagtaagatgcttccaagatattttattttttctaatttttgtggtatgggccgggtaagtttgaccaaacccaattaagcccatattagcttttatatgtggggagggttgtatagtttgggcatgagaaaagcaggatatgtcttcaaaactaaaaacgcaccgttttggttgacgttctggatgaatagtaaatacattggctttttttatacatgtaggatgtataatttcctgggatatctatagcgaacgatctgaagctgaaggtggtctaatttcatccaccacattggatataactgaagagcattttcggcactttacttctctcataaaggattctcaacctctaatcatcaaccaatacagatttatcatatagtaaggtatacattagaactagaagataagaatgctgtcctattttatgccactgcccactgctcttatatttattcagttataaccaacgaggatgacatgcacgctacgtgttcgaagaattgtctattacctattatcaaatgattgatgagttcaggaaaattctatggtggggtatcaatttctttgatttaaaaccagaaaataagctcttatgatagata

SEQ ID NO: 202666 - DNA, 889 bp, Cannabis indica
tcattggcaaaagagttattgagatatagtattttttttgtgattttattttgtagttttactgttgttttacaattattttagtttcttttttatgttattgtttcaggattggatcttaaatacttacatttcgactagaataatagttattttccagctattctggtgttacttgggtggttcagaccgtaagtattgaaaatagaggcttcgtatttattttgtagtgtgtgtagagtatataaaaaaattaaggtaaggacagaaattttgtaaaaatttctgtgtggcagtattaatgtatccctaaatatatttttttaagtttcttttaaatgtaattaaatatataatgtaattttaaattaagaaaaataagatatgaaaagaggaggaggatctgcatgctgtcacatgtatatatatatatatatatatatatatattgtttattataaattaatatccccaaaaaatatatttattattgatatgcatgtgttttataggtaggaaaaatacacgaggataatgtggtcatgagtaatattgatattattttactacaaactagaacatggatgcaattaattgataagatcatgttattttatatacagatttaattaattaattatgtaattaggtcataggcttgcaattaattaactgcaaagatcccttggcttaaggaatatgctaagaaatttgagagacatcaatatataatagtatatatttaataatatattgcaattaataagaacttcttaaacgagcttaattatataatttaattaattaataagcttctacatgctagctgtcactttcttataaattactcattgagatatgatattttcgaggaattgtattatattga

SEQ ID NO: 202667 - DNA, 1507 bp, Cannabis indica
atgagagaaagagagagagaggaatggtagtaatagttatttggtggattagaggtctaaagtagctttaagagtgatgattataacatatgtaatgtattatttgtaatgctcttagaccctactttggaatcattggacacttttgatcctttagtctttgccttgcattaattcattacaccacaccacacctttttctttttcttttcttcaacttttatttgttcctactttaccttcatttgctacttgttttattgaaaagatttagtatcattttttttttgaaaaaataaaaaactatttattagtgctttaaatttatttaatcacatttgagtaccttcatatttataaaattttattaatcacatttgaatacaaagtattgagtctctataaataaaacataaagtataactaattgttaatgttgattagtgcgagattagagagaaaaagagaaagagaacttttgtacagattgttattgattgtattgaaatggtattatactaggatatttatatacacagagaaagaaagtaatagcttctaatcattttctaacagactaactgtcataactaacatagtgtaatagaaataccagaaatctaactaactcccttgacaactccctttaaacttagtgtagcaagagaatgaacactgagtttggaccttaaatcaccgaacttgctgctgttgataagtttggtgaagaagtctacaatttgaattgaggcagggacctgcagtgtaggaagaaatgtgttatcctctgccaggagtaggaccactacgattgtactagttgtgtacgctaccaccctgttgcactgaaccaccatactgattgggactacttcgaccaattccaaatccttgcatttgagaaccagtaggattgctgcatatgtaaggattatggcttggatatcttgtgtgagattagtgagcgttcccctttactaatgtccagattcttggcatttttatcaattcttgcaaattgtgccataagcagggcctcgatctcagctacagagtaagaatcctttcttgtagtcacagatgtgacaaacacatcatactctggtggaagaccattgaaaatggcttcaatatgatcttgagcagtttgtttgtggccaattgtagcaagaagatcaacaatgtttttgatcttgagctggtagtcatttaatgagccaagcatcttcgtatttcgaagctgtgttttgtacagactgatatttgcaacattgagagctatgtagtactcatgtaaggcttcccaaatctgaggagtggtgtcacaagtaatcatacaattgattgttttctcaaatatagaagaaagaagccagaaaacaagaaggttgtcttgttgttcccaatcctcgaaagcatggttaattgtgttagtacattcatcatcacgagttagaaacttaggaggaatttgagtagaatcaagaaatttatgaagacgactacc

SEQ ID NO: 202668 - DNA, 596 bp, Cannabis indica
ataaaaataatatttatgataccaccctagttaaaacatgtgagattttttttactaaggtgtcaaataatcatgttgtgaatagtaattttttttacagttattattttataatatattttttttttcttaatgctaaaacattgataaaaaagagtaactaaaaaaaattataactaattaaacaatattagattgaataataaaaatattttattcaataattatatgtgatataaaaaattaacttcatgaaaaataaaaataaaaattaatagacttatttattctatataggccacaacataaaaaaacggttcctaaacaatgtgagatttttttctaaaacatttatcatcaatttttttttttcataagatgataaaccctcccaaattagtaaaaataaaaaaaaaaatcatataaaatggtatttaatttatttttttctttcctttatataaatatataaataaattgggagcaaaatcaaattaacaaaaaaaacaaaaaattcaaatcaaagttgatttagaattaggaatattatgttaattacatatcattactaacttatcaattagtcaggatggccg

SEQ ID NO: 202669 - DNA, 828 bp, Cannabis indica
aaaaagaagacaagtatcagtttttgattattgggacagccaatacgacatgcaattgggacaggcaatgtacaagattaattatgagcgtagttaatattttcaccactgcagtttgtgtgctattacttaagattaaattttgagttgtgacatatccgtacaagatgattttgagcaaatttattgtattgactctcactcacattatatgctttgctttgatttttttcgagaaaatgaataataagtgatgagcacatgttgtgatctgttttgatggtgctacaccacatggcacaaagtacgtatgagatagttccacaagcagaattaagaattgtgattatatcagtatatcttcagaatcattaattaatctcacactgtacttcttcaacgcccactccgccgagtaacactgaacgaggaaacttttattaggaatacagtcaaaagtactatatttaactttatataaaagctgtttagcgattaagtcattcagtttctattaaagctgttaggttgcttcgcaatggttcttggtgtggagtaaatttataagatattttgatgacttctaatagttttgctgagatataatttaattatagttttagaaagatagctcatgctcttgctaaaatgacactctctatgaacaataacaatatatatacatatttggtggactgtatatcacggttctttctacacatgtttatggctgatttatagcctgaagatctatttttttaatttttttttcaagtaaaagaaaaactattcatgctaaattgttttagcctttgttttttttttttt

SEQ ID NO: 202670 - DNA, 1213 bp, Cannabis indica
agaatagagattgaacctgaaagcaatcataaatgatactgctatttttctttgaatttctaagatctgaatgcagtgtgttaagaagccatgacataaattcaactggatccgactgagctcctatcctaaaacgctttttactggctttcataactgcctgcagaaactcgtgtgggctcacctacagattaaaagttaaaaactataaacttcatattcaagaatcatagattcaatctttaatgagactcttaagtcttcacaaacctgtcctttgaagtttcttgtatgccaaatctttcgtgttagctcaccatatcggtgaacaagaggcgatttacagtgttgataattctcaggaatgaggaaaaagtttcttaaaggagttactctcatcagtgactgaattgtaacattcacaaaatcagtttccttaatattattaagcccaacctgaaatttaaaaaattgagaaaccacaagaaaactgagaaaatggtccagcactaacattcttgggaagcaacacacaataacaacaacaagaatgcttgctaatagcacaaaatgagtaccattccaggaagataatcagaaccgtcaagtgcccttgaccacagcttatttttgtcaagttgttcaacttgttcgtgggtgaacctgcaattatcaatatattagttctgattatctatgcaattatgaaacttaagcagatgtctatacaataattttatctctaagaatcagttaaatacatcaagcaaccatggtaataacgcccttcaaactatatcaacatatgtgacagccaaaaagtataatataagctttttttattgtcttcacgtaacatatatagcccatcaaagagaagttggcgacaaaaaccaaagaaaagaggagatgcaagtaaaatgtaggaactagaaacaaaacatagacacaccttggatttagaacatgccgaatatcatctaatgacggatcactaatctcatatccatcaggaaggcaatacaccttttctgtttgaagatttataaaaacatggtgtccggcttccaaactgtgagtgtaagcatgagacttcctcccccttccttggtaatatttcccacaaaccaaacaggcgtagacattcaaattcgacagagaaacagagcaaaacttctcaaaatcaaaatccaaaacctgaccaggagttgaa

SEQ ID NO: 202671 - DNA, 2508 bp, Cannabis indica
caagtactatgtgagcataatgcaaacgtggattccctacataaactagtcaaacaaagcatcaatgaagacttggagcctatcctcatgatcgacagtagtccatcatggatgaccctgattgcacaatgcttagaacaaggtattcttcaaatagaccagaatgaagctaagaagttgatgataaaagcaactcatttcatcatcatggacaaagtaatgtacaaaaaaggctattccatgccacttataaggtgtgtcataaaagaagacgccaagctcctcatggtcgaggtaaatgagcgtttctgtggcaaccaaattggtaggcaaagcctctcaaagaagatactgaaataagggtatttttggccgacaataactgaatactcgatggactatgtcagaaagtgtgacaagtgtcagagatctcaaaaatacctagagctgccttgaatgtactcaaaagtatgtaatctccctagccatttactgtctagggaatcgacctcataggttcactacctaatgggaaaggtggagctcaatatgaagtagtagtggtagattacttcaccaaatgggctgaagtagagcccttagcaactatctcatcaaagaaaggttcttgattttgtggtcaaagaacatcatttgtcacttcagactcccatagaagatggtgtcagacaatgcaacgcaatttgacagtgatctttatattgatttgtgtgacggaaacggaagcattaagagtttttcaccggtcgcttacccattatccttgagcaagccaaagggaactagcttgaagaactagttgaagtactgtggtcttaccacactaaagaaataatagtgaccgaccatactccttttgctctaacatataggtacgaagccatgatacccatagaccttacacaactaccacatcagagacttgcatatgacaaacaaaccaataaacaactatttgctgagtccttggatggaattgaagaaataagagaatgatctgagctcacaaagacaacgtattagtaaagaattgcaagacactataatgccaaggttaaagatagaaaattaaagcctggagacatggtgttacgatgagtattcctaaacatgaaagacgcattagcgagggtactggacctaattgggaaggaccatatgtcattacagaagcactagaacctgaaacaaacaagttgacacgctatgactacaacttaaatctagtgctcgtaccaaggtacgggaacggggtgcatctacaacaatatcaatgaagaaactatcttcaaaatagcttgcttcacagtgagattcactttaccttgtgcaagtgaattgatcacctcttaaatcgacaatatgcgacaaagtcatatttaggttaagagttccatcgctacggtatggcccctattctactagccgaacagggaattagtgtagtggaaatcacttcagctaagctttgatgaaaaattaaaatctaaaactactagttcttttttgtcaacttagctcacagtaatgtagttgtatttaattttgatgaataaaaatgttgaacaaatatttttggtacttcattaacattaatcaattacaactcactgacttaacaatgctctcaagcgttatgtaaagcttgtagagttggtgttgagataatttcagttgtttctttagttagttcaacactgccaacccatgaatctctagataagtagttggattctcacacgtgtaatagtctcctaagagtcatgatcaagaaagcacagggggatttggaatggcaagtgaccaatgaaggcacttctttgatcacttggggggcacataagttatgttatggtacacaagagccatatgttatatgagcattcaaatttttttgcatgcctgtgttataagtacttccatgtaacgataacaataagaaatattgatgttactcccaatgactgagtttcttaagacatggaatactgtgcaagtgttaaaaggtcaagcaataatggataatgtaaaaacaaagaagcaaacttcaaaataaagtctttattaagtttgaataatttctaatttaatttaaacaagtctgataaaattttaataaggcttatctacatcgaaaggccaccaaggataaccaacttacaccctaaagctaaaaagttaaaaagaataataaaaaactaagacaaggtcctatgaagccaagatgctctctatgtcaataacaactttagcttgttcttcattctctattaatggcacattgaggaagaatgtcaggatgctcaacttgtagctttcgatcctcgcaccttcttccaccactgggtcatcaccattcaagttaaagtcaattgtttgaagagcatcagcactaaaacgctaatcgcaacactctttaaagaatgggatttctatctctatgaaggcttcccaattgaatgaccgtgctcttccattggatgacca

SEQ ID NO: 202672 - DNA, 1404 bp, Cannabis indica
ttggtgaatggtccaattattgatagctgctaaggcaaggaaagttttcagagtattgaatttagcaacgggtgcataggtttgtgagaaaccaattccttctctttggttaaagcccttagcaactaccagggctttgaacctcacaacttcaccaacttcattgtatttaactttgtatacccactcacaaccgatggctttgtggccaaggggtagcttttttataatccaagttttacattttcaagggcttgtgtctcacaatccatgcctgaagccaatgtcttaattgagatgcctcttcataattttttggttcattctgtgtgtatgcggctaagacagcagcacgaaactgagggttcagttttatatatgataaaaaagattcaattggataggctgtggaagacacatgacatacataatcctttaaatgagatggttttgtgagtatgcggcctttggttgaggtagtgagacttggatttttgttagctaccttttgagatggtttagagatactcagattagagacaatgattggtgttttggctttttcagaagcggttgttggagccttagcagtaggtgtttttactgcatcagtaaaggggttgtttgctgcatcagtatccattgttggtgctgtagcagtaggtgttttttttttgcagcagggatgttgttggctgcatcagtggctagtgtgggtgctgtagcagtaggtatgttgattgcatcagcggttttttgttggctgcatcagtagccattgtgtttatcacagcaggatgttgatcctgtatggtagggaaatcatcaagaaaatgagtcttgtaaatatttgcagcatttggctgtgtttgtgttaatggtttcttgtttggtaacacggatggggagaaaaaattgtttatttcctgagatgatgtggtgttagtaaaagggaaaatttgttcatgaaacacaacatcacgggaaatataaatttgtttggatgcaatgtccaatagagtgtaagctttcattcccataggatatccaatgaatatagattcccgactcctaggagaaaatttatggtgtttggactctaatgtggatccatatgccaagcaaccaaatgatctaaggtgatcatagttggggcctctttggtaaagtgtttcaaaggatgtaagacctttgaggagtttagaaggagtgcagttgaggagataagtggcggtagaaatgagataagtccaataggtcaatggtaaatgtgattgaaaacttaaagcttgagcaatgtttaatatgtgttgatgttttctttcaaccacagagtttttgttgtggtttttcaacacgtgaatgatagtgaattatgccctttgaggcataaaacgaagtgag

SEQ ID NO: 202673 - DNA, 2091 bp, Cannabis indica
tctctctctctctctctctctctctctctctctctctctctctctctctctctctctctctctctctctctctctctctctctctctctcttcttcccttttgaagccctaagaaccaacaagaatcaaagcaaacttcttcacagttaaacctattcttagctgaattaatcatgtatatgagttgttcaagctttgaggtaagttctccacctattcttcttgatttctaggattttaggttgagtttctttgagattttgcttaaattcaaggttgtatgattaattgagtttagagcatgatttttaagtttaattaaaggttgtttaattatgaatttgatgtttctatggttgttatgttttgatttgattgatttcagttcaagaactcaaatcaactatggtggatttgcatttttagtgtaattatgagttttgaatgcttgattatgttgattttatggtattgcaatattctggaaagttttaataggtttggaggatttttgattttgttttgatgcaaaaccaggggttgcccgtttctgcagtagaaacctgttcaacggtcctacaaggcactatggaactggtcaatcggttgaccagtgtggaaaccctattttctgaaattgtttatccattcgaggtactttctagaacttagttttaggtgttttattgatgtttaggctatttttaagctggtattgataagggtttgtccttgagtttagggcctattttgggatttggttaagttgtttatcaagctttcattgtcgtgacattttaggacttgagatctttgagcgttattcaactcaggtcgatatacacacctaattttggatttgaggtaagaaaagtcaattgcattgcttagcatgtcaaataagatacgattattatcgtttgggattcgattatgatcgaggtaaagatacggtaattaccgttgttaggaatgagttattactcttttttaaaactgttgataggtttcttacttgtcaaatgcttaattaagcaacgatagtgacataagaaactcggtggtaacgaggggtatggatgttttataaagcatcgtggttggtttgtcttataaggggaataaattaatcgttattatttgattatgctttgaataattgcatattctatatatttccttgtaagttgtacattgtttaaatactatactttatgtgatgtttgtgttttacttgctttttttgctaagtctttgtgactcacaagtgctctatggtgcaggtaaagggaagtgaaaactggaccaaccatgagtcagatgtctctcagaaatgtacatatcagtcgccatattttggctctcagtggacaggatccttcttttgttgtattttgaaaatgtgacaacattttgtaataagttgttttgtagcattttgtaaagagtctataattaaggggattcccgaatccaatggtattttgaatagaaagttaagttatgatttaaattattttactaagagttttaattaaactacacttttattaaaccgttagtttattattataaactaattcataaaaacatacacgtggcaccctcacggttcaggacgttacatttaaattactgtgctaacctttgctaattcaaagggtttagtaaaaaatgcatttaataaaaaatttataaataaacacaaactttactaattatagtttacaaaaatttataaactttgggatcctgatttttttacaaaatgaccaaaatgtaataatttaaaacgtcgcctagcgaccaactcaactgagcccatgttgtctcaaagatcgaactctcctgatcgaaccatattgatatgtatgatcttcgtagagctccagactcatttttgatttagtctcgtcctttacctacacatgcaaacaaattggtgagtcgacaaactcaataagaaaagcataaaatatataaagatatttttgacttgtaactaggtgcccatacacctacctacaaggcttaatagatgaatcaagaatgatcttaatagaactatgacttctataccacatgcactaa

SEQ ID NO: 202674 - DNA, 508 bp, Cannabis indica
ccgaaaacttagattgattggtgaaagcatatttatattgatcccatatatttcttgtaattttcaggcaactgctgtggaaggagttgagaacagtctcattactgattacactcttagagtaagttcaattacaaaggccttcttattattttatttttcaaataaaaacaaaaaactttagttaccaacttttttaaaactgggacaaaggagaggaagattactccccaacttgtatatttatgaccacaattttcttatctagcctcgcctactttgttgactgttgtatttttgcaacgtttgttaattcacggagtggggcccaaatcccacatatatccactctttatttctatctttgttgactatcggtggtcgttcaacaaccttgttgtcgaattctatattatttacacacttaaaaagaaaaaaaaatattaatcgaagcaattttttttgggaatcattgatggctgatttgatgttgacacgtggaacagat

SEQ ID NO: 202675 - DNA, 773 bp, Cannabis indica
aaaaaataaaaaaaaacaaaatagttcccaaacaactttataaatataaaaagctaccaaaaactaaacatgaaatcattaggaaaaaacaagagtgaacttgaattttagataaataatgagagcataaccacataatttcatggtttttgtaagactcatttaacttttattttattttttatttaaatggatttaacatttatttttggtattacattattattatttttttaagaggatttttgtcttttatatcatttcaattttttttaatattcaaagcaaacaacccataaatgattctatttatattacagttgatacttcattgtcacataatacaagaagtttagccaattaagatccaaaataaataaatcataaagaaagaaaatgataaatttaacttcttttcgtgtcattttaaatttgttacgagtcacatctaatgtttcttataataagtaaaagtaatccacatgcaatcatcatcatcaccatcaccatcatcatctatttagaaatggtgatgattgatgagtatacctaaccaaacaatatcatagttattactttatccaaaaaaaaaaaaaaaaaaaactaaatagtaatagtaattagtatcaacaaacccatatataataacataaaaaaaagtaaaagtaattacttattacaaaactttagtaaacaaaaatgtcgtgtttcaaccattggtttaaggtgattaaataccgaaaaatagaatgaataaagtctgtcgggtctaa

SEQ ID NO: 202676 - DNA, 1144 bp, Cannabis indica
tcaaacaatgtaatcaacactttccattctcatccattaattgtactatttttttctagtgtcaaaagccatttatatatatagataaaaaaagttaaaaataaaattatatatatatatatatatatatatatataaaaaaaagaagttatatatattctcttcaaagacaaacgctcctccaccaacaaatatattgctaatttgtcctctttttttattgcattattagctggtaagtcaattcacttttttgatcaactaatagattatattaattgaacttaacttaattagatatatatagggatattaattaatatagggatatgattttgtcatgtgtgatgtactttcacggaatgtattccgtgatacattaaatgaatgtcagggtacgtttctactttttaaccataattatccctagatcaatcttagccgttacatcaaataactccctcattgacggctgccgtacatcacaaattacaatccgtaaaagtacaataacagaacaaaatcatatctcatataatatattaacatctttatatattaatttcatttcatgtcttgttatttctctttatatatgatttaatatatagcaaaggaaaggtccaaaaaatgccagatttgtagggcacagaggaggagtggcccaaagagagttagcttttgttaaagggaaaaaacccattcatgtcacacaacacaaacagggacagtagtggcagtctaatttctacagcacaagttttcacacattattttctaacaaaaaagcacctttaatatattttatatataagtttatcttcactaccttaccaatcagaaattgtttttatttttaatatatatatgaaaagttcattttttgaatatggaaaaagtttaataaagtagagagatggattattgccccagttgtccccatatatggtacatgatactattactacccgtatacctagatcactaccaaacaaaatacatattttcatgcatggatggtaccatatggtaaaaaaaactaaaaaattagtaaaattagtcaaatttacaataggaatagtttgataaataataataaactttaggactttcggtcgtactaataatatatatatatatatat

SEQ ID NO: 202677 - DNA, 2616 bp, Cannabis indica
ctgaattatttaaacgctaaaccttttccacctacgtgtcatcgcccggttggtccacgtattttggacaaaatcaggggcaacaaatactattataaattattaaaatataataaattatcaaatttaaaaaaaataacaaagcaagcttttgcgtcagcaaaacttacccaaaccatcaataaaatatgtcaggtaagttattttttggtgcataaatgcaccggtataactatttcctaccatattccaattggcgggtaaggattttacccgccaaataaaaaaactcgcaaatttctacaccagtaaaagtcattttaccgaccaatggcccgatttaaccagatattaacaccgacgttagaatttttgttggcacataaactcgcaagtaaacctagttttgccgacgcatttggatattgcgccggtaaagattgttttaccgaccgagtattacgggaaagttttcgtgacgcatttaggtgccgacaaaagtttaccggcgcgttgtgcctagttttgttggcgcaaatttgtgccagcaaaagtattttttttcttataatgaatatagccccaataatcattatacttcacccccactatcaaatatgatttccaccagtagataattaaaaaaataaaaaaaatagatttttaacaaatatttttgtgaaatggaagccctaaaattaaatgaataggctctgataccacttgttaattttcaaacccaatgagtattatataatcataatgcatcccaacaacaataattataatactcatcaaacagctaaaaatcaaatcattttatttaagacattgaataataataaacataccttaatattgacattctcaaaaaagaatgtcaaaaacgaagatataagaatggtcccaatttgggttcatttagatgatttggagttgaagtattggggggaaaggtctcttttcaagattatagggcaagttggtaaaccggtattggttgatgaagctactaaaaatagagagaaactatgttttccaagggttctcattgaagtggaaattgagcaagaattaccagatttagttgaatttgaagatgaaaatgggtgcaccacaacagtggccatttcctatgagtggaaaccgatcttatgtgcccattgcaagggtatgggacataccacggatgattgtaggaagaaggacccaaggccgaagcaacattgggtggccaagaacactgaaaaacaggaaaaggcaaaagaagtagtagattcagagagatttcagcaagtaacaaaaggtgttaaagtgcgaacagagagttctcttggggcagcaacaactagtaactcttttcaaattttagaagaggaaaaggacatttccttgggagatgagatgagagataaaccgattgagtggaaagggaaacaagtaaagtatgatgacacaggagaggcgggagctccctctctaactcatggatagaattatgagttggaatgtccgaggaatcaattcccaacaaaaacaaaatctagtcaagcaattgattagtaatcaaaaggttgggcttgttggtctcctcgagacaagagtgaaggctcggagtcttggagccttgtatatgaggatgtttagtggttggtgttttactaccaatattgcttggcataaagggggtaggattattgttagttggaatcctaattcctttcatgtcaatattctaaaatgttcaagtcaactaatccacctctttgttgaaactttagacaagagttcttgtgacctttgctacggttttaatgatgaggagggaagaaaggagttatggaaggacctaaaggagctcaatagtgataatgcatggttggtactaggagactttaatgacatacttgaaaaagaggagagagttggaaatagagttcggttcaaaaagtctttagcatttcgagatcgtgtagaggattgtaaacttgaagatgtgaaatttgttggtaagtattacacttggtgtaaccaacaaaaaggggatgataggatatactccaagattgatcgagtcattgcgaaccaagaatggttgaatacctttactgcagctgaagtgtgttttcataatgagggaatttttgaccattctcctgctgtggtcaccatccgagaggcattttcagggggaaaaaaaccttttcggtacttcaggatgtggtctaatcatcctgagtatgcgagtttggtagctggaagttggaatcaggatgtccaaggcaccaaaatgttcaaagtcgctgcaaagttgaagagattgaaagctgtgtttaaacagctgaacaaaacacagtttgccgacctacctgctgctgtggagagagcaaaaatccacttacaagactgccaatatgctttgcaacaacagccgtttgatgaaactttacaagcccatgaagttgaagcccgagagcagtttgcaacaaagcaggctgcttacatgtcctttttacagcagaaggcaaaggtggcttggctcaaagatggagatacaaactcagctttttatcataacagtatccgtgttaggaggagccagaattgcatcctgtc

SEQ ID NO: 202678 - DNA, 630 bp, Cannabis indica
aaaaaaaaaaaaatcactcctttgctgttttttttcctttcttttaaccatgcatggacatatataacatatttttttaatattatatccattatttacaattgtactatataccatataattttttttaacaatacattagtatatttttttttatccttgccgacataataataataataataagttaattgagtaataatgttgttattaggtggatgagagttcaataattaatagacaaagaaacattgattagaaacacatttgtagtcatttaaatgtctcattttacagtcaagtcactttaattcattaacacataacataatatatctttgaccttaattccacttcatgtttgtactaaattttaaataattagaaactaattaattaaagctaaatgtgttattaacaacattttgtccaaactaaattcaatcatgtctttaaaagtcactttagtattgggctaagactttaactattccacttaaattaaagggaaattgctatgcatattgcagtttttttactttttatgggttttttttttatattatatttttatttttataaaagctatttttattttgtagatttatgttatttttatttttataaaaa

SEQ ID NO: 202679 - DNA, 1165 bp, Cannabis indica
aggtaccttgtatactctattgttaaatggaagactggaaccttcataggtgaaaatgggctacattaaggggatcagatttcactattgttatttattttggttattgactatctcactaggtgtctattccaagcttctcattctaaacgctttaggtttcattctatatgtaagtctcttaactttattaatttctactctacagaggactttgttatgttttgtaaaggcaatgttccttctttgaaaattgtccaagaaacttttgatgagttttgtgcagccatagggttatctacaaatgggtccaaatcttccattcattttgaaggggggaacgaaagaaagcaagaaatgcttgggatatcgaagatggatgaaggttctttcccttgcgagtgcaacataggccaacaaaatggaggtcaccatgatggaattattagaaaagttaagaaaaaattacatagctgagcgacttgtcatctttcatttgtgggtcgtttttagcttattcattctgccttgttgggtgtccgtaattattgggtggggatttttatattacctcagaaagtcaatactttaattgacaaattatgtcgtgatttcttatgggcagcaatagaaatcgcagtaaacttcactttggttcttggaagcatgtgtgcttgactaaggactatagtggtttgggtttttgaaaaaggaagaagtggaacattgctttgatgacaaagtatatttggcctgttagtaccaaacaagattgcttatgggatcggtggatcaatttggcgtatctacagacgatgggttttggtctttgactcctaattttgatgctagttggtatgtcaaaaagctaattaaactcagagattgtattgacaaactagcaatgatgattgttgggatcttgggtagatacaaggtgaaaagctattatcattctcttatttgcctggacaaagttaagtacccataagttggtttggcatagatttactgttccaaagcataaatttattttctggcagactattaacaattaacaattaatttgttgactcgtgacctgattgacaagttcatgcctattaactctcttgtgtgtcttgtttgtgatcttgaaaatttataataaaaatgattttattgt

SEQ ID NO: 202680 - DNA, 1150 bp, Cannabis indica
atatttcgaatatcgaatatattatacgtgattaaacattaagggcaagacccagggctctttcttcgatgttgactctaagctttggtgttcgattggccacgtttctgcgtgtacatcttcctggaggcgcccacagaataagaactgctcgcatttttattcactcaccacaaccgtgcgtgattggtcaaacttttatcaccccaaaaaccctctctcctatttttctgataaataattaatttttatgtactttttttttagaaatttttatgtacttaccctaaccataaaaggctgctaacttgaaagataatgtcggagaatctacaaaaatatgttggattttgttattactgtttactgaacaattaattttgttattaatagatagttacccatttttttaggaaaaaaaaaattatataatgtttttgttaccttttttttcccaattttatagttatttgaatcttttatataatgcttttagaattataaaaaaaaaaatacataaaagtgagtaaatttaaaataaatccattttgtttggtaaacttttacgggtcgggtcatatcaagctctttataaacgggttgggttgggttgggttttgttttttttgaaaataagcgatgttgggttgggtttggattttagtttttaacacgatttttaataaatgagtcaattttgagtgtgacattgcttgttatacttaagtctcgacacgacacaaacacaatccatgaataatgctgtaaatttgagcatgtcgtgctagtccgacccatatttgtccatactttttaaaatacgggttatgtcattttgggccaatatttttaaagggtaaacccaacacgcctcgtaggtccaatatttttgtgttgctctcaaattcgtatcgtattttgctcatatcaacctattttcatatcaagactcgaattcgtactttactttctcatattttttttttctttcttacaatcactaaactaaatgtatattgtatgacttcagtaatattatattctttcaacaatatttaatagataatagcatacaaaaaatattagcattatcatagtttgaatattcatttatatatactcaaattttatcactctataaataaatttg

SEQ ID NO: 202681 - DNA, 799 bp, Cannabis indica
tgcctcacaactttcatggctacagaatctttagcaatacgactttgtgcatgccttttggagtttttgccaataattttgtttccttgtcttgtgtttccaatcttcattgatttgactaacataatattcttctctgaatccaagttcaagccttatacaaagagagttttcagttggtatcatgagatagaaaatagagaagcaagaagaagccctaatgaaaacactactttagaaacgactagtccaagaagaagccctaatgaaaacactgttatagaaactactagaccaagaagaggccatactactacagaaattactactccggtcattccaggaagaagccataatgaaaacaccattacagaaactacagtccaggtaacgaaaacactattgcagaaattactattcccgttagtccaagaagaagccataatgaaaatgctaccacagaaactactagtccaagaagaagccataatgaaaatactattacagaaactactattcccatcggtccttaataaatcagtgtttttcataaactaaaaaaataatttaagtgttttaataatagaataataattgaaattccgtattttaatattcccagtttaattatttaattaagtgattaattaaatgcggaataatgaaactggtactgaaaacagtttttccgtagttacagaatacaactctgtaactccagagaaacccagaaaaacaaacagtgcataaaagtaaaaacacacaagatttttgtacgtggtttcaacaatcctttcag

SEQ ID NO: 202682 - DNA, 609 bp, Cannabis indica
catagcgttaatttgagataaggtgaggtgaatatcagcagctgtaaattcagttagcagtcggtcattttgggttctgctgaagcgtaacggcacaaatcgttgaaggttttctgttgtagcatgaccaccatctgttgctgagaaaagatcttggaaatggtcacaaatagtgctttctatgtcctctttagagctcctccagatcaggtttttatcaaaaagtccattaattcggttcttctttcgccttgatgttgctttttggtgaaaatatcttgtgttgcggtctccatgggctaaccaaatagctctactcctttgtttccaaaacaactcttcttttgctagttgaccattgaggtctttttctagaattttaagcttggtgaagccatcggttgagtggtcattagagtacttctccacctctttttttagatcttttattttggcaaggttggtcttcctttggactttattccattgatctaacagagtaccacagttatttattatctcagcaaggtctgtagccgaggtaatagaatttccttctttccaagtgtcttgaattatttgttgacactcttccttgtcggcccaagc

SEQ ID NO: 202683 - DNA, 557 bp, Cannabis indica
agtagttggatttgaaaaatcatgattcaatccgatcaaattagacttcaaaatctaatcaaattcaatctaattactgattggactggattagttttttaattgaatatccaattacacatttaatttttaatattaatttaaaaagtgaagaaaaatacataaagactaaatatctctatttctttaagtttaatactctataaaaaatatcattattacaggtataatacaactaaaaatttgaaatgagtaaaacaacaacattacaaaaaaataaaatagaacaaaacatcatgaaaacaaaaatacaaaaacaacaaaatgttataaaatttaactaaaagaaactactaaaaatataattcgaaaatatattttttattattatacataaagaaatataaataatttttttaatatataaatctaattagattggatcgatttttaattagattttgagaatgacatacaataatcaatccaatccaattataatatctaacttttaacatctattctaatctaattgtcattgaatatctatttttttt

SEQ ID NO: 202684 - DNA, 453 bp, Cannabis indica
tgttgaaataatagaaaaatctataaaaattgaggaaaaatatttgaagtccaaaaactttagaaaattatttctacatgtaaagcatgaatatgaatgttgtttgagctaaaatgaagaatgatttagttgatcacctgatgtaacactattttatcatttttttagctaaaaatttgaagataagtgattttaattattcttaatttaatgttcgtccacatatttgtaatccattaattatttttaatttaatgtttgtccacatatttgtgctttcctcatttcttagttttccgtgtatttgattttgtcaaacaagaacaatattaagtactttatcatttcatgtcaaaaaaaaaagtactttatcattttaatatcagaaaaaaaattattttatcatttagtaattttaaaaatttattggaaagggtttacattatcttatta

SEQ ID NO: 202685 - DNA, 1287 bp, Cannabis indica
tctctctctctctctcatcacattgtgagttagtcggtttagtttatactggggtttgagtctcaacattttctttatggggaagttttggtaattggacattttaaaagattttttcccaagttcacttcctgggttttaagttctggcactttccgtatttttctttgctttctattgagctttctagatttgcttatccttatggtgagtaagaaaacaaaagaatgagagaaagacacattgctcattgttatgactccacccaaaatattataaaaacacactgtttataagttaatattttggtattgtatccaaacactgtctgtgatgctattggcttatggtattttgctttgttttacttcagtggtaatcatgcatgtccatgttatggtttgacttctatttttacttcgacaatctagttcttacatagttgttttggaaaggaatttctgctaacctacaacgttattgttttgtttcagtcggttcttacaatatagggaccctcgtgctcaaaggcggcaccctctggttgatcctgttgttgtttctgagattagaagatgtcttgtggaaggaattgaattccagggtgagctccttaatttcaggaaggatggcacacccctagttaatagactaagacttgcacctatacatgatgacgacggaatcgtgacacatgtgataggtattcaggtttttgcagaagcgaaaatagatctgaaccgcctatcatatccagttttcaaagaaacttgtagtcagcagtttaatcagtcagggaagtatccttgtattactggagaatcaccaatcaaccaagaacaacaaatctgtggtattcttcagctttcagatgaagtcttagctcacaatatattgtctcgttgacaccaagggatgttgcatccattggttctgtctgcagaaggattcgtcagctcacgaaaaatgagcatgtgaggaagatggtatgtcaaaatgcagtgggggagagaggtcactggtacattggaactgatgacaaagaaattaggaggggggcgccttgctcgggaattgacaactcttgaggctgtatgttggagaaaatttacagttggaggtgcagtagagccgtcacggtgtaatttcagtgcttgtgctgctggcaatcggcttgtattgtttggaggtgaaggagttaatatgcagccaatggatgacacatttgttctcaatcttgatgctgcaaatccagaatggcgtcgagtgagtgtaggatcatcccca

SEQ ID NO: 202686 - DNA, 1222 bp, Cannabis indica
atcgctttcagggagatcatgccccccttcatcttatcactcagattatttttgaggtcacacccacgtgaccttgccttctactttttgaccttcttgtacttagcatccaattgctgtcacaaatttgcggtggacaaattttcattgaagtgacccatgggagtcctcccatatcaatcggtagaatttttagggggattaccttgccttcttggcttgggtattcttgtggtcggtccctttagcaaaatttctcctcgagggtcagaagggcatctaggctccaaagcaccaatggccttctgcgtcttgagggctgaccagccatggtcaagtcttattgaggaggttttggagcagaatttggtgggagctcatcgattttgcctttatctttatccttacaagggtttgaggtttgaggtttgagcttcagtttattcctgggttcgcccctcgtccacaacttccactgagggttcctcatctgattcagccaagtcgtcaaacttgctctgaagttgttccatcatcttcttcatatttgtagtcagttatctttgctctgctaattcctcttgagtagcttctaactcttttgttacttgcatcacattagggtcatggtcgtagtgataactatccatgtagttaccatcttctacgtactccccgtcgtaaccttcttcttcctcttcactcccagggttttggctatcaccaagatcatcgtcgacattctcagtatcaccttcttggttctcagcagggtttacgccctctccatcatttccttcttgaggttcggcagcatgggagtcaacttcctccataatcgtatctacaacagttttcttacccgtacaccatggttgaagcacgacgagggttactgaactttcctcagctctcaatgaaagcaccaaaatgtttatcgagattttcgaaaaccaaatatgtggagcttaagtaaataaaagatattaaatcatagacaagcagattttttacgtagtttaggcattaataatccttagtccacgagccaatagtattaccctctttaggcaagtgtttaggtattgcaattgtttacaataatgatctctgtactcctcttttttttcttcttacgagaaagctctctaggaattttagcagagtattggtaaataaaaaattagttcactccctactcaaagaaataggagtatttata

SEQ ID NO: 202687 - DNA, 1093 bp, Cannabis indica
gttatcaccgtcattctatgcagtattgaaagcttaaatgtgaggagccaaaacgacatgccgtttggaatttttggaatttaagttgccgtatttcaagccagaaaggacaatattattgatctagacaattaccaccaatgaaagaacatagaaatcatctgaatctgatagaggtatatatttactttctgttatatgtttctcaatatgctatttctgctattcagtacgcaggaagttccatagacaatttggcaaagctgatagattgtatatgaaaaatatcatatccccatttatgtgtgcgtatatatatatataattatatatatgtataatgcatgtaggaaataactttatacaacaaatttaccaaacataatcttctcctgagaccataacttacaacttggcaaggcctacctctttcttcactcttccatccaatctactccaattgcattaagcagtgaaaaaatcatattttctttgcaatactctcaccgttcataaaagaattggtcggttttgaaaactatataatagatgaagacgatgacattgttcatccaaactagaaaatcatcatcgggtgtaccaacaaatttagtcctggccaagaaaaagaaacaaagaattattgaaccccgtttaatcaaatattgatgtaggaaaaactctctaagaggcccttggcgtttttgaacatgaaagaaaaacgaactgaactgaattgaacttctgagacaggttgtaggttcagaatgttgttccttaccttggattcattgttgtggcttgatgaagaatcagaatctatatttactgatgtttcggatactcttgattcggacttctcgtttgagtaactagaggaggtgaataagaaaaacatgtcaaaaatcctcttttatttaaaatgttcagtaacaaaaggatcaagtcagataagatgtccaaaaaaatctttacttgcacttaagaatgaggacgacacaaataagaaaaaccaagttcactagcagacaatagacatgtgatgctgaagcagaaatcagaagtgaaccaaaacagttcagatgatttgcat

SEQ ID NO: 202688 - DNA, 1001 bp, Cannabis indica
gaccgggaacccctaatggggcaggtgggtcggagaatgtcctaatataaaaataaaattttatattaaaaaaattaaaagtataaaaatatttaaatataaaaaatattaaaatattacacattatttattattcaacatatttattattattatctaaaactctaacaaattagaaaaattgtgctaatatactaaaaaagaaaatataaattataaaatattattaaaaagataaataaaatataagatggtaccgtcagagcaaggagtgtcatccccgtcctattttatattcggagacaaaaaataatctccattcccgcctcataagtaaggatgtaaatggggcgagtcgggcccgacccactaccgacctaccgcggcccgactcattaagttttttgagttggggcagatcaaacttaactccgtttattcgggtcgggtttgacccagcccaaatctttttccctttgtttaaactaacatttttaaaaaaattatatacattacattataattgtattaaaacttgtttacactaaaagtagccctagtgacataaatataaatgtttgacacgtggcaagaataaaaatattctcgaaatgaaggaactcgagttatagcagtcaacttgggaaagggtccctatccctgcgcctaggttgacttcgaggttctggaactgccaatttgtttcaaagtcaccgtcctttaatattctaagtaatgaagacatgaagaattcaagtccagggttgaaagttgaaaatacacaaaacagcaccccctaaagtcaatctaggtgcctagggtttcaccaatcgcccatgttgacaatccaactaggatttcagtttctgggaccgtcttagtgaaaatgggtcaaactttgtactaggacataaattagacatgtcacgaacatatttgagacatcagaatcagattcagagcactttcattttttaacacccggagcaccaagtgcccca

SEQ ID NO: 202689 - DNA, 722 bp, Cannabis indica
ccccaacagcaactcgagttgaataatgggtctaatcctacacctttataaaggcccattattatcttgtcaagggctcactcatcaagcttgttacatacacacggccctagaaccccccccaaggggcaacatgcagcagattctacttgcatcaaatcttaagaacaacaagcacaaccttcaatccacagctcaattcaaaaccaaggccccatgtcactttttataagtttgtgaaatttaccaaaacccaattccaagcatgtccaagaaagaaacttccaaacattttcactaacttaagggagagatattttatttaaaataaaaatacaattcgaactaaggcaccaaagacattaattaaatttaaactaagaaggcatctaatttaatccttcaatcttcaacaaaagtgatttgttgcctcgttaaagactcaaaatgtgatttttctcactatataaatacagaattatataattaatttgtacaatcccaaacccaaataataataataataataataataataataataataatatagacttcatccgaaacctatatatataaatataaatatataaaaaccaaattcgtcccattaaaaaatttgtggcctcaaagattctcacctgagccttcctttcactttctctcactctcatatcagcttcttcttcttcttcgttacaaaccccaagatctgagccgga

SEQ ID NO: 202690 - DNA, 1523 bp, Cannabis indica
attattataattattcaaatttattattattttataagttttatcatttattttcatattttaaaacaaatatccatgatatttattaaaaatatctctgatatttctatgagtttattgtaatgatatttctaccttgccaatatatgataaagaaacaacattatgaattaatctaacgtacaagataagtcattatgtgttgattgtattttcaattgaaaaaaatgctctctcccttcactatacacaattatcccaccttaagcaaacaacaatatctggaatgcaacaccccatataattacattctaattttttatgcataaaatacaaggaagaagctagtacaaaaataaagtgagcaaaataaatacctccctcgtatctcgacacatcctatactgttggaagtaatgttaaacagcaaaatcttcgccaagatcacaccttccccattgcagacatattcagatcgcagcttcttcgcagattgtaacccgaacatctacaatcacatgactccaactactcttttcaacaaaacattgaaagagcgcgtattttttcaacgtgtatcactctgtaaatgccttctcaacttgaacttttaaaactgtcttctatgtctacaatgaaacatgcttaggcatgtttggctaatatagacatggaatataaatggatttcaaaacaaggaactccagacagctccatccccttcaccacacttatcatgaacatatttaattttctccacggatttgcagatcccactacagctccaatcaaatgatgcaacacagacattgcctgcctgtgccttccactcacaatctgcaatgcatttaagtaaaagagaatcccagccacaaccaattcaaattactgtacaaggcttaggtgtgagcactcattatttgatgtcatcatagaatatgatggcataaaaactttctagatcttgagaatttcgtattatgttgaaaaattaaagtaaatgaaagatgcatgcacaaactattccaaaaaagaaaaaaaaatggtagaagcatcagatatgctccgtgattgccttttagactcacaatatttgacatttttgctaggtatggcgctactagacattcctaatcaatcttagctctaaaaatagtacctggtggagtaccacaacacatattacggtcatcgatgtgctcagcttcaagaccaatgaaccatgcaccaagcgatacatcttcattggcgtacttatgcaatataggtctacagtcaaaaataacatttgagaactttgaccatgaaatttcaaagagtgaccacatgaaatatttcaacaatctatagagtttagtttcattaggtatagccagatttctcgctctcaaccccttgtcaaattataatttacagaatacattttgattagttctaataatttaattataatttataagaatacataatttatatcacactaaaataaaagataaattggttttcagaatattgcatcctga

SEQ ID NO: 202691 - DNA, 819 bp, Cannabis indica
caagatatatatgtatgcttgatgaattaataaagctagaaataatttagaataaaatgtcacattttctgttataatagtcatgtattatatatgattaatgttttattttgtgcatgtggcataaattaataattaataaattagtgtatattgagaaacttttcctatagtcatgcaattatttgaaatgttatgtagtttttcttttctttgtatgtgtgctttttctagtgtctctatcaattatagctttggagtgacaaaattatatacgttcatatatctatctctatgttatgtatttgaggtatatgattttgtaatttttgttattttaataatgtcacgatttatcatgtagcatttcttatacattatctcaatttttaataatcctcaatatattatatatatatattaatatattaaaatgatcaaatacaagtatatggtttaagacagaagctacttaattattttaaaataatatacatatttatgttggagtatacatagagaccttagctcgattgattgaatagtaccaacatcaaagaaaaaaaagaaagttatcccataagaatatgatttagggttcttataatgcacaaaaaaatgatgcacatccatctcttattattttattaattatttaagatattctgtaaaattttgaagaaatttaaaataatttccaatatataaaaacaagcattcaaataatctatttacacgtatacaatataaaaagaagtcacacatgcaacaacagattattattttttttgtaaaaatttactactattattaaaactg

SEQ ID NO: 202692 - DNA, 590 bp, Cannabis indica
cgactatttttgtcacaaaaaatgtatgtcatgtttaaaaaccgcttgagaaagtttgaaccatttcgaactctcaagtgaaattgtccaaagaagtatgcattgcatttgcattaactagtttttgcaactcctgtccaatacaaactctcattttaggactattgggagccaaaattgaaccttctatctctttttaaatacaaatatttatgctttgattgattgaacttttgtgtcatgtaataaatattttgtcttcattgcaattataattataggtgatgaagttgaagatggaccacaaatcataaaagttgtttaaagaataatcgtttattaaaattatgttctataagaagggaaaaaatttggagaagtagaacttgataatttacatcattatagctagtcacataattaattaatatttttaaaaaggactttcaaaattaagtaatatgaaattaattaaattattattaaacttataatatagtaatttaattaatatattacaagtggtaatttaattaatatagtaacttataatatgtgtttatattgttgttggttcaattaagtatcgg

SEQ ID NO: 202693 - DNA, 1856 bp, Cannabis indica
taataataataataaatattacttcatcaataacgtcacatcacatgtatctagcaggccaattgccactgccaaataatcaacttgtactttaggtggcgccagaggtgagactgaaagttgagaaacaataaatttagcctccctacttcctaaattaggtatagtgttgtaaatatgaatccattttgataccacacaaaattggcgcacacaaaaaatattagtttggatcgacacgtaaataccaataaattaatttgaaaaatacaccacacaacaagctggaaaaatatcaaaggatatattaaaaagatctaaaatttattattaataataataataaatgcgtctttattaatcataaataaaaaaaataataaaatttaaatataatattggatattagaattttatcattaaaactattaaaatatgtaaaataaaaattatatataagatgtgatataaaaatttaagtatttgtaagtaaaagtttagatttaaataatacttataattttgggaaattattgcatatactaattttatttttttttaaaaaaaaattatgattttggttgttccggtagtttctatatgggttgttatgtaaattttgattgcgatttaagttgttctgtttgttattatgtgagtttctatgtgtgtattctataaaaatataaaaaaaatgttttgtatgtgattatttgtaaaatattactgagaaattatataattataactaaagcattcaatatacatatagtttaacaacttttaaaaacaaataatatgagaaagtaaatcatgaattcgagccccaaaataaaaatgggctggcctgtttaaaaaatagaggctgacatgagcaaagcacgacacaaaaatactggagcaggcctaccctttaaaaatattggcacaacacaacacgattcatattttttctgtggcacgacacgactcgtatttaaaaatcacatatcaatatggggcgaactagcacgacactcacaaatttacaacactaattaggtaacaggctatcttatctctcacttggctttcgctcccaccatcaaatccagaaaaatagagataagagaactaattgaagccatgaaagataactttccttgatgtaagatactacagtccttgtaatgttttatattgggaatttttttggttggtaaaaggaattttttgttacacaagcccaaagtccaggaccaatataattggacccgaaagctatagaggagcaactgaagattggtttggagacttcagctgatgaggaagctgagcggaatgaagaagctgaaggaaagagcaggaatgagaaagccatgaagcaaaggaagagagaaagagccaagcctcgttggctcaaggacttcattctggctcattgagtctttgggcatattttgtagctaattttgttagcctttttggcttttgtcaattgagtgtaaataactctgctgtaagaacttaatgaattagcaagaaattactattggagacctcctctcttgtgttgctatcattttttttgtttgtattttattttgaaaatgagaattcatttttttcaaaattattagtgggaaagaattgtcgtgtaacaaaagaaacttggacgaaattttgccacacatataaggaggaaaattatttatttctctttaattatttttactgttcaatatgtaggctggcccccaattttaaaattatcgtggttctatattggacaacggttgcccatttctttaataccatacatttattttttcatatatatacgcatggtttctcttaaaaaaaattattaggtatta

SEQ ID NO: 202694 - DNA, 1148 bp, Cannabis indica
ttgatcttgtggggttggtgatgatgagggtgatattagactattagtaagaattaaggcagagtttaataagaacaagaaaaaggacaagagcaaatgaccatgaagacactcatttgtgctcagctctagaaggaggctctttgccaagcacttttttttttctttcaatacgggccaggtccactatattagggtttattatcagccaatcaccttttttgatcatggtgtttttaaggttgattttggtaggttataattttgaattgagattgcatcttaaaattggaatctgttgtgaaaacatagcaggtgattcagagcattaagcttttagtcctggttgctggattttttcatttctattaatttttttttctctttgttattttcttattgatctatgttggagttgcaaggatattgatctatctttgatctgtattttcctgtatgtaagtttttctctatgttatttttatttcagtttgaactattttttttaagtttcagtcagttttcttaagttttctatgtatagtagcactttatatttgattacttgaaagtggttgaagatgactgaagtgcttgttaatttgcaacttttgtttagtgaggaggaagtgtaaactattattgtagctttccttgtctggtggcaaacttatactactgatatctattttttcccttgaaaacatattgaaaaatttatgatggtgaagctcagtattcatactaagctaattgtacccaaaccttacttgtctgctcgatttgaagagaaaaagattgtatatttatatacctttgtgtattttgagatggcatgcaaatatacataatttgattttgactttatcttaaatctcaaaaaataggaggcctaatctgcagaacctgccctgctgaaatactctagcttctacaatgaacctctcctccctcacaactctggactccaatctactctccacccctcgatgcagggccttcaaagcccactttcggacccatgtttctcgtcctagaaacatcgttgtctgctccttcaaccccccggcagcttcatcactcagtgttgctgagtccgctacccataagtctagtcgaattgactcattgagtcaggtctctggtgt

SEQ ID NO: 202695 - DNA, 734 bp, Cannabis indica
tataccaatagcgatataatactttataatgatgttggatactattgataccctttaattaacattttatttgtttatttactttttattgaaatattttatttattttaaatatatagaaacataataataattagaataatttgcggtcagactatcttatattttaatttttatacacttaatttcatgattttttttttgtgacaactcttttaactttactcatgtttgcaaatttgagacgataattaaatttgatcgttaaatgccaattgagaccgtcactatgtaaatatgcacatgatatattttttgtaatgtcctcacttcatgtctctattagatctttacatccacaaaattaatactcttatacacgggtacatcaatttaattgcttcttggaatgacgactgaccatacaaaccaacacgagtatttccagcgtgcgcgtcactcgcacgctcactggaaagactttccaagaagttttccatcccaagattattccaagtcaagcatacttaattttagagttcttaagtgaccggctaccaaaaaaaaaaatgtacattattgatgtaggtagtatatatcaatccatttaagtcgtattcaactgtgtaattccatacttacacagtcttagaattatcacacttgacctttccgaaacgatgtgagattgcacatctcctagtcttacgtcacatttttattggtccaattaa

SEQ ID NO: 202696 - DNA, 1749 bp, Cannabis indica
ttacaaaagaacaagttgttctagatagtatatatagtgcataatgacatagcaaatctttgttacagaccagaaaaaggcaagtgatctatatcataatcaacatttctcatcgatatccaaacacttggtccataaaatgacgtgttacacatgacaattatcagtgtttggacactaactttagacagaagaaagaaagaaaaaaaagttacaaatctttctgctgatgatatacaatgcaaaaaaacctccctcttttcttgtgcaggtaagttactagtcatccaagtcaataatttgtacccgttcaaccaataagtcactgaaaaatggatcagaaatagcttctttggcagaaccatatgtatctaaacgcttcttcaaagagcgcagatctctctcgttctttgaggtacgttcctaccacaccatttcattagttaaaaccgaaaatattatcacttcttcatatctgattatgagtgcttagattcaagaattcatgactattgaaagatcattcccaacacttacacaattcagattaagaacctcatattttgtaatttaacttacgcctaaccctacaattattggaattccggaaactatggcaattgccatgtaggtacctcctactcgaacctcaggcattgtaggtatgcctaaaccgcgtgtccactacacaagctaccccttttggatcatattttgaaagcttaagaaacctcttttagagggcaatgtatatcaaatcctaattgtatcgacagaccctcacaacatcaaagccaactatcaaatcctaatagtattgaaagaccctcacaacatcaaagccaactatccattctagatatggatttaaagaaatgaatatgcagtatctttaaactaacagaaacaaaaaaaaaagtctgaagaggttgtttaaagaagaaattaagcttacaaatgatttcttcaagagcaatatatccaccaagtattgcaaccacagcacatttgttttagggaagctgtcaaatataatatgttcacattaagattaaggatccttataaattagaagcaaagataacaataaaagttaacaataattaggatccaagataaagatccaggttaattttgttcaatggtgcatgcacaatatactattttttttttctttttctttttctatatcatccgagaacagattctatccagtattttataatcatgcatcactattttctcaactgtaccttccctcccaacaatcatctgttatctccttcatcttccggtaagtttctgactggaagcaatgaaacctaaattagctttgttttaagataaacttactaatgcaacattagttccatatcaccacttcttacttgtttatctcctttgggacctttaaaaagataaggatctgaggataggtccagataaagtatgtcttcgcctgtgcatccatgacattggttaactatgctactaaaagaaaatttataatatagcggattatataatttctgaccagaggagagaaaaaggataccagtatttattcttgaaagagtaaagtcaattattgaaaccaataatccaaatgtcttcacagacatcttcttcccctcgaaaatgaactgcacagttgcagactcattcctactcaaaaggacatttcccctgcaaacagacaaatttcgttaagccacaaaatacactccacaatcaatcgatcaaaaccac

SEQ ID NO: 202697 - DNA, 1420 bp, Cannabis indica
tgtctagtctccctcaattgtccgctctgctcacattcttttggcccgtcataggtctctcataggtcgagtgataaggccttagaagcatggtggaaaagtttgtggaagattaaggttccgccgaaaattaagcattttgtgtggaaggcctgtcatagttggcttcctactagtcatgctttgtctaagcggggtattcaagtggcgcttatgtgttctcgttgccagggtgatcagattgaggatgtttctcatgtattgtggggctgtccgaagagtaaggaggtgtggaaatgtggtggcttgtgggatgtgattcagaaagtacgatccaatgatgtcttgctgacgttccaagagattcaaaaggtttgttcttcttcttcttttgagtatgttgtggttgtttcttggcatctgtggtcacttcggaatagattcattcatggaggttgtcttcctagagcgggggatatattagagtggtgtgggaaatatatccaggattttcaacaaggtatggtccataaaactgaggggcctgaacgggctactcagaaatgggagcaacctcctggtggatgttttgttgtgaatgtagatgctgggttttccttgcagggagatggggcggccactggggtggtcctgcgtgatggtgcaggggctgtgaggtttgccacagccacggtggtgcggtatgcaagctctcccttggtggcagagttgatagcgataagagatggtattacagccgccattcaacgccgagtgtccttgtttgaggttcgctcggactgcttgcaagctgtccgcctgattaatggtgctgaggtggggtgtcggcaagaagacggtctcattttggagattcaaagtctgcttcagcatcgttctgttactggggtgcggtttgtttatcgggaagcaaatgttgttgctcatattttagccaattatgctttgactaacaaagctagtgccatgtgaattgggattgagccctcatgtgcaagtcaagaaatctctcttgacatgcataatcctgtttgattgtgttagtgttattaatgaaaatttccttaaaaaaaaaaaaacatatcaatacatgagtaacaaatgtaatgtgccatcattattattattgatctcaaatctgaaaacaataaattacagtgtgtttttaactaaataggaataacattaatagaaagtttcatgcccaaatcacaatgaccaggaataccacaaataaaccatctatttccaagcttgtcgagggtaatttggtcatttccacttgtaaatgtcttccctaattcatttgatgtacggcaatttgtgaaaccattttcatcaacctcaactacattgtgtactccaactggatacttgaaaactgtattaacataattaa

SEQ ID NO: 202698 - DNA, 1250 bp, Cannabis indica
tttttttttttttttgcttggcagggggcatgtgtacagaatgtattggattctgtcatttcagccttgttggaagagaagaatcgcaagttcatctatgttgagatggtattgtagttatagtattcactaatttttcactcgtttgtttgttttttctgttgattgattacttagttatttactattattggtttttcatttcggaaaaaaaaaggctttttttcagagatggtggaggcagcaaagtaagtctactaagattaaggtcaaggagcttgtcaactctggtcaactggaattcatgtactgtcttgtttgtatctaatacttttttagtagctgggtatgattaaaagtttgttctttttgattctatttcaatttttgctgttgctgttctagaaatgggggtatgtgtatgcatgatgaggcaactcctcattacatagacttgattgatcagacaactttggggcatagatttattaaagatgaatttggtcagactcctcgagttggttggcagattgacccttttggccattctgcagttcaagcttatttgcttggtgcagaggtatctatagattgtaccttttgtgaatcctcccaagccatattggaatattagatttgatcatacagttccatattgattgcagttgggttttgactccctctttttttctcgaattgattaccaagatagagctaagagactcaaagagagaactcttgatgttgtatggcaaggatctaggtcccttggttcttcgtcacaggttaggagtttctttagtttgcacttctagttgattttatgcactatctctgtttctaatagtccaattgtgtttgaaatccaagtaactattcctatcctcagattttcaccggcatatcaccccggcattatgatcctcctgatggtttcacgtttgaaataaatgatgtttcgccacctattcaagtaaatctgatttggtcaatatttataatgcctgcaaaatttgatatgaacgtcttttaacacatgttttttggttgaaggatgatactcttatgtttgactataatgttcaagaacgagtgaatgactttgttgctgctgctttagcacaggtaagaattagatgggaatcattcagttgaactccacattccctagattacgtatgcaaatgatcaatattcaaaataataggagcctatgcattaaactccatatccttattttcattgtgtag

SEQ ID NO: 202699 - DNA, 806 bp, Cannabis indica
gtatcatttgtgttgaaaagagcatcccacgaaaatgcatttttttagacttcatggtcattttgtgttgctggtatggcctgagatagggaaaataggtgcaaccaaacaccttgaggaatccataatctggctatttatgaaaacacgcattggtagggtgacatgttgtcaagaacaagagttggtagcccgttaatgacaaatgtagcatgttgaaaggcaaaccaccaataggagagatctaaaccagcctgtgcaagtaaggacattcctgtttcattgatatgtctatgcttgcgttcaactctgccattttgctcataatcatgaggacatgagtgttgaaattgaacaccgttagctgctagaaatgaggcaaaacttctgtattctcctccccaatcagattgaacctttttaatgggaagggagaattgtttttcaactagcactttgaactgtaggaaggtaagatatgcttaggatttcaaggtgagtggaaaaatccaagtgaacttactgaaatcatctagaaagtgaatatagtacctataaccttccttggatgggacatataaagggccctaaagatcagtgtgaatcaattctaagcgaaaggatgctctactagatgacacaagatagaataacttgtgacttttgcctatcttgcaggcatcacagaacttaagttctttgagggtgcctgtgtgattaacattaaacaatattttagcaagtgtattggggccaggatggcccaactttgaatgccaaatttttataacctgagtagtgttaac

SEQ ID NO: 202700 - DNA, 619 bp, Cannabis indica
tagatatcggagtgaaggatatatgttcgaacaaattcaagtaccaccattatataaaaaaaaacatggtattgtcttatagtaaaagattgtcaaaagaaaaaaagaattgttatggttttgactaggaataaataagattaaaaggaaaaaaacgatttttctcctcaatctagtctgttggaaagtacacggttgaccccttttttaggtacatgcacacttgatagcctttcaggttatgaacgtcaaattttctatgaatagaaagatgaatttcaccactcaaatttttgaaaaaaccccaatgattttcaacacaaagtctttctttcccttcctctttctccttcttccttcaacaacaacaacaacagagagagagagagagaaaaaggtcatgatctaggtctggtttgccaccctccaacccacggtcatgatcttctatctcaccagcttagtccaaatccaatcttcacaataacacctcttcttcttactcttgaaaaactataccaatcccgtattatcttttcttaagaatggcaaagcgttcattcaattgttttgttgaacaagagcttggaaagttccctcatttcatggtctatgccat

SEQ ID NO: 202701 - DNA, 519 bp, Cannabis indica
aaagaaaaagaaaattaaagaaataagaactctttgtattccccattggcctctactccacctcttccactactcaatatattttttcagctaagcaaaacatattattttgaatactgatcatttttcagaacaaacagttctaaaacattttctttagataagaaaggagagaatggaagctgcagttgctgttggggaatgtataaacaagttgttagaaacttcaaggtataataatatgaacttaagcgattcaaggatgtccctttttgggccatattcattgataaacatttcatcgggaaaagaagaaatggatgatgttgaatatggttggaagaacattgttgaggttgcattagtgattagaattgtacacaatctctacaaaggtatatcactctcttgtctacatgcatagagatttttcattcataaatgcatgcatggttcttattttctatacatttttttcttgcttgattgatttcccttttatgtatttttgttgatttt

SEQ ID NO: 202702 - DNA, 637 bp, Cannabis indica
atttatatcttacattccgtttttttttttttttgattgcagtcacaaattagtcatattcaatcataattataacaaagacaactcaactgccattgattgcatctctaaggataaaggacccatataactatattatatatatatatatctattaaattcacaaatgtgttttttctttcatcaatatgaattagttaaacaaaaacacttttatttatatttacctgtttatcaatcaacacaaacaaaacagtcataaggtttgaactagtaccataaaagaaaatataatcatttatattcaagccacctctttgattgctttcgtaaaaatgacatgaaaatttataaacgaactacattgtataaaatatatgtacaatatatatatatatattattaataaggtattaaagtcaattgaattatttgaatgaacattaattgaaccaattgaaactatccacatggtacatttctatattcagttttgtagaacaagttattgtatgatatcataaatgaactatatgctatgagaagtagatagatatgatggatgcaaatatttatgaactttgttgcatacaaaccatataataatcattatgtataacacgtatatatatattta

SEQ ID NO: 202703 - DNA, 1256 bp, Cannabis indica
aaaataaataccattgtcagtagaaaattgatatacactaatcaaattcttggtgatttgtggaacatgtaataagttattcagggtaaggacagtacacttatctatggacaagaattaattgtgtcttacctatgttctatatagacagtccagcaccattccccatgtacacttgctcattggcttgaaagtcatttttctgagcaagattctcttcatttgaagtgtaatggtgagtggctcctgagtcggggtaccaagaatcatcacaaacagtttctgcagtagccatcatagcagaggggtgacattgagaaccagaaccagaaccaaacccaaggaaggaaggattgaaatgtagcacttagaagcataatgtccaacacatagacatatttgacatactattttactattgtttgaatcggttccatgacctgaattgttaggattagaggtagatccaaaataattgaatgtgttacctcttcctccaggaactggtggtcgatatggggaagcactagatgaaccattccctgatcgattatttgcatagggattctagtaattattttcacattggcttgaattacttcgagatctgaatttagagtttgcaagatctatagaagcagagctaagaactttgttcttgcgctcaatacgattactgaacaatgacattaaacgaattataaatgagaatcaagctgtgctctgataccatgttaagaaagattgaattgacataaatagatctcattgattaaccaagtgaaagatacaacttatataagtacaatgatagagctaaaaaatgtaatgaccaaactaccctcctaattgattctaactactaacagaattaactaacaaacatcatatactcttaacaggtgtcaatatataccaaacaccaattatagacttgtcgacaccaatattaaattgcaggagagggaaagagcttctctcttctagaactctactaataacaagcttaggatatacatttgagagataaaacagttacaaaggtgaacaagtgagaatacgtagacagccatcctaactaagaagcttaattatccaagcaaatcttgtagatggaacaactccacaaatcaacccacaaaaaaacattatcctaacaagaaaaagacatccaacaaagcacatgtgtcaaaatatgaaaagaaaaattattaaggagacctcatatagattataaaggacacgtgtcaaaatat

SEQ ID NO: 202704 - DNA, 1379 bp, Cannabis indica
tcttcaaataaaaagatctccaatcgagtttttaggaaagctagtagtcaccgaaaaggatttctagaagactagcttgtccatctggaagaagtcttgtaaaaagctagttgtcctctgaaaaggagttccagaaaactagttgtttcctccagaaaaagattctagataatttgttccagtaggctttgtgcctattcaggacgtttttccaaattgcgcttcatcagtttgggacgtctatcttggaagcgcgatacatgtccagagagagctcgatgccaagagctgacttggagatctcatagtaaggaaccagttaagtgggttaagtcttatcagaattaactacttagttatttgaagatattgtctttggaattcatgtaatcgatctataaatacaaccattctattaatttgagacaatgcgaaatatcagaagtagagtacgcaagttctttgagagagagatttgattgagagctagagagagaggtacaaagaaaatagaggattgggggtcttggttttgtaaaggagaaacttctgtagatgaagaagcttctcaagaaagagtgttagagagaaaatatcttgagagaatttaaatagagaaactctctcaactgtattgtacatgtgtttttcctggagcaacgccatagattacatcgatataacgaacttgaacagtataattcttagtgttgactttacgattttcttccattgtttgtttttgattttatcgtctctattatattcttttattcttctaatttttgtttgtttggttaattttgtcaattactaactatttgttgattcaatttaagttagtttgattgcacaaaaattaaaatttcccacatatatatttatatatatagagagacaaggccggccctgaaacaaacatagggaaaaaaaaaatttaggcccttatgttagaaaaaatgtgatattttttaaaatcggtaaaaaaaaatgtataattctaaaagaagaaaagaaaatttgggctcctgggctgggtgggccctaggcacaggcctagcctgcctatgcccagggtcgggcctgtatagaggccatgtttggaacttaggataatttgggattgaacaaaataatcctaagctatgtttggtagtgtagttttgagttaggatgcgattggataattatcctttcacattttgcccacgagcttgggactattttaacccgttaaaagaataaccacttgaggctagctcaagtggtcataggagggtgcgtgtgtattggaggtcctgaattcgagtcccaacttatgcatgattgtaatatataaacgcttaaaatcaaaaaaaaaaaaaaaaatccgttaaaag

SEQ ID NO: 202705 - DNA, 1086 bp, Cannabis indica
atatattttgcaaaaaaaaaaaatatgcatatatccactttgaaaataagattatttatatttgtatatatggatatacatttagggcatatgagtttttgttaaatttttaaaagtaatgatgtttatcgttataggattcttccaacatgatagtgttgtttatttgccaaaagtttcaattttaatgatgtcatgcacttaattcaacgctttcacattcaatgaacttagacgcacatttgaaacttaaatcactctataaattttctttatttaattaattaataatttagatgcagtactcgatgtaatcatatacttttaattcgtgaaaatataatttaaaacaaatggtacaaattaatgcagcaaacaccaacttgggcctttcaataatttttgtatctatatattttgtgtttcttgtcattatatataagactaattagaaataaaattaaaaggtcatgatgatattaatataggatcttatccttaaggatgaaccaactagctataaggcctgtataaagactgaggcacgtccagagacataatatatacttaagtcttctccacacgacacactagtgatactatattaaatggtctcgtttatcaaaagagttacattagtttttttttaaacaaagattgcaactttcattatagcaaatcagttaacaaaatagctttcaaactagaaaggacagaccccctactggaaatacgtacggtcaggacatgaaccagaagaacaagctaaccaacaaactgaactgaaatataaaaaccagaaaaggatcgtataagattaatacaatccgaaataataagaccaagaggagaaagaatgtaactcttgctattgatagcattaaccaacacaagacaatccgactccaaaatcaacgctgtaggacaaaaatcctcaacagtcctgccttctccccaacaggatttaacccaactcaaagcctccttcatggacaacgcctcagcaacaacagggtcaatttcacctcggagtttgacagcagcagcagcaaagcacaacccagcatgatctctggcaatccatcc

SEQ ID NO: 202706 - DNA, 750 bp, Cannabis indica
gtcaaatgcaggaatgtgattaacttgaacagctcctgcctgcactttttcacgcacaaagtaaagatcaagctcaatgtgcttggtcctagcatgtaggactggattggccgtgagcaaaatggtgctcagattgtcacaccagacagtgggagtccttggcagagagacctttagttcagaaaataaattgtgcaaccaaacaagttcagcaacaacattagctagtgatctgaattcagcttcagtactcgatcgagatactgtatgctgtttcttgcattgccagctgatgagatttcgaccaaaaaagattgcaaagcctgatgttgatctcctatcatcgggatccgcagcccagtcagcatcacaaaaggctactaagtcagtggaagatggcctctttagatgtaagccaaagttcaatgatcctccaatatacctaagtattctcttaaccgcaacccaatgagattgaagagggttttgcatgaattggcatactttgttgacactatatgcaatctcgggtctcgttattgtaaggtattgtaggccaccaacaatagacctatacaattgcacatcctcaacgggatcactgccataggcagcgagacgtagcccacttgtcattggtgtggatgaggtcttagccccttgcattttagctttgcaaattagatcccttgcatatttttcttgagacaaatgcatcccttcagatgtgtatctcacttctatcccaag

SEQ ID NO: 202707 - DNA, 1336 bp, Cannabis indica
aaaataaataaataaatttttctctcattttggaatattcgaggtattaaaatttaaactaattaagattttttttctctaaattttgacatgtacctaaattataatttttttaattgttaaaaattctctttaaactatattgaaataattattagatttaaggacttttgtccaatttaattgattttactaattcaatgattggttcatgctccccatattttgatatgtaccaaatcatgtttctcgaactttgatatgtaccaaattatgttcctcaactttcgtccatattttttttttttgaaaatgcgtttataaataaaactgaagttagacctcctggtcattacaaaagatactaacaggtataggagatatctctaccatgcctgtaacattgttggcaaacgcccatttggccacattatgggccacgtagttataatttctagcaacagaagaaaaattacaattagtcataaaattacaattagacttatcttactaattaaaatttaacaaaagttcttaaatttaataattaatctcaatattttaggagcaatttttaactaccttaaaaattcagggacataatttgatacgtgtcaaaatttaaaagataaaaaacctaattagcttcaaatttacaaataaatcagtaaaactaacagtttcccacttttattatttttctttaaaaaaaaaggcagtttcttcaccttgccaaaaaaaaaatgaaaataatttcttcacacacggcagcaggtagaattttcatgtaattttcttcttcttcttttttgaaggatagattatatagattaatttattttataaaatcataatgaatggctttgagtttattaaaacagtgcatatatattatatatacactaaacgaatttttttttaacccaaatctggaaattacatatatatatatttattgtatgtaattttgcaagcattaattcgaaatatacccttctaaagtacacgttccactcattcatattgagaattataatgatcaatatacccaatattaattgtaacatgcagatatattaatattgtatattttatgtggttatatatatatatatgagaatctttagtaagctttagatacactgtaaattgtaattggggtaaaaaaaactactataagctgttttacatgaaattatgaagtttcatttaacccaattgaagatatctcgttattacaaaattctagctagctttttcttttttgtttttttacctataaagcgccaactttcccgagctggaacttataattttaaacttcaaccatctgaat

SEQ ID NO: 202708 - DNA, 1349 bp, Cannabis indica
ttaggtgacgggtcaaagctcaacaaatcttgtctacacaatcttggggctccaagccatcgttgttattgggtttcatcacaattgttggtggagttcatatcaatactaattgacagtaatgtgcgtgttgtttgttagccttgcctttgtcttgtttggtgttctaaagcataactcacgccctttcttgtagtggtaaaaaatcacttttagcacttaactaagttaccctttgaccactttcaaaaaaaaaaaaaacaagaacaagttaatacaccaagaagttagtcgatttcaatgtcaatcacttccttatagttttattaaattaaatatcatagaagatctagaatcaatcccaaatacccttttttttccattaaaaaaaacaagtctaaaagaatgcaaatgcatgatatgttgatggatcaagttaatagaaacaagcaaaatgttacatgaagaagtcaattgatagggtgaagattgactggtttcatactaatggtaaattacacaacgaattctgaaaaacccaaatcctatccccagtccacaaaaggaagacttggatatccaccctctggaggaggctttaacgatggaggtagattgccccatgatatccccattctatctctgaccgtatcacctggcaaaacccaataagggaagcacaactgtctcatcaagcaggtagaagaaataccaaacaatggaatagtagaagaaatagcaaacagacaagagaaaaggttgtattattgaatgaaaaagaaacaaacagtgtaaagatcccttaggacctctgttctgcaatgcagaaagaaagacttaaatcatgcataacactactctccccttactcacctacatatactatcctattcccacacattcaataactaccctcaatacaatgactcatacacctttttgtttgctcccttctatcttgtgttctactcatcatggggtctaaaagctagccaatataaaatgatggcaactgactgttgatgagtctaagcaacatcttacttagattgtgttcttaccagacatagagttggttccaataacttgatttccttgaaaaataggtgactgattactaccaacgaaacctgccaacacataataacatcaaaactataagctaataatgctcttaaccacccctatcaaagttagaacaataaaattccaaaattatttggccaaagcaaagaaaagaaaaatagtataattttttacctggcctcccttgagaattgttcaaattttggactgtgttctttggatgcaaatacttgcaagaatccccatattggcaaattccctat

SEQ ID NO: 202709 - DNA, 817 bp, Cannabis indica
aaatttagcttttaaacggtgaaatcgagcctgagcttcttcgagttgagatccatggccataaacagggtccaaagttgagtagattgggattggaagatcttcgtgtttagccattgattcaattcctcgtaatctttctctttgttatgaatctgaagaaacagaggagaaagaacataacaaacattaacgataatttataattctgtttttatgatagaaatatatatagaaatatgtgcttggttgggggactaattaataaatattatctttttaaattatatttaaagtgagattaggaaaaggtgagtgttatagaataatgccttttttttttggcttttacataattgaattgattagattcggataagatgagatgagaaggaatcggatatcataataataataataataatagaaattttttttataaaaataaataaatgacattgcactacattaaattgtaaaaatttgtaaactaactatattaaatttacgttttaatgcttttaaatttttgttaatttattgcttataatcttgtcagaattacttgcattttggtttgttcatgccatgccaccaaatatgtttttgtcactaataaaaaaattttcattgaagatcgataagttggattttgttaaaaataaatagataaattatatttttttatataattgataagatataaaaaaaagaaaaaagtaaattacgaataacgttaagaaaataaaagtagagagggaaacttctttaattttttggatttaaaactaatgtatctctcaatttgttgtattca

SEQ ID NO: 202710 - DNA, 1206 bp, Cannabis indica
ttttataaatgtatttatttgtacttttatattataaatgtatttatttattagggatatttgcggtgcgggcagtataattttttaacatttttttaaaaccaatttacatatgcagtttttctaatatttcaaaccgcacctgcgcatcgcgaaattaaaaaaccgcagaaactgtactgcaaaaaaatggtgcgatgcggtgcagtttttacggtttggactatcactaataattaaactattacaaatataacaaaacttgagtaacacttgtcaaaaataccataaaaaataaatataaaaaattaaatttagtgtaatatttagtattaaaatattcttattatattaataaaataatagaataataaagaatataatatttggtgtaatttttagtgttgtggttggaattaaaaaaaaattaatgttgaaatagtaattttttaatgttgatttaacaataaatttgaatttctccatacccttagtagaacacttcggtgtatatatatgactggtgtgatgtcactttatttgatatagaaaaaaaaataaatattttttatttattacataattaatcttaatgaagcaaagttcctacaattttgtaaaattctaactaaattttaactatcattgtctagtctagttttctttttttcagggcaatacatagaagttgtattgtatgtataaatatggtcaaaaaagttggtaactactgtttcatttgaaaaaagaaaatattgtatatttgttccaagaaaaaataaaattatattgtacatatgaaagcatagggccatgttcttagtattcaacattcaacaaaactttggcgtaaggtctgtgtttgaacacatcctctactcttggccaattacacaagagtaataaattcattcgcctgagttcaaacatccaaattcagatttactttctcaaataatattaaacttaatcattaatacttatgcactagtttgaaaaatatcaccaaaaagaaaaatattttatatccaatatcagaagattttactgtgttgagtttccaaataacataataacagacagcccttgagtttgactttgtaataaatggcttattaattaatggaatttttactacagaacctcctaaaaaggacttatcggtggggtgtgtcagaataaatatattatagggacacgtaatta

SEQ ID NO: 202711 - DNA, 1128 bp, Cannabis indica
aaaaaaaaaaaaaaagagtactcgatgatcaaacaaagtacatccaaaaatattaaaataaatttaaaatcatattattcaccaattgaaaattatcaattagtatcaaaatattattgtctagaattaaaacttcaaatctacattgatagaaattcaatctaaaaatgaattggagaaaatgtttaaggggagaaaaatatgctatatttatcacgatattagtcgtattttaaaatattatgatatataaattagttaattgtgtttttaacatagagaatattgttttttttttttaaatagaggaaacccttttatcttttgtgtaagtatttttgtttgttattattttttttaattaaccttataatattaaaaattaaaaaaaaatataaaaagttggaataatctaagaacataatattctccaaagtccaaggagaatgaaggccagcctaagccagatagaatcttccttcttagtcaaatataatataataaataaaatataaattaataagtaaagaataattttataaaaataatcaaatttccaaaagaatattttaaaagagggtaatgaaactataggaaagacaaacccactttgtttaaaattacataattattatttaatgaataattaatcatttttatatttaaaattaattttaaaataaaattaatatgcagctatttttattttatagtaattcacataattatttttttttatttaatttttttttttgtaatcaattcattcacataattattgttgaggtatctattgaaaactaacatattttgtttgagtatggtctcaaacaccttttctgtgtttatcggttgtatgtttgaacatattagtagacaatgtaattttgcagcccataatgtggttaagtggactttttctcaagagaggtatggtcacgtgccgctaacctctatgcccgatgttgtattttgtaatgaccgagagggtctaattgttccttttttttttttttagtttaattatatgcaagcttttcttaaaaaaaaaaaatatttagggcttaaaaaaaataaaagtacatttacacaaagcacatataatggaactttttttttaaaaaaaaa

SEQ ID NO: 202712 - DNA, 299 bp, Cannabis indica
tttttctttttttttatttaattaataataattaattaagaatggctagagatagggaccctcttgtggttggtagagtaataggagatgttttggatccttttacaaggtcagtctctcttagagtgtgttatggtaatagagaggtcaacaatggttatgagcttaaaccttcccaaattgttaaccaacctcgtgttgatattggtggtgatgacctaaggaccttctacactttggtaattaaattaattaattaattacctcaatattcataatgattttatctataaatatat

SEQ ID NO: 202713 - DNA, 1178 bp, Cannabis indica
cagatccgatggcgaagcagttcacggttccgccggttgttttcccatccggcgggaatcccggcactgcccccgcaaacatgcagcaacggcgggtcgcgacggcgccgtttcaaccccctcggtcctctggttcaagcatcccgttcatgtcgttcgatatcggatccgcggttggtgcgtcttcatccaccgctaacatctatggcggtccaattggcggcggcctcacccctggaaacgccaactttgaggacgaagaacctctcctcgacgagctaggtattcacccagatcaaatctggaaaaagactaaatcgatccttaacccgttccgagtcaatccggtggtctacaaggactcggatctttcgggcccgatcctactctacatgtctctctgcttattccagttgttggctgggaagatccaattcggtgtgatcttgggatggatcgtcgtctcatcgatttttctctatgtggttttcaacatgttagccgggcgaaatggtaatcttgacctgcacacgtgtacgagtgtggttgggtacagtatgttgcctgtggtgattctatcggcggcgtctttgtttgttccacaaggtggggttttgagattcggggtggccggggttttcgttctttgggcaacgagggtttgcactgggctcatggtctcactcgccgacggtggagacgaacatcgggggttgatagcgtatgcggcccttttaatctacactttgttttcgcttctcgttatattctagtgacattaatgagcagtgaacagtaatggggttttcttttttgtttaatactgttgtagctgtggtttagtgttttccttttcggttttttcagtgagggattacataagtataatgtctgaattgaacttcaggagtttatgagatgatgggtgttcctctgtagaaaattggatatattactttgttaatgaattcattctttattgttagagacaaatgtttctaacaaagattgattttttcttatgagaaattagtttcagattacttatgatgctacgagtcccacttgctgtagttgttcattataacactcactaaagataaactagaatctcacttatcgttttacatagtaatattggagaataatcatggtcggagttgagttttacttgacga

SEQ ID NO: 202714 - DNA, 1200 bp, Cannabis indica
aagaatatgatgaataattacagcaagcgcagcaataataatagcagaacattttttattggtgtcatattttggtttatatcttttgtcactggaactggttttgtaaagatttgtattacaatacaacatgaattaccaatattcatggggatgattctacccttgggtttcagcagtgttttactactcataagaattgtagagattaaaaggatcgtcaactattataattcgacacacaataatattaatagaatgggtggcattgcccatgcagagctggtttttaaaaatacatatgctcttctattggtttgtagtgtttggattgctgttgaattcaccaccaacatgtttttgaatgatccactattttcaacacaaatctctccctctgctccagtacatttttcctttgctattatttatatttatttgacttttgttttcttttatggaggtttgacggctttggagcttagttattattctgatgatgatgatgctgctattggagaaaccctagtttgatcattaattacctttacctacttaatttctttatttttctaatatttagttttttttttttagggataatatttagttacctattttactttattaattaatagtgttgcatgcacttaattatttttctagtccttatttaataatatcaaccaagttttaatatttgttgattgctcgatcaacaactctcttactttattttttcagtctgttttttttttcttttctaaatattctttttttcttttcttttctaaatggttgttggagattttcttttttcttttttaaaaaaagaatgaaaatatttattgaaaatataataatgttataaatactatattatacatgccatatacaactagccaaacaagttatttattcatcgattgatttaattatccgattaagtttaattactattctcatttttaatatgaatgatagattataaaaattaactcagatcttttaggacctgaatcatatgttatctaatcatctctttggattagatgtatattagcattaaaacaatttaattgatatataattagctaattaaaacaataatacacaaagcctatgcaaatacaaaggctatgcaaatacgttttacatcaaaatactagttatctctaattttagctatacacaaactct

SEQ ID NO: 202715 - DNA, 1343 bp, Cannabis indica
gaacaaaaacggatactaataggagagaggaataatcactagtcaaacacgtttcaaggaaaattataggacgcttttaaaatttctagttaaaaattttagttaatttaaaatttttaaacaactaaaaaaaaaaaaaattctttttttttttaattttaaaaaaaaataaaaatgggttttgtagctagttcggtttctttctactttaataaaatgaataatttattttttaggcattaaaattttaatttaatttaggtggcctttagtaacatttttatttgttaattttttaatcacaaaaatgaaagtagaatttttgttttaaaatttaaaaaaaaaacaaaaatggtttatataattttgttttttaagttttaaaaatagaaaataaaaatgtgttctgaaaagtttattttaatttttttattgattttatttaagtcgagtccatgtcgaggtctcgggtctgggaccaaggttgtggtccgaggcctgcgttcggttggggttcggggctagggtcgggttagggtttgaggccggggtttgggtctgggcttggttcggggtctgggtccgagtccagtcggagtttcgggtctgggttcgagattggggtttgaggtcggggatcaggtccaagtccaggtccagggccaaagtctgggttcagggtctggttccaggtccaggttggggctggggcttaggtctgagtccgagtctggatccagagtcgaggtccggggtagcagtccatggtctaggttcgggtcgaggtcccggtcttaggggcgagggtttaggttcgggtttggttggagtccaaaatattgattaagaaaaaaaatatgtttgaaataaatttaaaatgatttgtttttgttttcaaaatttttaaattgattaaaaaattaataagttaaaacaattttagacaacatgtttttaaaattattttacgtttctaattgaaaaataaaaatctaaataaaaaattattactaaactgatttttgtatcataaaactattaaatttctttttaattaaaatgtttttactttaatattaatttttattttttttcattgcttttcctctataacagcttccatttttattgactaaaagaaataaatatatccatataattattagaatctttaacagaatataaataatgaactaagcaactacacaaaatgtgtactatatacttagggtttttactaataatattacattttaggtaaaaaattatcattttactgccacatgattttttttacaaaatactgtcttttataaacaacagtaaacaacaaacagactatt

SEQ ID NO: 202716 - DNA, 889 bp, Cannabis indica
gagaatagtattcatatgccattcatgttgcttaatagcattgcatccagtggaggaagagattatcagtattcctttgaagaaaaacagcgggtgatacaagtgccttcaatgaaaaaaagggaaattttccctgggaaagtatagctgatcgaccagaagtagtggaagcaagtgccttcagtgaaaaagtggggaatttctcctttgcaagtgtagctgatcggctagaggacagtatactaatgccattcatgctggataataacatttcagccaatggaaacaaagatgacagtgattggtttaaagagaaaacagtagcagaagcaagtgccttcagtgagaaaatgggaaattttcttgggaaagtgtagctgatcgacgagagaataatatacaaaagccattcatgccatatgagaacaatgtagccaaccaaaacaaagatgacagaacttggttgaaaggaaaagcagtagtggaagcaagtgccttcagtgagaaaaagagaaatttttcctgggaaagtgtagctgatcgacgagagaatatacaaatactgtccatgctggataataacaatgcaacctataaagatgacaatgataggttgaaaggaaaaacggtaatggaaacaagggccttcagtgagaaagtggctaacttttcctgggatagtgtagctgatcgacgagagagtagtatacaaatgccttccatgatggataatagcattgctgccaacagaaacagagatgacagtgattggttgaaaggaaaagcagtagcagaagcaagtaacttgagtgagaaagtgggaatttttacctgggaaagtgtagctgatcaacaagagaatagtattcgaatgccattcatgttggat

SEQ ID NO: 202717 - DNA, 771 bp, Cannabis indica
aacttaattaatgtgttaaacaagacacattgatagcaattttatccaaaatctcattaacccatatggatagggtattatccattgaattaggattcaaagtaaggtaagaatatgaaaacatgtacctaatgtgggtataaggtagggtacgtatatagacaggggtgaagataggattattagggctggtcttaagctatttggtgtttagtgttaatagatactacataatgagtatgtattatcaataataatcaacaacaaattatgctcatataattttagagcattaagataataataaacatatctccaatcttgactttaatctctaattatcttgttgattacacttctttgatctacacatataaaagagagcttgtgatgaacactactcttccattctctctacatgagagaattagttgtcttagcctaataggctaaccaaagacattaatttaaagcatgtctagtactttatgtccatcctattatggcctaatagtaatactatacattactgattatatagttatcattatatgataatactagtcaccaacacttaattatattagtccatataaaatattataatatttaggtcttaataggttcttttgggcatttagactaatagttttatagtcaaataacattatttaaatttgtttggtgtagtggtaatttatttttaaaaaaatttaaggaagttacaagttcaacacaacacattttaaattttttttgttcttttttttt

SEQ ID NO: 202718 - DNA, 1240 bp, Cannabis indica
ctcaaataatattcataaaaaaacccctccaaataagtttagatcacagtcatcatcttaaacataaaaatttaaaaaagaagaaaataattctccgaagatcaattgatgaagctccatggtgtccggccttttgctcttaaaaattgcctccccaaagttatggcttcctttttagaataggtctaaacacctattttttctttcaataagggagcaagccacaacattgggaaaactaatatacctaaaatttttgggaaaaaaattgtcacgacatagctaaagatacatgtttgactatacatatatagattttcacaaaaaaccgcctaagactaattattgttaattttttttataataattataatccatgtaattgtccatgtgtgttagccttcaaagaaacatctacccttttgggccactatagtgctttttcaccatgccacatggctgaacttcaattaatctttgaaaaattttcatttttggtttcaaaaatctccaagactagctaattcacaaaactttcaagggctccacttttagcatacctacattaaaatttataattttttatctgttttcaaccatttttctctattggctctaattctactttatttactaaatcctgaaaacacaaacaaattaactcaaggataaaatagtactaaataaaatatacctacaacacgatcacaaacataatgtaaactaatgcctaacaatcaaaaatgtagcctttagtgtggtgacatagcgacgaaggagggggttttccaagcaaaataaatataaaaatactttttttattaattttttatcactcattaatgtaattgataatttttatattttatttatatatttaataagagttttacataatgtcaataaaaatttgatatttttccattgaagatggtgtaaatattctggtgatggctcatatcttataagaatatatttaaatttatttattcacatattatcagtaaagggcttaagatttaatttgaggggggcaaattcttttttctaagtaatacttcgtattttccattttaaatgttaaaatttgtagttatatatagtattaaatactaattaaaattaaaaattaacaataaaattgtaggttagatgagtaagttaaattgtccaatagtactctaataggagtttaaattcccattacaaaaacacagtaatatattgttttgaaataaaa

SEQ ID NO: 202719 - DNA, 1329 bp, Cannabis indica
aatattgtaaagttcgtagctttaaacttcaatttcatcgattatataacaactactcttttgggtcaatgcctttggggctcaaaccctagactttagcatgctaagtgtgaaatgcagtgtgtttttgcttgcattataatttgaaattcatagatttctagggtttgtgtgggtttcccctttctattgtggaagaacatttttagttagattcctctctttttgtagaaatttataatagagtgcttctgcctttcttagttcttccataaggcatacaactttactggtaggaatttataagaaagctttggggttgggttgggttggattgggtttggttatattgacaagatagtcaactctcttcttaggttaattatagctggaccttttatgattaaaaactagattagaggtggatttaaactttggccaagtattcttgttgagtcctgccctgaaaataatctgaaactttataggaaaaagaaactaataaaaacaatgggagaatgataagagattttcagcagaaaatatgaaagggtttccaagcaaccttagtacctaaatgtttgagaagtgataacaatagtcacactcttattatacttgaatgtcctttttgatgatgcaggtgagagacccgagaagccggatgttttgactgagcaggtagtagctggtgcaaatctctctggaactttgtttcagtttgatttgtctatgttttttcgttttgtttttccccccattaaatagaagaagaaatcttcttattagtacttcattttctgtttgattatcagccacttccacccagagatgaaaggattgtttctgcgaatgcttctccagatccactcattatagggcactcaagcaatgtcacaggacaacggggttctcttgatgcaggtggaagagactatggcacttcccaccattataaagcttacactcctaatgaacagaacatttcatatgctggttagtttcttgagcttctcgcattcttttggtgattgaaggaattaaaaacatctgtttgagctttaatttgtaagaatatataaatggatctttttcacaatcatatcatacctattaatggcttcatttatctaaactttaggtagttcaggttatggtagcaacactggctcttggaatgcatactcacaaaatgtttatactgatggcttgcatgttttatcgccggtgagtagtaattgtttttaataatgatgtgtgtagaatttgtttaaagtctatatttacacttttaattttttttctcttattgtgtaataggttgtctac

SEQ ID NO: 202720 - DNA, 2527 bp, Cannabis indica
aatttgataagaaactctatatgtgaacaaagatatatatcgataagaacttgtaattttgttcaggatataagtttaatggcatatatttctaagttatcaatcaagagcaattaacagttcttaatttttattgaacagatgatataattatatcacgattttcaagatatgatcatgaagcgtgaaagtttacgcaaatcacatgataatttagtgattttttcttaacagtagttaattttaagaataggttgtttgatggtcaaagtaagataaattaaagcctatagctagtccccattctaacaatagatttgtttgttttgcattattattgaataaaaagcggtgactatttgaaaatcaatatataaggatgtgatttaaagatctagtcttgttgaattgcttgattaaaccttgagaaggtaactgacatggacactcgagttcaatggattaaatccattttgaggcaaggcatcaagatagtgactactgtaattattaaaaatggccaattcaaaacgttttcgttagtcaacataacgtgagagaagaatgggagtaatgatatgtttatactattacttgatatagtacattgcgcatagtttatgatcctggtctattctagagaggattaaactgttatttggtaatctctgtaagatgaaaaactcttaataaatcttatatggtctaaatatttaaattctttgtaatgagatcaacaatagactgaattgtctcatagtttccattgactatttgttgttattattaatgttttgaattcattcagaatctttaattagtttaaatatattatgaacaacctaaagttcatgtatattagtaacgacgagagatcaagtttgagattgtcccacatatatgcttattaaaagcagcctagagtttacttaaatatacgcaaattcctatcgtaatatccataacagacatgatgtgttggtacttgagttatcacccttatggaatcaaggatgtgttagcaatcaaaaaaccaatatcgtgtgacatataaccgttggttttattgatatcgattggacatgctacatggatgataaaatctacttatgagcattcatgattctaggacgagctattttgtaattatgtgtcatatgaacacctacaacttcatctctcatacaaagtgagtataatagtatggggagttatatgtgattaggtgttgtatggatatttatagcattctcatttgtaaaggtagagtgtgtggcacgttactaggacattgattgtacattacaattgtgatatttcattttagtgttaagagtagttggctctattgtgaatttagtgaacttatgtgataaatatcgcaatcatatcttgaacttgagtattattgctcgattaatggtgatgacgttctatatgtagtgggaaagtcgtggggtcctccattagtatcataacatgcccttacaaataacatgccaacgaatacattgatacaactaacctgaatgtgtgtactaaaaagacttttcttgattggattgttaggagccaaagatgtatttggtcggtgagagttattgttttcatgtatgatagacatgttaagaattgctattgattgttgaatacatgcatattttggacaactctttgatgttgcgtgtgcacatttattgatgcgagctaggcttagtctcgatgctatgatcgagtggatctagatcaatagttatcgttgtgttatataaatctcaaatgtcttattatgtattatatttgtaacgtgtcaatataatatgatgtataattagttttatagacattaatatttttttgggatttctgtgtattgacactattttttagtgagcacatattggtgtaattatatagtttaagtaagagaatgttataatattttatatagacttacataattaagttgctcacaagtgtcaatattaacatacgtagataactatatgcatggtatgatgttgattatgcaattagaaccatcatgagagggttagttttattaattgtatttgaagcacatggtaataccctaatgactataaattggcctattaagttatagtccaccactacaagcatttgagcctaaattatgtccactttacctttaggataaattagcatatatatatacatatattatatatatatacatatatgtgatttcaatggaatatgagatatatatgggtgataaggtggtaaaatttttttttagttatggatgcatttcataagctctctcaatgcttagaaaatgttatggtgaatcaaggagactcacaaataggaaatgctcaatattgagtagtggtattcgcagtgcgggtgatgatctttttttcaaatcaaatcgcataaacagtttttgtaatttctcaaaccgcaaccgcaccccgaaatcataaaactgcaaagactacactgcaaaaatgcggtgtagtttgaacggtttacactatca

SEQ ID NO: 202721 - DNA, 576 bp, Cannabis indica
acagaggatacaagtccgtagttttccttcttcttgttttctttctttcaaatttccttcaaatatatgtataaatgtttactaaaaatgcaattcacaccaataagtttttattattattattattatcattattattttacaacaaatcaaaaagttatgttattgctgtgtatttatggaattttgtagagaacagatttttttcttaataaagattacttatatgtaaaaaagaaaatagacataaatttttttgaactccacaaaaactataataataatactctaaaaaaaacaactacctagtgaaaataaaggacatatatgacaattcaaaatgaagaaataaaaaatcttaaattattcaaggcttaatgaggctttattttccttctctatgattttttttttttcaacatctgtcaatccattaaaaaatggtaattattattcaattctctcttcctctcctgggaacgttaaatttataaattcagaaagaattttacgtttgttttcctctaaactctctttcttcacccactttctcttccacttaatccaaaaaaaaaa

SEQ ID NO: 202722 - DNA, 502 bp, Cannabis indica
aaaaaagagtaattttaattttaaatacatttttattaataaaaaaataaattagttggtttgattgaccattgggtggctactgaagagagaagagaaacttctttttttctgttttgaagcaatgagattttgaagtggagcactggaccaaatctgaagttggaaagatcaagtacacgaggagtacattttggtttggggctggttgcttgccacagatcatgaatgtcatatttggttgcccgagtcatgtggatgcacaggattggtcacccatactctcaaaattttcaaatacttatattacattagttactcagaaaatacaaatactagaaaaatcgcttttgggcacgaagttcaatagaagtagagcaatcttctgcaaagtttttcttaaccaccttatcttaacctgcactactaactgtcacaaaaatgcaaaagacaattagaggatttaaatagaaatggccaagtgggagagagagagagagag

SEQ ID NO: 202723 - DNA, 912 bp, Cannabis indica
tcagaatcccctgactaatactggcggaaccgaccggtaataatccgtcggttttattcttttcaaaatttgggcggtaaaaatcccgcccaaactgttagaggtagattttccgccggtaatactaaagttccgctgggaatactaaatttaaataaatatttaattaatttttagatattcaaaagtaataccggcggaatgcctttttcgccggtaataaccccattaataccggcggtttggctccgccggtactgagtaaaaatgttgtagtgtttgttattgttattccctaaaaattatttttttaaattatatgagaatcgatacttaattacactaataacgatatgatagtagggtgctagacactaataatacattttataaatttactcttttataatttttgcatcatgattcctaattttttgaaactgttaaaatttattgttagctaaaaaaaatattaaactttagagaagttgtactgttaacctctaattataatctcttactactaatttttttttttttatttttagtcacaataaatttacacaaatattgtatattaaaatatcttgttgtgtcttctaattgtttagaatctcgtaaaaaacggttagtaaacaattattattattattttttattattattagtaattttatttttattattatattattttattattttatttttattttattatttttattattattattattatttttattattattattattattttgaaatagtaaacaaatagttattatgatgacagttatttgacacatttattgaaaattaattcccacatcttggaattttttatttatttttcgaaattaatatttaatttatatcatcaatttttctattgaaattataatgtat

SEQ ID NO: 202724 - DNA, 670 bp, Cannabis indica
gctaaggactatttttgtaacgtacatttttgtagaaattatagcttagtttgttttcatcatataacaatatatttattgactattaatttttttaaaaaaaaataaagtactctaaataatttataattaatgttaaatattaagatcaaaatagtcatttgtacatatatatataataaaaacacctgtaactcacagtttcgagctattttctcaaaattgtaaactattcgatcataatttctcagaaaaataatcagatgcatgctataataatatctatattatataatatacactatcagataaagtatatactaaattgattattcgagctatcatcattaattactccattttttttttcattagctacatgttattttattcaaattttgtgttattatttttttttatttattcaaaaagctgaatatttgattaattaactaattatattttcttcagaaactttggccgcagaagatgagaggtggaatgtttaatagggatccagatgagtacatagtttgctatgttacattaaaaaaaattaagtagatattattttcaaaatggtggcaaattaataaataaagttgtattttatccaattaatagttcaactgtcatttatttaagggtaatttttcttttgttttttggg

SEQ ID NO: 202725 - DNA, 1794 bp, Cannabis indica
gaagtgttatttgttgtttgtttaaataatacagtaaaaattaaagttttttttttttttgtaaggcagtaattataagttagtaacaataattgtataatgacaattgtttgtaaaataataataataataataataataataataataataaactatgaaacctcttataatatccagttctactaaactaatcagagaaaggacttttttgtcaaggaaaaaaaaaacacaatacaccaataacatttattccaaaataaatgtaaagatagtacatataaggtgtatatatttctatcaggaaaataaataaataataataaaaaaatatatgtatatgtatatacatttaatttaattaaaaaaaaaatctacgtataattaaaattttgtttcctctgctttcaaaagaaaaaaaaaattgttttctccaaaaatcttaggccgtcggatgcaactaccctgcttagtgcttatcgacatatataaatgatacacaatataattatttgaataaataaataacgtaattgacagcatatggacccactcggtcaactcgtccgagttgacccggtttatgtcggaactgagtcaaatcgtcctagtccgattctcaccgagactaaagtgagtgagtgacgcattacctgattagctccttctgaagggcgccgccatttttcgttctcctgtgtgaggtcgcaccgaatccggtagtcacaccatagctgtccgtacctttgttcatactctccataacccactcactgctagcgttgactccagccctggacgactcagagagctccacctttacaccggcaccgtcaccggcggcgatggcagctacctgagaaatcgttagcgtctctccaccgagccggactacgggttttcggtactccgccaccattctcttcacttcatccaaatgactcccactcatggagtcagccgccgcaccccagttcagcgggtcaatggagactccagccgctggcttggtcgtgcagaaactctccaacgacacgccgttttggctgtggtgatgaccattttcagcgacggcgggggtctccattgtatagaagaaatatccttcggttatatattgtaccagagagttatgaaggtgttcgatgaaatgcgtatgtagtatatggagaggaaaaaatgaaagcctggaagaaaatatgatatgggattttcttgaaagtacagggagatgatatgtgggtgttatataggtgaattttggaaagaagaaaaaataaataaataaataaatatggttttcaaatgtgatggctgaagaaagactttataattgtatggtatggcatgggaggtaggtgagcatgagagtggagagtgttagcccacaatacaaaggcaaagggggttagttgtaaacaaatcttgaccgttgatcttgatatgatcaaaggatggaaatttttgctacgtggctttaaacaagtgtggactagagaaaaagttctatatagtgtttggtttggtttgagggaaggatagagggagaggggtgtggttggtgggaattgctagatgaatacataaaggaataataaatgcattttaacaccaaaaaaaaaaatagcattttaactaccaacctaacttatacacagttttcttgatctagttgataaatatcttcaactcatagcatttttattagactattagttgtgtaatatctaattaattaaattctccaaaaaaaaaaactaaactactacttttttaagttttttttactttttc

SEQ ID NO: 202726 - DNA, 1021 bp, Cannabis indica
aacagttgctttgtgtagaaaacatgtacgtttaaggagagtttgttagtagtatttttttggggggttgttagttctgtctgttttcttgtaaaaggaaatctagcatattgagctcatgcaatccttacaatacgtaattgtttttctctcagttgatggcagtcaagtcctgtcatgatcgcaatatcacccacagggatattaaacctggtgagagattgctctgctgttaatttatatttgtttaattatgctttttgaccacctaaatgcctgtggagttgctaaaagatttgtttttccaaaaaactaaaaagaaaagaaagatcccttacctatgccgggataatttaatcctacatttatatctggcattttcttacactaacaaaacatggccttggacattaaaaaaaatatgtatataatgttttttttcttctctctttcagatctactaatttattgatttttattattattattattttctgtagggaatatggtgatatgcttcaaagatcagaaaacagggagatgtctgaatgtgattccaaatggagaggataactctactagtaaaatgtactgtaaattgcattgcatggctttattctggttttatgtaactgttgtagcttcatggtcaaagcttctactcttctcatttcaactgatgactttatattctgagttggagtataataatgcaatggactttatattcagattagtggctattttaatttttctgcaggtttcacaaattctataactctattttcccaatatcttcagtagtatacatctatttacgtaattatctgaatttgcattaactcatatgtgcttgtaattttcttggtaacaaaacccacccacattttgtagcattacggcgttgtgagtcaataaagttgttttgtattttgaaattgtttttagcaataaattgctttttatcctttttgtttggtcttgtaatttttttttcttttgttcacacttgttctttgtg

SEQ ID NO: 202727 - DNA, 806 bp, Cannabis indica
ttgctttgtatttaatcatactaataatactgtgtttgtagtttacataccatctactccaaaaaaggagctagctttgttcttgaagaaactgtctcgtctcgtgcctggtctttacgttgtcgacgttgatatcccacttgacattattaccaaagatgataataagctcgaacaagttgctttagggagggaatttcatataagcttgggtaggactgttccaatccgagttcaccagattgactcagttgtggctatgcttcgtcagaagcttcagtttcaaaggaggttagactacagtctacatctttttcgtttttctttctttgagaattatagtacagctgaagtttacatgacccattatgtaaatttggctcaggtattggattgattttagtaaatgggaggttttcctcaatgatgatcgtactcgaacctttttgtcaatggaagttactacaactggattagctgaggtatgctaacaactgaatagtctctctatataactattgtgattactagatttttttagccaaatcacttgggaagaaagtctggctattgaattgcaagtgcaactatatgaaatttatgttaggaagtgaatttcactaccttctagaaatgctttgctgtcatagcaaattgcacagtggtcccaatgtaacgaacttgattttcttggttagatttttctttggtgtaaatgattttgtcatgattgtaaaaatcatctgaaatattcatgtagagttattggaatttaaatcttcttgaattcttgagttgagcttttc

SEQ ID NO: 202728 - DNA, 928 bp, Cannabis indica
atattataaatatataaatgtgctaaatagtaatacgtggagcattttcatttggtgataatgacaacagaatatggtgctattagcttaatagtattaatattttaattattagttataaaaagtgattaaaaaagcctagctggctaggcttaggataatattgatttttatttcgttgactcttattgatgtagttcatgaattaatatacctgtggagaaaactaataaaataatgagtctctacactacatatatgattattcttgatcaacttgtaaatgcctacgtttagaagaagcctattcttaagattgacttatgtttatgcgtgtatatatacaaaccttattattatgattttgtttacatagctctttcctttaataagttctcttgtctttaaggaagctagcgacagccttaattatgggaggtacccaattattcttctctttatacatatatattatgataaaatacagtatatattctgatagattttaggtaatctaatgatcattgtactaggatttgatagttataattcaatacaaaacaactcattcgatcgatatgtgtacatattcatcaaccagcagtactagtaggcagttctattttttttatggttatggaataaagctatatatacataatatatatagctaggtattgggatatatatgtacggatctatatataggtttaggtttgagattaattatgcacaaatgtttatataaatatatatataatctctttttcagttgtatgtaagggttaaatcagcactctttatgttatttctttctttctagatagcacccaattcaattactacgtacctagacatgtaaatgtagaactccgataaaatgtatattattagggtttacattcatatgcatatttccatgtcaaat

SEQ ID NO: 202729 - DNA, 1604 bp, Cannabis indica
acttacggtaaattcaaggagaacatatctgcaagataagacatcgagaataataggcattatgtatatatgggtgacacaacatgtggggagttacatgtagtaatgtttcttagaaacagagagcatttaaagatgattgttggcttgtatgcaatgaagaaatggttcgaatacttcgttaggaagtccaatactactctttggtatgttatatgtaaggattcaaattgtaggtggagattaagagcaaagaagaacctactttctaacatgtttgaggtgactacatttcaaaatgtacatacatgttccctttatgttcgagggaaagataatcgtaaagcattacctttgataattgcccacctaataaattcacaattaacgactcagatcatttggactctgatataaggaaatatatgcaaaaggatttcaagatccaaataagttataaaaatacttagaggtgcagagagaagacactacacctagttcaaggtacacctaaagattcatacaagaaattacttggttacttgcacatgctaaagttgagaaatccaggtagcatcactgattttgtggtagaagatggtcgcttcaagtattgtttcttcttgttgggtccttgtaggcttgggtttaggttttgctgacctgttttatgcattgatgggtctttcttgaagactaggtatggtgggcaaatattgtgtgtagtggcactggatttaggcagccacacttttttgatagctttcgcagtagttgacagtgacaaccacaactcttggaactattttttgagaaaattgaaagaagcggttggtgatattgagaacttagccttcgtgtcggataggcatcaaagtattgttcatgctttgaagctcgtgttccctgatgcacaccacagtgcatgctaccggcacattactatgagcgtaaccacaagttcaagactgacgtcttcacgaagcatatttacacatgtacctacacgtattcaaaaatagagtttcacaaagaatttgataagattcgagcaatgaatgttgcggttgcattatatcttaaggaaattggatttgagaaattggtttggtcatactttctaggggtatgttataatgtaatgacgagtaactaggctgaaagtttcaacaacataattaaggacgcaagaggctttccgatgcttttgtaaaattcctaaggttcaaagtccaaaagtggtttgctacacgaacaagtggacgaagaccatagcaccaaaaatggaagaggacttggcgttgtagtttgaaaatctcgatatttgaacattgacacatgtggaccttacacgttgaatgtccaccatggaggattagttgagagtggtgccgtagtgtacttgcacttacaactttttctaaatcatgaagtttccttatcctcatgcatgtgttgcagctcatcaacgaagtgttagcatgtacgcactatgcttgccatattacacaatagaatgttagaggagcacatatgaaggcacaattatgtcagttcgtgacgaggatgaataggaattgtctaatgacataaagaacatgaca

SEQ ID NO: 202730 - DNA, 519 bp, Cannabis indica
accattaccattactctccccttccatcctcattctctctctctcctcaaacacaaacacgctactgtaactgtaagactaactcattttgaattttgatttagaatgcatatatataaatatcaataaataagatatatgatccgaaaaatgtgattttttttaaaaaaaattggatttatggataagttaaaggtgggtgggtcaaatcccatatagttcggagggtaagagagcttttcaaaaggaaactatatatgcatatatataaatgagtttttgttagactcttataaaaactaactatggcttaggcttagctgaaatttttctagttagttgataactaatgccacgtcaccatttgaacaataaaattaaaattcatttattttatgtttacagaaatttagaggagtaatgtaaatcgcaacccaaaattacaaaaataccaacctaaaattataaaaacattacacatataaattatagtgattattgaatgacaatacaatattc

SEQ ID NO: 202731 - DNA, 738 bp, Cannabis indica
atatatatatgataaaataggttaactctctcccaatagagtcccttatgagcatcattaatgcaagcctcccaaaaatttgcttttatattatacaccatttaaaaatataatattttatttccacccatctacattatttttagcaactttccttctacaaagtacactccaataggaccattgttattaggcaccttatggtgtccaacactatactgatgtggcgcttatcaaaatgtgaaggacccaatattagttcaccaataatagtatatcacatcttgtagtacttgacactataaggtactccttaacatcttttaatactaagctaacactaaaagttaccaccataatcccacactccattattatttttaattttttttatttatttaaatttttaagttatttcataagaaataaaaaagaatatcaaatttcattgtagttttgaaggaaccacgatagcataatgtaatttaatttcaatggccaagccactctaatagcaaaatgtaattgttgtttttcaagtttaaaagttattttagagagtatagtgttttttatatttgaaaatctttttatttaaaagtaactatttaatttaaaatgtgggacttccaataaaagaagatgaaaacttcccccctggacgagagtgcatatggctgaggccagtggtctcttaagggatgtagcctcctcttgtggttactaattttctttgct

SEQ ID NO: 202732 - DNA, 2321 bp, Cannabis indica
catcagtaggattttcaaccttcacgacaagagaaataactatttcatttaaatctggaggtaacttaccactctggaagaaatctaaaatagcagcggaaatttcctcaccaatttctccccaaagccctttgaagaatcccgagccgtacccatccaatccaggactcttggtgttataaatttcgaaaagagctttcttcacatctttcttgctgaaaggtctgatcatattaatctgattctccaagttaaggcaataaccataaccaagacactccttatttatacctctaataattaaacttttcctccccattatacctctaaaatggtttagaaaatgttcaatcactttaggataatcatcaatcacaacatcattctcagtaaaagttgtaactctattctcaagccttctcttcttcatgaccgcattaaagtactgtgtgttttcatctccacatttgatccaatttatcttgctttgttgtttcaggaaccaagtgtagctcttcaattcattatagtaggttcgttgcatcattattttttcctgttgcttctctatattactcgggtcactagccaggtctccttgcactctgcttagattctctttggccttgctgaacttagctttcacatccccaatccccttgccgaatttcttaagaacatgattcactctatagagcttcttcgataggttcatcatgttaccgttcctgtcaactattccccaactagctacaattgtccccttgcaattattctgtaacatccagtgattacagaatcgaaatagtttgatactagcagtgccaaagtcatgatgcttcacaatgcaataactatggtccgaacagggatcccatttaaagcaagcctccgtacaagcgtacaatgttgttataccaaaattttaattattaaaatattgtcaaacccacgtgaatttattattaaatttcactagttactatattttttttatttttatgctttaataattagacaatttaaagtaaataataattaagaatgattaatataataactgaaaaagtaaacagacaaaaaaataatttcaatctgaaaataaagacttagagtattaatttttctattttaaactatgaatatcagtttaattactaatcatcccaatttattttataatttatagtttcaagaattctaatgtaatctattaacctttctcgagtgataatagaattaacttaattaaataacaagatatctgtatttaatattaatcaattaagcaataataaaacaatatgattctctttaattgaaactcatagaattcttggaatctcttagtgtcacacttttcctatgtcatataattctatgtctgattttaaattacctcttgcatgtgtaaaacctaaaatccatatactaattaatggtgatagagcattaacaacatgataattaacataaaattgcacaaacaaataccaagaataaacatgggaataatctaaaaaatttaattcataatctaaaatagtttcattaacactctaaaaagaggattttgttcacaatcacaaacataataaccacaacaatattctcagggtagggaagatatcgacccccactttgacctaaaaatttgacctggaaatttgactcaatgacatgaaaaacacttttgacacatggcaagaaggaaaaaaccctaggccccagccaccaagactaatggtggtcaacttgggcattagaaattgtgatggtgccctagttgggcacccaggtaggcactatgatcctgcgaagacgttttagctacaatacttcgacaaagttcaagcgaacatgtcctaatgacccttaaagaaagaaccatgaagttgaggatgtcacgttgacatcccagggcttaacctaggtacaacattagtgatggaaacccaggtcgacatcctgtgtgccccatctcgcataagttttggttcttatcggcttcttatgggcaatctatttagcaattgtcctaagatacatgagagacatgacccaactaagttttagactttggatttaagtctacatgtaatggaacatgggcaccaaaagtcctaatgggcgtccaagttgacatacagtcgatatgggcacattgcggttagattttaggtttctagagacatacttggaccccaattcctcaaatccatcagggaacattgcaaggacatgaattaattttcatcaacaacatctcgaagaagcccatacagaactttgggcgcttaggttgacatttccacctgggc

SEQ ID NO: 202733 - DNA, 723 bp, Cannabis indica
ttaatttttttaaaaaaaaaatagatatgcatttaaatttaaatcacaatctttaaaaaagaaactaacagtttctgttattttctgttacatagatatatgtatcagttgaaaaatgccatttcttcatatttttcaactatttaagtttccaaaaataaactacaatcacttttatgtatttaattttatactatattttacagttattctaccaacttacaatacaactaggttaggccaattcggccgcggaggcggaattgttagcaattttctgggcactgcaactgagcagagagcgtggtcatgagttgtgactgttctaactgatgctcagatggtggcgaacgacctgcaggctaggcggcgtccccctgtgtgggaagtcaggtcgttggctctttccacccttaatctatgttctgtttataatgtttgtaatttttattttatttctcgtttagaaaatactatgtcagatgctgttgctaaaatggctagaattgatggtaactatgatggactttgtatgagggaggggtcccctggtgtgatacccaattttctacttcaatgaactcctctgtgttctttaacaaaaaaaaaaaaaaaactaggttagagttgcctaaaaatatatgggtggggtcgtctgccttgatggctgatgtgattgggtggtatgataaatttagaaagataggtggatcggaaaagatg

SEQ ID NO: 202734 - DNA, 956 bp, Cannabis indica
cttattagtttaattgcttactctttcactgtttttattttctagttctaatcttttcttaatttttattcaaccaaatagaagtaaaagtttaattctaacgtacttaactacaatcctcgtgggatcgacctcactcttggtgagtttactacttgtcacgatacgtgcacttacgtgtgcaaaatatcacaacagtcttcttcactcaaccaaactagttgagtaagaacttcatcttcatcttgttcttcaaaacccctaagaagaattaaaattactggccaatggaacaatcataaaaatttcaaaatacccaagtacaatccaaaacaacaaaattttaacccgtatacttttttgacagtaaaataattcaaatagagttagagaattatacattttgatgttcagagcttgaaacagagtgaagaacagcaagataagcttttggccgacaggtccaccggagctccgccgtgcgtggtggtcgacgttagactatgaccacgcatggggaatcgagccaatggatctggaagctctcagcacgtgaaaactgaaactggggtttgtttagctcgtggaaacttgaagaaagtcagatcagagctgagaagtctcatccccagcgagttcttcaataacggcgaaggatgatggaaactttaaggattttaggccttggggtttggggctcgtggaagtccgccatggcctccatcttggttgtggacgactgacgacacccatcgaacttggatcatgatggcgcgagctagggaagaaggagatatcgagagagagtgagggttcttaagagaaaggtatggtgagagaggggaaaaattgggtcgggctttatggttttggggatctttagcggctggaaaattttttaggggtcgtcagctgctgtaaggaatttttggtttgggtataaatttgtcgaggtc

SEQ ID NO: 202735 - DNA, 2641 bp, Cannabis indica
ttcttctccaagattcccttccactagctagttctacttgtatttctgtttttacaaataatggagaccattggcataaacgtcttggtcatccctctatgtacatctctaacaatttcaataaagatcatggttttgattcacatatttccaagaaccatttttgtcacatttgccatcttgcaaaacaaaaacggcttccttttatatcaaacaacaactttgttgaaaatacatttgatcttatccacatggatatttggggccctttcaacattataagtattgaaggttataaatatttccttacaattgttgacgacaagtctagattcacatggacttatatgttaaaaactaaagccgaagtacaaaccatcatccccatgttctataatatggcatgtacacaatattctaagcctatcaaggccattagatccgataatgctaaagagttcaatatgcaatctttttatgcatctaaaggcattcaccattaccattcatgtgttgaaagaccacaacaaaattccgtcgtggaaagaaaacatcaacacatcttaaacattgcaagagctctttgttttcaatctaatttgcctctctcatattggccttacctcatttatactgccacctatctcatgaataggaccccctcacaactacttcaaggccatacatcttatgagatcttgcataataaaccccccatgtatgaccatcttcgatcatttggttgccttgcatatgcatctacacttccctctagtagacataaattttctcctagaagccgtgcttccatctttattggatacccgcaaggcatgaaagcctacacattactcgatattgaaacaaatcaaatataccactctcgcgatgtaatatttcatgaaaacatctttcccttcacaggtcatacatcttctcacaagataaataccttttttaattcattcatcaaacctgtgtttgaacctgtccaaaaacatcatgctgctgccacctcccagcagccatatcgtgttgacaattcctcaacacattctggtgtcaatcccacaccaatatctcccacaagtgataatcaatcaccccccattccacttgtcccctccacggaccataacccactacctgctgccgatatcaccccagcaacatcaccaaaaaccagctcacaacctggttttttttcacaaacagccccacaaactggtgttaatccaacaccaacttcagtttctactctcacaactgataccaccaattcaattccacaatctttgcctctatccaaagctggcagacccgtgattaaaccaaaatacttaacagattatatctgtcatacaacctccacagcttttccaattgataaattcatttcctatgctaagctcagccctcattttcgagctgctgtccttgcagcttattctcatgttgagcctaaatcatactctgaagcctcacaattcaaacattggcttcaagcaatggatactgaaaccaatgcattggaaaaaaataatacatggactgtcaccaagttacctcctggccacaaggccattggttgcaaatgggtatacaaagtaaaatacaatgaattcggtgaagttgttcgcttcaaagctcgacttgtagctaaaggattcaatcaaaaacaaggcatagactatgatcaaacctatgctcccgtggctaagttcaatacactcaaagttttccttgcactagttgcaatgaataattgggatgtccaccaaattgacatcaataacgctttcttacatggcgacctccatgaagaggtctacatgaaactccctccgggatacaaagctcctcccgactcagtttgcaaactcaataagagcatatatggccttaaacaagcctctagacaatggtacgaaaaactaagtaccacattgaaagctgaaggatttcatcaatccctttcagataactctctattcatcaaacaaacacctaccctcactcttgctgtcctaatttacgtcgatgacataatagtggctagcaataacaaactagccataactcatttcaaacaattcttggacaacaagttcacccttaaagatatagggccactcaagttctttctcagcttggaaattggaagaacaaaacatgggatttccatttcccaaagacccttcaccttacaacttcttgctgacacaggttatcttggtgctaaaccggcttccactccaatggaaataaaccttaaactcagcaaagacaaagggaacctccttcccgaccctactatatatcgaagcttaatcggcaaattaatatacctcaccatcacgaggcccgatatttcctatgccgttaatcatctaagccaattcttaacatgcccgcgagtgccccatctacacgctacccatcgaatcttacaatatctcaagcgcactcccggacaaggccttttttatccatcaaacaccaccccacatgtttcagcatttgctgaaactagcttatcatcaacaaatgttcaactctctttttttgcagacgctgattggggatcatgtcaagacacacgtagatccatctccggctactgtgtcttccttggccaagc

SEQ ID NO: 202736 - DNA, 631 bp, Cannabis indica
agcgacagagcaaaacaccctttcggattggatttgctccaaattgatcatctttgaaaaagaaaacatataacgctatcaattgccaactcttgagaacgaataaacggaatttgtaccaaattacactacttataattgacaattatttattaaattaactgtctcactctcatttagttatttagttatgggtgctgctacacgatcgtggtgcccttcccattgggacattccttggaaaagccgtggaatggtggtttttggggcaccccctaattaggtaatatttccagtgttgtactaaaatggtagagtaaatgaaaaaattagttttcatgtctccaatttggtacatgttaaatttggtataatatataatattatgtaaaatttgatgcacaataaatacaattttttaattaaagttttgacattatttattgatgatagatttcagtacacatttttaattaaaatgttgtcattaattatttttaaaatatttaattattgatgatcattaatgatattttatcttttcttttaatttgcatcttaaaatgtgattatatattgaagtaaaataacaaatgctataacaaatattatagtaaatatagcatttgtt

SEQ ID NO: 202737 - DNA, 534 bp, Cannabis indica
taggatcatctattaaacaccaactttgtgctcttcttcatatgcatgaggcggccgatggtagcttttacctgggactcccgagtactatgagccgtaacaaatcggttgtgctggggtaccttaaagatagagttcaaaaaaagattacaaagttgggagggcaagtttctgtcgagagcggaaaaagaagttctaatcaaatcagtgatccaagcttttcctagctatgcaatgagtgtgtttttgctgcctctagaaattagtaatgatattgagcgtgccatgaccaagttctgatggcgattcaataagattggcagtaaaggtattcactggatgtcatgggataaactttgcaagcataaacgatgaggaggcatgggctttcgagatttgcgtgattttaatcttgctcttcatgaaaagcaagggtggcggctgctcacaagaccctcttctttggtttcaaaaatctttaaagcaaggtattatgtggatggtaatttttgtaatgctcaacttggctctaat

SEQ ID NO: 202738 - DNA, 2057 bp, Cannabis indica
aaacttaatatatataatctgataagtataaaaactttttaataataataataaaaaaaacactttattcataaaacttattttacaatttcttagccactaagaaatcgctactttaagggtactaggtcaaattccaaatacctctgattacccagataaatatagcatcaatttatcataatactcccataaaagtcactaatttaacattgttatgatatttttggctcccaatcgagtctccaaggtcaccaaacctaaaaaataatttattccagaaataggtcatattatattcacacatgctatataaatctctataattaataaattacacttatttatctacttatgacaaaacttaggatttatgttgaaatagattagtaggatctaatctcactcataacctgattagcccataatatatatatattaaaccctaattatttaccactaggcttatcgggatactacagccatgcattccttatagaaattttgtcttcaaaatttacctgaataattcgagatacagttcttgcatcgacaactctaattcccaagtcacttcctcaactttactgttcctccacagtactttaactaggaggatcattttattccagagtactttctcttttcagtctagaatctgaacatactattcttcataagataggtatgcctagagttcaatgtcatcgtagagatatgaaagacattatgtagactagacaatacgggtggtaaacctaaccgataggccacctagcctattcgatccagtatctccaaaggatcgataaatctagggatcaacttccctttcatcccaaatctacgcatccctttcatatgtgatactcagagaaatatagtctcccacttgaaattcaatatccatatgcttcggatcgacgtagattttctgtctacattgtgaagcgagcgtacgagatcgaatcttttcaataattttttagtatccgtagcacccaaatgttgacctcatatttggtgccaatggtgggtctactctcagaggcacgggcctaccacttggatccactggggtgctcgtgtcagttgggccaactgtagtggccagacttgtagcgcttgttgtggtgacaagattcaccacatctgtagtattcatagagattccagttgtgactggaacctgagtgcctggatcaactatctgcggttcttgagggagacctgaagaggtagatggtgcgacatgaattcttcttgtgctcaccatggcatttaatcagattacgatatccaccctctcaatgaaagtaccaaactgctgacctcaaaaactgatcaactgacagtggggtcgtaccgatctgatgcttgccacgtgtttgcacgaataacaataaaaagcaataaataacaagatttgttatataggttcggcccccttgtgatagcaagtaatgaactgcgccccttttaaatgtatttataccgagggaaatacaatccaaatcgctataggtgggatctgatatggtacccttaggattacaaggtatgaatcgatactggcaaaactcaagtgttgagatgtgctagggtaggcatgtgagagagaggaagtgaggaagagagagagtttaacagacacttagagttaggagcaagtttctggcttagaggcaacttaggtttttagcttaaggttaaagcctttatataggaagcctcaaaccctaggtttacaattcaaatcccttaacttatgcatagtttgttagatatttacaaaagaccaaagtgcccttgattcaatatattattcaacccttctattgtgcttttatggcccaattcgcagcctatagcctcttatctacatgtagaattgtccaggaaagcctgcagtgcactccttggctgaccaggcccctgtggaggccaggctggtcggccatagtgcagtcccaaggataatcggccatagggtgggccaggggtggccacctagctcctacgacggagctagaatgtcacttgatgcctgtttgagt

SEQ ID NO: 202739 - DNA, 1964 bp, Cannabis indica
gactgcaactgcactgatgatcagttaactggtaatttggttttatatttatttttcattgtaagtttaagtttttatcttaattaataaattattatagttttttaggaatagtgtgattaattgtacacatgggacccagattaaatctccatattttttttaatttttagtttaaaattaaaaacttaactttatttaatatacttaatagtaaattaaatttaatagtaaataaaaagggacaaataaccctaaatctcatcatattcgaaggcctaatcgtccatttcacgaggataagacgacttcctcttcccttgacattgtgatttggccattgttgtctgtgcaagttacttttattcaccaaggagagaaaagggaatggaatttggggttggtttctgggtttgctttttagtttgactacctgtgatggtggaagaagtcagcaggttaaagacagatgagattcaggcttcatttcctttttaatttttttttttatttttatttcattaaaataattttatggaaattaaatttatgttagacatattagattaaaaggttaatttttaattttaactaaaatttaaaaaaaaaatagagatttaatctcggcctcacaactaaaaaaaaatatagtatttaagtgtataaaattgaaaatatatgtatttgtgttgcaattttttttttattattaataaatttattagctattttaattaaaatctattgttttctaactcttttattactttaatttatagattaagaaattatctaaacaacgagaactggagctgatcaaattgaagaaatgcgaaagacaaatagcagatatatttcgcattataatgacgattgagagctttattttcaccatactgaattttgacgcgttaaccgtgaattgtaaccacggcttaattaatataattattcaatccattatcatattactaacaggggtaggtgtgtttgccatatacaatgaaatttggcatgggactcaagtgtggaacagtttaagaaatgaaatagaaacacaatttgacaaaataagggttagcatggacgaaagtaccctttatcaattaaaagttagtcatagcgtgagtgaaattcgctattttcgatttagttatggaagggtatattgtattctaaccctactctttttctggggatttatttccgcaatcacaatcggaaatttgtcagttgttatacaaatttgtaaatagttccgttgaatgaataattcagtatcttcctttcacctcttttcttctctctttctatctttatctaaatttaattttatttgttttgatttaaaaagtaacgttggtgaaatgaaaagaaaagaaattaaaattggtaaaaatatggccaaagacatgaaaatgtggtatttttaaagatcatatttagtcctgcccgataggcccaatcagcccaatcgcctcatcaaggagacaagctcgacatgtgtcgagctcccattagcggatgggaagcgaccccatgccatgagccttgttccccttgccagccgccaacttccctcacgcgcgtgtgccagtcaccttctcctctcagccgcgtttgcggctcactctccgtgtgcgcaagtgggcgtctcccgttcgtggtccccagtcaccaaaagcaacatttctcctcccttctgcagccgccaagtgtccaacttgtttcatctttcagccaatcaacaagtgccgcgtgcattcaacatcaatacgagctcaccgtgtggcactccgatttttaacccattctattttatgttgtgcaatttgttcatgctctaacctttcaagtgttaatttaccttttttcttagttaaattttttataatctttttaacttttcttattattaagtatttatttttatttttgattctcagtacttatgatttttttgc

SEQ ID NO: 202740 - DNA, 1129 bp, Cannabis indica
tacatacatacataaatttttcttctaataaaggaaaattatgcatatgtgttatattattattccttccttgctttacataatggcagaatataataaagaatagatttggtatatgtttattcaagatctattctttgcctccttaacactcatcttaatttttcaatgagatatatatagctaaagagtactagctacttggtaaagtttccaattgaaatagcaataaactaatccaaattaaaaaccaaacattcacttcctctctctctttctctcaataataaattcaactactgtagtagtttaagctatatagcctatatagatatggatatgatcttatttcaacccaaacattctataggagctactatttctaattccctaaacacaagaaatgagagtttcaatatcataagcaaattccccactattaaaagtgctcaaacattatggaataataatgatgagaataagcattgtaggcctacttttcttccattgtggtcattgaaattaaaaagaaaagaatgggcagtgaaaaacatcggcggaggtggatggcgaattcagggcatcgacgacggttcatgtggcatcgcgccttacatggcgccatcccctattgatgtggttgaagattttcacaagtatgtcaacgagagaaacttggacaagttggaccaacttctcacaaataattgtcactatgaggatctccttttctatgttcccttcctaggaaaagaggtacgtacctagctactactacaaaatgtgtacatatattattttagctataatttgttcttaattagtcactccatttatataatgtgtatccttattaataaagttggaattttgatttgttattattatatgactaattatataattaaataattaattaaagtgtatgtgtgtagggtgtgaaaaggttttttgatagtgtgatagatgcaatgggtccaaatggtactattgtgattgacaaaatcacagaaggccagggattgactgcaagtgtattttgtcatctaggtacgtacttatcttcttcataaatatacactacacctctagtgttttttttttttttttaaaaaactttttttaaaaa

SEQ ID NO: 202741 - DNA, 917 bp, Cannabis indica
aaaaaaaaaaaaacaaaacaccacacataatattaataacccatcatcaattatatactagaaagtaataataatgataaaaattaaattacaatttaattatatttttttaatatacaaaatttaatttagttttaaatttaaatatatttaaataattttactaaataagtaaataaatttaaacattttaaacaataaaactaataaatttgttaattaattatttaaattaacgtctaatttaaatgtaaaaaaataattaattaattaatttaagaagaattactctatatatatttttttttaaaatttatggtttgagtttctaaagtggttgcagcgctaataagagtttctatacaatattttgttacaatttaagtcgcagcaccagttgcaatatgtgtttttatgtagaattctgtaataatacaaaaaaaaaaaaaaaactgttttaaaatgtaaaaataatgttcatttaaaaaaaaccgttaaactaattattttcgttagataaaagagattgaaagagtgacctggtgaggagtttggtgaggtgtaatacgagcaccgtcaaaggtgaatcgaattgtgccaaaatcataccccattttaagacaaaatgaatccattacctctctcagcataacatttctgttaactctgaatatcacttctcctaaatcattctatacatatataaatatcaaaattaattagtcaagaaatttataactatatatataattaataaagtttagataaaatataataattaaaatgacctgcatttgaactttgatagtgacgtgagaagaagtattaatctcaggtttgatgtcctgttccatctttcaaaactttcttccttgtttttttttcttcttcttctatatactacatgtatttatatt

SEQ ID NO: 202742 - DNA, 1426 bp, Cannabis indica
agtttaaatgatcttattattttttatgtgtttcaacttaattctgtttcatgtactactttttagtaattggtttgtatcatgttttgattttggtatttcttgactgatgtgatggttttaatttttaaattatccgtatctaaatatctgaatcaattaattttaaattaacttcttgttttttcccattaatctccattatcaactttagattcaattcataatgccttatatgtttatatttgactttcttactttgctttttcatttgatcatgaacatagaggacaattgagttttcctacaatatatattaagaacttgaattatgactaataagttggaaaggaaagaaaatgaaatatttattaggataccatggcccataacacaaattttatcaaaactcgaatttttattaaaaaaataaacaaaaaatataaagaaactacagattatttgtctgtccgttcgacggtagtggtcgtggttcgtcggccacacattagagagaaccagagagaaggagagttgtggatggtggtcaccgatgttcgatggtggtttcagtgattgagtttggtgagaaccagagaaagggaaagaaaaaacgagctagtgaaaaagaaaaaattactgaataaatttgggtgattttttaaatgaaaaaaagtaatttgaaatgtataataaaatgtatctatactatgaatattaaacaacttagatttaataaacctcaagccgaatgtattattttattatcataataaacctcaagtaatttttggaattaatatgaaaattaatttcaatacaactactcgatacaaattcaactatgtaattaactaatgtatagttcacacataaccttaccttaattaccttaatagaatcatacaacacaactacttatatatattgttctctttcatattccaaccaatgatatgcttccactcattacataataaatatactatgatattacttagtgtttgactttgactcctcctctttacatataattctttttgtaaaatacgacaaaaattaaataacttatttattataatggaatttatgtaagagtataacaagacaaggtcagcatccacgtaataattatctgcagccgtccaaaatttgtcaaacgcttctgattggttaatggatcaaatggatgggcccaccattaaagggcatgataacgtggacgtacctcaattggccacgtagctactttagtaaccccatgtgagtttgtgagattaaaataatagttattgtggtctataattggtgatattttactattaatagaccgacttttattatcatcattttcattgatttaaccattttttttgttgtataataatgagtgggtgccgacaataaaaacctacgtatctatctc

SEQ ID NO: 202743 - DNA, 592 bp, Cannabis indica
aaaaatcagattaatgaaagcccaattatttttacatgtgcataaaggcatagtaatgtaaatatgtgtcgtgctataaatatagatcgtggtgtcgtgctataaaaaaatataggttatgtcatgtcgtcccgtaaaataactacaggtcagatcgtgctttactcgaactggatcgttttcttatatgagctcaaattggttttctacttttttcgtactttttttttcaattaatgagataaatattaatattatgtgtttcttttttgtagattcaattatttttatgtaatttttggacaatttttaacataaaattatttgaaagtttactagaactattaatattactattaccaattataaagtttttccatgtcacactttcacaataaattattcgtgcttatgtcttatgcctttcgggcttgtcctgtcgtgtcgtgtcgtgtttaagcccttgtttttgtgtcctgttgtgctaattagtagaatcatgccatgttgttcccatacccctatttttccatgcctagtcgtgttggtgcctcttaagctcgtgttagtttcatgtcgtgtcaaaaagctc

SEQ ID NO: 202744 - DNA, 1194 bp, Cannabis indica
ttaatacttattcacagtaaatactcattaaaaatatactcataagtagtttatatcaatctctcgaaaagaagactatccatagtttttttctgtggcaaagaagactatcaatagttagtttaattaagacattataatcttttttaatatcatacatatattgtattatagaccttccataattctctaaatattctaaataaattactataatctgagtataaataaaaaaatatataataaaatatttaaattttatttttattaattacagtaaattaattattataattttttcaaatacaacaacaaaaatatctacatgtggtcctgttttcttgtggtccattgtacatgttttgctatattttgttgggagtctaatagtgatatgtaatttaacttttttcaataatgttaatgggttcatacctctattaggaaatgccaaaaaccctaataaataaagtttagtctaaagtccaaataaagagaggttccactaatatatatgtgtggtacatatatactactcaatacacttatatatgctattatgctcatatttcagcagcattgtgatgatatatgttgatttcactttccgttttatttgacttctgaaaaagaaaagaaattaaattccaatttgatatcttattttctaatctttgacaatcaacaaatttgtatgtggctgtggtgcaataattgtatgtactgtgcttcattatattcttttggacttatcaattttacttggctagagttgatccacttaatttgaaactgagttgtcatagtttggttttggtcacatttttttttaccatttattgtggaacataacattctttgaaaaatttagcaattaagaaagaaagaaataatggtgtttgagaacctaacatgtttgaataacatgaagtttgctgagttctaacctttattagagcactcagatattaccttatcaaaattgtatttatctttatttatgagtaacgatatggacacacataaattgataagcgaaatacatcttaaataaaaataattaattaaaataacttatcacatatgtgtatcatatttgtgtgtcattgtacttttattttattaccttattttttttgtttagtatagcgtaatgttattttataatgaattaataatttaatagcttcaagg

SEQ ID NO: 202745 - DNA, 792 bp, Cannabis indica
gggttgtgttggttcttttggttattggctactcaccctaatatagagaccaaaattcttgaagaaatgaaaaacaagttgggaactaattataacaatttagattattattacaaaaatactgaggagttgagtaagttggtgtatttacaagcaacaatatatgaaacatttcgactatatccatcaataccttttaaccatagaactccaactaaagaagatgtttttccaagtggtgatcgagtgaaggcgaagcaaatggtgttgacttgtgcttacacaacggggagaatggaagaggtttggggaaaagattgtttagagtttaagccagagagatggatttcggagaaaggtgagtttgtgtttgtgccatctcataagtttccagcctttcatgttggaccaaggacttgtttgggtaaagacatggctttggttcagatgaaagtcatggccctcactatgcttaaaaattaccaatttcatcttgtggaaggacatctagtatgccctgttgtgggcattgtcatcaacatgaaatatggactcaagattatgatttccaaaagatcatgatcatgcatgaaaatgatatttttttagagaattacttgaattatttgttgacttttgatgtaatataatatttttaaggaatataatgtttgtttggttgattaaataaagtagcacaagtcttataaatatttggacacaacattatttaatatagtgtgggaatattagaccatcttgcgtaaaattatgttaaattttgttcaaaaa

SEQ ID NO: 202746 - DNA, 607 bp, Cannabis indica
ttaaactagcaaatatattcaaaccccaacagcaaactaaatcaacagagaagaaaaggacagagttgacttggatttcggtttgaccatttgatctaacccacgtggctagttgcatgttgtggaaaatcggtgttctggttaggtaatttgacagccaggattaaaaaaattcagctagcacgaccatatgtattatgtacatacatacatacatataaaaatatatatagagagagaagcacgctatgaaccactttgacatgatttattacgtacaccaaaactaattaataattagtagatcgattgatcgattaacaaatgatgcttttcacactaaataatatatatatagtagtaaaaaacataggtagatgattaatattttttcttataagaccatgatgaatctcttatgtaccaatcttgatattaatttatctttgtaatttcagttttatatatatgtatacatagtatgtacacaagtcatcatctttcagtcattattattttccaacaactctgtgtgccctgatttgattccttaattttcctttgtttaattaagcggttcaaactcatttctcttaaatttcaaacc

SEQ ID NO: 202747 - DNA, 749 bp, Cannabis indica
ttttttttttttttgaaacattagaaatattgagttcgaactcgatatatttctattttttttttcatcctgactttaatttttcatataattttgttttgtaattataatattatgtccttaatttttttataaattttaaataataaaaaaaattaagtagattattacaaatgtacacatatagcggaatgatctcaaaaagaataaatatatagcggaatgttttgacaatatgtttctagccacagaaatcacagtagtattattacaaatatacgaattgtccttataatatcatgtaaaactttaatgtgtgcgttaatattattggttgtttcacactgatataagttgaaatttagaaaatattaattgattgaatttctcagctcaaattatgttgtgaattgtgatagtattgtcttttatacaattctcaattacaatcaatcaatactttaatataaagagcaaagaatcaaatagctgtggtggtgtgctataaaggatagtgcttgtttccttgggtagaggagaaaaaaatgtcaagacaaaaaaacaaattatccaaatgtcatttccttaaatattctttatctaaattttcactacctacattatatattaattttttgttttattataaaatcacacatgcagttaaataatatttcgcaaattgaaagaaaactcaaatttagataatatgaaaacaaaacaatattatatttgtaaaaaaaaaaaaa

SEQ ID NO: 202748 - DNA, 857 bp, Cannabis indica
tttgttgatattattagtaattgagcaacttttttccgcccctggcaattgaaaataggttctattggagaaagagagagtggggacttaatagtgaataccatagaatttccttagtaagaagaaagtatgtggaggattaatgcaaatgcgtttggcttttgaaaatgagtttatttatttattttttaatggtaaatatttaagattaatttttgattacaaataaatatttacttttattttttatgataataatagttaagttataaccaatcaaaaatttgacagataatttattaatttagaaattattacagtgaaaactcaaacttaaaaagagaaaaaacaatcctaaactatcagagagagacacaccacaatggcccgaccctctcctcccaacatttttctttctcggctcctaggttgacgaccgacctggcttccctccacaatggtagtgtaaattaagctgcaaattagttaggtgtctataaaaaattaatatcatatatataattcaatattatattatacaatacagtgtaccaaacaaacacttaaataataataataattcgagttggtggagggtggtctaatgcagaatacaaaccaaacccccgatgatgttgttcgggttggacctatgagttctttttcacatggtctggttgagcgggtcgggtcaaggcagattaacctaatccaagttaaacccggacaaaatattcaattctcttctagtttgtgaattaaagtgcaaaatcaagtatctgtttatttaagttttgccgccaaacataaatccatttgtattatttctaattgtctaattctttctcactgtttcg

SEQ ID NO: 202749 - DNA, 1895 bp, Cannabis indica
ttttttttttttcgagaaatttcttcttctcctcctatgttgatctttctccaaggattctcaaacttccaaaaatccttgaattctattttctaagatctccattgttgacctcgcttttagccaacaacagtggattaaattgaaacaattgataataattaaataacagaaagtaaataatataaaataaagaaaacacaagattttatagaggttcgaccccttatagctggtaatagcccactcccctttttgttatattgacttgtaagaacaagaatgatttattctttctcgaaagttcttacaataatctctgagtaatttattcttggatcaaggtttctctcttgagtgttctctgtgtgaatactttcgtgtccctgaatagtgagatgagaccactatttatagagattaattacatgaaattagtttccctaaattaataagaaataaaatgagaaactaatttgtttccataattacaatgaagaaaatgtgaaacttagcctgattgcctttattctttgaagacataaatttgtcccatagggattgtgtcgtgagttgcaagcttggaatatgcaagatatatctaaaaaattactaccttgcatcccctggtcagtgtaagtgagaaatctgtgtcatggaagctggtcggatgtctatcaatgatctgttcggacatcccaccttctctgtgtgacttcgaacatcataaccacctgtacaacttactaagagtaaaattatttgcctaggttttgaaatatattacatgtgtcacctagatggatgccacgccataggatagaaatttagataatacttttaccccaagttagcgtgggttcttcttggttgcacgtggacttattcggtagataacatttttacctcaagttagcgtgggatcttctcggttgcacgtggacttattcggccaagaagctgtttggataggtgacgcgtgtctagttgtcatctttgatccgacgtgaatcgatcagatgtttcttcgatgtctatggtatttaatgcctgtcttgaaagttgtaactcaaatcatgtactaacggttatacggttcagcatgcatgacgtttgtactgccgtaatgagtgctaatgttattttttaggtgaattcccaaaaaattctaatttttaaatcagtggtacaagcgttacctgcttacactatgaatgtttttctcataccggttggtatctgtcaagagattgaacgatcaattagtaagttttggtggcgatcaaatactaacaaaggcattcattggttgaattgggataaactctcgaagcacaagactactggtgggatggggtttcgtgattttcgtgattttaaccttgctttactagctaagcaaggttggagactacttacttgtgagagcagtttggtggggaaaattttcaaagcaagatattttgcaaatggtaatttcctttcagcatctttaggaaataacccaagttacatttggaggagtgtcttggaatcccaaactttggttcgggcaggggatagaagattggtgggaagtggctcacaagttaatatcctaaatgacccttggttagttgatgatgctaatccttttgttgagtctcggcaagaatgccttgtgggaagaatggtgaatgctctcatgaaagtggaggtgcgtgaatgggatgaagaggtgctgaaggatgttcttactgtgagggatcaagaaaaggtgtggaaaattcctttgcttgatgaggctgagtgtgatgaatggtattggaggaaggagtctattggtttattttctgtccgaagtgcctatgctattttgcagcaggaaaaatccagcaacatgcaacccagtaatt

SEQ ID NO: 202750 - DNA, 901 bp, Cannabis indica
ccccactgaaaagatgacttggaaaagaacaagtagcacgtatttatactgaccacaaaagtttcatatatttttttttgaaaaagagttgaatatgaaaaaaaaagacggtgattagaattagtaaaaaattatcattgtgagattctttatcatcataggaaagccaatgtggtggatgatgctctaagtaggaaagatttttagtgctatgatgatttctcctcaaatagcggttgacatagttaaggcggatattgagtttgtggttggaaaacttagtaatttgacattttaatctgatctattaaaaagaattataagtgcccaaatggaggatcttgagttggttaagtctcgagaagaagttttagctagttgagctaaagacttttcagtatcagacaatggaatgttgttttacaaaactcgagtttgtgtttcgagtggtggtgagctcagaaaagagatcttattagatgaagctcatgttggttttatagtactaaattaaaaacgcagtggaaggatttcgtattgctgattatcattgtattatatctcaatggatctccagatgtgtgtacattaaatcagaatataaaataataacaagtttagaatatacctattgaagactatcagggtatcctcgaaacttctcgtatgtatcatatccttaagtctagatgatgaggatgatggaattggactcacaccaatgtcttccaaatcgttccaccacatacaaggaataatgtagactattaggataaagtgtatatgtttgttcttgttgagtttgcaacacatgagcaagaaaaattgggagagattttttttttcttttcctcctattaatttcgaaaattatagaagctgtttggctgtgttttcagtt

SEQ ID NO: 202751 - DNA, 714 bp, Cannabis indica
ttcccttaaagatccttgtaactttttcctttgaactcaggcccagttagcaagaaagtccgcaaaaacattgaaagacctactaatagaaataaacataacatctgtaaattgtttctttttcaacaaactctcaaaaaacataggataggaatgccatcggatcggcattgagctggagtttagacttgtaaccgcagtcttgcaatcggattggatagccacacggtccaaaccaagctattttgtagttgatagagccaaagagattgcagcaagctccccctgtaggacattttccactctcaagcgatccacggcaataaagtcttctgtgtcattgaaatctcctttgtagactgcagcaattccagcaaagccgtctgtaaccgaagcatctacctggaatacatgataaccaaatgtgtctgtggaatggttcataatcataggttcgttgtcattttcctccaagttagaaggagtagtagaaaactcgaccgcacgtttagtacaatctttgaaaatctcctcgatgctccactgtttgttgttgtttctgatagtatggcgctagaaccaaaggacttcatagatgcagacagcgaagattttgagatccatatcttccaattcagtccaccaggcaccaaagtccatcacattactccagtggaaggagtctaaccttagaccccagatgcttttgaacca

SEQ ID NO: 202752 - DNA, 1538 bp, Cannabis indica
ttaaaaattaaaaaattaaagtaagatgaaaaaaattatatgtataaagaataaatgctgaatttcgttttaaattatattttctttataaataataatagaatttacttttgatctactacattttgaaatatatttgtatcatatgtaatagatttttaaattattattttttgcattaaaatattaaattatatatataattttttttttaaaatatatataaatatgtgtgaattcgcttgaatcggttacttttatatgtcaatcaatcaaaatgtaatctagacaagtgcagactttaaattttccaatctaatttaatgtgcgcaaatataaatattcacactttgcagattaaattagattagattgagaattaaattgaattaaatattttataaacatttacctgccaccaaaattgaatataaaaatcaacatgacaaaatagatatttataaaggagatgtccccatggcatggtgtcagcccaataaaacattcaaataatgcattaagtaggattaaaaattgtggccactctcaacttgtgaccaactaatttgagaattgcgtattagaaaagagcaatattataacacaccaagcatgtagtgttcttcgaccaaaaaaataagcatgtcccgttcaacgcataaccaatacgatgctacaattggcacaagttcccgttcaatcatacaaaataaaaaataatattactacttatttttcataatcatttttacatgcatacttaataaaattaaaaaaataccctccaaaatgaaacactatggctattaacgatgcatgtgttgacagtgaaaatggtagcaaacttcctggatctagcaggcttaactgatacagagatataacgatgacgttttattatccaattttttatcttgcccagaatgttatattcatgttatattcccaactcccatgttcatttttttaacacaatgtttccagttcaatttaattgtctatgagatgatggttagttttaatttgcactttgtttttttccttctttttaactcgattcaatcatctagccaaacagcccaacccaaccgttaattggaaagaaagaagaaacatttcgccaaaaggatgagaaagtcccttttgccatatatacagagaccaacaataagcttccagtgtaccacctataatggaaaaaaattcctaacttttatggacaatgtccctttcaaatacttccactggaaaccaaaatcatcacattcatggattagatgggctttctacatgcttgtttgccatgtctttagggctcaaatcaccctcaccgatggaggagacattttccccggtctctgcagggctgcccttggtcgttaaatgaccttgttcaactgaattcatcccacagttatcttgacttcttgatccattattattagtcaagatgtactggcaagaatgtgaatcaatggattctgtaccgatccgagatcggacagcagagctgaacaacggctgcatcaatcgttttc

SEQ ID NO: 202753 - DNA, 1150 bp, Cannabis indica
tctaggggttatggaagtttgcattcttcctcttggatgatgtgaggataggtggaggctaaaggtgaaacttttttgaattccaaactaaattatttgtggttgacagcttctggttttttgaaaatgaagcaacagcgacattgcatttttggctcttggagattactttcattaatgtgggacgtgcaataagactttgtgaaagaacagttgattacattagtgcgaatctcgaggagaatatcatcatttggatatcttggttccaagcatcgcattaaatgtgtgactgacagctttcccagaccgttggattcatcttgtgttttcttggatgtaatcctggctaatgatctggggacacgtcattcatcttgtgttttcttggacgtaatcttggccattgatctaaggtcgcgcggatcaccacctttatgtataaatacagtgaaactttcccaattatcacttttgcccaattttcaaattaaattcaaatttttcagagaaaaaagaagacaatcgaatttcgttgaatgaaccactacatcgatcggtgcatccatcttcttcttcttcgaatttgcaagcaagggagcctaggagcaccacctctagttttaactgtcgattctttagcatcgtcaaaaacactggatattctggcataaatcgaagaactcatcaacaagactcatcttcttcgatctagggttgtatgccttgatcaactttctttgatgggaatatccttacggccgttgtacgatattaggattcctaaatgaaactctcagctttctccaagttcttcctcttcacccaattcctcatcaagaaaggttctcttcttgtatttctagaatcttgatcaatgtttggttttggcattcttttatatatatatatatatataattgcatgctcccctaggttgtagttgaaaaggatttaagcattggagtggttcttgaatgttttgtagaataggttctgattaggttccgtgaaattctattcttttttatgaatattgattaaaatagctaaattttagcaacagagatgtctaaaattatttcctctatctaggacccttatagttctaaatgatatgtcgtttacgccctcaattggctttctatgt

SEQ ID NO: 202754 - DNA, 2320 bp, Cannabis indica
ttttattattattttaatttataagaccaataataaataatataaataattcataatttaatattatatatagttaaatatagtaataaaataatacaactaatataaatataattaaaaaaataatactgtaaatttttatcatattaacaatgatgaaaaataaggaaagaaaagcaaaatagaaatatgggggagatatctaaacctttttttaaaagagaaagtgttatggaaattttataaaataaactattctattttatacatgccaaacgattaattagcatatttcattttgtataacaatctctaaatcttacaccaataaaactctattagcaaagatttactctatataattaagacacgaaatagatataatatatgtatatacattaatgcattcatacatccgtacttaccatcattatcatgcgtttgtggctctgagaaattctgaataatataaacctcaagagcattgaggatgggttggtgtgtagatgtggagtattggaagaagtcatagtttatggatgaaccatcggccctcacagatgcaaggctggataaagtagtggtttgcaaatacttaggagtaaaaggtttgtcatcgccattccaaaactcaccattttcatagattctgaactgtctcgactgattgggttggagcttttccaactccgcaaagtgcatatatacataatattcagccatgggatcatccggacttaagtaaaatgaaaataaaggacttgtcacattggctggtgacatagctgtgcccataacatttgatggaggctcgtaaatgtttctagtatttaagtctatttttgatgatgtgcttaataatttgcgttctgggaaattgaaaggctgccatatacgatcataaacatcgtctttgtaccttaaaacccaatgaagaacaaatatctactttaattagttttagatttctactgaaaaaaagaaatatagttttagataatgagtattattttttttcttatatagacaaacacagcagtatttactataacattataacactatcatgatgttaagacttggtatatataaatatcaccaaacatgatatttgcaagctactaaatgtaatataatccacacagagaatagtaattaaactgaatccaatacttcatacccttattgacgtattacttctcgaccctacatccaaccgtcgatagagaacggctgtagtaggagtgtacaaattattcttcaaaggcctaagctccaaagccgaaataaaaggtgtaccatgtccagtatttactaaacatacaaatatatactctgaaattggaatatgtatgatctcctttgttgcagctatggatgcattatccaatttcacagttccccatttgttggctccaatgtataaatcaaaccgtggtactgtcatttttccatcgtaatttccgtacaagaaccttccccttactagaaatttgtttcctttcccatttaatggctttagggtgtaacaatttttgtctccttgtgggaaacttcttaaagttgaaaattgctgctcaagagtatctgaaaggtattcgagtgatatggaactgatttcacctaagttggtttcgataaaatcagactctgatacatatgttaagccagttgttttgtctgtgtaagtcgagttctttggtattccacaatctatgctgatgaagcctgacaataattcatacaaatagaaaaatttagattattatataatgtaaaggaaagaaagaatgtattgatattttgcagttctgatagcatatttttaaggcttgcatatatctgcacataacattaattttgtacctgattgagtttgagcttgaacaagaaatgttgaggctagaagaacagtaaggtatgcaacgaagagaaaatgttttaacatcttcaatcatttgtttttgtaaagaataataagctttggccgacttaattttattgtggtctcttatatatatattgatcagaatcatgtaaagtcatgaagctataaatatctgtatataagttataaggcatcattagattcattgcttttgttaattagtactacaatagctgtacgtatttgctggggggcaaattaaattggttgatttcaagtattcaaatgatcgaaacgttattacgtatataaatatatactatatatatttatatgcacacttggctttaataagtttttaattgtgtaccagtatttattatttttagtatatgtcgcctgtttagttgatgttttttaaaaaattattac

SEQ ID NO: 202755 - DNA, 833 bp, Cannabis indica
aaatatgtaaattataattagtaactgaatctcataataaaaccataattatctacaatccaacatatttaaattaggcaatctttacattggatgtgtcggtttatgggcctctgagtcacaatattcgtaaaacaggtgagtgatatgctaaatcacttttcggagaacatggcaaaactaaaagtttctctatcaacggataacatggcaataccccaaacatcggaaaaaacgaaaaaacctagggtgccctaaaatgccccaactagtagaccggttcctaactggaaaaccggttatgtggggtcggcctggggacaaacaggtagaccggttcctacaggtccaaactgagccggtcgaccgattcagtgcaggaaccataaaaactcttcttaacaaaccaaatcaaccccaaaagactccaaacctttcagacctcctaattaggccacaacaagcaataaatctagcaaaagaactaaataaaaagcccatattcaaaacttaccatgagagagcaacgtttgagctctaaagttcaaactttactcaaacacaactacaacactcaaatcagttctaaaccagctcaaataacctcaaaacatcctctgaatacaaaatcaaatatcccaaaaaccaacagaactccaactctaaaatcaagcatagaactcttaatttataacttaagaaaacaaaaagaagtgagctaggggtttaaccttgaattggaagcaccacaaccttgctaaatcaccaaaaatagagctgaaaccctatccttctactagtttctcctaggtgggagagagagagagagagag

SEQ ID NO: 202756 - DNA, 513 bp, Cannabis indica
tttctttaatttattgctgaatactcttattactgtatagtattttagcacttccatctagtttttccctacacaaatcactcaatcaagacacaatttactttttgttcctgaaccttttcaatatctatatatatatatttatttagttaatgatttaccctgagcaaacaattattattaaaagtcatcaatcctctataaataatataactactccaaaaatgaaattctttattgcttggattaacaataccgtacatatacattcaaaacataaatacttcacttattctttaataaaattgataaaaaatgcaaaaggtggcaacattagtaattgctttgttattcaagtatatgtgagctgctttcttggctagctcaaaataactgattttttttcttcgattctaatggaatgttttgatgttaaatttcaaactatacttcaaaaacattattgtacgttgataaacttattatttattcctcaaactaacacttcggaag

SEQ ID NO: 202757 - DNA, 766 bp, Cannabis indica
agatcttctaatagaggtgcccacaccttggctaagtgggggttaaataattcaaaatcaggatttgttagtttatgggaggtgaatccccatgtgttcaccactattatttcaaactaagctggttttgggggaggtgcttccctgttgtaagcaccattctgtttttccttttaatgaattttcttccttagcaaaaaaaataataaaacttataaaatactaataaatttaaataattataatgattcgtacactttaataataaatataacgcttattgtttatatattataatacaaaataaaaatgtttaaaattattagctaaaccatttaattctctgcacccatcacatcaattttttttttcttttattaacaaataaaatattttgtacatttttatggttatggatatcgatgaatatttttggagatatattttaattttttagaaaacaatatatattgtatttatttttaaaacaaatcactattcaaaaaatctagaaacatcggagaaacatcaatatttaattctttgctaaattcagaaaatatggtacatattcattgtattagttttttacttcctcgttgacaatgatagatttctactttttaatggtgctatcacataacatagaagaacactattaatatatcacgcacataaaattaaatggtaaggctccacttttttctttaaggaaattggtaaggccctactttgaaaattattatgcattcaaaaaataaataaa

SEQ ID NO: 202758 - DNA, 746 bp, Cannabis indica
tctgatgatgattgtacatattgcaatgatctttacaagacaacgtagcggctctaataccaaattataatgccctacactagattaggcatgttattgtgatttcaaattattttgcactcctttgctaaccaaaggatctactgaaaaatgcgaatgattaacttttttataattaaactttaattttaaatacataaatactttacataatttgggatctcgcttcaaagttacaaccgttttcaaaatatagtagttacaaaagttgtcgcctagcgaccatcaaaatgaggcatgttattctgaagatctaaacactctaggtctaaccgccccggtatgtacaatcttcatatgctcgagctcactactccttagcctttgctttacctttacctacacatatgaatattatttgtgagtcgttagactcagtaagaaaaatataattattacataaacataagttggattacaactaggcgcccatacacccaatcacaacctatcatgcgtccaacgcgataagtctgaaatgtttgtacgatagtatgattgaccataatattaacctacacttagtactctagtcgtgttgatttgatagcatcaatttgtacttttccaagcatatattcgttggtattcagtccaactctatgtacactaataccactcttattgatatgtaatctataaaaaaatcataaaaaatgcaccctaaacatgtaaacatatatgca

SEQ ID NO: 202759 - DNA, 592 bp, Cannabis indica
aataaaggtgtcaaggaaggaatacctgccaaagttttgtggtaccttcctcctgttcctcgtttcattcgtctgtttagaagtgttgaacatgcaaaagatttgacatggcatgctaatgagagaattaaagacggaaaattaagacatccagctgacaccctagcttggcagagagttgatatgaagtttcctgcttttggtagtgaatctcgtaaccttcgtttaggtctttctactgatgggttcaatccgcacgcttctcttagcagcaagtacagttgttggctagttatgcttgttgtctacaatctacccccatggttgtgtatgaaaaggaagtttacattattgactttattaatatcaggaccaaaacaacctggtaataacattgacgtctatctagcccctttgattgatgacttgaaaacattatgggatgaaggtgttaatgtttatgatgcatacaagaaagaagaattcattcttagagctgcattgttatggaccattaatgactttcctgcctatggaaatttatctgggtttacagtgaaagggtataaagcttgtcctgtttgtgaagaga

SEQ ID NO: 202760 - DNA, 1063 bp, Cannabis indica
tctctctctctctctctgttcctattcctaatatcctaccatagctgtctgtctggtccattttgtatttcaaatacaacacatcacatattatgtattatatatatatatatatgatgataatgagaatgatgatgatgatgatgatgataaccaactcatacatgcatatatatgatgattgatggagctcccaccaccactaccaccatcaccaccaccaccaccaccatcaccaaccagagacaccattttcacacactcttctctctctctctctctctttcaagatcatatacaatctgcttcaactacattacagactacagaaaggctcacatgtctgccactttatcacattcactcttttatttccgtacgtgttatttctcataaatattcactcttttttttcttttctatatgggggccactttctttatttatttatttatttttctgagtcaaacactactttctaataatactatgcatgaaaaaaagcaatctagagataataataataatttaatacaagtctcaaccgtgtctctctcgtatcttgtgttgtgttgtatatatatatataattccttttttcttttttgtttctcagcagacttatactatccaaccaattcagttaatattctcaactgtttgccttagctattgagaaaaataattcatctcttcttgatcaaaacaagaaagaaaatgtcgttttcttgcacaaaaaacttctttaggcgtttctgtactgatgagttacaaatgggaagccttcaaagcagtttcttctctagtgatctgttaccatcacttggagcaagaattaatcagactacccaacttcgtaaatacattgtttctcctttcaatcccagctataggtacttataataatgattatacgtacatatatgtaatatattattctctatctcatgtaataataaaataatattaatgtggttttgatgatatataccagagcttgggagatatttcttgttgttcttgtggtttactctgcttggatatgcccctttgagtttgcatt

SEQ ID NO: 202761 - DNA, 572 bp, Cannabis indica
attttgagatgacaaacttagaagattatgcttagctatggaagtttcttacaaaagtttaatattgtctttgaatacagaaaattttttttttagatggtaaaatgtgacattcaagtgtaaatctttttgcaaagagatgggagtctgtcattggttcctgttatatttggtatttatacgaatgcgttgatagtatatttgtatttgacttcataatcttttgtggattttgaacatttgagataaattgcttattcttcactttcccccagaagttggcatgtcttcattgtctctttgggtatacaaaatatttatcaaattttaaagtaagagtggaaatttaaattaaaaacaaagacaaaaaaaaaaaaggaaaaaaataaaacatgtctcaacatagtacttgtaatacagtattcattagagttacggctgaagacgcaataaaatcttcagcattttgaccaaacatggcaccgtttacactgttactactactttccttaattcataaatatagataagtggaggatctagatgcattatatttatttttttttattatt

SEQ ID NO: 202762 - DNA, 526 bp, Cannabis indica
ggtttttaaggtcgggtccgatgccgtccgatgggcctatcggacccgaccttaaaaactcaaaaatttaagtagtttttgtgtgcaattggacgacatcgggcccatcggacccgaacttgaaatcccaaaaatttaagtgtgggattcgcgagacacagagagaaagagaggaagaggggaaagagagaggagtttgaatgaggggggtatttgggaattaacaaaatattgtcccatcttaccaataaagggtatttagggtttaagggaaaattttcccctaatgtaagtataaaatttcaaatttccctaaaaagaagagggaaattattgcctttgtttttattttctaaattacgatcaaatcaattacaaaaaataaataaaaatatatatgggtagttttaataaaagagtgggtatgttggtattgtttgagttaggcccaatagaagaagcccaagcccaattataaaccaaagtcacagcacaacttgttcttattcttctctctctctctctc

SEQ ID NO: 202763 - DNA, 877 bp, Cannabis indica
ttagatggaatagattgtactaccagttgggggtctagattatgttatggaaatgcctatgcacttgcaaaataaggtactactaatgtttgttatggtcttttaaatttttgggaggtgaatccccatgtgatcaccactatattttttaattaatgaagttttttgaaatttttcgagtaaaaaaaaaatcacaacgcgctatattgatatagtgttggacaccttaaggtcaataataacaaatttcttttcaataatacaatgaccattttgtgtaaaaattgaaagatttggtaggtaacattgctttcatctcataaatgccattttgtgtaaatcttgaatattggtaggtaacattagtttcatctcataaataatttaaatccaaatttcaaaacagcatacacaaatcacagttaatgcttcctttcattgactacttggccaaatattttaaggacggctagaatttatttgcaaaaaggttcaataattacctaattcaatagcattgtttccaaaatcagtgtacaaatagtagagagatagggtcaaattattactagtcttaaagttagctaagctaagcctaggttaaacataagtaaacagtgtatttatcaagccaaacagtgtactttgtcccatatctcctctgtgctcccatgtggaaaacagatcatcactttcttcaaatatgtaaaagaaagtcacaatgttgttgcctaattttttggacgtttgcccattaaactgcttctgcttctctgagggtaaggttttattacaaattattaggaccacttaaacattattatatatctcaaattacaaatacacgtatctagttattccaagaaaaaaaaaaaaa

SEQ ID NO: 202764 - DNA, 818 bp, Cannabis indica
aaaatatatatgtatgtatatatatactatatatattcttcttgagactaatacacatatatattatttcagacaagacaaacaatgaatgatagaatattatttattgttttctagtttagtttaagttatttttagtttttgttgtagtattagttttttggttttttttttctaatctatgtctcttgcttcatttttttttgttattgttatctatttcgtatttttgtttcttattatatgcatattttttatgtttttaacagttattgttatgttgttctagtttgttcttttgagtcattttttttttaaaaaaaaaggctgagtacacgtttctccaaactcaatacttattgctcttcttatcttcatcatcttcaaaatttctacttcttcttaagcttctctttttcattttttttcttcatttatttaaaaaattgatccatgttttttcaatcggggtttccattttttcttgctcttctcatctttaaaaaaaaattaatttcttaagcttttttttcatttttttttcgcatattcagtgtcagatattacattgggattttgttcatcactccctatttttttaaattttatatatattgttgttctgtatgtgctattcggtgttaattaagtattatatatttcatttttatattttttaacggttattttttttattgttctagattgttttttaatgtattagtgtaagaggaaatttttcaaggtgaaagttccctttcgtgatattatagaagtcctcactggcaaaagagatatagtattttttgtgattttat

SEQ ID NO: 202765 - DNA, 801 bp, Cannabis indica
tgaagcaattcatacggtgaatcctcaaccttgcgtgcaggctctgtgtgaacatcttcttcgaccagcataccctcctggacctcaccatcttcaattttcatctccttcaaccagttctttaggtttctcagttcctactcaatcctgctagtataattaaacaattaagaatgatcataatcaaaacacaattcgaaaaacttgatttgaggagccaaaattaggcaagataagcctacacctaatccacaagaaccaagaagatgaaccacaaaaaaaagctatatcaaagtgaaagtgacaaacagtttaatcaactcagagtgaacaataccttttctataagatatgtctccgttttttcttttaatatgcatacaccaaaaatcatatacatataaaatatatagatatataaatatcacaacatatatgttcatacttgtatcattactttagtatcaattttaacaatgtccacagaagtaaactgaaacttgaatgcaaattcattaacaaaatagtatatctatttgcttagagatttcacaagttgaatatatcagtccatgtaaaattcagctagacatttcaacaaacagcttataagcaatttactatatattattaggtcatcgtgcagcttggttcaccaaatcaaaatcctcacaaaccccataaagcatagaatagtaattaactgtactagctaaaagaaattcaaagacatcgagagaaaatgagagtggaataaaaccaaacctcaatgaagataataatgtcaccgccgaagagctt

SEQ ID NO: 202766 - DNA, 766 bp, Cannabis indica
cttgtgggaacgaaggtgattgtttacaaccaaccagccatcaaatatttaattgccaagaaagatgcgaagccaagactcattcgttgggtgttacttcttcaagagtttgatttagaaatccaagatcgaaaagggaaggagaaccaagtggctaaccacttatctcggctggaaataggtgttgaacaggaggacaaaatgcaaatttaagaaacttttccggatgagcagctacttgttataacccaagaaaacactccttggtgtgctgactttgtatattacttagtgagggggttgcagcctcctgatctgaataggcagtaactaaaaaaattcttccatgaagtgagattctactattgggatgaaccttacttgtataggcaatgtgtggatcgcataatgcggtgttgtgtgccagaagaggaagttgcaaacatcctagagcattgtcattcatctccctatgttggacactttggtggacaaagaacagcagcaaaagtcttccaatcagggtactattggccttccattttcaaggatgctcatgattttgcaagaagttgtgatcgttgccaaagagttggaaatatttcaagaaggaatgaaatgccattgaattgcattcttgaagtggaactttttgatgtttggggaatcgacttcatgtggccatttccatcatcttatggcaatctacacatcttgttggcggtgcattatgtctctaaattggttgaagcagtagcaagtccca

SEQ ID NO: 202767 - DNA, 1394 bp, Cannabis indica
aagaagaagatgatgatgagaataatgaaggagaaggaaataaaaattaaaagggaataaagagagagtgggttagagagtgataactggtaggagacgtgattgatatttgacagaatggaaggaaacatgtaggtagttaaggtgacataagcaaaaccatataaaatgtaaaaatttaaataataatcgtatttttgtttaaaaaaaatgataaaattgaaactgaaagtagaaaactgtaaaaatgtttgaaaagaaaaaaattggcattttatgtaaaaaccctatgttttagcttacctctgtgcggtgattctgtttgactgcacagaacagagcactattgaaaagcttttcttcagctttcaaattttctccacttttttataatttgtccagcaacaattctaccattttttttttggttgagaatcgctttcttttgttgagaaacaacttcagttctgttttttgattgaaattctggcgatcgttgtcgaagcttttttcttcgtccatagtgttttttttttggttgagaatctttttagatttgctattgctttttgcttacagtaacattgaatcaaatttgtctatagattcgatatcgattttgattttgatttttttattggagttttggttgtgtttgaaggtgtttttttttattttttttattatcgttaatgggttttttttcttgtaagaataattcaaattgatttgcaatctcagcaaatcgtaaatttataagtttcgtatatgcgtttgtgttttacacatttttttcaagtaatctcattccgtaaatcatgagttgattggcacattattgtttcaaaattgcttctttttttttttagttatgtgttttttttttcaattatggtagaagatgactacgcgtcatggtattaggaattaattttattaattaaggtaaattttgttaattgaatatatttttagtatactattaaaaatttctcataatttttcttaagttttctctctctgttaaaatatttgggataaggtggatgaggttccatctcaaaactaaactaattgatagtgggaagaataactcattcatcatatattctattatttttttacacattaagaatgtctctccaatcaatgtgatttatatgctacttaaggcatcaatatctttacaagccaatcttgaggtgatatcaattggatcatttccgaagtttagcttcacaaagcttatatcagccactcatccactttttccaacaggcatatgtcccacatttgaagttttcacatttcgagcaaaaacataattttgaattaatatatgtttatccataaaaaaaaattaatatatgttttaccgtataaatgaataaaac

SEQ ID NO: 202768 - DNA, 1117 bp, Cannabis indica
acgttttctcataattgttatatatataacaaaaatgttaagagtgaagatatatgcatcacacattacactcaaacattatatattgtaacatgactaattttcaactaatcacatttatgtaaattggggctcagtataatatttcaatgtaatttgtatatgtctacatatcattaatcttaacaaaatattttaacctaaaaaatgatcatagaaaagatcatgaggtacaagaacagccactagaatccttagacccttttgatgccttgttatcttcaatcttcctcaatttcacctgagtgagtacctttattgcccactcagagaaataggtctcgttgtgtccgacccggccgcccttgaagatggacatgcaacgacgatcgtcctctgggtagggacaagcctctccgttggggtctcgccacattccctcatggcgcatgccagaccaactagccaaccattggaagacgaattggcctacacctgctagcttaagccagcctttgggaaagaactccataacactactgtttcggtctaaaaagaacaagttggtgagttgagctccatgtggggataccaatatgtctgttgagctcattaacttcacctgttttaataatttgtgtcacaaatgttaatactaatcaatagcatagatcatatcaaattaaggtccaatctaagttgttaatttattattgaaataaattaagtttcatatttatatatatctaggggtgatcatttaattcaatttgtatattttgcttaagtacatttgataagtgtagattttatattttggattcaatccaattcacataataattctaatctaatacaatatacattgtgcaaatcgaatcggttaatttagattagttatttttttaatattaaattatttaatattattaaaaatatcattcataaataatacacattaaaaatggagagaaaaaaaaaataaatcacattaaatttattaggcctcttacttacattgaattgacatgccttcacatgttacgtatcttcatcacaccgtaaggatgtaatataaatataatgtacaaatggggtgtttggttcacccacttgt

SEQ ID NO: 202769 - DNA, 1331 bp, Cannabis indica
cagttctttgttctttttctagatatgttcaatttatgacacacattctgaaaatatatattcacctcaaatattagagatgctcccctctgtgttccatctcctccaattatataaacctgggaaaataaattgccaaacgaaaattaacatgcgaagcttatcatcacagtcacactgtttgagcttttagaggccttgaactacaaacctgattaattcctcgatcttggatgctgtcaacaattttgaggtatcatggccacctcgagatgtgccaagaatagttacctccacgtttatgaatatcattcactatcttaggatttaaggatatagtatttcgagcatagaagcctctgtatcctccctacacaattatatatatatatataaatatatatttatattgttatttttaagataataaagaagataagacgtaaaaagagaagagggagattagattaatgacttacatcaataccctcgacttttttgactccatacatgtaatgcagcccacaaacgatttctctaatgacagtgttgagaccaggacatagacccccacatgtgactatacaagcatgaacctcatccgattcaaaccaaaccttaaacaacaaacaacaccaaataatcactcttttaactgaatgttgtttcattgattaatctcttaatttcttcttccaacaaacgtaaatcacataccttttgacggggtcccgctcgccggaaatgtattccttttggactctttttgtgcacaacaatctattgtggcaaaaaaaaacaaagcacaattaagtcaaactcacaagccaaaacataaaagaagaataagaagatgatgaagaaaaagctgaccttttgagtaacagtatcatcttcattcacaaagtattgcctggaaaatcaaagcccattccaccaattgtcagtgtcaaacgaaatctctacatataattgcaaataaataaaaaaaatatgaaaattcagagaaaggaaaattagaaaatacttcacaacagagtatgccggattgtcttgcaattgatttgaatgggtctgtcacacatcaaatattgtcatattgttattatttaattaaaaaaaaaatcaaagaaagaatactaatttgcttaaataacaaaaaagttgacttttttaatcttttagtttaaacacaagaagagcttttgtattaacccagctttaaataaaatgaaaaaaaaaaagtttaagatagaaagtggcgtacaggaagatcggggatataatcagaaaaatagaggcacatcttcaagtacataacctccttcacc

SEQ ID NO: 202770 - DNA, 1407 bp, Cannabis indica
tccatagtgccttactagatcctaaaatatcatgatgttatgtccaatgaatcttccttctatgaacccccttgagagcttgataccaactcaggaagaatacatttgattctagaagacaagagcttagttgcaatcttgtaaatagcattgcaacaagctattggcttaaaatccttgacagtgttgggacatttcatcttaggtaccattgttaggacagttgtattgatttccttaagaatcttgcctgaatcaaaaaaggaggttactgccctataaacatcctctccaactagctcccaattatcctgaaaatagaaacttgagaatccatctgggcctggagccttgttcccaggaatttcaaacacaactttctttaccagtaaaatctcttattagcatagcagcctgttcagtagttagtacaagtcctctacttaggatcttgctagataccttctatctgttttccattttagagccaagtagggtcttgtagtaggagataaaggcttctgtgactttccctggttcaaaaacccttgttccatcatcagtttcaattgataggatctaatttttcctatttctttatttgataccaacatgaaatagggatgtgtttctatctccatctcggatccagttgattttggccttttgttgcagaaatgattgatagttttgctgtgcagctaatagttcagtccttgcagcaagttcttgatcatgcaacataggatttaggggatctctttgtagcatttcctggatttcttctagctttattttggcttgtattgaagtagtttgcaggtcaaagaaaccttgttgattgatctctctcatgataggttttaaagcctttagtttgcaaactatctggtacatgttggtgcctctaattatttccttcctccaaactttagcaacccttccattgtactcaggatgtgttttccacatacgaaagtacttaaaaagttttttcccacaattccatttaggaaatagagacaatccctggtgtgtgatcaaaagtcccctcatctacaaatagagcttctacattagggtagcaatcgagccaagcatggttggttagaactctatcaatttttgaaaagattctatcctgactatgttgcttattggaccaagtgtagatacacccagaggccctgacatcttccaattggcagtgttgcaggcattctataaattcaatttcagtttgatattccactctgtgaccaatcctttcttccttggcaacgatagcattaaagtctcccataatcaaccaattttcttttgtctttagagaggaaatattcttccataatccaacctccccttactgtcatcaaagccataaacaactgtcaaaaaactgttata

SEQ ID NO: 202771 - DNA, 1117 bp, Cannabis indica
cgatagagtaagtcagcaactgaacgaagagcaggagctttggatcttatcccttccatagtgtccctgaattctgtgtagtttaaccatgggatccatggttgaaaccatatgtcgatatcttcgccattgtgaataatagtagtagcactttccataataattcttctcgcctcaagaattcccttccaccccggactgtccgaagctttaggagagacttgccagaaggattcaagagcaaagtatttagctttaagagatctaatccatggtctctcagtaccagtagccaacatccaagccaatttagacaaaagagccaaattgaaatcttcaaatcttctaaaacccaacccaccgcagcacttaggttgacagagagaatcccaagttttagtagcaaggaatcgagagtctttgagattacctttccaccaaaatcttctcacaatggcatccatctctttacaagaagaactcgggagtttattcgttgacatggagtacgctgggattgccatagcaacagaattaatagagaccattctccctgctatagagagagatttcatcctccatccctcaagccgagaaaggagttttgatttgagaaagtcaaaatcctttcggcgacttctagagaaaagaaagggattacccagatgtttctcatctcccctcattgtatcaatacccaatttctgtgatatctcacttcggatagtagcaggacaattactagaaaaaaggatacctgattttggtttgctacatctttcacccgaccagtcttcaaaaatctttaaacatttgccaaggttctcagcctctctgctatttgctctgcagaaaagaatcgtatcgtctgcgaacattaggtgggaaattgccggagctcctctcgccaattgaattccatgaatcctccccagttcttggtctttagaaatgattctagataaaacatcattgcacaggaggaacaggaatggggatatcagatctccttgccgaattcctctcctgggactgaatttagggagaggtttgccattgagaaggatggagtatgtcacagaagaaacacactccataactaacttgatgaaatgag

SEQ ID NO: 202772 - DNA, 895 bp, Cannabis indica
ctacatcaaaagttcaaactcaaagcacttggtccactcaaatattttttgggtttcgagtttgcccgcaccaaagatagtcttttcctctctcaacggaaatatacgctgcagcttcttgaagacaccggattcattggcagtaagcctgctaaaacaccaatggatccccgcaccaagcttgatgatcatcaaggagatatacttcagcacccatcttcctacaggcaacttattgggcgactcctatatctcacacactctcggccagatattactttcgctgtcaacaatctcagccaattcatggctcaaccgcgtacaacacacctccaagcccttcatcacttgcttcgatatcttaagaactcacctggacaaggaattctttattcagcatcatcatctctacacttgaggggtttctcggactccgattgggcctcttgtccaatcactaggcgttctgtcacgggcttctgcatttttttgggagacaacctcatctcatggagaactaaaaagcagcccaccatctctaaaagctctgctgaagcagaataccgcgccttagccgccaccaccagtgaactcacttggattcgctatcttctacacgatctacacattcaacaaaccagccctgccttcatctactgtgacaaccattctgcaatccacattgccaacaatcccacctatcacgaacgaacaaaacacattgagatcgactgtcatttcattcgtgagaagatcaacaacaacactgttcggcttatccctattagcagcacacttcaactcgctgacatctttactaaacctttagcttctactacactcaccacacacttaaccaagatgtctgtccatgatatctaccatccatcttgag

SEQ ID NO: 202773 - DNA, 735 bp, Cannabis indica
tattaaatagtataaatgtttatcagtgtataaaaaaatccgtattattttggttctgatgaatttgagctggtaaagtcattaaacgttatttaataagaggagtgaagagttgaggtgatctctcataagattaaggagtatatatttatctatatatatatatattcgtacatagtctctcttccccattcaatcttttccctctcacatttctcccaaaacctaataaattaatgtctccaaccttgaatctctcgaccggcgccggcgacatgatcaacaactctagctccaactccggccacaacattattccgatgtttggtctcgatcaccacaatgatgagttctatgatcaagaatctcaagaacctccacagtcaacaactactcatcatcaagaaccatcatcatcttcttgtactgctcctacagcaataattgacccgtttagccgtgggatcttctatgcttcattccgccatttctggtccacacaaagacaagaaatacgtaacaaccccttcgagtttctcctatcgtatctccagcgctatgcatttgtctatgcattcacactttattctgcaactattggacctgagaaagacattattcctgctgatcaaggtcgaatctttgctcctgttgtaagaaaattaaattcattcatagagaaattagagaggaaaccctcattcgaatcgaacgtggacaacctgacgagtaagg

SEQ ID NO: 202774 - DNA, 1129 bp, Cannabis indica
tcattattattattatttgaaagcgaaatctccacaaagagagacaacttacaaaagctcctacaagtagaatttgcaacactgggaaggtcccttttccaaatagttctaactctaattacaaaagtatgtttggctagaaaatgagcaacaaaattaacttctcttcaaataaaagtgaaaccaccaaagtcttgactcggaataattaattagttatagtaaaaataaaaagtgttttaattaaatgacacatttttggactttttggattaattagtagtacatgattaaaaaataaattacgttaataataaattacattatcatgatttatttgataatgtcataataagtaatagtttatctttgattaaattcaaaattacgtaattttttttttatttatttttgatttcttaaaactaattttttttctatattaattaggtcaaatttgagatatttttagtttaggaaaggatttacgttcagattcaaataaatgttatattgaaagaaaaataaataatttaaaaattaaaaattcagttatatttctgatatttttattttttcttgattgttaaactgaataaaagatatatatatatattttcaatttatattttaaaaaactataggcgttcatttcagttatatttaatatctaagctcttatatattcccgaagcttcgtaaaaaaataaagaattataattggattagatataggattcatgtactgtagacctaacactatatatatacgtacatatatagagagagagagaagagagattgagattgagatcagtactttagattagtcgaacatttacataatattatatataaacagtactaattaatattattattaatcagcaaacacaacaccatgaatttgaatttcccacctggctatgtgtttgcacctactgatgaacaactaattgtccattttcttcaaaagaaagttaatggagaattagtaaatattccaatgatcaaacatgataatatttacctatacaacccatggcaactcattggtacctaactctaaaatcattttcattttcatattatatatagcttatattattaactttaaatatttattttt

SEQ ID NO: 202775 - DNA, 1385 bp, Cannabis indica
agcactggtggcttagccatgtgctcattcaactttttgaatgcttcctcgcattcttcagttcgttcaaacatctgacatttcttcaagatgttaaagaacatgatgcacttgttggttgagcgggagatgaagcgactcaaggtagcaacattcccagttaagctttgtacgtccttgtgtctcttcggggaaggcatcctcaataaggcttgtattttttaagggtttgcctctatcccgcgttgactcactatgaatcccaaaaattttcctgatttgatgccaaaagtgcatttttgggattaagtttcatcccatacctctggactacctcaaagctaggggagagatctctgttagtgagctcaatggtcgtgaaagcgtttttaaataacaggttcacggagcttccattgtctacaaatatcccgactacgaccttatttgcaatgtgagtctcgatgaccagggggtcttgatatggaaagtgcactgaccttgcatcttccttagtgaaggtaatgggttgatctaagagcccgggcctttgatccggaagttgagtaacttcccatattttttttatcatgctttagggccccagcataacactttagctcatttctagtggttcctccaatatgaggacattcggagatcatagcgaccctcccattagtccgaggtggtagtccgggtgcctgttgatggggcatccctttgggaggtacctgaccttctagcgctatcgcggttcctccctgaggcactgagactctagtttaagctggattcaagtggggtaacctatttttgatccactcatacaagtggcccaatcggattaaacttttaatttcatctttaaacttttgcattcgtttgtggtatgaccaatatcgttgtgatagttacaccttttaccggggtccctccaagatctgtccctatacaaaggaggaggttttcgataatgcgtattttgtcgaatcgtaaaataaacacgttcttgagagtctattagctcagtgtactgtgtgtattggggcgtataccctctcctttctctcttttcctcagatcacgtactacctttagaagacctcttactctggaaactttgtggcactccttccatgcttgtggctggtgcagattgagttgggagttgcgcacttactccagggggattgcttacaggggcccccaagtgtgacagtgcaggggccagagtaagattctgattgtatcccggagttgcagagaactgtattctacttatttggggggcaacatcgagtacggctccaggaagttgtgttcatgttgcatattctgacactcccgtcaggtagtaccctgtaataaccaaaatatttgat

SEQ ID NO: 202776 - DNA, 1689 bp, Cannabis indica
attagaaaatgagatatatggatactagggagtggtatttggtttgttcctatgtgataaccgtgaatagtcatgactctaaactgaaatcgttgttaggtttcttacttgtcggcgatccttattaggtagcgataatgagatatatggatgccatgttagggcatcgacctgaattattaggcaatgtgatttatggatgacaggttaggacatcgacttgtcttattagacaatgagatatatggatgttgggttagggtatcaaacttgccttattaggcattgagatatatgaatattgaggaaatgatatttgggttgtctagtttcacaacgacagtaatatttgaatattagttttttagtatcagggttgttttattaaacaaggacaaagatattagtatgctaggtgatgcattagaattgtttttctaggaaagtagtgagaatagttactttatgaagtaatggctatagctattatcattggattggtgattgtgtataactatatatttctttacattgacattcattgtgtttggatatttgtactgagctagatttgaatatatgagtaatgtacgattatttgattttgatgatgtgaatttgcttgatgatatttgtgtgatgaattatatgaatgttgtattgcttttcttgctgagtctttgtgactcactggtgctttgtggtgtatgtaagggcaacgaatgactaggacaaccatgagatgacaaccttctctggcaaatgtacatatcaatttatctggcttgtgtggtcaagttgtcaggagttattttgggctgtacctgatgtatatttttacctactattatatatagccttttctgtaaaaacttttgtaagagggaatcctcgaaataaagtttttagcgatgtaatcctgttcattgctggttttattttagtgaagtttttttttactattatcacgaattttattaaatagttaatctactattagtaaactatgttttaaaaatacacacgtgtagtcccaagggattagggcattaaataagagctcaaataccatagaaccgagggacaattgtaagagataaaaataatattcatgagttaagaaaataaaaataagaagaaagagctgatcttataatatcacaggtcttaaagagaaacgcacgatttcattaaaaggaagtgaaggaggaaaatagcagacaaaagagcagatctctacataaaaagaaatgcggaacagagcttagaaaggaagagaatgagcgatgagtacggagtgatgagttgcagatgagaatgaggacgtgggaaaatcaaaacaggaaagaagaatgaatcaagcattccttcccgtctataaatagaagacccgatcattctaaaaaggggatgaattcttgatcacactaaactaaccgaaattctgtcagaatacaccctcaaatttgcacttgaatttagagagcaaacaacccagacccgactgagagaattgaaaggaaaattgaataaattgattgagcatgtaatttgactaaatcgaacatggtttaaagaatttaaaatcttaataaaaatttgttgttgagctaattttcagcatcaactgtagtatcctattcctagtttaatgcttaagatcagatgaacatgaagccaactgagttt

SEQ ID NO: 202777 - DNA, 1012 bp, Cannabis indica
tacggttttatagaaacaacaagaaaactacataaatgtaacaagaaaaagaaaataacatccaaacaccaacaaaaaataatatacagataacaaaaaattaataagagtacaacataaaaagaccgaattttctgtaaataaaatcataaaaaacgtaaaaatatttaaaattctatacaatcgtatttttatatatatatatatattttgctgtttttggatatttgtgaaataatcccatagaaaaaattaatctttttaattaatatttcaaaaatattttataataattcttttcttattcgcaattttatgtttatttagaaaaacttatagttgaaataattatactaaacatataagaactttacaaaataatatgaatattataataaaaaaaagtaaacatactaagatgctacattataaaaattagttctttatgcaaattatttaataaaaactataatttttaattacgataattatatcttttattttctataccttaatttgattgaagactatatataaatatatattattgattgttattatttaaatatatatataagatcttaacattttaagaaatttgtagcataaatattttatattttttgtttgatatacttatatattacatgtttttttcgacatattaaagggagttacatttttattatttctgtcactattaatttgttaaactctattaaaaaaaagggtattttgagcataattacttaaaattttcgatttcatacacttatatgctatttgtttttttttaaaaaaaaagaattaagtacctaattaaattacactattttgaaataaattacacttatgtactatttttttttttatgatatttagatatttaatttgctagaaaaaagacaagtactgtataaaattaaatatattagatataatttatgctgcaaatacttctttgtttgaataggaatagactggtaataacaaaaattaagggtaaatacca

SEQ ID NO: 202778 - DNA, 2861 bp, Cannabis indica
aaataattaaactatcacaaatacaacaaagtttgagcaacacttgtcaaaaataccataagacttgaaaataaatatgaaaaaaaaaaagtttcaagtttcaacaaaacaataattagtgggcttaggttgggtcttcacatattggacctaaataaatataaaaaatggtatcttcataatatgcggtgcggtttgaactgcatattaaaaattcaaaactgcaaaccgtaccgcgcggtttaggaaaaatttaaaccgcgaccgcaccacaaagaattttaaaccgcatttttttgtggtgcgggcagtttaagcggtttgatgaacactcctagttaataattaaaaaaatatttaaaaattttaaaaaatcagaaaaaattagaaaaattaattttttcttttcttttcctgcttcttcgttctgcttctccttcttcttcgatgccctaggaaaaaacctcatattttccaaaattttctcagcaaccaaacataatcctttcccatcagccaacttccatcaaaatcctagcccatcttcagagctagtctcgacccaaacatgctaaaattggtcataccctcagctgtacaactcggctcaaacgtcgaattccttggcacccacactctgccatgactgaatcgagactaacccgtcacttttgatccagacttgaagctcaaaaattgtgcacgatttccaattgtagcctcacccatcactgcttgagaactgttcgccatggccggagaggatgacaatgaacacacacttctcagatgacctaatcgactacaaaagtaacaaaaattaccaacatttttgtatttaaattattcataacttagggactttgatttgatggaagtgggcatcgacagaagaggcttcaaaagataggtgaggaggggcggtgggggtgggtgtggtggtggtggtgtttgtggtcgcggtagtggtggtgttggggttcaaaatctgggttggagtttgggtttcaatttttgggttgaggttcgtggggtgggggtttgatttatgggaacgaagaagaagaaaggtgaagaagaaaaaagaaaaaaatattaattattttttcatcattttttttagtagtttttaatatttagttttttttaatatataaattattaatatcagttggactaacgaaaatttaccatgtatacacttgtgtatactgtagcagtccactttggcacttaacaaaccaaaatggacagaaggactacagagcaaaacgattgtggaatttggggagtttagccctaattttttcagtaagagagttaatccacaacgaacttcaaaatatagggagtttggccacaaataccctactttaatttgtctaaatggtttggaaaatttttttaatagttgaaaagtttaagaaacatcatttggtacatgttaaaatttaagggataaaaattataattattctaaatatatttatgggatcactttgagcactcacatgagcttctttactctatttttcaaaataccttattaatttttttttttattttattttacctcacatttttacattacaccatatatcaattttttttatatttttatcggcatcaataaaataatatattttcaatacattaataatatagaaattaataaaatattatatataattataaagaattaacttaaataatgtagtaataaaattaataataaaaataaaaatagcttcctctccatagcaacatgttgaaatgcattttattggagtttgtgcaaataggcaaacataaaaattttgttcaatggggacgaaaaaaattagaaggagaagtaaacttaaaaattaagacataatgaaaattaatttataaaaaaaaaaataatataaaagaaaaataaaaataaggaaaggataaatataaaaatatttacaaaattaatatataaatgtaaaaaaataaataaaaatggactaaattgtaattaaaaaactttaaatattaaaattttaaggtgggcatatgacaccctcaatcttatattgggtctgccactatgtataataattcagttatatttgttttttttttatatagttattatttgattattttaataatattttataatttaaatttatctaatataaattaattttatattataataaaaaaaataatagtgtttcttattaaaataatattaaaaaagtttagaaaaaaaataaaataaagagctgtgtatatttagaaagttcttataagaaatgtcgctcgctattgcgctgcgctcgtaaaaataacttttatcagcgcatttcgcaaactgtccttgcaaagaggtcaaagttttaccagcgcacatttgcagtagctaaaatctaacttttaccagcgtatttgcgcgctaggaaaagtcacttttgccaacacttttcattttgtgctggtaaaagttctaatacataccaacgttgatttaccaacttttttgtcaacacatcagaagtaaattgtattttactagcgcaatatcaacttttaccaacacaaaaatatactaacaaaagtgacatttattggacattcatttcctattatatattcatttgtttttatatagagaacatacatagaaatattgtaatatatattatatttttggctaaattttgtttagcttttagctgaatacattgatgggagtactgctcaaagacgtttctctttcattggtattaactaagcatacacgctgtcaaatcttagagagactttctcaatcaagtgattaaaatggagtggtctctaatggttgagccactataaaactgccagtt

SEQ ID NO: 202779 - DNA, 1280 bp, Cannabis indica
atataacacaccaaatggactatctggcaattttcaaaagttcattaaaaaaagctacactatttatttatttattttatttagataaaatatttattttttttttgaacaacacaatttttgaatttttagaataaatacaaaaattagatgattgttataggggtgtagcagtaccagtaccagaaacttctcagctctttcaaaaatacattctcaaaaataatatatattaattttttaatatatttgtatcattatatataatattaatatatattgttatataatagagtaattttaagtaaaaatatttaaatttataaataagttatattttgaaactcatatatcattattcacgtattatttttttttaatatatttaaattaatttttaaataaaataaaattttaataatttagaccaaagagtgtcaagtggttctttaattttcagaagttaaatatttatgtgtttatataatattaaaaataataaaataaattattaaaacaaaaaagaaaaactagtaacttatggatattagttattaatgataaaatcttaaataattaggaaatgttttaagaaaaaaaaataatatcttatagatataaaacataaatagtaaaattacaaataaaaatgatatgaagttaaaaatctgtgactagatagtcacactggttaaatgtcaatttttgtttatatatttagttattataataattctttaacaagtttttctttttttttgaaaaaaattctttaactagttaaatatctatgaatatacacttttaatgttaaatttaatagataatattattaataaaaaaaattagttatatatgggctaggtttaaataatgatagaaaaatatcttcaatgatttgtgatttcctaatgaacatgggatgtaatttcaataagatttgttggctatacttaatgcttttaaccttttgaaatatgtaaaataacaacttcatagtttgatagtcaatacaccactttattttttatttatttagactaattaataaaaaaatattgctaagagaaattaagatatttagtactactataagtagcggcttataactaatattaaattgtatcaataataatattacatctcacaaaagtattaagtatcatatgtgccctttaacatttctcattaataaatattcattccaaaaaaaaaaagcttctttggcatcattaattcatttatttatttttagctaaaaaattatgttcatttttttt

SEQ ID NO: 202780 - DNA, 1604 bp, Cannabis indica
ccctcctcacctggaataataatgtcgctcatcccaaaaacatccaagagcgaattgattgggggatcatcaatgattcctggctagatactttcccgggagcctccctcactcacctgggtctctttggctcggaccaccgagccttggagttagtcacatccaaccctccgggcactcggtcaaaggaccatagcaagagatttcactttgaaaatgtgtggctaaaggaccctaattggacacgaatctttgatcagtcctggactagttccacgaccactcaggaagccatccctaaacttattgctgctcaatcttcgtgcgcgtattcgcttaataattggaaacacaaaaaagatttcaacttcaaacaacaaattaataagcttgagaaagagctggaaacagccagttcttcttccatttgggatgatcatgccataacagctattaaagatctccaatcccggcttgacgctcttttgtacaaagaagaaacttactggaagcagcgagcgagaacccaatggctggctcaaggggataaaaacacaaaattctttcaccgatttgcctcccccaggaaaaaaatcaataaaattcatcaacttcatctgcctaatggtggcattgtttctgacgaagagggtattatcagggaaatcgaatctcattttgaccatcttttcatctcctcgaacccttctaatgaggatatgagtaaagccttggaaggcatcacgtgttctctctccgacctggacaaaacccttctggatgaagacttctctccggatgaaatcgagaaagcttttacccaactccctctggataaagcccctggcccggatggctttaactctcacttctacaaagcaaactggtcagctgttaggaatgatgtgattaatgcagcatccagcttcctcaacggaagcggcaatgtggccccattgaataataccctcatcactcttatacccaaagtcaaacagcccaagtttatctccgagttccggcccattagtctttgcaacatcacttataaaattatctcaaagactattgctaaccgattaaaaattgcgttgaaccagttgatctcacccaatcagagtgcttttctcccaggcaggctcatatctgataatatcattatagcccaggaagtagcacactccatcaaactcaagacgaaagggaagaaaggttggatggcggtcaaacttgacatggccaaagctttcgatagagtggaatggccttttatagtagccattctctagaaattccaattccccccaaggtttatccaattaatccttgcttgcatctccacagccactttccagttcaatctgaacgaaaaagtcgtaggaagtgtcatgccctctaggggtatccgccagggtgatcccctctccccctacctctttcttttatgtgcggaaggcttctcttctcttctgcacctgcaagaaagaaggcaaactctctcgggcttcaaagttgccagaagagcccctgctctctcccatctcctttttgcggacgacagtttactattctgtcaggcttccacactactacaaaaaggggta

SEQ ID NO: 202781 - DNA, 432 bp, Cannabis indica
ataagaagttagaaaaaaaaatgagaataacttatttggacgttctttaaatttaattgtgtgacttagactttgtaactatatgagttgctcaaaaagagaaatcattgtgtaaaaattagtattattgtaatatataatgcaataaagtttgaaccgcgattattaaatctaaaatcacaaaccgcactcgcattgtaaaaaatttcaaactgtattttttgtgcggtgtgatgtggtgcaggcggtttgtgcaatatggtgtcggaagtttgatgaacacacctagtattcttgttaaaagaaaaaaaaattgaaaaatttaccttttgaaagagtccctctcgaaacaacctaccaactcaacagtttggtgcacttcattctccagtttgtgcaatatgggctcctcatatgttttttttttttttt

SEQ ID NO: 202782 - DNA, 738 bp, Cannabis indica
gatggaatgaaaatataattttagtcattgcattcaattcataatcttccaaccagattccaatagaaaaggcaatgcttgagaaaacatatatgaaattttacctcttggccctagtatcaagtcaaacaaaggcctcaaactaatctgttccacagtatagtatgtaaaaccaaatcttaccaataatggcaaacaacggaacaaattgattgataaacaattataaccatttctctctgggataaacctgtatttttaaaatgatgaactcctatgaagacaaggacaaatgtcttgatggctaaaggaataaaggaatgaaaactttgattgttctcagtaccttgagatggtttacgagttcaacactcaagacattatgagaagggcacatatcaaaaacctgatttcaaaagtaattcgattctgcacaaaaatgaatatgattgaaaatgagctgtcgaattaaaattataaccaatcgacattaaatcaaaatcttttcattcatgaatagaaatattgggaaagactcagagcatactaaaatgcctcaggaacacaatgaaatcatcttcctcttcttcactaaaactgaaaacaagacagaaaacactgtctttgaaaggaatttccaggtcatcaacaaacagaaagactacatttcaaaaataactaaccaactaagaatagacaacactatcctcctcaaattgccataagatcaccatagtt

SEQ ID NO: 202783 - DNA, 614 bp, Cannabis indica
gtgaaaataggatagggtatttcccctaaccaacaaacatctcgatccaactttaaagcatgttttgctagaccatgggctcctcatatgtttgtaagacgattttgttttcaataaaattttgaaaattataaataagttacttccaaattttcttaaataatttactaaaaaaattcaatttatatctctttttatcaatatatatatatatttttttatattgaggagaggcttgagacctcttacaaaaagtataaaactaccatcactacatattcatattatttttatcaatattcattttattttattatattttttatattgaggaaagaggagttcgaacttgagacctcttaagaaaaacgtgaatccactaaactatcacatattcattttatttttatcaagatttattttattttattttttatttttatttcatcactttatctaactaatctcactttgcttttaagatcctcacttaataagaataataaaaaaaaattaccaatcacattttttatttttgaaattaaagaaaaatcaaaattaattatcaatgcacatttatttttatgatttacaaaaatttaaaaacaaaaaaa

SEQ ID NO: 202784 - DNA, 1062 bp, Cannabis indica
aacttaactaaatataaatatggtcaactaactttaatttgggtatttatgaagtatcctataaatttagacctaaaaattatttatgtaatagagtagagtagctagtagtgtcccatgaaattgaaaactaatcacgtgatattatgataaggcctttttcattttcttggtctttgaagggaagtaaacttgtttgaacaaacaatcatcacataaatagaagaatttaaagaactactagcctttgaacatgtgccattaatgcttaatttccatgtaacatatatctcgagtttggtttgaggaatgaaaatataagaataataagaataagaatgaaatagaatcaaatttaaattaaaataacaaaaaaaaaaaaattatcatgcattagatattttttttactattttaaaatggaatagtcatttcaatatttctaaatgcaactaaataaaataataaaataaaaattatttttttttctattttattttatttcattacttccaactaaacgtcatctattgacatatgaaagaataaaaattattactaccataaaaaaaagttggattaattttgcttctttatgggctaataataagcataagaacctttggtttaagattatacattgcaagagttgaacaagcatatcctagaagaagagcaaatatacttgcaaatatagatgaagctttgaaaaagagtcctagttacggacataatgattccttttttatttggtaaagttactacaattacaatgttacatagaagaactataactaaggcaagatatcctagaagaagagcaaatatacatgagagtctgagcaagaatgcttgaaagggccaagagcaatatttatcacatgagtgaacccccaacattaatgtttaaaaacgggtggcggactcaaaatttaaattgaaatatcgtaatttatttttaaaggagagtgcatgttttttttaatcatgctataacatattaaaaattactacaaacttgtttttataggatagaatatagtttaaattaaaaaaaaaaaa

SEQ ID NO: 202785 - DNA, 1281 bp, Cannabis indica
ctttaattaattctaaattttaatatagtatcagaattgcttgtgattagcttacaaagtgttgtcggtctaaaaagataagttaaactaaaaaaaaaaagcttttgttgtttctcttttaatgtctatttgagatatttcggtcaatgtgtgttgtcggtttaaaatgataattttgtatgttttaattatgttgcaatcacgacaagtttaattaaattaatattcacttcattatttttcccttagctttagaaacttaatatagaactggtcacagtggtcactgtcttgggcaaaatgtaaaagaatatattacttattattttttgattgaaaggaagaactctttcattattaaataagcatttctcattccaagtaaaaatcccattattctaaaaaatagagtaaaattagtagtcctaatggaaaaaaagcaaaaagcataacctacccaattttgtaaataaattgggatcttgtcactcaaatacatcaaatttaatagaaaaaaaaaaacttctaagacccaagtatgggaagtggggttggaaataaaggatgcaaaagggtgtgcacttgaaatttcctagtgattaggttacttaaaacccaatgtataaatggaaattgaccaacttttgagaacttatttcccactatatcatattggtaaataatataagaatcttccagtaaaaatatcaaattaccatcgtctggatggaaagaaactactctcaaattttgtgttttaaaactctccacattaacttcatgcaccaaactccatttcgaagacaagtaatctacatcacattcctcatcttcatcaatattgaattcccaaattttcaaaagaaacacattgttttccttgtagagttgcgaaagccttaactgttcacgaaccactccaatgcgaacccttatggcatcacacttgcctcgctctctctttaggtctcgaggcaagccattttgttcaatatgtcccgataggaatcaattgtaataatcttccgagcatttccaaataaagtacttgtgactagacaatgttgtattccattacatgtaacattattttcagtcaacactgcaaaagtgagaggaaagaacaaactactccattctctagtctcaaaatcaaaagtcataacataataaatataatgaaatatgtcagggctgttatcataatatactaacaccactttatatttgttagtatttgtgtcacaaaccaatccaccaattcctttaaatggtaaaaaa

SEQ ID NO: 202786 - DNA, 603 bp, Cannabis indica
attttttaaagtttagtttatttgattttgcaccatttgttgtaatttttccacaaatcaaagcttgataatcgatcaagaacgcataattaagattctttcggctacaattcttgaaaaaaatttaatgtcttcaaatgttgtaattcattttctttctctttgtgcttgaataaagtctagaggttggtttcaactctctaaaattgttagtctttttatgctctttatattttccatggctatggttgttggaaaaatatccttggttaattatgagtatgcacttactgaggtgcactcaaattgtcacatggtgggttcttcatgccttaattaagttgcttgtttctggctctactgctacacacactactagtgatttatcaagttcatttccatcagctagtgtttaaggggagcctttttatttgagtgttcccaagaccgtcaacaaacttgttgaaaaaaggaatggactaagacaaagcagtcaagtccagagggagcaacttgatgttgttcagagtgaacacactgtcccttttgttattcaacctacaaatcatctacccagggggagtttccatgatgggagtgttt

SEQ ID NO: 202787 - DNA, 2075 bp, Cannabis indica
ttctaccaaaacaactgggatattagttggtaatatggtcactgctgctggcctaagtgttctcaatgaaggagctgacccaacgccgctacaactctactatcatcactctcataccgaaaaaaaaaaaaacggcccagtacatgaaggatttcaggccaattagccttagcaatgtcatttccaagctgatcactaaagtccttgttgctcgacttaagaatgtcctaccacatgttatttcagaacacaaagcgcttttcttaccaaatcgacttataacagacaacatattggttgcttttgagttaattcatggtattaaactcaaaacttcaggtcgtaaaggagtggctgctataaagttggatatgagtaaggcattcgatcgagttgaatggaatttcatcaaagttgttatggagcaaatggggtttgctaatggttgggtatctttgattatgaactgcttgacaaaaaaccacttcacttttctcttgaatggtgagctcactggatcggttaccccaacaagaggactccgacaaggctgccctttgtcgccatatttatttttgatttgtttcgagggtctatcttgcttgctgcaacatgaggagcggttgggccgtctccatggttactcactttctagaagatctacaccaatttcacatctgctttttgcagaggatagcttacttttttgcaatgctactgaaagttcttgcaatgctatcaagagatctttggacatctatcacaaagcttcaggccaagtcttaaatccggataaatctgtcctctctttctcaccaaacacaactttggctgcgcaaattcagtttcatcgagtgttgtctatgccaattcgcgactgccatgaaaagtacctaggattaccagcttatactgaccaagataaacaacgcctatttagtgaagtcaaagaaaagatttggagactaatgagaacatggaatgacaagatcttttcggttgggggaaaagaaattctcctcaaggctgtggtgcaatctattccaacttatctcatgagttgtttcaaattaccaaataacatatgtaatcagctagaaatgatgatgtctaatttttggtggggttcaaatgacaaaggcacaaaaattcattggtgtaattggaaactgttatgtaagactaagattgagggtggtatggggtttcggtcgtttgtacactataaccaagcgcttcttgcaaagcaagcttagcgacttcttgacaatcctaactctcttttgagtagattgctgaaaagtcgatatttccagaacaactccttccttgaagctccacaaggtcattctccttcacttacatggcaaggtatccttttcggttgagaacttctaagtgctgggctgcgatggaaagttggtgagggcaggaacataatctgtgctcgtgatccatggattcccggtcactccaacttcctcccgactcactactcaagtccttcaaatgttgttgttgctaattttatttctgaagatagacaatggaattgtgacttgttacaccagtatttttcaaggatagatgtggagaggatactcacggtccctcttagtttttttctcaacaaccgatcggcttatttggcatcattattcatcaggcatttacaatgttaattctggttaccattttgctgcatcattagaagaagctgatgtttcttcggtctccacttcacccacagcctggtggacctttttttggaagttaaagctgtcacagaaaattaaaatttttgcctggagggtgtgccatgatgctctccctgttgctacatcgctggttcgtaggaatgttattaccgattccacttgttctctctgtcgtcaagcttgggagtctattggtcatgtcctttttggttgcaaatatgctcgagcagtttggcgtgcaactaatcactattttgactggaacaaggctgctttgatgcaaaaaggttgatttccttcattcatctttccactatggggttgactgaagttgattcttcggaagcaagtgagcag

SEQ ID NO: 202788 - DNA, 1027 bp, Cannabis indica
gagagagagagagggtcctgactgtaactgcaagcaatggaaagaaaggaaaaggcaaagtggccacacaaagcaaaggaaagcacgccatggacattggtcacaatcacttctgttctgtgtatattaaagaagaagaaaaaatcaaatctttttccctaatttgggactttaatttcatctaatttgtaataactcacattaggtatactagtctagtactatgtcttgtaatttgttggatgattattaaattaaattatgtattgtctcatacttaattatattaatagtgatttttagttgttgtttcggtaatttttttgtgaattattatgtgaattttgattacaatttaagttgttttattagttagtatgtaaatttttgtaaaaatgcaaaaaaaaaactgctttgaaatatataaaaaaaaaccctataatatattagttagtagtggtggcttatagcaatgctcttctctaagagaaatgctaaatggtattcatgatatgtctagcactcttgtaaggtataatattactattaatacaatttaatatcgatttccacttattttattttaataaaaattataaaaaaactgctaaccaattatagtgtttaaccttatagtagtgatatatatggaccttaatgtctcattgttgtttctccaatggtacatatactatgaccaagtggttgttgttaataattagtgagtttttaaaataattattaaattaaaatatgtacgacagaaaaatattaagatatctagaacaacgttgcctggcaaggcccattttttatattatatataatttatgtaactagcttgtacgcattattatattttcaatgaatttatttattgctttaaaaaaataaaaaatattgtatcccaataggagcatcgatgccctaataggtgttaatagtgtttgacactatctaatatttaatatcgttattggtgaaattaattatttaattttacataatttaattgaataactattat

SEQ ID NO: 202789 - DNA, 1237 bp, Cannabis indica
attgttttagatattcgtttttaggtgtttttatggtgcacccccttcgcgctatcgatatctgattagttgtaatcttttatattataattatttaagatacttacaaaattttgagaaaatttttattaggatatttcacacgcttgcaataaattgtttgaattgaatcttgtttttttttcaaaagaatccactaaagaaaaataagtaaataaataatgaaagttatgaacaagaacaacaatagtaaggacttatttggcattgttttagatatttatttttggctgcacctcttttgtgtattttttttatttaaaatattttacaatattttgagaaattctaataatttaaaatacaaaaacaggattctaacagcctattaatttcacatgcgtataaaataaaagagacatgtatgcattagattgtttgaaccttggttttggctcatcaaaattttcagaatttttcaaaaattttacaaaatgttttaaaacaattacattgtacactcgtatatacaacaaaattaagattaaaactatctgaaatcaaacatacacatggtaaatagtagtatgtgccagcctagcattcatacttgaccaatcaaatatatcaaagcatgggatgtcatgagtaatgatgttacttcttataataactttgaccattattatgtaaaaataaataaataaacaaataaaaactctctcacttcattatgggaacatcaactcaattgtcctgtttatcaaatttaaaaaagtctttgataaagacttaatctatctctaaagtattaatattactactacaacactctactactacgttcattcatatcctctcattgattttgctttctcttttaacacgtggaattagaaaaaaggaatttagcataattatatgccctttcttttttatatttttttactttttatatagctcggaaagaacaaaaaatcacgtggtgcagatcattttcttatatttttagtgttttgataattctggagactacgtgctaactatacttcatgctatcttaattgggttatcaataattgcacctccgaggattcccatccaattaaagatggtaccgctaaaatgaggagctgtgacgggatttgaacccttaactcaaataaagaaaggatgccaataaaaatttccttactactacaccacacaactcgtgattttttcttatatagctttg

SEQ ID NO: 202790 - DNA, 1040 bp, Cannabis indica
atttgtgtttaaattttaaggtaatagtataataataatttttattatttcaaaaatattaatttcttctttattgtattgaaaaccattgcataaattattttattaaaatggttgaattgagttaattttacaaagtattataaatatatttgaaaaaatattttagtaatttctttcgaaagaaaataatattaataaaagcattatcttctatataaaaaaaaaaagcatttatgatttaaaattaaaataatgcaaaataaaaaaataattgaatacatttacttaagcttaaatattattttagaatattttattttttatatctatatttcttctttctttttaagcacaaatttcacagatatatacattcttttaattagtagtaaatattaatttgtcccatctaaaataattttctaggttcgtcattggtaggaggtcacccatcttgaaattatccctgctcaagcacgtttaactatgaagttttttcttaataaactaccaaaaaacaaatgcaccttatttatataggtagtagcaattaatatatttaagtcattttcaactgtatagcctcatacctacacaatctcatagtcatcacacttgaccatctcttggcaatgtgggattgttcaactcccgtctttctctttcgaatcatgggactctaactgtcccaaaggagttcgatggttggttgggaagggagatagagttcgaattcgggaagatgcttggatccctaaagaccatgtgggtcgggcttactaaaatctctaaatgagtaagaccattcactactcaatcacacaaaattcaattttattgtttccaagttagaatcgcctcctcctccaatttttttattgaaattgtaaaaagattatagtgaataattaattaaattatatatattataaaataaatttatggtaggtacacttattttgtctaaagatattttctaattagattattagataattaatttctgggagttgaattttgatattgttatagtatat

SEQ ID NO: 202791 - DNA, 2395 bp, Cannabis indica
acgagaattacaagaaattggcttagtatggggcttaaatttctagagagagaaagtagagagatgctctaaccttatgcgtacttggaagaatctcaaaatgagctagatgagctctcatatagagaaagaagtcttattaaaatcataataataataaattataataaaatatgaaaaaaaaaataactttgggttgatcttggccatttatgatgttccaatggtgaaaatagtcaatttttggagattgaattttgtctgtcgaatcgttttcaagtaattagtggaaaaatcgcaactatgttgaggacaaattttggatttaaaatcttcaaacttacaatatgggtgttagatatgacttgatatatcttttaaatatcttcaaaataaagttgaatcacgtccatagaatcaatattgaggagttatggctatttaattgaaggttgtttcgcaccctgcggccaggttgatacccaatcctcatgttaacaacgaccaggttgacaccctaaccgttaggatgtcaacctggtcaacctggatgtcaggttggtgaaaaaacatccaagacttgaatttttttttatgcctaagtgatgtgttgacatcacttagtcagattcaacattttagtgaagttgttcaccttctcggagatgtagcttttttgtgaaattagaaagcctcaaaactccccaattgtgctgatattccacattgttgaaacggtgaaatatcaaagcagaatttgacctgtcacaagttatatctctggtttactgtgaaaaaatagttgaacgctcaaaacaaaatagaattctgataagcagaacccgacgcaccaggtcaggtgtcaacctgggcgctgggtgctccccgggtgccttcctggggcttctttagatacttttatggaatttgagattgcaaacgaggtctcctaccctatttttgacaattttaagaagaatgcacgtagtagaatttgtgtttgaggagaataaattaatgtgggaactaggttgcatgttaacctaggcgcagggcctaatgccatgtcaacctgggcactggggccctgttctgggtccctgggaaaattgtttactcactgaaatcacttgtatctttgttattttagatgatagaaataatgtctaaaaacacttttttggaaatttgattggaaacatcctaggttgacaaatgtcaacttgggcactagccccagtgtcatgtgtcaacctgggcattgggtcaagatttttgccaccagatgactccgtttgattcccaaaaaacacttgtatcttaatctttaaagaaaacatagaatatggctagaagacttctcataaaaacccctaaaaatagcccaggttgacaaagtgtcaacatgagcattgggtcccagttctgaccacccaaatggctctgttgttttccgaaagcactcaaatattaattgttgaggaaaatagagaattttcagagaagattttatctaaactgctgttggaagtggccttggttgacaaagtgtcaagttggatgttgggcccccactttggtctccaggtcaatacgtttctttcctaaaagcatttgtttccttgtttgtatgaaggcaaagaaaattctaaggatacatcttcaatatagttgctaaaagtgccctaagttgacattatgttaacctgggcattggatgcctggagcacctagtgccttgggtgctcaaaattaatcaggttacctcaaatatgtttgtgacatgcctaatacatgtaaccgtacaaattttgagccttttgaccaaaaccctacttcgaatgttaacctaggcataaggcacgcgggttgacttctggggctttattttgtgtatttgcatctttaagaccttggatttggattcttcttatcttcatggtatagaatactaaataatggtgagttgtaaacaacttagctgaaacacccattctggagttcctagagtcaacctcggcgtagggctaaggacccatcccaagtcgactgctatgactcgagactactcaattcttggatattttcttgcttgccacgtggcaaacattgatttccatgtcactagtgtcagttttcgggtaaattttttacccctaagacaactttacacttgtgtgaggttgacttaatgaggtgaactaagcccatttctatcgaaactactaggtgggaatcaattttggtaatatcaggtaattgtttttgtttttcaatgtcttctagtgagattaggaattttaaattcctattcctttttgaacaagagatttcgaaatttaaagataaatagaaaggagaaaaatagaaaaatataataatactctctctctct

SEQ ID NO: 202792 - DNA, 1169 bp, Cannabis indica
gagatggatcaaatggatatacgaactgcattcttacatgggaatttggaagaaagatctacatggagattccaaaggctttaagaatgatgatctagataagattttccttttaaacaattctctatatggtttgaagtaggctccaagacaatggaacttgaggtttaatgaattcttgatgaaagttggctatacctagaagcaattatgacacttgtgcatattttaacaatcagatttacctcttattgtatgtagatgacatactaatttttggtaaagataggaccaacattgataagcctaagtctcaactcaagagtgagtttgagatgaaggatctatgtgaggccgagaagattttggcaattgagataaagaggaacaaaccccatacaaccatgttaagccaaggcagctaccttaggaaggcaatagagaaatttggatgactgatgttaaaccagttgcaactcctctagcttagcactttaaattgtctcaagagaaatctcccaaaactgagatagaatgaagaaagactgatgatgtgccttatgctagtgatgttggcagtctcatgtattccatggtgtgcactaaacctgacctgacacataacatgagtttagtggcgtgattcattacagatccttgagaagaacattggacattacttaaatggatgtcgaggtacatcaaagggactcttattagtggtccagcattgggaaaaccaggtaatttcaaagaaaatgtaattggttatgttgactcagattatgttgcaaacctaaacacaagaagatccttaaccggatatgtgtttactgtgtttggagtttgtgtgagctagaaatctaaccttcaaatgtcgctctatcatccactaaggctaaatatatggcaacaacagaagtaataaaggaagtcatttatcttaagggtttacaaatgaggttggtatcaagatagatgaattgattgttcattgtgacaactaatgtgctattcaccttatgaagaatcccaatgtttcatgaacggtcaaagcacatagagattaagctgcattttataagagatatcattggtattaaagaggttccagtcaagaagattcacaccaatgagctctcaaccgttatgttcaccaagagtgtaac

SEQ ID NO: 202793 - DNA, 543 bp, Cannabis indica
gtaactttttttttattaattttatctatttgtgaaatattaatccctttaaaaaagataggcccaacatatatctaataataaaggtaaacttacacaaaaacattaaggtagcatgtgatttagaggaatagaaacataagaataaaaattaaaatgagataggaataagaattaataaatttaaagtgaataaaaaaactgataagaaaattattagattttttctcatcgtgcattgaaatgattttttctttcattttgaaatagaatagtcatttttactattaatgatagaaatgtcattccattttagacatttcaatatcttagtatgtaactaaataaaaaaataaaataaaaattatttcctccatttcatttcattacttccaaccaaaccaaatgccacttaaatttatctaaaatattacattatactgttaggcgacacttacatttatagtgtgtagtatttttcttctttattattacagtagtgcatatattgttgagtattctcattcacaaattaatgcagtg

SEQ ID NO: 202794 - DNA, 1096 bp, Cannabis indica
gtttttttaattatttattttagtgttgttttacggttgtttgccatgatttattcatttgacgtcgattttactgttcttactccatctcgctagaattaatgattattttctgggtttcttgtgttgatgtggtggttctgtttgtgagtgtggaatatggagactataaatacattttttcttcgttctctttggctatttttgtggttttcttattcttattctcctacgagctcactaacaaaaagtttttgagctgtgtggtttttttatgtttttccaagtggttatatctacttcattattttgcatttgtttttgtgttgttttagttttatttttttatttttttttattttttttagtgttgtttacatttattttgttatgattatttattcggtgtctattttactatttttgctcaatctcgccgaaattaatggttgttttacgattgtcctactgttgctggttctgtgtagaagatggaggccccgtatttttttttcttttttttttttgtgtttacaatataaaagaagaaaaaaaaacaatataaatataattttttccatataacaacaaaattaaaatatttcacctaaaatccaatatttttataaaaaccctaccaaaaataatgagtctacagctatgtcgaatctattcttcgaaatattaactcgacatgagacgctactgtagggtctatatgttgaaagttttgaaaaatatgagttggtccgacccaacacattccccggcccaccccaaatattgaaaatgaaatggctacgtgttacgaaagagattatcttaacgtacttatttattttcaacctttatttgtttattacatttattttgttccttttagatagtgccttatgggaaagcaacaagccaaagggaccttaaaacaaaacgttaaaaactttttgtagtgggcattggcacaatctatgcatgcaggctaagcttaacaattttcctttgaatagttcttcttttcacttcacttatagcattcatcactttccacatgttttcacatgtctgtttgacttgctcatgagagagagagagagag

SEQ ID NO: 202795 - DNA, 796 bp, Cannabis indica
acagagaaggagagagagagaagagtactgaacctctgacgaccttgttggttcctttgagtggtataggagtccaggtcctttttgcctggtctagttttggccatgggagttgtctttacaaaactacaaaaagaagaaataatctgaaagaataaatacaaaaatgtaggaacctaataaatataatatataatagtaaaagcttcgtatatataaatttatatacatatatttattgatttctaaaagaagaagatagacagaatgcatgggtgatatagataaagttttcaaatcaaaatacctaaatttgggagaagagaaaccctagaacttggtgaagaaaggaagaagacgagacagcggaagcgactcagacgcttgtcctcagttgctgcactgactctctctcacgtacctatatatcttatatatttattattattggcctattttttataaattatatctcactaaaatatttaataatattagtataaaacattttcatttattatttatgaattattatatacaattaattaattaataatctttgattaatatttaataaacaccattttaagcctaatcttgctctattatttatactaaaaaatgggagatagattaaacttttttcacaaattttttgtcttttaccatttagtctgtacacactttctattaaaaacttactgtactgacaccacttttattttactctttccccattttcacttttccttttctcactcgcgcatttgtttaaaaaaaaaaaatattccaccta

SEQ ID NO: 202796 - DNA, 2479 bp, Cannabis indica
aattttatattcctagtttaactgaacacagatgatgtttttaaggatttttattcttagtgatgtaagttaagtagaatagcctataaaaataatgactactactctcctaaataataatataattaaattgtaataataatgataatttttttgttaatattttattgccctattatgagcaatgtttctttcccttggaaattatgagcaaggttagtgacttttagtatttaaaaattatagtaatacacaaacaaacaaagaagtgtggagtaaagtacactacatgttataagtcactagagataatatactttgaagcatacacacttaattttaatttttagaaaataataataaaggaaataaactatcatttaatagctaaacaactacaaacaaaagaccattgttatggagtaccaaggtgtctagcacgaatatgaggtgtcactttataattggttagcaattttctataatcgctaataaagtaatgagagtgagacccgatattaaattgcaccaataataatattacatatcacaaaagtgttaagtgtcataagtatcttttatgtttatacccgatattgtttctttttcctagaaattaattatttgtttgtaagatttttcctttggaaattatagatataatttagtagtgttaactcagaatttcgttaacataaatgaggctcttggcaattaataatctaaaatcaataatgtaaggaaattaattgtatagctataaagataatgaatttttacatggttttgttgttaaaatctacatactatatgagttactcgtatttttgagttttctatttacgggatacaacttagcatatattcttttagcaaggaaagaataggtcgtccccatttacaatgatttctgccactatttataagaaacattcatgacattctttctaattttatcttagtgacggtttatgaaatatgaacattccccacattttatgttattttaacacatgggaataacaatgggtaactatttaaaattgaataatacacttattaactgctacttttgatcttatctttgagcgattattgaccgagccgtatttctatttaatacttgtgcttctcgcgtataacatggatgaattggtccttcttgctggtcactaaaaaagtgaggttcaaccgatagaatcctttccttgtaagcaaactttttcaaattgtatctcttgtgcttcttgagatgaaatcattccatctcgcaatcagcttggtcttcctcttctcattgatttcatgagtcttcgaaactcatatctcacgttcagtgtttctcgagcaggtgattgtgtaagtcttaggtctcgctcaccttctattcttataatcaatatttttgacttactcttatggcttaaggcaagacttaaattctgaattgtatgggtatttttcgagacgcattaaatatcacagtatttcttttaacatgcgagcttacttatttttgaatttatgtacacatgtcgcgatcatttactgcttgaaaatatgacaagtagagtaataaaaatagaagtataaaattaattaatggaataaaatttatcatggaatcgataattttttatagcttacattagaatgatttttcttcgtgtttttttttaatattttaaatacaaccatacaaagtaatgaaataaaaattgattttattattttcatttcattaccccaatggagttttttttcttcaaatatcattacatgctacaagatgtgtacatatattgcttagagcatgttagaaattcccaaatctacatatttttatcaaaaaaaaaaaaaatcccatatctatatatacaatttcccattccgacacaacccatagagaaaaagtattgaaattcggcataacaaaaaagggatagtcacaacaacaccactattgggagaccgataccaccacataaatagaagaacgaaaatgacttatatataacttataagtatatacaattatacacttcttttgtactagcgtctctactcgaacatccgtgataaagtagagatgccaccaccacctatacgccaactaggtggtggatggaatagagttatttctagttgagtttgttatattgcattagggtttatctatgttgttttaaggcataaacttgtcctaactatttttcactttctaccctacactaacaaatgttgtgaaactataaaatgtatgtgctataatataatgcttttagaatctaagctatattggtactactaataaatattattttgactatggttgcataaagtgagcaaggttttgagtcatctaataatgacttcattccaccgatccatgcatccccaactttaatttattttagtattattatattttggtacaatgatacttataaattaataaagcaaccacaaaaaaaaaaaa

SEQ ID NO: 202797 - DNA, 625 bp, Cannabis indica
aagtaatgaaaggttcttgttcttctaattccgttgacgattacacgaggacgaccactcaatgaagacattttttgctttgaagaaatttaggtgttgggaatttttatggtatatttatataagtaaataattttgtttagggagaaattaaagttatgtcgggtagggtgggatgtaaaacttggaaaaggatggcttggaggaataaaggaagtgattctgttcttctttcgtatatttgatgaatttgtatttggtttttgtagatggacgaagttaaggatgatccaaataatatgtccacatgtatttatttaaaataaataattaaaactttgccttacgtctaaattagacaattattttaaatatttggacctaatttatttataactaattaagctaaaaacttctatcaaaaacaaaaaaaatgaaaaatatgttaaaagatgattaacattaaaataattattatatgagatatttatagaaaaaattaatttttttttccaaactttatatttatacattgattttttttttttttacatttatacttttcctacttaatttttttttttcatttttactgtttaaagtttcaaaaaagtttttttttttt

SEQ ID NO: 202798 - DNA, 2111 bp, Cannabis indica
cttgtctaattctgacatttatttcaagcttatttactactcattagtttctatgttacaattgtgatttgagatgatacatccaattccacttttgagaaattggacatgtgaaacttttacaacaaatctaaatctttcatatttaaatatatttttcttgttgcagctttcctaagtgttgagttacagaagaagattgaaagagcaaaaatcttgtccgaattcaactgttggactactatctaataggtaccaatattgacttgctcacctatctgactaccaaataaaaaatttaaactaataaaatgttgtctgcattatttctcactatctttcttactttttttaagagcaaaaaagtacatgaagactaggataatgaagcttcatctaccataagaaaaaaaattaataaaagaattcagttaggatcattatcttagtttattttttagttgtttgttgaaaatatgtgcaaattaagattatagtttatagttgcaatattaatatattgtctcttcttgatttaagatatagataacatttttattgtattccaacatagtggtcattgggatgaatattaaaattacatcaactttcaagtttgtaaaatgatcattccaaataattgcaactacaacaccttagttgaaatgatatgtaatgagttgaagatagagcttgaatcaacaatcgtaaagatagagtactaaggaagagacgttacctttcatttcacatagtgaatgatcttcagtttatcttctacaaggagttgaagaaaaacgaattagatttcacaaagtacgttttgtgccttacaacggagattactaaattgaaccgacttttttttcaaccagaagtacaagaacacataatgagttgtatatagaattggaacaagttgaagaagcgacatcaaattcagatgaagaaggaactgttgatatgggtgcagatgagtatagattatatctcttatgcaaggcttgttgccaagcaaataatagaaatgggaaatgaagcaaacaacgatgcagaagagatcgaaattgatgaagattcggtaatcaacaacaaaaaccattaagaagaaataattttttctcatatatacaaagataaagagacattgaagactgtgttgagccactacgctattagaaaacattttcaataccgtgtgaaaaaatctagcaaaagaaagttcctagcgaagtgctttgacaaaaattgcaagtggaagttaagggtatcaagaatggaaacacaagctaatttataattagtgcttttgatgatgataacagttgtgatatgaagataagattaaaagatcaatgtcaagcattctcaaccatcaatgcagatatgatcaagtacaaatttacaaacatcaagactaaaaccacagttgcaaatgttataaatgagttgaaaatttgtggagtgtgagtcaaatatagcaaagtttgaagatctatacaaaagacaaaaaaaagtgagaggaaatgttattaaatcttactctgaactagctaagtgattttacttgttgcatcttacaaattcaggtttttttgtggaactcaaaacagaggaagatggtaaattcttttcgttttgtagcattgagtgctttaagaaaatgatggttgcattgtattcctgtaatagttgatgggatattcttaaagtcaacatatggaggaatattgctggttgatcatattttttcgctagctttcgatgtggttgattcagagaatgataattcctgagagtggttctttgacaagtttaataagtgttatggtgcaagaaaaaataatgatcattatctctgtcacgaaagcattaaaaagacaactatcaaagtgtacccaaaagtatctcatgggagcctgtacctttcacttgctaaaaaacatcaaaagcaaattaaggaaaagctcagaaaaggtctcagatgcatttttcgcagtggcaaaggaatacattgttaaaagtttcaagcactacatgggaaaactagatagattgacaagaggttacgactgtacttgtaagaaattgggtatgaaaaatgggttcaa

SEQ ID NO: 202799 - DNA, 571 bp, Cannabis indica
atggcccggcgaaacctctgaccataagaaagtctaccaagtcgattacatcacgattttgtcttgggaagcatgtgtatctatctatttaatgtccatgtctcatccataattgagagacaaataatataaggatgtttttatttatatagtttataatattgattgaaaactgtttcaacacgaaatgatgataaaatttgttttatataaatattcatgtaataaaaacatatattatttgatgcaaagtcaagtagctaaatgttatttaattacagtgaatgactatgtatggtttttgtttaattgtctatttgttataagcatcatctccatgaatataataaactatttctttgttgtacagtccatgttatcagtttatgtcttgttggctcgaacttaatttataattaattaaactactgtaagtggaaacaaaaaaaaaaatagcataatgcccattcgtgttcttttaaaaataataataaataataataaggaaaccaactcaattgatatggatatggacatattcttattttattattttgtaatgaagaaatat

SEQ ID NO: 202800 - DNA, 1179 bp, Cannabis indica
aaaaattaatttaagttatataattatattaatattatggtgcacttataactttatcagtgcaaagtggaaatgaccatgtagccctagccaacgtattcctaacaaactacaaaatagacataatatttattataattatagtatacataatcatataaaaaattagacattgataatatatcttttaagtgctatagaaataaagaggttccatgtaaaattttcaataataataataatcataatcatataattaagatgattaaattaatcattaccttcagaggtaggaggaatcgaatggcgatgtagatgtttagagtgaaaatatgttggaaaagtttgactttggttactatgattggcttttcttctttatgatcaaaaagtggattttcagtgaaataattatacacataatcataagcttgagaaacataaataggatttttgatggagcttccaacatgataaatcattccattttcaccaaataccatccccaaaatcattgcatttaccaccatatctgctggtatctacataaatataattaatatatattattgaaattagttctttaaataataatataagcatatatatctttttctttgttgataaatttataaatagtcatttaccaaaatacataaagggatattcatataaacataatgacaaaattaataatttttttcatatatgtaaataataaaaattaatgatgagtcactattatagatttttatataaatatgtatatacatgtacacattgacatacttaccaagtcaactatcaaagtaggtttgcccaagaagaatgacatttttccttttccaatgctagcaattatgatatctatggttctgtattaatagattaattagacaaaaaataatatttgaaaaataggtgagatatcagttataactatttaattatgtaaaaaaattagagtatataatttttttaggcactaaatatgaaaaaagtttctatggtaaagaaaaaagtaatattaattttgagttttgtaaattattttatatacctaagtccttcgatccaaccaggaaatggttctttataagtgcttaaaatcattgtgggacgtagtatgacagtgtagacatcttctttgaattgttctaagcacatttctcccattgc

SEQ ID NO: 202801 - DNA, 910 bp, Cannabis indica
agaaatacacaaaaataactaagaattacgtttatactgaattttgagttttttaatattttaacggacttttttttcttataaaactagttacattttttgtaactattcgttctaaaaattatctttaagttggttatattaaaaaaaataattaaaaattgaacttagatacttttttactattttggaaaatatatggttcagtttgtcatttaacaaaacagatgatctgattggtaacttttataaaacacaaaattcaaactgatattaaccctattgttttttttaatcttggaacctaaattaatttatatcatcagattagtaagtggtatcaggaatcccacattggttataggtctgtctcaagccaatggagagtctagggccaaaaaatataattaaacttttttatatgaaaaatttatatttttttttttggcttatatagtggtaaaattttaaaatataattagaccttttttaaaaaaaaatatataatatcaaatttggtattttaaaaagtaattatgtattttttttaaaaaaaaataattatatttttaataagtaattgtaaaaatacaaaatatagtatttttaaataacaaatttggggcatttattaaaggattttttgggcttaagttggggaccttcggcgtggacccctactgcccaacccttgagccgaccctgattggttgtgtgtgtgaaattgtgaatttcatgagtaactttaacatatttggttagtgattttgtattgaaatatcactatttttttttttcaggttacttgaattattaattagaaataaaactaccaaatttaaattgttataggtttttaatttccttgaattttttttatcataatggttatataatagttttttttttt

SEQ ID NO: 202802 - DNA, 935 bp, Cannabis indica
ttgataatgactttaatagtttttgcttgtatttaaccattattctttgtttcttttaggcgagtctgctagctgagagatgttccgctttggtgaaaaaaatgaccatcgaagtggacaatttgaagctaagcatactagggctgagtgaaagagagaagaagcaatcaaggccctataagataccaaggttcatgttgatgagttggtaaaactcagtattaagacttctctcaatgatgttatggccagtctcaaggaggaagcctagaaagagagaaaatgtggggttgattataagaagatgtacaccacttctcaatctcgggttattgacctagaagagtaggtaaaggaggcccatgacaaaattaatacccttgagcagcaggctactaagacttatcaagactatgaacttcagaccaggctgattgacgagaagattaccgaaatttccaatttgggaaaagaagattcaacatcatctcaatctttaatagaaggctaagaattctgaggctgaagaatatgggggttgatctttcctcgaagcttgctagggcagaactggttctcaagaagtctaaggaaaaagccaaggaaaccttgagaagcttgaggaggaaaaatctctagtggaagaagagttatttgagactaaggtagaaagagaggaggccctaaaccaggcattggtagtcattctttatcaactttggaagattgatgtcaaggtatgagatattctaggagtgggaatgagatgttcttaaaggatatcttagagatcgatgcaactgaaaaaccttccaaaaatcaagctaagggaactgatcctaaagccacccttccgacagatacttctctttcaacccccatggtggatccagcttctaaggcttcaaggcctgtttagcaaagttcaagtactc

SEQ ID NO: 202803 - DNA, 510 bp, Cannabis indica
gaatcatgttactaattgatttataataaatagatattattttatcctttctaatgctaggtattgtaaggaattaaaactgttatattcttttttattcttcataatcttctaccaaagcctttgaattacctaagctagtgtaggaaatttttttcaaactttgtggttaatttttagagagaagagatagagataaaaattggcgcataagaaatggcgcatcgagagatagagagacagagagaggaggctatgatattgcatctcattagttgtattataaccgtagctataactctcgaaatgatagccactttgttagttggagaccaagtactctcttattataattactacacatgtaatttgaaactttatttaaatgttttttattaacatggcataactttttcatttaatgaactccctcttattttcatttgataagatgaaactacatatgtcttggcgcatgtggggctgaatcggaagctgcagagtctgaat

SEQ ID NO: 202804 - DNA, 2848 bp, Cannabis indica
atatgctgtaacccaataatataatattgaatatattatgttttccatatatttgcatgtatgccatgattaattatatgttattcatttttggcattatttttttgtgtttactgtataaccatatatatatatatatggggtttaattaatacctaaatttctatagtttcaataagcaagtatacattttagtattaattctacatattgaattaatgtacttattatttatgagtttttatgtaatattataaagattattaatataattaataataagtaattgatgaggaagaaaagattatcaaaatcttccttagagaagcactttgtgtcttattcaatacaatgactaatgacctttgtctaaaatatttgtaagtgcaattgtgaaatttggacacttgtgaaccacttgctttattaattaatctatatatatacttaactatatatctagtactctagcttctatatatatatatgtatatatatatacacctacgtaagttacctattaatattttgtatatataaatatatgtagaccatatgaaatgatacagatacagcaatattattctacatccaaaccaaacatataaatattattataatcttcacttgagcaaaaaaataattaaaatttatatataaaaaaatattatagtcttcagatgtctaaatctaattcgggccactttcataagatttaatatgactctatctaatttatatatatgtaaactctaggaaaaagaaactttattattatttaatttttttattctatatatatatatagctagtaactgtgactttaacttgtgctaaataattggagttgttaatttaattaattagctagaaatgattgatgattctatctcctatatcttactatatatgttctttgaagatatatatatgtaaaaaaaaatggaaactttgaagataattagaaattaaataatgaattattgtcacactaaaacaatatttaattgataaattataaaacttttcttttcagtcaaaaaagatatcgttcgatcaattatatattatatttttgaattttatattaaaaaaaaaaaactcaactgtcatcattcataattgaagaagagttgataactgattattgatataggaatttatatatcgaataattttttacaatattatatattttgttattaaatttgataaatagtacatgttattccattaatgggataacttaaatactataaatacgatccaaaacacaataattcaggcagagagtattgcacacttattattaatagattattaatagagatagaaaaaatttaaacactacctttatatgtacgtaaaacaaattaattaatcaaaaaataattagtatttttattccaaatttttttgcactattaagttgtacttcttatagtatacgactcgttaataagatccattaaaatataatttttacagtaatgtgatccttccatcatattttattcaattttatcgtgaaataagtgatcgcagtgaataatagttaataaatgggtataaattaaatacattttataatttttattttaataattagaaaactaaaactaaaaatataaattgttattatacaattgttttttattctattatattcattaaggtaaaaagtgttgagaatattaattaatttgtatttatttatcaattactattcaccactttacttattttataattaattataaattttaataaaatgtgatacataggaggattacattattgtaaagtttaaattttgagtagtacccttataattaacaaactgtgtatattataaaatgcacaatttggtagtgtaaaaattttagacagacaaaaaactaattatttttaattaaattaacattaattaatttcgatctagacttaagtaaggtagtcattttctgatatgactcaagtaaaagtatatagttgaaatttcattagatatgttaggtaaagcctcaaaagaaattaaaagaaaggaggaaagaataatatataagccaatgaaaattttgttgtggaacagaaaagcaaacactgtcgtctaggaatctttattacctagaatagtatagtattagtaccatagatactatactaagcaatcaccttcttataatatatttttctttgattaattgccttaggaaataattctttgacaaaattgatagatatgtgagaaccatatatgtatcacatgaggaacataatatttatatacattaatcttctattttattttttgggcttcactcttcaaaaaaaaaaaaaaaaaaaaatctataatgtatgtatatacattatacctatttgcctatagctatatcttttgccatttgttgagaaattggcttttattttgggtaattaagtattttttgccatccttataaacataaggaataaattatattatatcctagaggtactcttttttattagattagaaaaattaaatataactcaaatgttcttatattgtttgttagcggatatttctcttttagattctaatatttttgaactttaaattttttatgtctacagatctgttaataatattgttcatttattagctaaggacgttcttttagtggacactgattgtacttggttgaagaaaattctttctctaatattgtattatgatatttctatcttaatataaaagcattttatttaaaaaaaaactcaaatattctcattatatatatcatgattgtatatattattatacttataacatgcatttcacaattcacatgtcttcataaaaaaa

SEQ ID NO: 202805 - DNA, 947 bp, Cannabis indica
ctttaagagaatatgaaattaaatgttggagggaattaatactattaccattttaatttgaaaattgagacccacttaaaaacataaccctattagaggtgttttgtgttaatttttggttacatgagaatataggtgaggaaatcacatgtgggaagtgtacaaagctattcacattatgcattaaatatttgtgaaattcactacattctcacttaaaaaatataccaaacaaaacgaacgttaaatttagatgaggctcgggtgtggtggccaggcttgccaattgatttagctgtttaaaattatctatcttttgtatcttaatcttttctctgcttactttcaaaaaaaaaaaattatattacaaacaaaagaattactttaactaccccatattccaacacttattctcataacaaataccccattattaaaattaatttaaatttaacattattatttccatcaaatctaaatccggtaataaatttttcaaaagtaaaaattagcttttcaatgattcatctttgtcaaaaaaaaaaatagctaggcagatgaatattcagttatatggtgatgtgtgtatgtggtgggtgtttgagataagtgaggtgaggtgtcacctttggtattatatgactttatgggtttatttttcttggtggagatcatataaatatattgtgtttctttttttgttttttcactattgttgctgaattttttatgatgaaagagatatcacttttattaatgaataatttgcaccaccaccagcttattcatggcagcagttatggtgaagaagaaagaatattgaaaaagggaaaaaagtagaagagaagaaatcaagtatgataaattgatgtgtattgtgaggtggtgaagtgaggtggcccctttggtattatatgactttaatgaatttcttttctggtggagat

SEQ ID NO: 202806 - DNA, 1425 bp, Cannabis indica
acaattttaatcaattatccttttctttatgaaaaaaaattgaaatgggtttactatatatttctagatgaattccagttaatatacacaaagatatgcccctcaagtaattttaaagagaactttgtaattacttgaacaaactttaactttattaataatataaatgtacataatatagagataaatacaccatttatgtttttaattttactggtaataaggtcgcaaaattccaatggttctttattagcgagcgttgagctgagctaatttataaaccccagttccaattactgcttcaataacgtagggtccttcccagtttgggttaaactttccagcagatggatatcgtgtgtttacaaatactcatcttaacaccaaatctaaaacattaaagagtcttttcttaactcttttgttaaattatcttatgattcgatgtttgtagactgcattagttatttgcaactcattatgtctttcttcaagtaagtccaaggataggttcagaagctcttggttgtctacttgattatagaactcacgtctatgggtcgtaatattagcttccattggtagtattgcctttgagccaaatgctagcgtgaatggagtgtgttccgtcactgttttctctattgttttgtgatcccaaagtacctgtggcagttcatctacccatcttccttttacatcatccaacttcttcttaatagcatcttttaaggttttgtaaatagcttctacttgtccgtttggttgtggtcttgatactgacgagaagcttttgataattgtattccttccacagaattcagtaaacaactcaccgtcaaactgagtcctgttatcagatactattttgattggtattccaaatctacaaataatgtttttgacaacaaaattaaggactttttttgaatgttatggaaactagaggttcagcctctgtcaattttgtaaagaagtcaactgctactacaacatactttgcttctccttgccctgtgggtaatgccccaatcaggtagattccccatattaaaaatgggtatggggaggtatatgtgaaaacctctggcacttgtcgcatctgttgacaaattcatgtgtgtctttgttgattgtcggataatctttttcgataaaattttccaacctgcatgatctccacaaaacccctcatggatttctttgattatttcagtagcttctgcgggtaacacacatcataagggaggcatagagtaacctctcctatacagtttgccctcgactagagcataatgaggtattgaacagaagagtttgtgtgcctcagttttttctgtagcaagttccccgttaagtagatatttgaatattggtgtcttccatgttggcgaggcgtctgtcatcttaacttcttccttttca

SEQ ID NO: 202807 - DNA, 823 bp, Cannabis indica
ttgagttttgtttgttgaggcaacaaaaaccaagtgatagaataagaagaggaaagaaaaagaagtgaaagaaaaagggatttttcttttgtgtttttgtgtcaaattgccaattgctgattttctagtttactattttatgaaaaaagtgattcgatcattttgtagttccttccaagggtggtaaaatggattttgattcgcacacaaattttatgggttagagttggttaaatttgatatggattgaaaataaattgacataacttaacacgaaataaaaatagaacaaacacgatgctattcacttaatataaatgtgacacgattttttttgtaataaaaataatataactatatcaaaatatatatttaatgatttaatattaagttaagaaaatttaaatttaattttctttagatatatataaaaaactatatatacatatataaatttattgttttctctatagctcaaaattcactaataataaaccagtttaaagtgaataaacacgaaaaatgacacgaacttttataaattaggttaggattgagaaaattagacataagtcaaaaacagatcgatagtcttgacacgaactataaaaacatgtcaaataaaatataatacaaacacgacacgatgacacattttaccaaccatacttctatatttttaatgaatcccctacttctatctatattctttataaacatcatcatacatccctttgaaattaatgtaatactataattatattttgtcaatatatataaaaattgtatttgttttccacctaattctatgttccccaataaa

SEQ ID NO: 202808 - DNA, 1176 bp, Cannabis indica
ctaattctatgttccccaataaaaaatgggcattattcaaaaaactatttttatcacttattttttgtgggattgatgggtccataagcataaaatgatcaaaacaaatgtgtggaatttattatggtaccaattaaattaacacctttatttactattatatatgactatgcttatttggatttggagggcaagtcgtgacactaatatatgtttcttctgtctcttttatttgtccaaatataggctgaagattattctaatatgtttttgaccagaaagtctactatggttcacaaagttctataatagtagtagtttttgatatgtttgtagattcttaagaagattttgtcaagtgttttatcctaaaaaatacagcaagtgtttgatcacttacaacccctaaaaatcaccaaatatatatctatatgacatttgagttatgcataaatcaataaagaaagaactatttttattttagtcattgagctcaaatttacctacttccaattttagcactacttattgtctctcccacacttctcttttacaaaagtgttctttttcatttggggactaattttgtggagaagcaacaaaagtgaaaacccaaaagggaaaatatcaatatggtcataaagttattgtttctttttcctctctttggaatttgatcaaagctctcccaaatatttctcacgcgtattttcttttttttttttttttttgctggagaaacattctcttaaaaccagaaaaactaaggaaaacaacacagtcacatggccacaagaggggccaagtcctcagcagtgaaaaaacaagaaacagagttaccgaaggaccatttcgtgagcttatgagccacctgcacactgtccctgggctgccacaccgtttccacttcaggcaggtcatcgagcatctgcaccaggctccagaacagaccagcaagacgccgaatcgggggccctccgtgccgtgtaacccgtcgcgaccagcagttgacaaatcaaaaacaataacaacctgcttccaatccctgcatatgcaccagttgacagcattaatcattgccccgcactctcccgcctccagcggctgatcagagtcaaaaaatgacagccaaaggccctttaaacactgactccctccgagatacgacgccacaat

SEQ ID NO: 202809 - DNA, 1110 bp, Cannabis indica
tttcatattttccatcatctaatttaaaaaaaaaattctaaattagtatgtaacaaaagtcgttaaatgtaacacgaaaaaaataaccatccatacccaacaaggcatacaaataatgccttcttctgatgtaaactctaataccccgcaatgagagactctctcagaagagtcatttcgaagctcgaacaacattggatagtctatatgtagaaatactgcaaaaaaaaaaaattaaaatgttaacatcttgaatctaattcaaatttaaacttagaaaagaaaaaaatgaaaatctaaaaatactaaccaagcttatgaagggccgactgaggcattataactgaacattgcaacaaaaaacatgtataagaagaagaaaaatagtaaaattaatcatttaacccataagagccttaagatatagaatacttacttttatccccattctcaagttgtggctgaaaaatagattgtaaagaattttaatcagaattaaaagattaattaacataaaaaatttcaatcatgaaaacagattatctaactaagtgacgaacaatattaaccttattgataaatgatggagggtagcatcgatacatatgctcaaacgaagtctcgtggtattcatattcatatccatatccatcgaaagcctgtaaaaacaatgaagcaagttacatacacaaatttataaactcaatagaaaaattgggataataaaaacttgatgatgatgatgatggtgtagtgaagcttaccatcttgaaactatgtaggtttttctcactttcgaaaatattgcccaccttcaatgcaaaatctaaatatagtaacaaatttgatataacatttagtattttaataataaaccaaatatttaaaaaaaaaaattaattaagctaatacattaaaattacatattaaaattaataattaatgtacaacttttaacatgtattaaattaattaaaaacaggacttatcacagaaaaactaattttattaaaaataataaaatatagctctttagagttctattaatcctataatgataaactaattattagattcttaaatatattcatatatgaaagtaatggaatt

SEQ ID NO: 202810 - DNA, 498 bp, Cannabis indica
gtcacttgtcctgacataacaaaaacagttaccccggatttgaagttaggagatgatggtgtgatacttcatattgatttggcaaagggaaagcgccgtttgggtggatctgcacttgctcaagtttttgaccaagttggggatgattgtcctgatcttgatgacgttccttattttaaaagagtttttgagtgcacacaggcacttcttgatgatgagttcatctcggctggtcatgacattagtgatggtgggttactgacgtgtgctctagagatggcattttctgggaattgtggtgttgtattagatttgaattcacgtgggaagagccttttccaaacactttttgctgaagaacttggtctcattattgaggtaagtaaaaaaaacttggatgttgtgatggagaagctaattagcgaaggtatatctgccgacattattggacaagtaagttctgaacccacaattgaattaagggttgatggggcgtct

SEQ ID NO: 202811 - DNA, 569 bp, Cannabis indica
caccccaacccaaagagtacctctgcccctgctcaaaacactacaaattcaggccctcttacatattttggagactagttctaattttaaaattggcccccaaaaaaagtgcaaattataaatggtggagaatttttaaaattttgaagattttgaaaatttcggtgtacgtataaatgaatggaatttttattttttgggttttatggccaaatgttacaaaataggaatgtcaatgggacgggtctgatctgatccgactatgaacgacttgatccagatcatgtacggatctgccccgcccgccccactggatcatgtaccgagctccgaccagaggtgatccgtcgggtcggattccaacccgctccaactaaatgcatctttttaacatgcctattacaaaaatatagccacttaaaaaaaagttactctatggaaaaaattcaaaaaagttcagaaatatgggataggtaacttgttactaattgtgttctccatatttaatttatttcttttttgatttttccatcaatataagtttttaaaaaatatacaataaaaaacta

SEQ ID NO: 202812 - DNA, 900 bp, Cannabis indica
tttttttttctttttaaatgtacgttgtattaattcttcattttctaatgttagtttgtccttaaaatttataatatatatatttatttatatcactaataatattggtccagaatgctacactactgatttttatcatgtttctagagcctccaactcacatgtggaaaaattaatactaacataaatgtcatttaattgccatcaaaacatttcaaaacaagtgtttgtgtatgaaactttaagatgtcaacccaagtatacctcaaaaccatttccaagttattcctgaggtctaagggtgaaaaaaaagtaaaattgagaaaataaacccttgtgatttattcttaattacatcaccaaattgaagcagaggaaatgatgttttattttcacaaatgtggctatggctgtgtttctgaatcccttgaatagaaaaaggaagaccaccaccataaagttctccataaatgaacaattctaccacactcagtaggcttaggtttcttatgttcctctgtaatttgctctggtgttctttctgtcacatctttctgcaagaataacaaattgaaataaataataaaaataataatgggtaatatatataatatttattattattacgtttattgtaattaaataattcttacttacgtttgaaataaatttgagtccaatctttagctgtcctctataagtgtcatcttcaagtactacattatatgggcctggtttcacttctagaaatcctctgtcacacccctctgtgattattccacctaaatgaattctgcatagtacacccaaaatattcaccaagtttaaaatggctatattttagtgattagaaaattataaatgcttgttagttgttacagaatgcaatattttacatag

SEQ ID NO: 202813 - DNA, 866 bp, Cannabis indica
tgtagagacagaatttttagtttagcaattatttgtgatttctttcattactttaatagaatattttatacttaacataatatttattaattttataatattataatatatatttaaaaataaaaattatatagatattttacataagaaaattttaattcaaatttaaaatagttagaatattgtaaatattttatataagaaaattttgattgtaaatattttatattagtaatctgatcataattagtgtgtttatattatttaattttatttttcgatcgatatataaatggagtgaaacttactaataatatgtcaaacaatatgcttgaattacagataatctccatctttcactcctaaattaatactcggttgttctacttcctccaaatgtactaaactacataaaaaaattaacatctaataaaaattactacaatttatttttaatgaaactgaaagtagacagtatcctatacttttgtaaaaaaaagtttaaaataccatattctaaattttttcttttcttccttattctctctctctatctagcctcgtacatcaaatgttgttggaccggatccatctctacaagcctctctttggtcaaaattactgacgtcttgccgaatggtgatgtgcttgtggaggagcagtagtggactgtgccatacctattgtctgcgatcgtggtagccaatgagtcttgatctactcggtagcatgtgccaaccgcctgtgtggcactaaagtctaggccaagagcaccgtgctctgaccacgcccaccgccaaccggagtctaggtcggtttcctccaagacagaaaaccccaatctccctcttctctctctctctctc

SEQ ID NO: 202814 - DNA, 1389 bp, Cannabis indica
  modified_base (1332)..(1332): a, c, t, g, unknown or other
tattaatcaaaatagaacaaatgctacacaaaccagtatttacaaaacaacaaaagatagacatacttaaatatcacaataaacaaaatcaaagatctttagtccttcttagagagattcctcctattaacaagtagtaatatcgatttaagcgtaactctaatcaattctcataagaaactaaaaaaactttttgctcaaagatacaagcatttcgactctaccaaataaaataaattgttactgcacaataatagccgccacaactctatgaagaagattgtgatctcgattagcactcaaccaaaaaagcgaattcggatacaactctggccaaatgacattactataagccaataatggatagcgtgcatgagatacttagtaaaagaacaatacaaaaaaggaagtttatgacaatcaacatcaacctcacaaattgagtagctagtaaaattcatggcaattcctcttactaacatataatttcttatttaaaaaaaaaaatatatttttcttaaaaaaattaaataataaataattttctttaatttataattaaaaatatatataataaaattagaaactaaaaatttatttaatgcacgtaacgatagctatttatatgagaaatgctaaagggtatcagtggtgaatagcactctcctatatgttaatatcgctattagtccaactaagtatcgagtctcatgaaatttaatttaataacttttaaaaaatatcgctagtcaaacgcaacgtgacatacctagaagatattaggtactacattagtgtctaatagcaatgttctatatatacttaaatattgtgtatatatataacattatttagcttttgtatggtttggtttgactgagaaggtcaacttaattaaacgacatgagaaattaattggtagtgaagaaaacgacatgagagaaattaattactaaaagctaaagtacgtggcaaacagcaacatataaatgtatatctacttctactatatataataagaatgcaaaatgacaagtccctcttgtccttttgttttttttttttttttgtttattttttacttttttttaataaaatttatattttaattttgtttaaattatatttttaataaataattttatgtacttattattagtattcggattaatgtcatatcggtgtggtactattttttaatttattttaattttatttttattggtaaatgatttttgtacttctattagtactctaaatgtacttaattagtatagtacctaataattaatttgtaattgtttttgtttcttttttttttttttttttttntttttttttttctgtatgacgattatttattattattattattggtaaataattagc

SEQ ID NO: 202815 - DNA, 1776 bp, Cannabis indica
cacaattgctaaaaatgaataatgaagtgtgtttagtaacacttttattttttaatcgcaaaaattaaagtaaaatttatgttttcaataacaaaaatgtgtttcacgaactagatcaaggcaagggtgagggtctgatccgggactcaaaataaggtctgagttcaaaattcgaggtttggagtccgagtacgagtccagattcgtggctaggatagaggtttgggatttagggtttaggttaaatttcggtgtttggggattgtgtccgcattcgggatcttgggtcggggtcggatccatagtccaagctgaggttgagatccgggaggggactaggttcaaggttcgagttgtgcttatcaaattataagatttttaatgcgtcgcttttaggctagaatatttgtacttatatgtcatctttatgatatatgaaactattagtgttttttatgaaattttttaataagagtttttacttggaataacgctatttatacttgattccatacttttttttcgtgcttatgaagctcgtaccaaattccataaaatgtcatataaatagttttactttttaaattcttcgcaaatattgtaattatctaatatggttactaaataattattattaattaaacttatgctatgtttactgaaataataaatatggtaatattttatattttttgtttgttacgtaatttgagaacttggttaataaaagagtatattatgccataactctaatagtattactttgctagtaattaattcctaaaatttaatttttgacgataaaattttttaacccaagttttttagtatttagcctctttcattcatttttagcagttaactgccatgttagatgtccatgtgtatatagaatattgtctgcgtgtacataatgtacacatggcactatattattggcacacataaataaatatttaaaaataagtaataataaaaataagctactttaaaaataaaaaaaaaaaacaaatttctcttctctttctcttctttctctttcttttctattttattttctcatttacagaccaccattcctctttcgaagctccatctacctcaatcctctcaaactccacctcggtcctccatcgaaactacacatcttggtcctccattgaaactccatttcaatccaacagcatgggcaaacccaccaaaacttcccatacgagaaatcaaaatctaacttgaaaaccaaaaattctcagttaaaaaataataataaacaaaagagaatggaaactcacaatgtctacagcttataataattttgtatccaaacaattatacaaatactagttgtgattctttttcatttgttccctttttatacttttttaattaattgattcaaattctaattattatttagtaatcgttgcattaattttaaatacattttaaaataggatacaaggagtataattattgcgtgcaaattatacatttattgatttataaataaaattatatttgttatatataaaaaattataaagaaaaatcataaattaattatttaagatttgtaagttaaaattgttgccattacaattcactctcactaaaaacacaatctaaaatgaataagaattaacgagcaacacaatatacaatctatttgaaaaatgtttaacaaaacttaaagaagctaagaaaaacttacaatcattaattaaagaaccaaatagaaatacatatgcacgtactatgagttgtttgaacaatgatt

SEQ ID NO: 202816 - DNA, 854 bp, Cannabis indica
ttttttaaaaaaaatatttttatgctgtttgaaatatatttgttatttttgtcactttttttttcttctcagtctgatcacatgttactgctatttgttatcttatcatttctttttttttttcattatcactttcatccttaagctcttcatctcattttcatttcttttcacatttttgttttttctttttttgtttcaaaaattcagccacgatctaaagaaagataggaacgggttcttatttttgaactccattccaccctgattcaattattttcttttgaaaaaacattttttgtttcctttttttatctttctttgatcagcattcccttataaatacttgtccttcccgttaatagatgttacccgttcttgttcttcttccccaatcgtaaaaaaacctcaaaaatctcttaaaaaaagttcgaacaagtcggaaatgggtaagaaaggcattgctaagaaattttttttaaagatgatcttcctagccctacattctctatttcttcaaatagaaagttaagaaagttactaagtgattatgaacgtttgaaagtgtttattgaagattcaaattctaatttttagaaagaagatgaatatgtcgagtttgagatagttccaaaagtatttagctttattttttttttttatggttggtgaggtaatggtacttttttaatatgaatgtagttgttttatttgtttagtttgtgtgtgtgttttctgaatggtttttttttttttttttttatggaatctgttgttttaatattattttagggtttttgtacgtgattttttttccttacttgtttttaattttgttgtattttgtttaattc

SEQ ID NO: 202817 - DNA, 1566 bp, Cannabis indica
aatttatattgaacatagcattgatttttggtattgataatgtagtattaattttgaatctttattcttggtctaacttagcttgttgtttttaatgggacaatccccaatagattgttctctgttagaaaatataatagtatttgatctcataagatatattttgtaaataaaaaatctagttgactcatccccaatagattcaacttagactagggtctacaataccgaaataatgaagaagtttataaaattagaataactttcactctcgccttaaggaacatcgttagattcttattttaaatcagaatcattctttagattttccctatatctttttcatttagaaattactacaaagtacatcattggcctatatggattatgatcatttgtgatgcagatgaacatattctagatattcaatccaagaattgataactatcctcaattttcaagaattgaatctcattatagtgctactaaatatcgattaaacttaagattatagttctgaaatctatatcaagcattttgtaagctaaacacggaattataatagtgttttattggcggtcaaagctagaataataactcaatttctagattactaaacactatgcttaacattcatgagtttttatatccatttcagttgatcaaactatgtatgaaaatcgagttaatattctgagaccgaatactcacttaaactattcaacaaactctttgttgtaattaaacctaggaaccatatacatcaaaagattagttatgactatgaaatatctatggcactctatcttgtcatagtttttttacaagattattctctgcaaagagatgtttgtcctagaaaaccacttggatggtgcattcatgtgcctttttaacataagggtatacaaactagggtggatatgagtaactcgtaaaattcttagatgagtactatagatatttaacttatgccagaaatttgaaatatttgaaaaatttcatgtatttctagcaaagacaattaataaagtcgttaaagatcttgcaaactaataggagtagagatatatttgatatgtagttcaaagaccatttaaatgaactttgaattgtaattgaacttacctgctcagaattttaaagtcacattttgatgaaatgatcaggtttgtgattagttactagcagctgacaaagtcctttctagtgatatgccttagagatagcaaatcatactttaaaatgttgtcccatctaagactagatcccaagacaatcttggattgaaataattgtcaagtacttagtgtatatcattattaaatctaaggaagcccttaccatgtccttaagaaaagctagaattattgactaaggtttgtatatttgttggctattctaaattgactaggggtggagtacactatggtcatcaagactagtaagtgtttgtttttttttttcacaaattactacttttctagacgtgggctatatagatgtaatctcaaaaaactaaagtagcacacaagtggagctagtatttgatttaagtccataagt

SEQ ID NO: 202818 - DNA, 560 bp, Cannabis indica
cacatccaaatatcccacaaaaacaaaataaaaccatttaaaatccataagagaaaaatcttagatcaaaagagaaaatttgaaatctagatccaagtgagagagagagagagagagagagattgatagcttactcgacatcaggcccatcatcggagaacgaccgtcgaaccaacgtgtgcggtgctgcccaaattcaacaatgatgaaatgggtaatgaaacgttagatcgagaagtcacgaatctagagtctatttgtcaataggaggtaaaaaagccactggatcggagtggaatatctcagattccataaatttcggcgaacatcaatatttgatttcgatgagcttcaagctcaacttttagaggggttttgttctccaatagttcatgagcttaaccgtaccgtttactgtgagaaatagtgttaaaatcacgcctaaaaattgatttagagatttcagagctaagactttgattgggcaggcaaggctcacatgggtgaggtgttaggtggggctcacgtgagtgtgtcaccgacgagagagagagagagag

SEQ ID NO: 202819 - DNA, 1011 bp, Cannabis indica
atagacagagttggattcatacattttgaatctataaaacctttgtttgtcatgaacaattgttccaactttgaccacaccctcactgcttaattatagtccaatccaatatcacatgtacaactctatctctacatatatctggtctatggatatttatagggaatacaagaggctaactagtaaacactaatagaacagtctaatttatgcagatcagttagttatatatatctggtctgaactaactgatgagtctccaatctcaagggttcttaacacaccattgtcaatataccatccactaactatcactgttgaagttcttgaaggcctccattattagagccttgaatagaggaagaattgttattattttcatttttcaatctgtgataacacttttaagcaagatgaccaatcttgccatagaattattcatggtggtattaagtgagcaaactagcttgtgcaagagatcaagagaagggagttttcttgttcaatcctaattttttttattctaaagcatgtatttcacttcttctagtgtaaaagcatcagaaaggtgttgtcctgcaacagaaaaagcatcacccactgtttcatctttaacatatattcatcatttcaatgtttgaataccaaaaaaaagctgtagaagaggagccttggattgagaatccagaacgtgaatatagcatagacttaaataaagaattcataagccaacttcatttcaatttaagaatacgaacaaaaaacaaaaagtaattactagattacaacgtatctgttactttaaatttaaatttgatttccttattagcaaagcatcacaatgaactcaaagttgtataagatgactcatatatgaatattgtatacggtcgactaacccaaacttgtatatgtcaaccgtactaaattatatattgatctaggcattgttccaacttttcttaggaaatgaaattgttagctcatctattcataaattaagtaaaattt

SEQ ID NO: 202820 - DNA, 474 bp, Cannabis indica
agagtagtattacacgtttattttatagagatgtgagggataccacttttgcttatatagttagggacatcaattaattctttgctattttaaaaaaattataattcaaatttttttatataacaatttacattataattacaattacagtaaatattttattagttttgaaaaattctaataattttacgatttggaaagcagacttcgaaaactcaattgcacctgtgtttttatttgcatgtatgaagctcaatatttgaattatcttcttttcctcactataaaatgttctaaattttctaaaagtcaagtgtaaatatctactataactacattatatatataataaaaaaaaattaactttagtttcactaaacataaaaaatagaaatattcctactagtaataataaaaatgaatatcaccatgataaaattttcttatatataatgagattggttacattttgta

SEQ ID NO: 202821 - DNA, 1515 bp, Cannabis indica
ttaaaaatatcttagaaaaaatagatatggggaattaccccatactatttttttaattttttttttcaaatttacggtttgggtttctaaagtggttgtagcgctagttgcaataggagtttctatacgattttttgttgcaatttaggttgcagcgttaattgcaatagaagtttttatgtaaaattccgtaaaaatgcaaaaaaaaaactgtttttaaaaatagtaaaaaataaaaaaagcccctaaaaataattacctattacattaagaaaaaaaaaaaagtattaactataaaattaattatttgaaaaaaaaagtatatatagaaatattgtcacataaaaattccatattaatatacttttaacataaataatcatgcaactctaaacaaaccaatattttgtaaagatttttagattaaagaaaaaataattagcaaaattgaaaatattgttgaaaaaaaaatcctgataatctcaaccctatgtagcaacaacggtaaattgataagtgtctacacaaaaatactacttaatatttacataaaataatctaggattttctaccaaacctcgtggtataaacactctaaattaaaacttatactttggctctaaaacatataccatatttagatctcgtcgcaagctttgaaatggtataaagaacgtctaaaataggcacccaagtgaaaagttatggtcaaaatataatttttgatcttctcaaaaaataccaaaaatggtaaccgttttaaaacggttaaccgttttgtcgtagggacaaaaaatactcaaatttcaacttctcaaaacccaccaatacctaaccaattgattccaaacttcacaaaacacttataaaacatccatatgacattctctacgtaacagaacttaaaatcacgcccttaaatgaaaagtgtcattaaagctcaaggtttgagttttaaaagctcaaacttgattcctatctcaaaatagtagcaaaactattgaaagaacatcaaatccaatcccatatcaccttagaagcaaaatcaaacactcacggaccccataacaaccacagaatacaaagtcaaaccttaaaacctaagcttttcgatgaaaaccataaactaacccttacctgaagcttctaatcttcttgattcacctctagatgctacaagcagaaggaagagctagattttgggtcggagaaaagaaaattttgacagtagtggtggcgtttggctcgcacgagaaggagagggatgagggttaggtttctttgttttaaagtttaacatatatatatataattagattaataataataataataaaaatggtaacaataataataataaaagattattttatcacttctctaagaaatttctaaccctacagtatttggtcaaccccgaatatctaaaaatatcctggtaattctatactaaccttatctcaataatcccattaacattaccaactaaatccattgtgatatttttggccttcg

SEQ ID NO: 202822 - DNA, 1246 bp, Cannabis indica
atctctaacctgctcattattatattatgtcaactttagatatgatattgacataaatctcaacacatcaaataatatagggatattttcatttcttgtggttttgaagtacaaatttataaaaaaaaaatattgctctttttacaaaaaaaaaaatatatatatatatatattttatagtaatttttagttttaaaaaaaaattcatcgatgtattgctaagtaatgcatccacaacaccataatattgagtttcatacatttttaaattaaaatacatcaaacccactaactaatattaaatttcatcgtaacatgtcatgtaatgttggcatattggcagatttagttagcaatattcaataatataggcacacgacaacaaatacatataattttttatagaacatgctcaaatgtaagattaattgtcttaagttagttgaattaccagaaccattttaggattgaaagaccagcctgcaatataaaccaagtacttagctccctcaatggctttgtacacatcttcccatagctttctatgcgtagtcccacaaatatcaagtggaggctgaaaagttgagcaatggtgagcatcttggtaaagtgtgacatgggtatttgaccgttgtggaaaagaagcattctttagcccttgaaattcatcattactatgtattgttctttcccatgttggttcgttttctgctggtttgaaccacaacaagaacctgagcttgagttcttgatccttaggctgcttcccattctccaatgaaagagggaagaacccattaatcaaactcgattcctctaatatttgatgagcttggacttggaactttcccaagaatgagcatgaagtttccaaaatcaaggtaatagttgagctggaagaatgtgcacataagatttgaaagctttggttccaaacgcgctcgctttctgatgtcgttttagctactattttgtcgtttatctttatggtcacatatgcaggctttccatttgtaaatacacactaatgaacaaaatcccagattaaaaattttgtaattatttccctatgcatatcaaatttgtacaatataatataatataatatacttacattgaaggggaaaattggagtgtaaggtgtggcatgaaagatcgtagcttcaagtgttccatgaaaaacttatgttttccttccattggttgctgctatagaagaattaatcaatagagactttttgttttt

SEQ ID NO: 202823 - DNA, 779 bp, Cannabis indica
aatgggagaggatgattgattactatcctatgtagcaagttataaatgtagtcgtgtcctcctatatatatatatataatagtatggagtcttatttatatcatattattaattatttgtcatcatcaaaccaaaagcaacacctagccttagttttcatttccattttcatacccaaaaattaaatacacttatctcttctcttggccaacttgtagagtggactcccaacaaaaggacacaatttttcccattttctctagtcaaagctacactgcccacgttcttttctataattaatttattgttatattgtagaagaattctttattattattatcatataattaatttttgttgaaaaatgtgtaatatttcctatatatattaaattgttacggtacccctttttcttctttataatatatgcatgtataatagtctaaattggctcaaataatattttttaatatagtatgtgtaacgccggaatcatgatgtattaactctcaaatatgcatattataaaataaggctgcttggcaaaatgacctataaattttgttctcggttcgatgatagattttttttcttataaaatttcattcgacaactggttaagaaaatcagaccaataataattaacaaaaaataacaatcaatggataaaatgatttcgatatatgttggattatttaaaaatgctaccagtaaatatgcactattttactttttttttttttttttttttttttagttagtaggaaaaggtaagcctt

SEQ ID NO: 202824 - DNA, 1193 bp, Cannabis indica
atccgacccgtgtgcacccctacacggttgtgcatgatacctgacatcctcaatggtccccctcgtatagacggttgtgcctcatgaattgggcctcactcgattggcccaaagtcaatatatattatattttacccactagtgagtctagtagacacttttaaattctactgggttcggatttacctatattcaaatttcacttataaatagaatattacctcttcatacaaagggttgaaaaacaatttctaggatcaagtcataagaattaaagttcatattctagggaaaaaaatgtttgtaaaaaatacgttggagttttcctagctcaataatattgactcgtggactaaactcattaatactcgaaccacgtaaaattttggtcttcttcttttaatcatctctttcttaagcttaattataatataattagtttcaaaaaatctcagtaaacatatttatatatatataaaaaaaagaataacagtaaaaccttcaaaagttttacctcactactcactagcaactatcctaaatttattttttagtagtaagacctctcttatgttgtattatgttaatagtttatcattttcatcaaattttggcagttaagtgtcatgattgagtgttcatgtagcacaattttattggtctctctaaacaagtacaaaaaaataaaaataattgatttaaaaataaaaataattgatttaaaaataaaaataaaaataaatcattctagaacaaataaaaattaataaataaatatatgtataaaaaatactaaaaataaagagcattttcaatagagacgctacgaaggatgtttgatgatatggatatatttttaacattttttaattaatgcttaccattgaaatgaaaagaatgtcataccataacatcttttatattttctctttcttatttttttattattattttatcataagcaaaatttatttattaaatatacattaaataataatataatattattttaataatttttaaaggtgcttaccactaaattattttagaacaaaaaagtgttaaaataatgttgaaaaaaaataaaataatataatatattgaacttttttaagttttaaccaaaaaagtaacaattacaaaaatacttccagctggacaaataaacaaatataccgcccaaataaaaaaaa

SEQ ID NO: 202825 - DNA, 576 bp, Cannabis indica
  modified_base (545)..(545): a, c, t, g, unknown or other
gcgctcatgttaatcccagactgaacccttcttggaattttaatattgttatgattctctcttatggttaccttaggtagctcaaccaggaagtagagtctcttggccttgagctcgtagctcaggtcaagaggtttggctcgagttccgtagtgttttacagcttcggactcgagcaaaacatgacccggatagtcttttactacctccccaacttcgattccggcctttactttgaactcttctccatttattctcatcactttcgcagctttctttgctcctaaactgttccccattccaatattttttggagttaaaaagatccaaatgtttttcttttagaaaaaaaagggatgaggtgagacactatatagtagctagctagtataaacgttagcgtttaattatgcaattttctttctttttttctttttttcgttataaattgtgtttagcttggtgggtgtgatctcattgagaagaggttttatagggaaatgggaatggtcttccatcaggtcaataaagaagggcaataaacnttaaaaaaaaaaaaaaaaaaaaaaaaactct

SEQ ID NO: 202826 - DNA, 1179 bp, Cannabis indica
aattgtattatatgtattagacttttaaattactattttctttacattaaatgttattgtatatattaagtttttaattttgttataaatatgtgtagattggattggatcggttacttttacatgtcaatcaacatccaatccgcacaagtgcggattttaaattttcaatccaatccaatccgcacaagtgcggattggattggattggatcgtgcggattggattggatcgactattttatgaacaaatttaatctttcttgcacattcgtatgactagcatgattattgttccaagtcatcctaggcccttgaaatcaagagcttcaacatggaatttgtcaataaagtccctaaagaattcagaagggccatttatagtattgccattgcttttatcattccaagtcaaaaaattattaaaatcacccataaggagccacgacaaggaaatacaagattgacctattctattaagaagttgccaagtatgataacgaattagtagggacaaggagccccataaaaccagtaaaattaaaaccaaaagagttgacactagagacatagcaatgaacgtgattaatagagtaattagtaataagtacatccacatctgaagtccaaaaacacaggaggcctcccctaaacctagtcgagggacctcaaaaccattgacaaaacccaactacaacctaagactatcaacaaaacccttacagagaaggcttatagatcttgactaagagggagaggtttaggaatgctcaatcactcccaaggccttgagcattccaacataatacattcatttttgtaggcaggcctattcctccacaagaccttcctcttcaccggaagccacttccactatatcctgctgtggtaagggccttcatctctttagcatatatctctgctcattatctacaatagccaattgtctattgaagccaacagtgctagtctgcgagcctcgctttgtctgggtctatttgggtgggccttaagagctgccaacataaagctgggggttcaggctcctacaatggtaaaattattggtggggaatgtggtgttgggttttatgccctaaataaaactctctacatctgattagttatcaatataagaaattgaagtgattgatgtttgcatgaatttgacatgctaatgg

SEQ ID NO: 202827 - DNA, 794 bp, Cannabis indica
gatataattggggcctcaaaataaagaaggttttggacattggcacagtccaatatttaggcaaaaaatcttattattattattattaagcattttaatctgatcaataccatctcatgttttgcattgtaaataattagtagtttctctcctattatttattaaatcaaattacattttttatagtgcctcttaaacatttttcataatatttccagctataaaaactcaatatttgtcattgacaataattacctggtgcgccctagtgcgagtactcagtttttataacagaaataatcaaataatataagtgatttttttatttttgaaacagaataatataagtgatttaatgatgtatagatctgtacttttttttttcgtttggtacaatgatatatacctaattttacattttaagtgtgaccgtacgacttttaaaaattgtgtgtaaaaaaattacaatttaagtataaatcactctaaaaaaaaataaaacttaagggactatacattaaatctatatgaaaaatggaaattatatttaaatgaattcatattgtccgaaactttggtctgcttagctataattggtatattcagagctggtcttattagatgatgataataactaaataatgacaaagtaagcttagctacactcaaataagaagatgtttgtttgtttgtatatatgtatgaaaattgtgtctccatcaccacatataattaaattgtatatcattaattattctctccttcaattattgtgcatcacctcttatggtagt

SEQ ID NO: 202828 - DNA, 1303 bp, Cannabis indica
ttgcattttacatcgccaccgagttaggatcacaaaaataattcattttacatttaacataaatattcacatataattatcaataatgatgataataataataaaattagtatttataaccacactaatccatatctaaatcatgcgctcattaaatttatatattaaaagtcctgtagcaagggcctattaaaattgtatccgcaaaggtaaaaagggggaccattgtcccccaaaaataagttcaaaaaaaaaaaacaaaagcataagtgaatataagtttaggaatcgacaagagcatccgattgagtatttgggtctagcagaacatttgtatccacaatcaaagcttcagaagatggatccaccacctatgctgaaagagtatgcagtttattaatattaagaacataaattatataataaatataaaatatttattttgtacaaaatagaaaaatgtatggatttaaatattgtttattttgttataatttatttgttttgaatatttatattttttttttgtaatatataataaataagtacatatatttttaatataaataaatttccttaagtcttttaatccaatcaacattttttaaaagttgggttgtacaagatttaaattttgactataatttctttataaatttttaaataagttattttttatggtcctacggggacttaagaccctactagaaaaaatattattcacaaattacaatataaagtctttttaatttttaaattattttaaatattatcataagatgccttaaaataaatttttacaataattaagccttccacaaaatgaaatttttttttagtaaatcagacaaaaaataatttttttaatttactaatatatataattttttattttatgtccccactaaattaaaattctatgttcatcactgtagcaaataactttttttgaagaaagtttttttagaagaaaataagggttttactagtttgtctccacctcataactcatttacaggatattaaatattgaataattaatattttttgcctcatgaactttcaacactacctaatcccgtctcctaaaatatactgcttgtcaaaaattttcttaaaatataacaattacataatcatattctttttgttagattctattacttttaccgttaaaaattagcatttgactccgtaaattttgacgaatgctaaattttgcctctttttattaaaaaatattattttcaaaaattataattctttattaattctaaaagaattattaaaaatctaataaaat

SEQ ID NO: 202829 - DNA, 1495 bp, Cannabis indica
gcttttgattaaacaacttgatggatctttatgaaaattgaagaatatatatacaaattaataaataaaaatttggatggggaattttggactttcaggacagtcatcaatggatgatcaacaacaatactacacaaaatcatcatcaaactatggtggtagacccttcaaacaatcccagagagacaatcatcttcgaaagtcatccttcacgggtctagataacgaagaagattattatgatcaagatgaatcatcgtcatcagctgcaatctctgagctcttccatggttttcttgctattggtacacttggatcagaccaaatgatgactgatcctgcaacaccaacatttcccatatcagtggacaatataactgagaaagaaactgaggttactgagaatgagttgaagctcatcaatgatgagttggagaaagttttgggagctgaagcaccagatgatggcttcaataatgattcttctggtagaaacagccatgttagtaatggaagaagcagccatggcagcatcattacactgagcggaaagactgaagatgggaatgggactactgtctgcccattgcagggttacctttttggctctgcaattgagttgtctgaaacaaccacaacagcagctgctaagaaagaacacagaacatctcttggtgaactgttccaaaagagtaagattatagaggagaataatagtggtggtgctggtgctggtggcaaaagtgagagggaggagaagagatctgagaaagaagcagataaatctgccatgaacctcatgaaaaagaagctcaagaagaaaatgcttcatgcctcttctcgaaactctggggcaggtcctggtggtggtggtggtggttgtaatggtggaaccggggacccttccgctccaactgaaacaaaactgcacaaggtatgactaatatacataacaaagtaaaaaaagaaaacttgcatatttatacatgagtaatatgctaaaaatgggacataaaatttttggattataacttatccagatactacaaacaaaagcttgtgcacatcccttgccagtaataccaattgagaatttccccaagttatttgcattaatctttcatgtatgtttggttgtagattcttcatatgtttcacaggaaagttcaccctgaaacctcagcggctacttataataagactaataaggttccaaagaatgagcatagaaagaaaactagccatgttggtactggcaactgtggaggtcagattctcccagatgaagatatcaccttatgtccacagagagctctctttctaaagcaaaaaatacggcgctacagaagccaatccaatccaccccaatttacatacagcagcatggattctatggcaaatagggagcagtggatcaaaacagatgcagactgtaagacacccttatcttagcttcctctcttctttaaatctctttatttattttcagaacatc

SEQ ID NO: 202830 - DNA, 624 bp, Cannabis indica
ggagggggagggtgagggtgagggtgagggtggtgcgtgtgagtttgcacttgctgctgatggtattgcggatgtggttgcggcgccgagggcgtctgagcctgagcctgagcctgagcctgagcctgagcctgagcctggaaagtgtgagcctcggttggtcggtggtggtaagggtgaagggcaaaatggggagggaattgttgggggtggagaggagcggtgaattgttgttgggattgtgggtgagaatggagggcaaaatggtcctttggtagctggttatattgtcgtggggggctgaggatgggaccggaggaggaggctgatctgctcccggatgaacaaagccttgtgggagaggtctaaccctagcttcgcttcaagctgttcaacgacgccgtttacggaggtgaatgagtttggttcacggagcaaagtttcaacccctttcgctaattcttggtcggacaccatggtttttcaattacatatagtaacagaaaaaacgaccaaacggtctatctctcttctttcttctctcactctcctgctctctctctctctctctctctctcttcctctctctctctctctctcctccctctctctctctctcttata

SEQ ID NO: 202831 - DNA, 911 bp, Cannabis indica
attctgaaacttctgtaggtacttgaacgttaaatgtcaaataattgtcacgtgacaatccttgattggtctaggtcattaattttttatattttattataaaaattaatttacatatactaataagaaaatgacacgtgaataataacttgacacttaacggtaaggtaccttgggaagttccagaattataacttaagtattattatggtcaaaaattaaacttaagtatttatctgtaactgagaattaaagtattcacggagtaaattactctaaatgtttgaattttgtccttatcttggagttattaaaattcttttgttaaatattgtagacaatggctatgggggcctacccataaggtaacagaggtgtgcaaaggttttctcgggcccgacagagattggcccacgagctaagatatcaaccgagaattcttccttacccacctgtcaagtagggatgaaagtcaaccttagtgatccgttgatgccgagtgatcttgtattttacaaaaattactgatcgaattctctattttgttaaatgatgaattcgaccatatatttttaaaatggtacaatatattacccttatgtcaatttccattactataaccaatctgattcatttaacaaaatatatggttgaatttgtcatttaagggttttttatttttcttttctttgtaaggtaaggcttttgcctttattacttacaaaacagaattaattagtactttaacaatattttaggtgttggcttttggttttttgagcaagttcccaactttgttaaacccaaagtaatttggatatttttcataaatacccaaaactgatagaaaaattacaaatgtataattttttttagtattgttacaaatttaaaattttattttcaaaaaa

SEQ ID NO: 202832 - DNA, 1858 bp, Cannabis indica
aagaggatcatttctctctgaagtatcttggtgtgacaatgagactaactaaatgaaaatagtagattgtaatcactttcttaagaagattcaattgaagcttcacaacttggcaactaagcatctcttttttgtaagaagagtacaattgatgcaatcagtgttgttgggcgtttgttgttattagatgagtatctttatgttgccgcataaagtagtcaataatgttgacaaactctgcaaagcctttttgtagggtgcgagaggtaatactagtaagatgcatctagcttcataggaccttgtctacaagcctaagaactatggagattgggttttcgagaagaaaccaattgaaacaaggcttcgattgctcgatacatttgggctattactacgaaacaagatgtcttgtgggttaaatggatcaatgtcttctacttaaaaaatcatgatttttgagtggttgatatgaaaggtgatatgagttggtattggcggaaacttcttaatcttaggaatcttttcactcgagagacaatattggatgctgaaaaaagggaaaaaaatttaggtcagtaaactttacattatttccttactccttatgctaatgttgataatcataaaataatttagtgtggattatccgtaccaaaacattagtatttttttttttttttggtccaagcctctcttaatatcttattaacaagagatcacctgttgacaagaggtatcccatttattttattggttgtccagtttgtgaggttggcgatgactatcatagtcatcttttctttgattgttctttttccaagcaactcatgcatgttattcattcttggcttggtaatgccatttggtcgatgtcctattcatattggcttctgtggttaaatgatcaccgagatcgcagtcttctttatagggttgttgaggcagtttgtgcagctgcaatatattttatttggtggaattgaaatatttgtatttttgagcaaagatatttatgattttttatgtgaataacttaattagagttgctcttaaagtaagattattacttggtgataggagaaatctctctaaaaaggatcaaccgatttttgattttgtttgtaacacgtaagtaagtttatcttttgttgttttgtcgatgattggttaaaaaaaaaaaaaatgagtagttttgaacacgtgtattaacctcttttgaccgaggaggaagtaaaatgagattaattacgagagtaaaagcagggtagttaccgtggtccaatttgcacatccccaaaacccgaacttcgtgtttgctttgcttaatttccttttgcgtagcgagtctccctccctcttcattgacactgcaaaactcaatagggttgctttctcctctagggcttcatttattcacccgccatgtatcgaactgcagcttcacgacttaggtctctcaaggttagtaccaacttcactccaaaattctaccgcttcattcaacgtctaggtggtttaagatccgtgtcgtgatgtttcatttccattatcaagctcgattaattgtgtttttaattagattatattgctttcaccaccttttattattgatttatttgggaaaatggagaaaaacgagggaaatcaatttattagtgctgtgtgtttatgtatgctttggtggacaaaatgaaagattttaatcaggtttattatctccgctgttccaaaaaatgaaagaaagtttttgggctgggatcatcgtaattttggcgagggaaatttttttcttttcttaaaaggtgaaaaactcatttaagcattgaatttttttttggaaaaaaagaaaaaattg

SEQ ID NO: 202833 - DNA, 1445 bp, Cannabis indica
caatcaaaactttggtgaatggatcagctaagttgtcttcagtatctattttctacaccagtacatcccctcttgccacatattccctgataatatggtatttcctctctatgtgtttgcttcttttgtggcttcaaggctctttactgttggctactgcaccagtgttgtcataaagtaaaaccagtagtctttccattccaagaacaacaccaagtcatgcgaagaactttctaagctagacaatatctgtagcagccttagcggcagctatgtattcggcctccatgttagagtctgatgttgcagtttgcttagcacttctctaaacaactgctccaccctaagattaaataccatgcaagatgtagactttctatcatcaagaccagcctataaatctgagacggtatagtctatggaatttaaagcaccacccttcactactacaaaaatggttcttctcaacttttttaaacagtcgtttaaagtattcatgtcagtttctataaccgtcgcccatacgaccgtcgtgaaataggcaaaataggcaacagttaaaaactatcgctaatgtagactttctgacagtttaaaattgtcacctataacagggtctaggcgactgttttaaaccatcgtctatagtataggacacggtttaaaatcgtcgcctataccctgttatagtcgacagtttttaaagcggcaggaatgtattaaaaaaagagaaaaaaatatagatttttctaccattaatggcagaaaaatctgtattttctcccattttttttcctgcattagtttaataatgggttggggatgaagcattttgcccatggttatgctgggcgtgctgcggcacagcatttagcatgtcgcagctcgtgtcttgtcttcgagcccattctgggtttagcatgctgcggtccgtgttctccatgccgcggcccgtgtgccttctctacctgctcacttagttatcacatgcaaggctagacaggaaattgttatacctagacactactaaaaattttaaattgactagttttcacgatttctacggttttcatagttttttttttaaattaaaaaattaaagtttactaggaactaaaactaaaataaaaactattgtaattatgtctaaaaaattagcggtaaaaagtgtaagatgctgggatgcctccctcatagaggcaccaattggatgacgttcttggcttcatcaatggggcctcctaagtaaggtttcaatcgttgaccattgaccttaaaagtctctggtttctctcttataattttcattgcgccatatgggaatacctgaacaactatgaacggtccagacaaccttgatttcaattttccaggaaaaagcttcaaccttgaattgaataataaagcttgttgtccgggttaaaactctttcctgactaagtttc

SEQ ID NO: 202834 - DNA, 958 bp, Cannabis indica
gaaacatcaaaataacataaatatataccctatcaaacaatctagaaatgttaacccaagtgtgaccaagagttatcataataattatcgactatttaggatttttaccccctgaactttgacatgtaaaaaatatcctctgaactattgttggatttaaggacttttatctaattttagtaaatatttcagtgattatttatatactaaaccatgctccccaaactttgatatctactaaatcatgttcctcgaactttgacatatacaaaatcatgctctctgtacttacatccatgatagacttttttactaaaattggacaaaagtccttacattaaacaatctcaatagttcacggagcatttttaacgaccataaaagttcaggggacatgatttggtacatatcaaagtttaggaggcaaaaatcctaattagccttatctcaatacaagtctagcagaaaaaaagtttacaactaaaatgaataatcacaagtcacaacctataagcaaattgatgatcgactttccaacttatcacgtagcataatttattcaaacttgttataaaaaatcatgctcagagttcaccatgtcagagagttacggagctactagtacattaataactccaagtttactaggtatactataaaatggttccagtaagagaatgaatatgagctcaaagcacgtaagccataatttccacagtaagcatattacactcctattaaagtttgtgaagctcgtttgtgttaagtctgtccccgaaacaaaagacagcaccgttatgtttgcatacatcaccgttaacacattcattcagatttcagactctcagagagtcgtgaatcctttagatttctctctcctcatccacaaggaagagaaatgatcatacctccataaatttcaaggcatgtattctgctaatataattaagaagacgca

SEQ ID NO: 202835 - DNA, 565 bp, Cannabis indica
aagtagcacaaccatcaccaaaatcatatcacatttaaaagcctagttatccttttattttatagcatcacataaaaaaatagtttactatactggttctttgatggaatcaatctaaaatttcaatatatcccatccctattcttaatttatgtttatacagtgaaaaagaaatgcaagttccccttattaatattgaggaagatgtatcttggatcaaataagatgttttatgtaagagtaccaaataataccattcatgtacaacaattaatcactctaaagatttaaagtaacaccaatcaaaagaagtaacaacaccatgatccaaaccatgtcacatttaaaagtctagttatcctttcatgttagagcactaaatacacagattaagagagatctttctcttttcatatgttacaccaccacatagacagacataaagtaagggtgagatctttctcctccataacattcaaaactcatatattcatttttaatgcttattacctattacacaattaagtactttaaaataatacgaaagtcatttacttttgaaaga

SEQ ID NO: 202836 - DNA, 892 bp, Cannabis indica
aaaatcctaagacttgataattttacagtgcttagaggtatgatgaaataagattttggacaaatgtgtaataatttgttcaagtcatggtaatctccactaatctatactcaaggttgagagtgagtgtttccatacatattctacttttatatatatggaatatatatagtgtatacatgtgtgttgtaatatatatataattaatctcttattttagtctttgtattattttacaataaaattgtagtatattttaattttctttcattgtaataaaatctctaattggtccattattattgaatatgctcattcagtaatatcatgtgaaatttgtcaaactagcattgtgaaatactaaaatttacaaaataatttcatttaatttattctacatgtgattatgatggttgtacaatgtaaatctataattattttgtgactataatagttatttatgattgcagagtataatttatggtcatttatgtgaccatacaaggttacttactaataaatttttctataaaattattttactaaataaaattttgaactatttttacaaaacactcaaattatcattgacattaactgacttatttttttaaaaaaatgaataggacaattttaagggagaaaattagattgggaataattaaaaaaatgatatttacagcaaaacctcttaatagtcgtatttttttagtcattaagtgttaattaaaaaacacgaagtgatatattatcagagcacgtatcaaataagctgaaaaaatatatcgtcacgtgtttttgagctcacacctaatacaggcttaattaacacttaacaacaaatatccctttaaaaaatattaggtgaaatatgtactgagaggattattta

SEQ ID NO: 202837 - DNA, 613 bp, Cannabis indica
ggtttaggtggtctatcctttgtctggttcatgtcactgtttctagtggctatgaattgataaagattgttttttcaaaaaaatatattattggaacttattttatcaggattttaatttataaatcatgtatgtttattataaattttatcatctaacatcctaataaatatgaataatcctaaaacgataaataaacgtgtaaaagtataacattaattgcaatggaaataacatgagtcctttcgttcaacactttaacccttgttttgttgcagagtaataacaagtacgaagcctgaatctccttccttaacctgaaaaggaacagttcttcataatcttccacaaaggtttgagtatcaccttgaatagtgtgggttcatactcaactcacttttggaacacattttgaaagagaaataggcagtgtttttcgaataagagaaagaagaagatgagagctttcttgacatagaattaggggttatctaacattaggaagctctctctcatcactttatgtatatagcctttcacttagggttaagtttagatgagatgggccaaaataaagacaattgggctaaaaaatcaaccctagggtcgaatt

SEQ ID NO: 202838 - DNA, 731 bp, Cannabis indica
aaacccaacacatcaaggtcatcattgacctttagattcaatcaaacaagtcataatcatgacataatagatttcacacacgcacacttgaatttcgatctttaaacacaaactgatatgaaaaaactttgaatgatcaattttcttataaatcggttagaattagaaattcaaacattaaacaaagataaaaatcacagtaaagaacaaaaacaataatgcataaagttaaagagaacaaacacaatgattttctaaaggttcaccctaaatcatagagttacatccccgttgagctcaccataagaacaggtctgctcttgcattataatcaatatcaaattaaaacaatatggtgaggaaattccaagtcacaatctaactggtaatttcaagatctcactctttctctttcaatctatctttacaaaattgttcctcactttccctctccccttcaaactcccttctatttttatctcttgagataacttctctctctagctctcttggagctcaattccttctcagtctgcgatgatttaatctgagttaagagggctgctatttatagtagccttggtagttgaataagtcggttaagttggttaggacagttgagttacaatccagatgtaactaactcatattgagatgagtctagatatatgtctacgtgttcaatgagcttgtaaggggatttaatccaaaaaaaatatatttttcataat

SEQ ID NO: 202839 - DNA, 2866 bp, Cannabis indica
ttgttttgaattttttgtttctatgtcgttacattacagttgcccttcagatttattaacgctccgataattaacgtatcaataattacgaactgataatgctacaataattttagagatatttcatatagacaatccgacacaaggctctcataaaaaaaaaaacaattctaatatagtcagtttttcatatttaaacattggtttagttcacgttggtttacagtatttttactattatttcttcacaaaatattcttaacgtacaagtcattgttcatcaatgcaataaaactttgttaaattttttcttagcgatgtccaaatacattgttcatacatagttggacctacgttgtctatcagttgcctaacagttgtgctactaaaaatattataatataataaatcagggctcggaattgacaatatatgactcatatagaggaaactaacaattgtttttaggttgtcaaatagatatctgacatcatatatattatataaatagttaatgttgtacatgtatcttcaatgctttgttgggtttcagtttctttaaaattttcttatgattcagtttctttatagttttcttatagttggctgactatattagaatttttcaaaattttaggaaacagaatcaattccattcttataccgttcaatgggtagtttgatcaaggaatgaattatatgaattacgaagttagtggcgaatttatcttgagggattgcaaaaatgaagaacttgtgcacaagttaaagcaagtgctagaatgcaaccaaaaaaaatacttcactgcaactaaaagactaagtgaaataagattaccaactgttgataataaagtacgatctaacccattctttcacatacaactaaaattgaaagaaccttacttcacaagatatccattgtgtatgaacattgtcagcaacacaacaacaaccaacaacacctccttctttacaatgagcaactcattagttggataacaattattttaaggttgtatgtcatatctaaaatattaataaaaacataaagtattattaaaatcatatttgacatattaatgtgaagtttcaaaacttttcttattacattgactattctgttaaatcttcaaaagttgattgatagttgtaaaaaatatgttatacataacacaataatttaaaattcaaataattagacagattgcataaaagttattttatcgttgaatcaaatattatagatatcaatataattcagaaacatgtacaaaaataaaagtaataaattaaaatacaataccatacattctaaacccgtaatcaaggtgaactcttcaacactaaaacaaacgcagcgaccagcaatgtttgctcaaaattcctttgaattggagtgttgcaactctcttaagagaataccatgatcaacttgagggtataatttgaacggaggaatatttataaatttaccaaattaggttgcacagaccaatgccttaatatttcccgaaagaatggaattaagcttctaaatgacattgttactacaagtggaggtcactttcgatctatagtgatcagaaatagggtacgtggattccattcctgaaatcaaacaaaaaatatcaaaatgaaagtaaaaggttaacacaatgtaaataaactacaatacaactgttagcaaactgtttaaaagcaacaccataccaaaaccaaaaaaattgtaaacaatcgcctaaggaatactgaaaaaacattagaaaacagtactattgctcaaaatacgtggcagcggctgcgtgtgacacatgatttcaagaacacctcacccacaaaagttggttaagtcacgtatgggtaagaaagtgcatatcagggagtgagcccccggagaggagcataaagcatgacgtgactctccgagagctagaaatataacaacgcatctccgggagaagaagggcccgttcgaacagtcatttcacatttaatccgcatcggagaaacgtattagaacccccataaaaagatttgacagatggcataagtctcttttacagcgatgacacgataatcaataagtctagtgatggctccattatgaagaatcacatcaatcaaggaaggataaatattactttcacctaatccttaagatacctacggcatagcatgtatgtcctattttatatctgctaggaatttgtacccctaaggggctgacacttaaagacaagtgatccctttctagtgattctcccaaaaactctataaataccccaaaaaacagaatgaaaagggatggctgaaggaattattgaatcaaagagagtaaagaagagagagagggagagatagagagagagagagattcacctagaacattctctgtataagaactcttataaataacaaagactcgtagactacagctcattaatgtctgaaccacgtaaaaaccacttgtattaatgctttctcagttctccttattatatcatttacttggttgccgaaaatatcggtcaacaagtacaaatatttattacaaaataaagtctaaattgaacagaaataaatatatcaatgaacaactatttatgtcaaaaaaaactaaaactaacataaatataacaatattttaaatcataaaacctatcactaagaaaacaacaaaacaaataaaatatataaaaccctattactaaaatcacaagaaaaaatactaaataaaacacagataacatttcaaaattagagcaaaattgaaaagaaactgaaaccaaaccttaggaatttgatccacatgcttcttccccatcttaacttctggaatcgaactctttcttctgcaatttct

SEQ ID NO: 202840 - DNA, 567 bp, Cannabis indica
aaaaatatgccttcatggcattccttgttgtagcgttcatcttggtagtcctcaaggatttctaaagaagtataattccctcgttcaaatctagacatcttaaaacccaatggttttctttcctaagatttataatgaaaaaaatatggtaagccccgtggcaaggctcagaacaagagattctcaaacctttgatataataggcaattggatgagcaacatgaacatgagacatttgtgttttcaatgacttcaccttgacaaatttcttgtaaatagactgcatggaatcatcaaagaggcaatctcttgtagtaaaattctcaattaccacaaatgaatacttttcgttctttctaagataataaaaaatagtattcatatactaaaatgatatacaagttttactgcaagcgtacagtgttgttacagcaaagttttaatactaaaaagattgtcgaacccacagagattgattattaaattttactaaatattatacattttatttttataatttaattagataacacaaaataaattataaatagtaagataaatagaaaa

SEQ ID NO: 202841 - DNA, 524 bp, Cannabis indica
cttgaggttctttcattgtttacctccactgttgagctttttgatattttgatattatttttttttctggggaatgcttgtttcaagttttgtgaccaatatttttggtgttaacattttatttttggataaactagggtttggagactggttagccacaacatcttctgttttgggttggagatagctcaagtcaaattgagttttggaacctgctttttatgaattctaaggtaacagaatctaaacaggtaagaagaatgtcgttcataagcttcttcccctgtttcattctctgttttcagtttcatgaaaaagcttataactggtccttctctcctcttcttgtttttacttatagcaatctggttattgccggaattttcagaatccaattaaagaccaaggggttctttctgggttttgcctttgggttgctgttggaagctacagtagctattgaatctgacaaaggtgagactttattattggatcaaattataagggtgacaagcttgattatt

SEQ ID NO: 202842 - DNA, 2624 bp, Cannabis indica
gtctcatttaatactttcctttactgtgggagccgttaatattcagcttcacacgcgagttatgagttatatctcatttataactttggatttttctttctcgtcagacaggttttcaatcaaaaagttgtgatggtttgatccctttctcgtctgaaagtttgatcaaaaacttttaaaaaaatattgaagaaatgaatgcacttgttagtcgatcgggaaatgaatcgacttagggcggtaactttcccagtcaagctctgtacatgcttgtttttttagggaaggcatgttcaacaagacctgtattctttcagtgtttgcctctattacgtgttgactcacgataaatcccagaaatttccccgatttgacgccgaaggtcaattttttgggagtaagcttcatcccatatctctggactacttcaaagcactccgtgagatcgtctgcatggcccattcatgttttggacttaactagcatgttgtctacgtatacctccatgtttcttcctaggaggcctttaaacatccggttaaccatgcattgataggttgctccgatgtgttttaatccgaaaggcatgaccaggtagcagtgtacccccttgtcggtcctgaagctagtacattcctaatctgcgacatgcattttaatttcgttgtacccggagtaggaatccatgaaagacaacaacttaaaacctgcggtggcgtccactatttgatcaattcgtggcaaatggaagcaatcctttaagcaggccttattaaggtcagcaaagtctacgtagacttgccatgttccgttgggtttgggtaccaacaccgaattggctagccacttcgggtaatatacgtcccacatgaggccattggttagcaacttatccacctcttattctaagtcgtcaaccttcactaggtcaagcgaacgtcatatccccttggcaccacgcaaagacattcaggacatgggtgatcacgtaggggcttattccagtcatatccccttggcaccacgcaaagacattcgtggctgcctttaacgtatctatgatcttgcttctttcatctggttctaggttttttcctaagcagataattttagtggagtcgaggtcgcacacgcttacttcctcgatgtcctccataggttctatagctgtttcaaatcccacacggagatccaactcctccttttttgttaaaatgggctttttgtgtcccttcgtaccatcaaaattgatagatgtacttcaacattgtaacattgtctcgcctctccttggtttcccatcacggttcctacttcggcctcccaagtagggaacttaaggcataagtatatcgaatggaggtaatttctccaaaattgaccaaggcaagtcggccaaggaaggcattgtaggcggtgggacagtttaccacaacaaaggtgcagtacttgaaagtgctttgtggggtatcaggacacaaggtgacgggaagccttacttttcctatcgggatcagtgttgtcccgttgaatcctgtgagctgagagctgctaggcgataggtccctatccgtgagccctatggctgtgaaggcttctttgaataataaatttttagagcttccgttattcaccaatattctagccactaccttattggcgaaaggagtttctatgactacggggtcatggtgggggaacacactggtttcgcgtcttcttctataaaaccaataggttaatccatgagtctgggcctttctggtgggagttgagcgacttcccacacttcatcgtgttttagggccccaacgtaacgcttcaactcgttcctggtggttcccccaatatgaggcccaccacagatcatggccactctcccattcggccggggtggtaattcgggcgcctgttgaggaagtacccctccgggagttacttgtctcttgggcataccccccgcttctccctgaggtaatgggcctcctgctggagctgggtttaagtggggtaacctgcttttgatccattcatacaagtaacctagtcgaattaggttcttaatttggtctttcaagtttttgcactcgtttgtggtgtggcaattattgttgtggtattcgcatcttttattgggatctctccgggagctatctctgtacaagagtggaggcttcccgtagtgtgtattttgtcgggtggcgaaatatacacgctcctaaatatctgcaagctccgtgtattgtgtgtactggggggtataccgccttcgctgtcacttgtcttagtctgagtactactctttgaggatctcttactctgggagctttgcgaagctcctgccatactggtggctggtgcggattgggacagagtttggatactcaacccagagggattgttcatgggcgctccaaaatgtgatgatgcaggagctaaagtaagactttgattgtatcctggggtagcgaataattatatcctgcttgcttggggagtggcaggagatggagctcctggaagttgagctccagtcgggtaataccctccgtaagccactatttgggcttcttccaaattaatgtattctggttagaatccccggttggggcaattttaggaac

SEQ ID NO: 202843 - DNA, 1292 bp, Cannabis indica
atgtatatatctaaatataataatatatattttggggtccttaacccaacaaaatcatgtgcacatggcttgaatatcataatgattaaactaatttctcattagtaatatataaatgtatatatctcatatctcataagtttatatactatattatatgtgatgtagacgttttagcttattaattattcatttaattaaattgaaaagaagtactatatacaaatggaacacctaacattttatttattattcctttatctctacacaagctgattctctatttgattattatagataaaatttggattcattcgttttcaaatattaatgagaatatcgtttatatattaaatatattatgtgtttgaatgcatgcatgcatagtcattatcatcaggactaccataaaaatagttattaaaatattcagatgattaataaatttgatgaaaattattagtttgtatagcttgatttaataacttttcttttttaattatttgtatagctatatagataggcagccgttaattctttatatatactccttgatttttttatccatgaagaaaaaaaaagacaatgtatatatacatactcagcgtcatttctcttagctagtaacataactgaaagtaaactaaaatattattattattattattgttattgttgttgttgttgttgttgttgttgttgttgttgttgttgttgttgttgttgttgttgttgttgttgttgttgttgttaggactccccctagcttcaactcaaactacttgaacgcccttcatcaagctttcaaactagaaatccatttagatttttcatagtgaacttcaaccgaaatgtcagtcaatgaacaatgaatgttgtcaaatcttttgtaaataatatttctgaattatatattttggctactcaaaaagttagggttaacatagaaaaaaaaaaaaacaattcaaaataaaggtattaaaagatcgttcgtcgaaacatgctaaatgaaaatgacacatgtaaaataatgcatcttttaatttaatgttcataatatgaaaaataaagtgatttataataataataataataataataaacttctagctagtatgttatcagtgttcaatgaataaaaaaaaacgaaatttacactattaactctccttaattaaaaatactatatggttattggaagagatgagagttagttttatattacgattagttagttgattaatcctgtcaagttagctctttcatctcattccttgatgtatataaattaa

SEQ ID NO: 202844 - DNA, 985 bp, Cannabis indica
ccaaccgatcaatctaaataatttcatctcgaactagagagataattttatgcttagcagtccaagattagtcgatgactacataggccagtcaacatgtagcacaagctgaccaagggtgcaagcccaactagatcatcttaaaagctttatacaaagcttaaccagtttaaaactcaccaatctggagcttaataagactcgaggttcgccattcactacacagatcaattctctcaatcttccgagttcaaaatgttgactttgaagatatatatacatcgagaaggatgatctattatctcacatcaaatattttgagatacagacggatttgaagggagtaaagggtgatgtcaggtgtcgaatattcccagcaacgttagcagaggccacccagcaatggtatttctagataactcctggaacgcctttgcctcatagttgtacacctaattatcctcctctagacaactccccgctcaccttgaagacctggatgagataaaaaaaaaattactgagagagcaattgaaagattatattagtcgttttatgacaaaagtaactaaagttaaggacctaactgaagaaagacggttggctgcactctcaggaggaagagaacgtaaaattaatcaaaagagaaatcacaattattttatgttatttacgtaactaaaaaaattaattgatattgcgtaaaagattttctaacgatatatttgtttttaattttaaattattgagaaaaaagtaccatttacaaagtaattactaattgtcattccttaacgaaatggggagaccttttttattcatttctccttaatttcgtatgtttgacaaaattcttacatggcttattgtaataaaaaagaaaaaatgagaattattatgtacatttgattatcattacctcattatgatatattttacattttagggtttatttggtaaggagtacactctattgtatatttat

SEQ ID NO: 202845 - DNA, 1832 bp, Cannabis indica
ttctcactgccatcatttgcctggcgctgtttctcccatatttgctgaaggtcaggcgcttctgcagagtctaaagtggtgtatcgactcccaattgtctcctaagtttgtcttttcggattgtctgaattcggtatccaaagtgaatagtgcatggcaagataattctgctctttctggtcttgtttcccggattcgattgctcttctccaatttccctaatgcttctttgtaatatctcccttgccaatttaatatggacgcccatgtccttgcaaaagaagccctcaggccaagagaagatagctagaggagtttgttttgctccctctttgctgcgtgcgatgttggttcttcttcttcatcagcttctttagttcaaaaaaaaaaaagtcacacctccttctctttttaaattatagaaaagcatatgtatatatgctaatactattaggtcttcataacatgcgccacgtggcttctttctcagtgtatgcacaaatctgcatatgatatttcaaatatttagaaatgaccaattaatttgggcttttgtgagtccatgccattttacaaaagatttggttcttagtgaatccatagacattaatgctctctattttgaccaatataataaatctaaaatgtacatttaaactttctataaaaatacacaacattgagattaacacatataaaatgggaaactaaataaaattgataaaatattacaaaaattaactaaaaactaatctacaaatactaaaactaatatttatgcaaaactaaataaaactaagtaaaaattattttaataaactaaaaatacttgagaacaaaactaaattaatgcacaaaaagaactaaataactctattttcatagagttataaattacaggttgaaaattcaacagtatatattgtaagaagcttttatggtgcattccctaaaaaagatgtaccgatgcacccaattttaattttttccatggccatgtgcatagtagttgtttaagacatcctgcagattttaagaaatttagaataatttttttaaaaagaaaatgttttatataataaaaggttagacctcatgatcattacacataatattttttggtattaatgaaacatcgatcataccagataagttgttggtatacgcacattttgccaccttatgagcaacaaaattacataaccgaaaatttttagcaaaattacaacctgataaaagtttagcagtagatctacagttactaatatagctatcaatgtcccatcgtggtgaaagtcctctgatcgcattgatgacaaccttggagtcactcttcaccatcacaaaattgtagcccaaagctattgaagtctcaatagcaagactagcagctgcttcaccgatgagggagtcaaaaaaaggaaaattattgatagctacccacacaaaagtgcccaaatggtcacgagccattgttgacacacacatggtctctctccctcttcttacatcacaagttgatcttaatccagtcaatgggaggaagagcccacccagataccacaggcgcaacagtcggagggagtacatttgaggcataatctgcataataatgttaaatagagttaatatattacgatatgctagatatattattcttgtgtaccttgtcattttttgccctccagattgtatcaacaatgatggatgcataaaggaagatctcattaacattagatcctcttgagttaaggttctacaaaaacttaacccaatcccacattcttgcaccagagtcattgatgggggtaaggcccaaaggggacgaatgg

SEQ ID NO: 202846 - DNA, 935 bp, Cannabis indica
ttttcagaaccgcttgggctcccatccaaaaccctaattcggactccatcgtcgtcgcctctagtgacggatcaccctgtgatatcgaggaggcatgcgagcccacttagcagaattgtgtgccataaaattttgctttcgattaattttcattagcttggagctttcgagagagagaacatcacttctgaaacgcaacaaagcaccttccaacatagtgaggcataattcactgtgtagattattaaagctagtaaccacagcctcattgtcacaaaagaagataactctcctaaattggtttttcgctgcgaaatcagtagcacacaccatcatttgtgcttcaaaaagtgcaggattagtagcaccaaatcgtgtagagaagattgcatgaatgtggtccttgcaatccctaaacactgccgccctgaacgactaatctgaacagatgttaacatcagtgtagtaggcaaaccaatcaggcagaggggataaatgaaccaaatattcatcaatgggaggattttgataagaggaatggtcctaaaattggcggcacactaatttgattgcctccaaaacctgtaagaggtggaaccatgaacaacgttattgtgcgttctacaaataacatcaaagatacacaaggcccccatcaaaaagctgtcaaaattaagatgtgggggcctattgttgttacagcgaacccactagatccaattgaaccaaccatcgcactgaatggaatctgttctgattccccaaagacttccaaacaataatgccttggcaaaagaacattcccagaacagatgtaacgatgattccacaccctcatcacaaataggacagtggtttgacaagatggggaaggccaatgctaacttctccctggtagggagtgcattactcaaaatctgccatcccaaagctta

SEQ ID NO: 202847 - DNA, 700 bp, Cannabis indica
ttgcatctgtagaggattttgttcattcgttcttctgttattattttttaaaacttcatatatatataaactgataagattttgtttatacataataataataataacagtaataataataataatataataatataataatattaataaaaacattattatcaatagttatcttattatttcttagctactaagagatctctacttctagggaattcgatcaactccgagtacctaaaaatatcccggtttatctaaaatcaatttatctcaataatcacattaatatttctaacaaataccgttgcgacttttttggtttccaattgggtctccaaggtcgccgaatctaaattttttttatctcaccaatacttacattatatccacatatttcaaataaatctctgtaattatcaaatggcttttatttatccacttatgaaaaaaattacaatttatgactacaaacatcacctccttatagaaattttgtctccaaaatttacctgaacaatttcggatattactcccatattcacgattctatctctcaagttgctttttacatcttgctgtctctctacaacacttccttaactaagggaattatctcattccatattactttctttttctagttcaaaacctggacatgatgtttttccaatctaaaaatttgtctaacttaacatcatca

SEQ ID NO: 202848 - DNA, 1676 bp, Cannabis indica
gaagtcacatattataaacacttcttctattttattgttttaaataaaaaaaacattaatagaaaatatatttttaaaagtaatagaaatatttttttagatatgtgaaaaaataataatagaaagatattttttaaaatatgttcaataaattttaaaaaataataatagaaaaatatatttttttaaatatatttagcgaatttaaatttgaattataatgtttaaaaaataacaatattttctgctttatagtagctacatgggtgcactacatttgggttaaacaatttgacgaagacttttcattattctccactgcattattcatgttttccatagcattagaaccccactacatagaagagtaaaaccttcaactcaaaattctacatggactactagcgataactcaatacttagacttgggtattgctcctatcaacctaaacaattaacaaaagataaagaccaatcaactttcacggctaaccatcatacatcgatataactcatttcaaaaatctgagtgtactccaacaattaacttataagtgagagtgagaagattcatagtcaatttgttcaagcaggagaacacccccacaatcaattttcatagtaaaaaaggagaaaacatcaagtcaatttatgcgaacaaaatgagaaagctttagccgtcaatgaataagcaacatttacaatcaattaagcaagaaacatctatgatcaattcttactctcacaagcaaaatacattcaactttacaagtaaagtaaagaaagaaatatttttttagatacgtgaaaaaataataatagaaagatattttttaaaatatgttcaatgagttttaaaaaaaactaataaaaaatatatttagcaaatttaaatttgaattgtaatgtttaaaaaaagaacaatattttctgttttatagtagctatatgggtgcactacatttgggttaaacaatttgacgaagacttttcattattctccactacattattcatgttttccatagcatgagaaccctactacatagaagagtaaaaccttcaactcaaaattttacatggactactagctatagctcaatacttagacttgggcattgctcctatcaacctaaacaattaataaaagataaagaccaatcaacttccatggctaaccatcatacatcaatataactcaattcaaaaatatgagtggattccaacaattaacttataagtgagagtgagaagattcatagtcaatttgttcaagcaagagaataccccacaatcaattttcatagtaaaaaaagagaaaacatcgagtcaatttatgcgaacaaaatgagaaagcgttagccgtcaatgaataagcaacatttacaatcaattaagcaagaaacatttatgatcaattcttactctcgcaagcaaacaagtaaagtatggctagcattcaattttacaaagatggcatcaataaaatatcacctacaatcaattttcattagcactcaactcaccacaatacaaagctaccaatttaccaaaatcatttatattcaaatactaggcccatagataggcccatgaggttattacaaaatcaaattggatcaaaaagctaactcaaaatttaacttgggacaaacatcaacacaatgattcaaaca

SEQ ID NO: 202849 - DNA, 831 bp, Cannabis indica
attatcaattggttttgagatagaaactcattcaccttatttcaaattctaacgtggtattagaactttttttttttaaaaaaaaaatgtatatcattataatttaagattaaaaaaataataattttattttttatcaattttaaatttattttatttttattcttatttccattttttttttttttgtttactcctcgcatctcaaatcaatttgatttgttaaaaatatttatcactttttagtttagttttgtttatttcatttttttgttgcaaggtaaaaatatttgtcattaaccgtgcttaccattttggtattaaaaatgtatgcacatatccattttaaaaagagtaatttgcgtcataaatactaagtttaactttcagttgtaaataaatacttaagtttaatttttggcggtaataatacttaagttatatttttcaaactctgtagttattcgaacgttaaatgtcaagtcattattcacgtgtcattttcttattggtacatataaattatttttcaaaaaaaaattaaaaattcatgacttagaccaatcaaggattgtcacgtagtaatttacttaatatttaacaaccagatacctacagagttctaaaaataaaacttatgtattattgccgccaaaaattaaacttaagtatttatttgtaatcagaaattaaacttaagtatttatgccgcaaattactcttttaaaaatatctcatattgcaatatgaggtatgaaaaatgttttaaaaatacctcatatgtttgaaattttggtttaaaaaatgtgtgcaccctatattatattgtga

SEQ ID NO: 202850 - DNA, 964 bp, Cannabis indica
ttttttttggtgttatgttaaaattgcatccactatgtaatcatgcaactatgcaattttacatgtatttaatgtaaaaattagttttttcttttgttttatgaacttttttatgttgtttgatgacatatattctatttatgttttcttttgatagaattttattattattatttaactaaaactataattattgtgtttgaaggggagatataagttagtgaattgattcaatgtgatatctattttgttttgttttataattgcaaattgaattttggttataaaatctgcattagatttgctatttaatgcagaatttttagtttttattgattttattttaggtttatattatattttttctgctcagaacaaaaatccttgtttttggcataaattgataaattggtaagaagaattataacattggaatttgaagctgttgtttatttgattattttatcttatatttgagtgttgtttttggataggatatttgggaataatggatgtgaaaccaaagagaaaaaattgttactgagaatggtgatacaggagaagatttggttcttgcaactttgatttcgaatggtgatgatgttggtcctcttgttaggcatgccttcgaaatggggaggcccgaatcacttcttcaccagctcaagaatgtggtgaagaagaaggaaaccgagattgaagaactctgcaaaacacattatgaggaattcattcttgctgtcgatgagcttcggggggttttggttgatgccgaagagcttaaatgtgatctgtcaagtgataattttcggttgcaagaagttgggagtgttcttttgattaaacttgaggagcttcttgagtcttatgctattaagaagaatgtgactgaagctgttaaaatgtcgaaaaattgtgtaatggtgttagagctttgtgtaaagtgtaatagtcatgtttctga

SEQ ID NO: 202851 - DNA, 1889 bp, Cannabis indica
ttagcaacactattggttatcttgatattaattatgtgtttataataggaatcattgtccgaaatactcttgtgatgtatgaccgtgagcattcgaaaattggtttttggaaaactaattgttctgagttatgggaaaggcttcacataactggctctcccccaacaatggcaccagctcctgttgagaaaaattcaagtacagaagttccacctacattagctcccaatgaatcaccagattatgtgcttccaggtttgtcagctgtaaacttctgtttggatataatcctcttctctatgtcaaaacaaaatttcagttaatttccaaagtgttttattgtaatatcaaaaggaatctttatctctcctacattaaacatttcgctggtaaaatatattgtctcatccatttggataggttttctgacctcgtgatatatccttaacattggtctgcagaggatcatcaaattggaaaaattacgtttgaggtgtcattcaacattagctattctgatttaaaacctcacatgacagaactggtcgaatatattgctcctgagttggatgttaatatttcacaggttagacaaataccttattggatcagggtgcatgatcaactcagaatctaatgtatatattttcacattttaagcattggtctgtaaaaatgttagtaatttcctttgcccgattttaggtccaagtattgaattttacatccaatacaaattataccgtcattagattggccattctcccagcagggtctgctgactttatctctaatacaactgcagtggtaagtttaaatctttggagttgttacttgtaattgcagaagattcaactctttcatttttttttttaatctttttctaacaatactatcttgcagtctatcatagcacatcttgctgaacatggtatacagcttcctgctactttttccggttataaattggttggatggaacattgtaccgaaggtaaaacggtatgttaacaatctttgtgaactaatttcatcaaagtcaaattcatatcaggttgcactatatgcacacacattttttgggtgactgaaaatcgtgaagcaacttctgtcttttcattctatgatgcaggaaatggtggcatcaagaatatctggttgtcattttagcaattttggttactctttttattggattatcagcttttggtatgtggtttatttggagacgccgacaacaggctctcatttcctataagcctgtcaattcagctgttatagagcaagaactccaactccagcctctgtgaacttagtagctacctttgcttggtgggcatcccagcttatatatgtccccattttcattttttttgtttattcacatatgcaagtcaatcaattttttttgtttggccaacactaatcattctttatttcaattgctctgagatgtatttcatagaaagaaagttaaaaaaaagggaaaaaacacatgatgaatttgtaagcataaccaaatttgtatgtgaatattattattattattattattgtaacatacaggtgaatcgaaagtttgctcaataagaccacttattacccctggttttcccttttcctttcccagtcaaagcatttgagaatgtgataatactttatggtaaaaactattggttcctttatgaagttattgttaaatttaaaattttatgatggaatggaatggtatatatagtaggtgggtgggtggtgttgttgatattgtcaaacccctaaaacccaaaaacaaggtcaactaggttatgaaaacaagcacattgttcttggcaaagagctgctatgtgtcccaatcagccatttgttggttgactctgcttttgcatgtga

SEQ ID NO: 202852 - DNA, 1042 bp, Cannabis indica
cgtatgtagatgatggtgcctgttaattataacatattatattttataattaatccaacttacaattaataataaatttgtttatattgtttatttttttattaaaaattattttcaaattttgatatttagaattagttataaatttaaatattattttgaattaaatttgaatattttgataatttaaccagataagcatttttattaatttcgaaaatatatttaggacgaataataattttttttaattactattacaaagtataatagtaattttatttttatttaaatcacgctttcaaatttgaatgattatcactaccttaaaattatgatattaaaaaaaattaaaaattaaaataaaattaatataagtgacttgacacgtaacatttatctatcatatatatgtgtcttattatgatcatgaaagtatataggcaagaaaattaattatgacataagctgtgttgcagtagtacaaccataggtaggctagatttccatggaagcactgtcgcatggtttgtaaattaaacaactatttactaagagttttaacagaagaatcttgtaaaaataactattacaagccattgcgtgatggtaacatgtttgtgaagttaattacttaagaaatgcattataaatatttatcatgaaattattcaaaaaaaaaaatgatgaaaacttatattaatatagatgcactatggttaattagtattattagaaaatttaagtttttatacttaattttgttatgtaattaaaaaaaaaatactctcattgatttgattgcatattcatttgttgagagataaaaaaaaagttaaatttgagttaatcatgatataaatattttttgatatagtataaaaacagaaattttttggaccattaaattaaaatctaatgaattttttttgtttaataaatatcaaaatatataaattcttgtatacacaatgtcgatgttgaaatttaatgagtgatagaaaaaaaaaatagactctcatttagaaaaaaaaaatcaaaa

SEQ ID NO: 202853 - DNA, 1030 bp, Cannabis indica
aaggaaaacatccacaatcttccccatatcttttaatggaccgcacggcctgaggtgttcgtcatgaagaagaaagcgaaggtttcgcttgcgcatgtcaacactttggagaagactcaccctctcattcaaccagtccaatggttggatgtgaatggcccctagaaagacgaaaatgcaagtcaacactttcgaaaaaaaatatatatataatgaataacaatcattaaatggagccaaagtgcaatatttgtacctgtgcgcttgaagtcatggttgcccctgtcagattggccccatacccagaagaactcatttttcttatcaggtggtttatcgaggagaccttgaagaattattggagtggtcacacaattcagataatagaatctatcgctatgtttccccttcccaaaaggattggccctcggctagtacatgtacaacacctccgcaggtgtcgggtctccaagatctaatatgatagagggacttaagcccagccaagatccgatagctattagaggatagctagaagggagtaagacccaaggctccatggatgtcccaataatcagaggctaatgtgagtgcacccctcgccataagcaaggaagtgccccacgcgtacatgctctcatgaggaggagaatagctgcactcggtgggagtcaagactcttcttagtcgtccaacaccgaggttgagctcgtgaactctaaggcaatcactaacttggaacatgcttccgaaagaagaagtgatacagctcgcctcgaaatacacccccacagatttggtcctagaccgcggagggggtttacaggtactagtagagggtgaatgagtagattcctctatattcgccagattgttacatgatgatatagttttggatcccacaactctctttttgttcttgaaaaattaacaaaaacaaaaggaagttagaacctgaggaagaaattatggcaaggggttacttatttctcttgagaaaagtgacgtggcctatatatatatatatata

SEQ ID NO: 202854 - DNA, 1253 bp, Cannabis indica
tcgcatgcctcatcggctcaggcttgcgaaatgcaaccttgtgctcatttgcgagaaaatgttttctcgagtttcatttagctcggtataaatagtataaattggcacgtacttatcgtgattttctgtttcttcttatgtttagatgattccatagagtcatcttttcttttagcgttggaaccatctggattgcatgcctttgccgagacggtacttgttgtgacagtgctggatttacttcgcaagtcagtctttaacaatttcatcccgttccttgcttcctctttccgtaggatcacatgagctctttcattgaagtcactgatatttttcacagggtgaccttgtaagtcatcccacagctcgcccccaactattgagaggtcagtcgtgatccgtgcttgaagagcagtaagttggatactattattcaagtttctaactctagcagcaactgtactgaaatgacttaagtaacccttaagtgactcgcccggttgctttacattagtaagggaagacgcttcaagtcgcctgtctcttgctacctgaaagtgtttcttaaaatccttagacagctgttcttaagaagtaattgaatgatgtgtgaattaattgaactagctactcgctgcttcattcagggaggtggggaataaaatataatatgtaaattatttgatacgttgttggctcgcattatggtattaaaattgttgaggtgagcgactgggtctgaagtcccatcgtacgacaagacgtgatggtttttacatccctgaggaaatttagagctcataacgtctggatggaaaggctcgggttctttatctgagtcataatcaggcagtttcccatatttcccatcttggtatcttttgaatttatcttctagcttaataatttgcaattggattggatgctcttgctttcgattaacattgagttgttggcgtaaatcaagtgcattttgatttaaatgctcgcgtaaatcaagttgtgtttgattcagatgttcacgaagatctggctatcttcgttcatggttgctcgcagatcttgtattcgagtaactctcagattgacagctcctcgtattactcctactctctcgatcattattacggcgaggtctatttcctcctcgcgtatgcttttctgatcgactgtgctcccgagaatttgatacacatgccttctccttcggggaaggttagatgcacgccccccgctgaggtatgtgtatgcct

SEQ ID NO: 202855 - DNA, 1294 bp, Cannabis indica
aatacaatacttaagacacatagaaatgtgtggatcgtgaactggcaatctttatgtgagatattcttttgataaatatgcatataacatattcatatgctgatatgcctgcatgaaagaactaagatgacatgtttgcaaatgaagataatgaaaggatctttagttaagcataaagtgtgttctttctgcatgtttggcagtgcaccccaaacctgacagcactttaggaaattgctctcggaaaataagttgcagtttaatttcatatctatatgtaggcatcaataatatatataaaaagacatgaagtaattttgtttccaatatagaaagaagatgtatataggattctgttgtaccacagaaaaagccaagtgttagatctggcagctggcacactagatgatgaacccagtctgtcctacaagactgcagccccctctagattatcttcggaacttgtcaatagatcttacattatgattagcagataacaagcagaaaaggatattaatacacgtactcattgagccctacaatctatgggagtggaacctcttgcaaattgttactaactaggtttcattcattttttcttgtaactatattatacttatctctacaggcaaacaagaaattggaacaaaacttgcggagttctgtgcacatgctctgttagccttggaagttcttttacatcccagggccctttcagtggatgatttttctacaatgaaatctaaatctgatgaagttcatgatgaaattgctgagaatatatacactgacaatatcaggtacataaccccattttcaagtggcatatgttactgacattcataatacaaaacattatgttactgactcagaagatcatgttttctgtgacagttggctggaaaatggaaaagaaacagaagctgctttttgttaccctgccgagactctaaggtacaatgacattccgtctgaaacttttccagtttcccaggatataaatctttctaatggttccaataaagagattccagtaggaagtaagtgggagccagcagcagccaatgcaggtgctgtgattcaaggcagtggggatgaacttatggttgagtctcaccaacttcccgaatcaaggccgctaaatcatgattttgttcctgcaaatactgatggtccagcaggatttcaaaaggtgaatgagagcatttcatcaggtagtggcactttacaacaagcaggtgacaatacggcctcaggccaagatatggatatttcaatggctaaaacggacaag

SEQ ID NO: 202856 - DNA, 913 bp, Cannabis indica
attttattataaaaacacatgcagtttttttgttaattccgtcatttaatatttgtcacaaaattgttatttttctaaattatatttttaatttcaaaattattactttatttataatacataaaataaaatattatattttagattatatcactcaataagtataatatatatatataatttacaaaagttggataacaccgcgtgaagcgcagcttaattctctagttaataaaatagatacaaattaaactgtttattttgcaaatttaggtatgtatgccgtttttattaaatttgaatatttattaacaataaatctaacaaactgaatatttatgttgcactttttcctatattttaaataaaaaaccctaaattattcacaaaaaattttaataaataaaataaaataatattatatctaatagaatttgaaaagtaaaaacataaataaatgatatttaggggacgtttagtaatacttttatttttaaatttttcatcacaaaaataaaagtataatttgtgtttttaaaattttatttttaaaaactaaaaatatgttttatcaccacttttattttttaattttaaaaacagaaaataaaagtgtgtttgataactttcattttcattttcaatttttgattttatttaagttaggcctaaaattgggtctggggccggagttatagtctggggccaaggccagaggccgggtctcaaggtccaggttacggtcggaatcaaaaattgttaaaaaataagaactttttaagtgattttttttttttaattttcaagatttttaaaatctcttaattaaaatattaaaaagtaaagacaattttatagaacatgtttttaaaaatatttccactattctataaaaaaacaaaaaactaattaa

SEQ ID NO: 202857 - DNA, 566 bp, Cannabis indica
gttagattcgtctttgagtttggtttttgatgatattaaagtttctcataaaaatctcaatgttgtgagttttattttatgcccaagaaatgttgatgtagtagttgatacttttgctaaatttgttttaacaactattgttagtacagattggtggtgtggatatcttcactgtatcatgacccttattttgggagaggccatctctcaataacattctctaactctcgacccctttgagattctatgctcattagtggtgttctctgagactatttattaaaaaaaaaaactaaataataatattataaataaaaagtgcataactgtgtatcaaatttatcaatttaacataatgctataagtgaaatttaacacaaattttagggcattatcaaaaaaaaaaaaataagtgaaaatattaaaacataattacaccacttattttgtatgccattaaaaatgttcataattttaataaaaaaaatttactacatttatttttcaatacagccacagtattatcggtatacatgtgaatatataaaacatacttaaaaatttag

SEQ ID NO: 202858 - DNA, 819 bp, Cannabis indica
aaattaaaaataaaatctaaaatttcataaattgcactctcgtcgtggcaaaggtttatgctcgccacgacaagagcctcctggagaaaaatctaaatttccaatcccacactctctcccgtgagagcctctgctgaaaaatttatgctgcgtgttcagattagtattttggccataaattctttaatataactcaaaattggacgattcaaatgttctgaaaagttaagaacgagatctataacttttgtgtttaactccaagtccatctctgcttcctagatctttgaaatttgcaattaatttttgctttgtaaaatcgagctctccaaaattgatcttttcactaaagtatgctaaaatcattctaaaatactctaaatatatgagtagccttgtaaaatctaaaaatcaaaatcacactaaatcaaaaggttaaaaaattaatttaataataataataagagaaaataatataatttaatggacaaaatatatataaaaaaaattttacggctaaaatctctcaattattattccacttatatttaaagttcaaattttaatagcaaaactctccaaagtgaactattaacaaatttaaattgttgtgacacatttatacgtttatattgacccattcaaataattcatataataggtgaaggtctacgagactaggagttacgacaactgaatgccatgccacttgttggctatttgcgttcttcttctcttattccattttttgtgtgatgcaggctgctatgttgctcatttcccactcttcctcaatattcctctttcaataacatactc

SEQ ID NO: 202859 - DNA, 714 bp, Cannabis indica
ggagtttgttccttctatttactagccttgtttaatttattagttgattagtaaattaataaagttttaatttccttaaaataattactaatctacaactacaatattgtcatagactagtttatgctatatatatatatatatatgttaattaattacattatcttagaaaatagaactaaaccctagaaacacacccacccaattataaactagtaataaaacttaaaaaaaaaagttcaaagttcttttctttaaggattaaatcataattaatttatgtatattattggttaaagtatatgctatgcatgtgttgattcatgagtttgtagggttgataggttacactccaagtgatctttaatacctttttaagcattatgtctcttatttatgtgtgttatgtatatatatgtatacatatctttagacactaaaatagaatcacatgctaaatacaatattggatttaatatgaaacatataaagtcaagtgtcttatattgatcatgatactcttaattaggatcattatatatacatataatatttgtaaggtagtaaaatccaataagaactatatgtatagtatatatgtatatattcaagagatgggttattaaaaaaatatgatatcatgtttaatcccaatcaaaagttttgatctttataataaaggagatacctttgaaagattatgtcaacgactac

SEQ ID NO: 202860 - DNA, 1976 bp, Cannabis indica
agagagagagagagaagaagctagaaaacctaaatgtctcatcttctctcttcttttcactttgaattttcgaaaaatcctatgccatagaatttcaaaaatttaatttctctctctcaaagtatgttccaaaggtgagttgagtatcaccccccacactattcaaggtgatactcagaccttttgtagaagattatgaaggaaattcaagttcagtacttgttactactctgcaatagaaatgaataagggttagagtactaaacgaaatgagacattatattccgctgcaactaatgtaaggatatctaatctcttatgtatttatttaccgttttagctttattcatatttaggatgtttgattaatagaatataattaaatatacatgttagtaaattaagattttgataaaataagtttcaacaataatagaagaactaggtgttgattaaggttcttaatatccaaagcaatataaaaatatgtcttaataacatacataaaagcgctataaaatgcattaatatgaaagtgtaaagaaatacttacattggttgttggtgctataactggcaatggtggactctgatcttcagggaaagagtgaattaaggggattgttatttctcctccctcatccaaatagctaaaattttcctcaacaatatccatgatgtcctcctagtgagaaacatgttcccgatcatccatattatcatcgtgatcatcatcatgtaattcatcatcttgtttatcatcatcctcaaaatctaatgatatctctactgtctcagatacactattaccagattgcagactgcactcacaagttcaacttcatcattctgtgctagatcaccccacttcacaaacttgttgaaaaaataatcatttcataatgcccttgtggacaactacatatgcagttaaatcacaatctgatgccaggtcctccaatgtacatttctccaacttttcaactgttgtttcaggattatgcataacaactccatcaactatcctcttcactgcaaatcttggatctggctagaccatatatatgtttgtcttcctgtaacttcgagaccttagatcatccaaaattaaattaattttaggctcttcaaccaccatggaacccatatttaactgtttcccttttggcttaaaaagaaaacaaaaaggaatctgtatcccaactctctaactatttcttccagcaccaatctagtgaaacttactgtagttgtgggagcatctacttcgagtctgcaacaatatggccttttgaagcctgagaatagaggtttgcctaagaatggtgtgggattgttcaactgggaatggtggttcgactctttgacttcgttgacaatggaggttcgaattattcgtagttcgaacagtttgtaaaactttttttagagagattttctaatataaatttccttttcagtattttatattgtttttaatttaattttgatttaattatttttcattcaaattaagtagcatttagttggaggtaatacaatagactaaaataaaaaagaaacaattttcattccattcctttaattgcattttaaagtattaaaatatcattccaatagaatgatcttcctactatttttagtagaataactattccattttaaaaagaaggaaagatcactctaatacaaaattttagaaaaattaataatttttcatacattttaaattctatttcattttattctttcttattccaactcatatatttatatctctaccataatttttttttttcttgacatggcctttaggatagtggcctgacagctaaaatataaatccacgtaggcattaacaaggtcagatagacaggaaagtgattttgttaacagttgttcagtaaatttgaccataaaaaaattaattgtagtgaaaaagcattaagggtcaacagatgttgaaactaaggtca

SEQ ID NO: 202861 - DNA, 1510 bp, Cannabis indica
ttgagcctttagaacttccatctcttggtccctcattgttcatcgaatcaaggtttgtgactactcgaaaatcctcttggtcatgttgcaacgtgttagtatgaccttgcatgagtccatgggcttcttgcaggttttggagttcagtgtcgtctccaattggcctttgagtattggtggtggacgggacctcagtgatgagactgaattgatcggctgccgaattgggattttcggtctcctgtacgcctggtttgatcccaaccagaggggaagtcactctatggcctatagtaggaggttgtgtgttaacttgcccagggtttgtccctgggggtcctctcgtgttttcagaagttttcacgttgggatctatcaccattgggtcgccctgatcaacgaggccttccctacgagtttgcacaatcatcttgcttatttatcagaacttaagacaaaagatttgtgtttttgctctcgatgaaagcaccaaaatgttaatctcgcttctaggcaacgacagtgagtcaaatatgaagcgattaagactgataaataaaagaaagcaagattttaaagaggtttggcctcgtaagtgtggtaatagcctactccccttgtattgtattgacttgagagaagggaagaaagtgttcttcctcttgaaagcttttacagatgatatctgagtaattttctctcttagatcactctattctctctagaatgtatttctgaagcaattcttttgatctctttcataatgaggctaggttactatttatagagacttaatacatgagggatagtttcccttttgcttataatgcacaaaataggaaattacaataatactataattacaatgcatgaaataggaaactaggataggttgccatttttctctgactcaatcccacgattatagagattatcttagcatcttgacacaacgagattagtctttgaagtcaccatctctcgtacgtcgctcagcataaacatgttcgtatctggtcggacatcttcttcacaatcatgctcgaatagctgaccaatgctggttagtcgtttatagactgctagggatatcttcctctgcccaggtatcaaaaatatggaacatgtgttattcaattctatttccacgttgaggtgaaaaaataggataacacatctcaaatggaaattgactctacatatcaagagatactgttagtttacataatttttattattattatttaattgtaaagtatataatttttgtgatcaatataattatttctctaaaaataagaaaagaacaagtcatgatatgttatataaatagccatgacctaagagtgtaaaaggatccatctattctaattctgttgtacttagaaacctataaaaagaggagtctattgttaactctctcctattcttgtgagagagagaactttgtctattgtaatcactcaagcgcttgctttgggaacataattctgattgtatatttgaccat

SEQ ID NO: 202862 - DNA, 1189 bp, Cannabis indica
aaaaaaaaaaaaaacaatattttgttcttcaacctcaacttgacatgcagccccggacccgagccccgaccccgaccctagactcggaccttaagcctgactctagacgtcgaacctagactccaaacctgaatcctgtacccgtactcgaagtcgaactcggacccggaccccggacttagaccatggacctgaaccccaactccgacccttgacccgaacttggaccccaaacccggactccagttcggcctcggactccaaacccggagcccgctctaaccctgaatcctgttccgattccagaccttagattcagacccgacttaaataaaatcaaaaaataaaataaaatttatataacatacttttattttttatttttaaaattaaaaaatacacaatcttattatatttttgtgattaaaaaatttaaaagctaacactacctaaattaaactaaatcatatacataatttcaccgatatataattagggacacgattttgtcccgtgatgtattttcacagaatgtattctgtggtacattagatgagtctcaaggtacattagatgagtatcagagtacattactattttttaaccttaattattcctagatcaatctcagctcttagatcaaataactcatccatctaacggttgtcgtacatcatggaatacattccgtgaaactacaatcaaaagaaacaaaatcatatccccgtataattaaatatgacacctattataaaaggctagttcctttttgcatttctacattaaataatcaaaaagtgttgtaccaaattaccaatagatattagtgtgtacaaaaataaaacaaaattggaaccattaattattatttgtttttattaccaaaaaaaacaaatatattattagttttctatataaggctatacacggatgtatatcctctcactcacttctttcatatttatttgctctctcaccactcgtttgtgaaaaaatcggcaatggcggacgaggtgattctgttggatttctggcccagcatgttcggcatgagagccagaatagctttgactgaaaagggtgttaagtacgagtacagggacgaggatctgagggacaaaagtcccctgcttctgaagatgaaccctattcacaagaagattccggtattgattcacaatggaaagcc

SEQ ID NO: 202863 - DNA, 720 bp, Cannabis indica
ataccaaacatgctcttagatttgccatattttattgctttacgagggctatggtagtgtgattgcacgtgccttctgtgttacgtggttacactttgtcaattggtgaagcttcttgtaaaaatgagctcacctataatagttacttggtgacttatagtaacctggtaagttacagttaacccgattcatcacttcacaatactatttcattgctctggtacattttttgctctttaatttgatttggtaaagcttcctaaaatccaataccttttgcgatcccatacgacctttctcacaatacatcttagacatgttatggccactagtatcccgatagtctacataagaccttaacgatctgactaatctctcccataagacccaataaaacatcgattgaacatcgtaacattaaactttagctaacgtcatcaatgattccaaaaaatggcactttatgaggaagtaaaataactattacagcagtgtaatatatattcatagaaacgaaatgggcaaccagctcaacctgccaataatttgagttttatgccttattttttgctcatttaatttggtaaagccttctataatctgagttttgtggctcattgatttatcaagtaccacatacttgtaatataataaatctatacatttataccatattgaagtgattaggtaatttaataaatgattagattttgattttat

SEQ ID NO: 202864 - DNA, 1474 bp, Cannabis indica
tatatatattattacatgtagtctcatctgatactcctctcgtctctcactcactctctctctctctctctctctctctctctctctctcctaatcttatggactttttcccatataataatatatgatatgatattattagaggaatattgctattgaatattagtggtactttaacactttctagatagtatcgtcttgtaattggttagcgatactctttaaaaattattacattaaattatatgagactcgataattacttaaactaatagcgatattaacacgtaaaaagatgttaagtaccactagtgtcttttaacattttttttaattaaagcaatgttataagatacacacctagtaccacaatgaagtatcgttttataagtggaccccaatattaaattacatcaataacgatattaaactttgggagttccttttagtatttttcatattattattgtttgtccaagacaacccacacagcagcacaagaccagtagtagagtagtagtactaattggtattggaaatcagaaaaagtaaagcgataggcatagcctaacatgcacgtgacaagtccgtgccataccctttgtcttgtcttttaccataaatacattagggaaggctcaaactttttaccatttgccatgttttactttttttggttgcaacttggaagcttttgtacattctataagagaaaaagggggaaataattgaaattgtgaagttttagtggtattgtcaatttctaaaaacatgtgtttttttgaaatgacatgttgaatttataagaaataagaatatacaataatgaattaaatgttgtagtttcaaaagaaataaagaaaaacaaaattgttttcaacacaacaagtaaggagaacttaaagtcaattttgatacaaaacctaacatcacactcaaaaatccaactaaaaaagattaatttacgaaaaaatatttaaatttaatttttaacggcaataatacttaatttataattttaaaatttctgtaagtacttaaatattaagtgttaagtaaattgtcacgtgacaatttctaattggtctaaatcataaaataagaaaataacacgtagataataacttaacatttaacgtttaagtagctacagacttctagaaatataacttaaatattattatcggtaaaaattaaacttaaatatttaattacaatcgaaatttaaatttaaatatttataccataaattattcattaaaataatataatattagtgttatttattcaactttgtgagataaaccctatttgggtaaaatacataaaaaattaaaaaaaataaattgggtttagaaaatgtatcattggattaagtgagaggaagagagagaaagagaggaagcaaacaaatggatccttgcaatctctagatgtcttttagtgtagaaaaaagcctccacttcccacaaat

SEQ ID NO: 202865 - DNA, 782 bp, Cannabis indica
tatcacttttaccagtataatttattactgcaccgataaaagtaacttttacttttaccagtagatttcgtaaactgcgttggtaaaaaggtcaaagctttaccactgcacatttgcagtggttaaaatttaactttttccagcgcatttacgcgctgggaaaaatcattttttcccgtgctttttattttgtgctggcaaaagttctaaaaccaatgttgatttgccaacccctttagccaacacatcaaaagtagattctattttacgagcgcaatactaaacttataccagcacaaaaatgtactggcaaaagtaacattttttgtagtaaatattgtagcttatttagattttttttttaaaaaaaaactaatgttgtaatgatatttattttattgagtattgttataggcgttagggtggtgcctaatactttttagatgtatcttgtgattgactagcgatactccttaaaaattattacattaaactatatgagacataatacttaattagaccaatatcaatattaagacataaattgagtacttgacatcactattactctatgataatttttttttatttatatgcatcaacttggaggttgaaattaatagtaatttaatgacaataacctttaaataataataataataatagtctaccttaagtagtagttagaacttagaatgataaagaattaattatatgaaggtttggatcacttgacaaacaactaattagtgttagactcaaaaaaattagtgttaaaaaaa

SEQ ID NO: 202866 - DNA, 647 bp, Cannabis indica
attttgaagtattattattttgtattgcttgaattttctttttaagaaaagaaaaaaataaaaaacttatgaagaccaaaacatacctcgtatcctattcatgcttgaaattaatcaatggtatttatttctcattgatatgtagtcatttttctatttcatatttgaaaagaatttttttttattaattctttccacataatatgataaaattcacaaaaattacaaccactttaatttgctaagttccttttaagcaatcaaatttctagtttctaggattaaaaaaattcttttagatgttttggtaaaaaaaattacttaaaaaaatattacttttaattgcaataaattttgtgacaaaagaaaatatatatttccatacctttgtcatcattaaaaaatctgtaaaattgtaactaaaataattagtaaaaaattataatttattgttgtaagtaaaatgtattttttcgtcaaagcacgcctgcaacgataatccttcatctgattgacaatcggctccaggaagcacttcactcccctcaaaatggctcagctccaattacacaatggctgcccgctcctgagggatggctcatatgcaacactgacgtagcaataggtcattccctttcggctggagc

SEQ ID NO: 202867 - DNA, 1231 bp, Cannabis indica
ttttttttttttttctaacttttgggtatctttgttgcctaaagaaagattgggaccaggggagtttttggaccttagtaaaaaaattaattattgaagttttttttttttaaagcacatgtggtatttttagaaaattactaaatctttttgtgtattttaaaaaggaaaaatacttaagtggtactaatatatgaattttgacatttatgctctaaataaataaatatttttattattaatttttactaatttaaaaaggttattataaagtgaattattagtaataaaaatagtgtgacatgtgacaatctagcttgacaaaagcttttcacacaccttattctagtaaacattggacattacttaatttgtgagaatgccccaaaaaacaaccccaaatatctttagtcaaaaattgatgacaaataatatttgagatttgtgatattaaatacaacataggaataggaatagggtataattgagaaacacatattaaaaatggttagggaacactacttttaaggtaagtggtttggcttttgtcgtggtgtatagtgacattatttagcattttgaatatgactatttatatatttaattatttatatgtttgatgttggaaaaccaattaattattaatttaatcaactaactacaataacacttctcttctttaaataaatctttattgatagtgaagtgattacttttgcatttatttttattttattttattaagcatcatgaataatatatctacatgtatctagctttttcaaaagtaaatctaaccaaaatgcatattacaatcttccaagatcacatagctgtcctccctttataatactaaaataaaatctataaaaatacaataagaaacaattattattttgtggattaaattaaaataaattattttaaagaaaattaataataaaaaatgttctatttggatgagaagagctaaaagactcctctgagtaacgcaggtgggaagaatgggttagttatgggagtaatctgacagaagaagtataaataaatgtacttctttttttaatatatataaattaattttttattatttgtagtaggaatttagggttatattatattcattatacaaatatacagcacttgaaaatatctatattaaccttaaaaaaagtggcttggggtgtactcttaggccaacaaaatactactattttagtactattttttt

SEQ ID NO: 202868 - DNA, 1482 bp, Cannabis indica
aataatgaaaaagtcattctattataataaaatttcaatactttaaaatacaatcaaacaaaaaaatataataaacgttatttcctttccattccatttatttttcttgctaatagtagcaaatgctctattatttatacgtatacacacattctattaatatttccttttaaaaagatgttgaaagtggaaattcgtcaaccagattgtggctaaaaaatcaaacttaataaaaattggaagcaaaacttaaaaaactaagaataactttcagagctttaatagagaagaaaaatgaatgttgtattgcttttatgtgtcattgattacgataattttctaactcctttcacattctaaaaatggagtatatataggagagctctattggctttgatttacaagatgatgccttaatggtcctaagacaacatgaagaatgttgtactcttgcatgtaacatgttgcaggaagtctcttgtgccaagtagtggttgtcaggtgtcaggtggtcctaaggtgaaaaggtagtagttgcagcgtaccccttctcaggacgccagggcatgcaggcgagatgcctccactactcgtactctctcttgtaaccaagtcttttaggttgtgtggttgtaccctcacttgtacttgaccgcgtacatgtcttgtccttttgatttcttgtctaatgactttcttcccaacacttacgaaaatttcactaattattggtcatgttgcatggtcgagatgcttgttgggcatatggccaagatgaggttcttcaaaggggcttgatcgagatgctcatatgatactttgaggagggtactgagttggtgagataaagagaatgtagagatgcacttgtaaagtgcatgtcgagttgcacttgtgaagtgcatgttgggctgcacttatcaagtacatgtcgaaatgcactaataaagtgcatgctgagatgatcaccatctcttggtgccgagatggtgcccttggagggcatgccaagatgatcaccatctcttggtgctgagatgtcaccaagtgacattgccgagatgcatggtacgtcttcaatactactccttggtcgtgatggttgagaccttaaggcttgaagctttagtcttgaaacctgaagcttgggacttgagaactcatgtcttgaagcttgcatcccgagactaaaaacttgaggctctaggctcgttggactcgaacatattgtcttcaatttatcgataagattctattaatggtgtattttacttgactaattttagaaattattctcgttaattttaagggttaacaaaaaaaaaaaaattgccaataggtaacaaaatttattgttcacgtaagattatttatggaaaaataataaggttaagaaaaaaaaaattatatacaaagaaataaattaaaaataaataactaaacctatttcaactgttaaaactatggtttcaaatataaaat

SEQ ID NO: 202869 - DNA, 683 bp, Cannabis indica
taaaatacattaataataatatactatcttttatgcttggcattttgagttacttcttatcgtacaactaataacaatataccacctgcttaataccttaaccatattaaaatacacccacatataataatactaccttttataacacttaccactttaaaatactcttttatcatttcagagaaaaaaatgtgtaatctgaaacttcaacaaagtcttagccgagaatatggatatgggccttgataaccaagatttgactttttgactttaagtagataacttagatatggaacacactaacgattttttgcaaaaacttaattggggcgggttctggttcacaggcccgctaagggttataaatgttctaacttggaattgctgtgggtttgggaacctatggacttttcaattctttaaagagattgtatctcaaaagtggcccaagtttttttttttttttgtgaaacaaagtgcttgaagaatagagtggattgagtaggaagggattcgggctttgaggggaagttttgtgttgaggcccaaggaagagagggtgggctagctcttttttggaaagaacaagatgggggtcgcataacagggtactcccaaaaccacatagactttgtggtcactacggaaggacatccaacttggagacttactagtttttatgg

SEQ ID NO: 202870 - DNA, 1973 bp, Cannabis indica
ggtattagggatgacaattttactcgaaagctcgtttacttgcatggataagatattaccaaattagtatgtagtaacaatagttctgaataaaaattgtattgtgattaatgtataggctaatttgaattaataacatatatcaaattatgcccttgaatttttttagctgttaaatattttttttaaattattgagattattagatttgagaacttttgtcaatttcattcatattagatttctgttagtaaatttagaaaaaaaaatccttgaatctaacaattttaatagttctgagagaatgtttaatggcatgaaaagttcaagagatatgatttgatacatatcaaaattcgagagtcaaaaatattaaattagcctaatatatatatatatatattagatgaggtgtgctaattacaacctcttaatcaaccttcacgtccgaaattacatgccagaatatttttttcaattttttttgttagcaatataatatcatccctataaatttataaaaaattttgaatagtttacattgctaaaaatagagtttccgatattccagtccaccacttatgctcaaaaaatttcaaatctataaactattcgaaaattttaaaaaaaattataagaatcatgttacaagtataacgaacactctcgtaaaaataattttaaaaaatatttctattttcagatacaaaaattaactaagatattataataaaagattcaccattttactcctcattacattttacaagtatagattttattacctagagaagccattggatgatgatgaggtggcaccaagaaacaaattctcaactcgatggtgtatggtataatcaatcaatgcttgtgccacatcaaaatcctctactacaactatctcaaattttatctgcattaattataatacaaattaattatctaaagctagctatagttaattgaattaattaatgatgagattaatgaataattacatacttgtctacgggcacaaaagtatctaaatggacttaacatttccaactcccaatcatttgcttctctttcaataaaattgcttggactgctctcccctaatcatcaccatcaccccaattaatttatatataaaatatttttattatatgaatattattaactatacataattttgttttggacatataaatcaattatattgctcatgtatatataaataaaaattatatgtataaataaaaagaaaagaaaatatttcaaatcacatgaattataagattggtcaagagagctgcatagctgctgacttgaccaatctcatagtatcatgtgattcgttaaaatccctccatgatcggactaggcacaagcctaaggtccaccatgcccaaaggtctaaaacaagtcactttaaaaatacatattttttttaataatttttaaaaatactatattttttgtttgaaaataactaaacaattttgttactacattataggcccaattaatctcaggatcgactctggatccttgagaaattataatatcataatgcataaaatatagggtaaatactattttggactctgtgttttgcaaaagttatcaattgggctctatgttttgttaaataataaaatagaccatgtattttccaaaatggtacaaatagaaacctgaattgatttttgtgaaaataaaatttaataataatctaaaagtgttatgacaaactatttacattttctatatctgttcatgttaagaattgttttcaagttagtcatattaaaaaaaaaattagtcaaaaattaagctcaggttcctatttttaccattttagaaaatacaaggtttattttgtcatttaacaaaacagagagtctgattaataatttttgcaaaacacaggatccaaaatggtattaatttaagcactctatcgagtcatatgacatcatagaattggt

SEQ ID NO: 202871 - DNA, 699 bp, Cannabis indica
aaaataaaagtaaaaattaaatttagttacctccatgtacactgctaaactcatcatcagaatcagaatccaaaatactgaccgaatcaaaccaagcttcctcatgagaaatcactgaaaatacaaaagatcatattaaatttatagtttctaataagaatcaatatagttacaattccatttaatctatctgagacaatgttgttcgataagaaatgaagataaaataccattagcatcacactgacttctgtgccattgcaactgagtaagatgaaaagtagcatttgcaacctcagatcttctacaagtagttgtctcaccattatcaaaatccatcctaacaaattcactaacagcataatctcttacattattattattattattatgatcattattagcaattttctttgaagagatatctgagacaacagcactgctgatctttccatgccggcgtttaatcagacggtgacggcggcgcgatcttgttggtctgattttatgagatggtgttgaaacacagcctcccatttacccctttttctctgtcaaaaatcaataaattttgagaaagaaaaaaaaaagagtagtctttgaagtttgaagagaaaaaggtaatgtctttaattaatgggaacaattaaaaagaagacaaaaatgaattggatatatgtgcctaaccaataccataca

SEQ ID NO: 202872 - DNA, 1091 bp, Cannabis indica
aattggcttatattcaaattctacaagaaaatagcttatggtcatttttcaacctcaaacacaaacctatattgctattgaattatcgcctcatctattctctttgatctttcagcttctatgccgtgattcatggcctctttgctgcgattcctcactttttgttgatttgggtgtaatattctgacattggtttgatatttcggtgtggttctactttagtgtggccaaataaagatgaaccccttcgatggttggttctccaattcactgtcttgaagatgagtgcttgctttgccaaccaaattttctttggaactattgcagttatccgagcacaattgggacatttttggcttcaagcaggtatattcagattatctttctctttattatgatcataatagctagataatatatatttatattgatcgctggtcttaatcaattattacattaattgatagaatacattgcctaaaaattgttaatttattctatgaactggtttgacaaaaaaacttcaaagtgatgtaatttttgatacaacaaatatttttgaggaatgactataattactggtctaacctctctctatggctttttaatgtttcgtgaaatacaccccctaaaagaaaagaaatatatacaccattttcttgatatatactattgttcatatgttagatttgaatatgatttcctcatgaagtgtttgatcctctattataattttgaattattttatttattcaacttgtgatcctctattatgattttgaattattttatttattcaaacttgtgatactctaatcaacagttttttcatgtgtgttcgtctcttaaggttggaaggatatatatatacataaatttatgatgtataccactcaaattgataatctttttatttattattatttcattgtacatttatatttatatttggagtttgttttttccttttattttaattttgctcttgattttcccatttaaatgttcaatttaagattatgtaaagtcgtccaataccgaggcaaaatagcacagtacgtttggcgagtattgatcaaagaagcccaaca

SEQ ID NO: 202873 - DNA, 1831 bp, Cannabis indica
aaaaggaaaatatagtaggatatgacgtacataaagaactgcagaaccattcctccccaaaatcgtttccaaggcagatgctgtaaaatcagcatcagtctgtgcaatcttctcaccccagtgtgtaagccaacctgtgtagaactccctgaaacaagcattcatgagcacatctaccatttcccagtaaagactgatacaccaattaacaaaactcttacgcagaaagtggtggtgatttcccaggtgcattgaacttcttttgtaacccaaatatgggccaagggttatcaccagtggtgaagtcaacagctacaaattttacagaacatattagaccaaaaaaaaaaattaaaataatatggtaacatatgcaagtctttgcgtttcttttaaagaagtgtaaataggaaaaacacgaaagcttctcatgagtcacgagccaagcttgattaccaacaaattttattcttagttagatttctggttcagttattgccattctaaataaaacactaaagacatcagaaataagtaatggatcaatcataaactttacctgaaaagacagcatctccacgaattgttcccttctcaagtgtttctctagttcccccatctgtagtatacctgacaacaccccaattaggaaaaagttttaataatcaaggtgttaatctcaagccaaaactttgttggatcaagtatgattaacataatatttatcaaatagtggagaatgtaagtggagaattctcttacaaaattacatcatctccaaggtgatattttgccaatctgattaggtgatgaagataagccttgtcatttcgatatgaaccatattcattttcaatctgtcaacataaattacttttggtaaaatttaccacccttgggctcaattcagtttattgaaaatccaaaagctctttactattatttgcttactttctttatatgtcaaagacacagaggatagaacaaataagattcgcaaatccacttacctggaccattataacaggacctccattcttgtaaagatatggagctatctttggaagtagtgctccccaccatctttcaaccttaaatgatacaaagtaaaacatgcataagcatcttcaacattgaaaataaacacaataaagagcaaaacatgaattaaatagacagcaaaaaagaaaaaacaaaccagtttcaggtaagcgggatctgatgatcttagcgtgagagctggctttatatctagtaaccaaggaggaaatccccctaaatcccactctgcaataaaaggcagctctgaacagaaatttccagtgtaattcaacttttaaactagctaacatttataagagcatgttccttatgataaatttagcaatgatttattcagcttcaggatagaagccatggtcacaagtattttaccaaataaagttatgatcactaacctccacatatgtatggtccggccgtagcataacaaggaaaccttgattctggcagtgtttaagaaatgatactaaatttgcaataccatcaaaattaaaagctccaggcttcggttcgtggagattccatgggacataagtttgaatagtattcagacccaaggcctttgctctcaacaacctatcatcccaatactgcaatcacacaaagaagtaatctttctgttaaaccaaggcacttgaatcttggtgaggcaagagcaaacgccaaatctgttcctccaagaaaaatagagtacagaatcattttggcaaatcaggaactttaacatttttctttcacaaggtaaacttattcattgaaaacattacag

SEQ ID NO: 202874 - DNA, 598 bp, Cannabis indica
agagagagagagattctgacacttagagagtctgaaatttctagcttagaggcggcttatgcaacttaagttttcagctagagatttaggcctttatataggaagccttaaacactaggtttacaattcaaatcccttaataatagcaaagttagttagatatttacaaaaaacaaaaatgtccttagattctagatattatttagccattctattaggcttttggtggccaattcgcaacccacctttgatgtccacgtgtaagagtttcctatgggacctccaatgcaatccttggctagccaggactttgtgcttgccaggctggccgaccatgacgctgtccctgggttggctagccatggggccgaccaggggtggttggctagctcctaaaagtgagttggtctatcacttggtcctcgtttaaataccgaggtcttcattccaaacatccgaatttattagtcatgaaatctgttgagttcattaattattttaaataatagaatcaaatagatgtgacttatggaggattctaaattaatcaatctccaaacaaagttttgaatgaacacatatatttaatattgagaat

SEQ ID NO: 202875 - DNA, 1110 bp, Cannabis indica
aaaatacaaactccttcgtccttaaaatttaatttaatttttatattgtcattcccatcaagtttaaacctcataacaaatgccccatcaaagttttctccaatgctgattgggttacatgtgtggacactcgcagatcagtcacaagctattgcatcttcctcgatgactccttcatctcctaaaaatcaaagaaacaacccattgtatcctgttcatctgtagaagttggatatcgggccatggctaatgcaacttgtgaagttacatggctcattgctctcttgaaggactttcccatctctcactagctctctgctgcactctattgcgacaatgttgcatcaattcactctctgagaaccctgtgttccacgaatgcacaaaaaatgtggagatagactgccacattgtttgagaaaaacttcaagatgggcacatcaagcttcttcacgtttcttccaagctcaacctggctaacctactaaccaaaccactcttcccttctcagttcaaagatctattatccaaaatgaatgtaaaaaaaatatttacatatcaccttgagggggtgtattagtattgtattagttaattaggttggtatatagatttgttaagttagttatataactaactctagtagctcaagtgaggatagagtgtgaatataaagctaccctcttcctttataattgtaacaatacaatttcaccaatgagttaattgcagcataactcctaatacttttactatgctagcaattaacccccaaaattcaaattttgacggtaaaacccccaaaactcaaattttgacggtaaaacctcccaaaactcacattctgttagcatttagccatttccatcaatttttagtaattaactgccaagttggctgtacatgtgtacttagggtattttctacatggacaaaatgtacacatgacactatatttttggctcacgtaaaaaaatatttaaaataaaataaaaaataattttaaaaaattaaaaaataaaaaaataaaagaacaatttttttcttttatctttcttttctggttctttttttcacgatttctctatttcctttctctctctctctctc

SEQ ID NO: 202876 - DNA, 794 bp, Cannabis indica
tttaccttataaacaagaccagcactacttagcttggtagaaaatccatgaccaaaaacctcttgaaaccctttctggtgatgatcataacgatccttactagggtcataaacaccaccaacatcaagaacagcatccaaactctccaaaacctgaaacccacaaacaaaaatcaaaacccctttccccaaatccccaaaattccatcttttccattttcccaataaccaaacagaaaacgaacctgaggatcacgagaacggacgatttcagcattggagaacttatcagtgaggcgaatcatgaagcatccgagggcttcatcgcagtgaaagcttccgttgtgagtaccaacccgcttagtgagctgtggagattgagtgggagaaggagacccagttgagaaagccatgagagggaggaaggaatggaatgagggttagggttagggtttaggttgagatgggtatgtatggaaatgggttgagaagaagaagacgaagaggtctttggaggttagtaatgggtctgcaactgaaggagcttagtagtgtgagcattccttgttcgaatcaaatactcaaaaccccccaaaaaccctttgccctgccctcaataacttattattattattgttatcctttaaacttggtgtctacacatttatttattaaaagaatactaattacaatctcttatctcttaatcttcacgtctcgaatcacgtgttaatttttttttatagtgttaatcgttagagttacagtatcatttttataaatttttgcaaaatt

SEQ ID NO: 202877 - DNA, 2463 bp, Cannabis indica
gtacaccttataactatttacaaactacatcatatgtttttgattttttattcattttatatatgaagctttgtaaaaattcatcattccttttaaatttctttaattctttttttaaaaaaatcaatattatatttgactataatttttacaatgacactcaacctctcatagcggttttagttttgatgggcgctggataaatttaattatgcaatgtgttgagtatgttacctatacttttgtctatgctaatagagaaatgggaccaatcaatccttctcacaggattcgtcaaggtgatccaatatctccttatcttttcatcctttgtgctgagggtttttcaactttattgaaaaagtatgaacgggatggtaagattcatgattgtaaagtggctagaggagctctagtgatgtcacatatgcgatttgcagatgatagctacattttttgttgtgctattaaccaagaagccgattatgttatggatatgcttcaccaatttgagaaagcttcaggccagagagttaattttgataaatcatctgttttcgttagctccaatattgaaccttctatgagagacatcatatgtggtcatatggatatctatgaagttgataacaataccacttatcttgggctccctaatattatgggtcgtaagaaaacagtttgggttttctcaaagataagttgcaaaagcgtattcaagggtgggaagattgtttcctttctcgagcaatgaaggaggtattactcaagactgttgctcaagctattccaagctacacaatgagtattttttttgattcatgtggaaacttgtaaggctctaaagagccttatggctaagttttggtagaaaatcggttcatcaactataagacatattagttggatgagctgatctcaaatgtgcaaatacaaacatgctgggggattgggtttcataagtctcagggattttaacttggtattgctgggtaagcaaggttggcgtattctcacacaagaatcgtctttggctggtcgagttttcaaggctcgttattttccctctggttcttttttaaatgttgaattaggaaacaattcgagttttatttggcgaagtgtgtttgaagctcaattccatgttcgtgctggtcctcaaaaaattgttggtgatgtttcaacaatctcaattcttcttgacccgtggctgctttgtaaaaattattcttatgtttcttcagatcttcctgctttgccaaataaaaacgttaacaacctgcttcgtatagatgctaaagcttgggatttggagattcttaacgatctatttacaccccgtgatcgtgatctcatcactttaatccaattaagcttttcccatagttttggtcttgaaagtttaagaggaatggtttctatagtgctaagagtgcctatcatttcccggaagaccttaaaggtggctggtctgaggataattcaactggcttttggagaaattttagaatttaaagattccaccaaaggttagtaatttcctttggcgagcaattttttggtattttgcctacttgtgtacaggtccttatacaacatgtccctgtctctttgtgttgtcctatctgtaatggccacgacaaatcgatttttcatgccctgataggatgctcattttcaagaggttgttggaatcggtccatggttgatgtttcatgttggtctgagagggaatttggctgctggtttatgtcactatctgttgtgacaaatcaacaagctttggaagaagctgccatggtttcttgagcgatttggaaggcaagatgaggtggtttggcaaaataagtcccctacaaccgcatcagtttttcaatcaacacgttcttgattagtttctttttacacagtcacagacgaaatcctctttgtcatttatttttgctggttcgaaacatattatgcatttgactacaccgacttttaatcagatcaaagtaaatgttgacagagtttatttaatgatgatggtagttttgggttcgaatgtttggcaagaactcatgatgaacggattttggaggcctttttagcaagtaggatgggtatcgtctctctagaaattaaaaaaataatagggattaaggaggctctgagttagattcagcgacatttgtggtctaatgtgattttagagattgatagtttggtttatgttcaggctatccaaagtaatttacatatgttttctgagtttggactcttggttgatgattgaaatgttattttattatctttgagtaatgtcgttaaacattttgttgaacgatctacaaataaggctacccactgtttagcgcgtggctcttatttttcctctagtcatgttgttcaagagcatgaattacctcctgaattgcgtgctattgtaatagatgaaatatatataaaagtttactttta

SEQ ID NO: 202878 - DNA, 1440 bp, Cannabis indica
tttttgacgatattattgttggtgatatttaaaatttattggttctttgtcaaattggtttttgttgctttgtttctgacgaggggacaaagtggtccatcatttggcaaagattagtctacaagaggattttactcttttatctaatattgatattgacaattatattactaatcttattgatgaggatatttgctgattaatgagaagttgccctcctaatttgtattgtataggtattattaattgttagccaataaagaaacttgttaactattttgtattgagtctgtattggtagtgtatagctgttattaatgaaccaaatcgtgatatgaaaacttcaaaacaaaattgttaacattgaagctaatgaattttgagtttctcaatcactaaaccagaatgataggtagtgcaagatataatgtcaatcaaataggattatcaggtggaacttgtagatatgggcttgtgtcgtgataatgggcttgggcttatccatagtggatatagttgttcaatggtatgagatttggatcttgcatcaatgtggattggagaaatgttggatgtggattagaatcacttattgcaaaaaaaaactgtgactttgagtactggatgatgtttgttgtagttgtggatttgaaattgagtcatatctttgtgtaatatgttgttattggccttgggattggctagtaattccaataaaatgctctcctagtcttgaacttgatgatcccatataagggttatatctactttgagtagtactcgatgatggaggcattatagtttgttgtagtagttgtggtcttgaaattgatcccttatagccataacttagtgtaaaatgttgttgttgaacttgggcttggcttcctataagcccaccatgcatttccaacaaactttcccttgcattgcaattattgttgttgtgcttcctacaaatatatgacaaattaagtattttgattgaataaaaagggagaggtctgaatccaaaacttttaaactattaattaattgtaaaatattattagactatactaaaaaaaaaaaagaccaatctaatttatgtatattattattatctattccggttagttaacttcttagtttctaagttataatttcatttttaatttatataatgttgttaatcaaaatacatttatattattttattttctagttatataatgttattgatcaagatacatgtacctaattttttattttatatttttatagcaactttgagttatattaaattttatttgagtttaaaaattgattacttgtttaattaaatatataaaaaaaaattaaagtattacttttggttgagacagaaatatttatgattgaaaaataatatgcttctcacatattaaaataatcacttcgatgtgtaaattacaattgtac

SEQ ID NO: 202879 - DNA, 792 bp, Cannabis indica
aaccacgacttaattagctaaaatattttcaatttttcaatattaatttaaaatttacaacttcataattattggttgaaaaccaaaactatccacatagataaaaacaaatcatattatactagttcattaaaaacaaacaaataaataaataaacaaatagtagatgagtaaagtacaaaataaaagttgtttaaaaaagtgaaaacatccaatagtagaaaaaatggagagtgagtgtcgacactattagtgtcatcaccatattcaccaattgaaaaagtagtgagtaaagcttcaaccttcattgaataaacctctgttttcctcaaactatgtcgacattctcttctcacaatcactcttctcatttcaaaatccaacctttcttccactctactaattgggctccatgaaaatcaacctcaaacccctttttctttttcttttataatcccaatttcatacctttgatcaaatccttcctctaaatatatcgaatcccaataaccccaattcccattttgatatgttattcctcgaggttccaacattttcaattttctacctttaaaattccaatctttacttttcacaaaaataaatattcaatctttaacgttgttgttgttcttcttcttaatctcaggagctttggcagtttctttccctcggtggattcgtcgcaaaactcgtctctccgcaggtaaaatcttcaaccagaaactctcaatttcgtatcgaaattcgatgattccgagaattgggggttttttttttaggttttttttg

SEQ ID NO: 202880 - DNA, 1398 bp, Cannabis indica
atcctattataataaaatcggtagttgaacaaggcgaagtcttccaccatgaggaggaagaagagcaaccacctgaatcttcaatattcaataatcacactttactaagttaagtttttaacttaagttgcaggttgcactaccattggttcttaacaaagattaactaagttagagaaaccgctctaacaacccgaaagtttccatttttaacaaagaacacccatctagataccaattacaaagtactaaaaagcatccaatcttacaaccccaaccagtcattggagaaggataaacagcaagcccctgaatcttcaacattcaataactaaacttactataaaaaccaaaaaagataaacactttaacaaagattaactaagttagagagaaaccattctaacaatctgaaactttcctttttttaacaaagaacgttccctaagagatgcttttttgtttttcagatctttcttagatgatattattagttagttatctaattttccagacatctctgattcctattcgttgtatacatgaattagcagttcgtacactcagagtagataacgaactaatttagatggatgttttctcatctctttccgatgatgatgtattaaactcaaattattttcaatgaatgttcattatccaaaaaaatacataacatcttcacaactattttaacaaccccaagtcattgaacaaacattaacaaagttaaagagaaaccactctaacaatctcaaaattctcatttttaacaaacaacattggccctgaatcttcaacaacattcaataactaaacttactataaataccaaaaaaaaagataaagataaagactttaactaaatataatccttaaaaccaacggtaatgcaattcaagaactaaaattcaattcccaattgtacaaattaatccaaaaattcaatcaaagcacaaaaaaccaaagtcattcagagtcaaccacagtgaaaaacaaaacaaaacaaaacaaaaagaaaggaaattgaacaataaaaaacaaactcacagttcgattacggaaacccatcggagagtggagtaaacagaatcgggatcgttgtcgagtcggtaagaagcatttaaggaggttagaacacgagagaaagagtctttctctcgtttagtagcttcggccactggcggtggaagccatgcattgtagagatgcatagtgatatcaaaattggattttttttttcttggctacttgaattttctcagtgattttccctttttcttttcagacaagaaaatgagagaaaatgaagatcaaatgaagtcgtttctcttcttttattacaaaattattatatatattggggaaattcagatttggggattttttttttatttt

SEQ ID NO: 202881 - DNA, 737 bp, Cannabis indica
agaatggaagccaagcttcctccggcaaagcctccatcgccgacggacatggtgattgaccagatgtcggagaccccaaagcgtgggtcgcatcacaggcgagctcactccgacacttcctttcgtttccctaatctcgatgaccttctcctcttcgacccatctgacctcgacctaagcgccttcccttctccttctccatctccttccccttctccctcccctacacccgccgcacgcgcctcagccgccgcggcttcctccaccgccgtgaccttcgattcctccgacgagtcctgcggtccaatcggggctcccaggtctagacccagaccctcaggtaccccttcccatattcggagtctgtctgtggactctgacttctttgagggtttgggtttcggtggtggagactcgtcgaaagaggcggttggggttgagaagagggctggtcgtcatgggtatagtaactccatggatgggtttggttcggcttcgtttgagtctgactcggctggtcttggcgttgatggtattaagaaagctatggctcctgatagactcgctgagcttgctctgattgaccccaaaagagctaaaaggtttgttttttatcgttttttctcaactgggtcatcctctatctatgtttttctatgtgctttttttttttccccttattttctttgtggggtttcttaaaaaagcattctttttctttgcattaacgatctgat

SEQ ID NO: 202882 - DNA, 866 bp, Cannabis indica
agatagagagagagcatttgtgattgacacaaagttccctttggattattaagcaaactaacaatgtggaagttaggtgagtgtccgattcatcatttggatcgaccgtttttggtttttgcttccctacatatctcctgcgccacaaaaagtgaattaaggtggttatgaattgtctccaagtatttgttagcatttgctgttaaccaaaaattcactcatttcatagcgtttaattaaaggaaaaaaaagcggaaaattataatccatttaattatggatatataatatctttctgcaatgtgtaatatgtgtttatatatatataaatatatatatatatatataatattatgagtatgtggctctagttgcagggatgctatgtatattaagaatatgtgcaatcgggctacagaagtgtttatttggacgctatttgattagttcgatcgttcaatatttttaacttttctgcaataaagctttaaaaattctgtagagtccttttttttttttttttttttttttttttgttaaatccagaattacagcagcttgtatagcatttaatcagccgtgccatgatagattggctagtcgttgtgttatagaacgaacaaatttcatagtgctttcacaagaatattatatttcatacatattaaccaaagccacaattagttcactcttatatttatattactataccaattctcattttcaacaatcacatttttctgaaggaaatgaaaggtttcacatgaagatatttgatattctggtcactggaaaactatatctacatctgggtcaagattaaataactaaaaagaatggtaaacgaattaaataggttttgtcag

SEQ ID NO: 202883 - DNA, 1849 bp, Cannabis indica
tattgtttaaaataaaattgaaacgttctccttgaaaattactaatactgtatacgcaataaaattatatgtaaatatataataacaaaacaaaaataaaaattaattaacaggttacgtactcgagatgagatggaatcctcattccgtggtctatacaatataagcacataaatttgattaataaattaagaatgactaaatttgatatttgactcattaattaaacatatttgctagacacagctagcttaataactagtgtgacttatgctatattttgtaggagacagtgagacacacccaagagttgtatagcttagaacattgctattaagtatttgtagtgtctagtacattctcaaaatgtcacgttgcgataggctagcgatatttcctaaaaactattatattaactatttgggatcctatatttaattggaccaatactaagcatcactggtgccctttaacatttatttattatgctagcttaatatatataatgtattaatttagtgtaagttgggattaatataggatgggatagagttgaagacaataggtgcgtctttgtcaccacgaccactacaattgacaaccacctttgtgtgattgggtaaagtggggcacactttacttagtattgctaatgcgtggcacgcttccaatgctggaaatattccttccaatctacacaataatccataagctgcatgcacatgtaaattaaattaaattaaattaaaacatataattaattatattacttaattaatcttcattttacttgctaattaattatatatatacgtaccatggagagcttcttcatcagtgaccgtataaaactcagctcgtctactgtcttttaaaaaactcaattctggactaactcccgggcactctagcctgcatttatatattaatcattatatattaaaacgaaatctttctattttatatttcttaatttcttccctaatgaattgcttgggtgctttaattttttttttaacaacttttttttttgaaagagatttttaacaacttattagaatgatgggatgtatcataagtcaagtgtaaattgaaataatgattatgagagttgagaaaaagaagtaatatagtgccaactctattattgtttggcacatagtagagtagaattagtacttgcgagttctcaatttcacacgtgttttttaatgtacaataaaaacttttcaaacagttacgaacatgtgtgcaaatgtgcatcactcgtaacatattttttttcaaatacaattaaatattaaaaaattcgatttgcaacaaactttttcttactttttttttatttcctagtacaatttagtatcttaactagattgatgatgtttgtcgtattattaaaaaaatattttttgtttttaaaaaaatttaaaattatttttttaacactactacaaaaaactgttacttttagtgataactttttagtcacaacataaattttttgtgactaaatgtgacttttagtcacaacaaaaacttatttgtaactaaaacatacaatttagacacaaatcgtcactaatttaatttttagacacaataagtattgtgactaaaaatatatttaatcacggaccgttagtcacaataataatttataattactcaaaaattttttacttttaatacacaaattttgttgtgactaaacgtaaaaaaaattagtagtgcacaaataaattagacattgttttggtatgtcaattttttttttaaaaaaaaaatttaactaaaaataaataaaaaaaaaacgttagaataacaacaaaaaaattaagacctttaa

SEQ ID NO: 202884 - DNA, 700 bp, Cannabis indica
gacctagtggaggcagaacatatgcttgaccatttaagctagctataccccatttgagataggattgatcctatgaaaacatctacaggaataatatgcataacttttaaacaaggcacacccaccattaccatttcttcttaatattgccaatagattatataccactagaaaaacaggctcgcaacattacaacaacatactgatcctaccaaggttaacttaaacctagactcatcaagaaactaaataaactggcttcacagacagaatcacaaggacacttaccaaaattagcatagaatgagttaatgacatatcacaccaatggtttggaagtaaaagacgagaaaaaatgagagcaaatttaaaaagctaaagtgcagtaagatgaaggcaacgaacaaagtcgggaatacagtattacaaaaacgaaccaacacacttaaccaaggaattcaccgaaatagtatttacatatataaactagaaaccaacaaaaatgcacgagtagatcatcaattgtaaatataaatataaatgaaactgagtgcaaagcaggatttttcactaaccagtacttgatcaatccatcccagccacatgttgctactttactttgctccaacggatgccactcagctccaatgcatacaccctcatgacacttgagagttctgaacactttgcaagtcttcca

SEQ ID NO: 202885 - DNA, 1172 bp, Cannabis indica
aataccaagagagacagcgagaagaaatcacaatggtggtagtgaatgtgaaaacataatattttgtgatattgctatgtagacatacatgcagacttcctactgctttgaggattgacttcacatactcttggagaatacctacttctggttctggctgctgatgatgatatacaaagatcagacctttgtgaatgcttctctcacttgcatctcattcactctacagttagcaaatttcctgtgatacgaataaaaaaatgtcaatcacatttgcttctccatttttttgtctttttagctgggatgaaattttttactagttttgtcttggatgtatatgcaaaccaagaaggtgggtagtagtggtttttgattgtataaatttgcattctttatactatcttaggtgtctttttttttacatgatttcaccttgggagttttgttgtacagctctgccttttattgaactttatgaagggttgtgtaaattttgatgattaaaacattatttattgctacacataatgtgctagattttccgatcttcatcttaagctgtaaatactcttaatacagcctaaaaagcatgtaagaaaacatactaattccaatgtctaagcttctggtagaagggtcagcttgtttgcttaaccaaaatctctgcacctttattatctattaaaaaaacaaataagaaaattgattagaaaattgatttttttttttttgaaaaggtaacaaaagttgattgaatgtacagtgaatttcatttttaaatcctgggagaaccaaagtaaattttgtaatactaattccaatgtcagcttctggtagaagggtcagctagtttacttaaccaaaatctctgcacctttattatctattaaaaaacataagaaaaatgattgaatgtacaatgaaatttcagttttaaatcctggagaacaaggtgacttttgaatttaaattgatacatatcatcggctcctaagccagttgtatgcacatttacaatacaaaaagtgggcaagtgttaaaccagatcaagtacaatctgtctttcaacaagacagcattactgcccttgctcacttgttttttcttctgttcacttgtattctctgtaggagtgcccaccacatctgttgctccattggttgatttag

SEQ ID NO: 202886 - DNA, 1239 bp, Cannabis indica
agctttactgtactactaccctattccatgcagaaagcttaagacacctgttcaaaaacaaccccataaaaggagccttaatcagtgtgtgttagttaccaacataacaacaaaaaaaaatagcataaaatatttgaggtgatatatatacaaatataactaatttgttaagtcaaaactttgctttgaattcatctccaagaagacatggatacacgtgtgcatgcgtgcatatgtaaataaaatctaaattactgtttaattttttatttattttccacacaagtgacaagctttcaacatttagattgattgagcacggcaaagttaagatcttttcttaattatttgttttatattttacagtaaacaaaaaataaatatattaattaagaaaaaactctcagataataaatatatatatatatatatatggtattttgtagatttgggggactcccactatatataatacagccaaaatggtggttgaacaatgaggtttgcataaaagatagaatgagacaaatttggttgaataggatgatgatgattatgatgatgatgatgatgatgatgatcaaatggggtttgttcccatggctttaggaacattttactaaaagaaaaaagaacaaaactaaaaaggggttatgattatccaaaatttattcttttataatatacttttattccacccataatggggcactaactttatctttggtcttatattacattaggtggcatgaaactcttgttattcttattccataatatatattaaataggattgttcaaggtttttccatcctctattttcctatgtccaaggttagcttgtgtacctaaaattttcaagtcctcacaagtcaaatataaaagatttgaatcaatatataataatagatatttcaatgacaaaatcaagaagaacaaaaacaaaaagaaaagcccatttctttatgtctatagaaacatgcatagacctttttataaacaacaatacaaagatatgggcattgttataagtgataatatttaaaaaatgaataccccaagactctaattatccaatattcctacacataaacacaccagtataattatataatgttattattataacttcgacccaacccccaacacttgcctagaactctaagccaagaccaagattttattgattgtcacttcagttgttagggaaaattgacttggcgtgagaagagaatgaat

SEQ ID NO: 202887 - DNA, 1105 bp, Cannabis indica
ttgctttctttttttttgtttgtttgagaattgttgctgtagtttttaaaaattcagagaacattcatttttgattgttttctagttttttgtttttttttaatcccaaattttttaaaaagatttttaaaaatttaaccaaacactatcaaattagttttttttaaaaaaaaatattttcagtttttaaaattaaaaaatagtttttaatctacaaagtcaaacaagctccaagtctcccgcaagaccagagcagggcaagggaaaaaagaagcatgcaaatctgcaaaagaggtacaaacagagtcaatacacttcctcacatcagcagaacagtttcctttatactgtaaattactcttatattttgattaagttttctttaaaaatttaattatttttttattttttcagcaacataagaaattacaattacatggatgggcatgtcagaatattatccaccatctcatgatctaatttatgaaaagcctaagagatgtcttaattcttactaatggatcataaagttaaagaaatttttttgacaaagttagggagcaaaataattttattcattaataaaaattttaagttttactaattgataaattgttaaggaggcatatgacaacactaatatgagtacaattatataaagtgacaaagtttaaaagaaaaataattttttaatttttttgaaacttaattatattaactcatagactaagactcattaacgcctcaaccacataaaaatcattgctacattttcttcaatttattcttcttttatccttaatttatctcttaattagtttctaaaaatctcggtaaacatgtagattttatccattaatgtgaatcactttcatttcttttgttgatttttgtcctatcctttgaagttgtatccatattatttttgttgctaagttgtgccatgctccaagtgtttgagtccttcgcaatcttcctacttcatctagtgtgttgagtcatttgaaatgtgcaggcctaactacttaacagaattatcttaataaatgataatatcatggagaaagtctccccaaacactaatttgaaaaaaaaaaaaaaaaaa

SEQ ID NO: 202888 - DNA, 1027 bp, Cannabis indica
aaatgaattttttttaataattacgcattactcaattttcactgggtctataagaatcgaagcgtgtaactggaatttctcaatagcctcaaattacaccgttacagtttatatactcaaacaaacatgttaaattatataattacattcaattacacctgaattcaattataccatagctttccaaacacactattaatatcctattttaagttacttgttttcctgaatgctctattttcatcatgatgccattagagatcaaaattattaatgaaaatgcatgatgaaataatatcaggtggtgtttagtattttcataaagtatcatattattattagtgcaatttaatattaaattttacttattttactttaataataattataaataaaaatcgccacctatttatagggtactaccttatggtagttttaaacaacctaatagcaatacttaattttgtcattttttttaagcgaatattgcccccattatcttaacttatttatttattgaaaaaaataattttgagagtatttcaaaaaaaagataaattttctatttttccctgaaaatttatgggaaaaattcttatgtaatttattttgttacacttaaatttcaatgtgatttttctggtatgacaaaaattctaatgttgtttattttaaattttttggtagcaaattttttttttgtagtttattcgcaaattttttaatcattaggagttttttcataaatttaaaaaaatgtaatagaatttacttttatacgacatagaattaaaaaaataattaaagttaaaatatgggaaaaaaacaatacataaatttgataaaacttgtaataataagtttcgttgaaaaagttactggtccaagagaaaaatactggaaaagtcatcggtgccagaaaagtcactggaaaagttattgtcaccagaaaattcatagtccccaaaaaagtcaccggaaaagtcaccatcgtcgaaaaagttactagaaaagttaccaaaagtag

SEQ ID NO: 202889 - DNA, 555 bp, Cannabis indica
tatatagtaactgaattgaataaataggtttaaatttatttggtaaaaagttcataaaaaaaaaaaaatggatgagtgaaaagatgaattgtatatgaggtgtggaaatttaataaagttttcggtctcgattgaacttagtatctcgagttacgtggttcgagatgttagattcaatcgagccttacaattttacttgtgtaaatataagagaaaagaatggattattcttattattgtttgagtcgcagttatttaaataaaatatgataattttaaaaatatatacttttacaataatttttattttttctaattttactgagtggactctaaatacgtgcctaatgacttagccgaagaccaacattggttatgtgtatacttaacatttgtttgataagttgaaaaaaatatagaaaatgataaataattattagcatatttgtaacaatttatgataattagtcatattattttgatttttattaattacaagaaaaaatgtttaatctcatgtcaaagacaaagttaacaaatttttttttaaaaaaa

SEQ ID NO: 202890 - DNA, 1052 bp, Cannabis indica
aaactgctgaagtttgcagctggtttcatgttgatgatatcccttgggtgcttggtattaccccaatcacatcaagacccgattggtttacttggagtctaaccaatcatggtcaatacacagttgcaagtggctataaactaagattctcaaatccggacattgctgaatgctcgaacaaatcaacactgaaggcttggtggaagtttgtttggggatccaagctatctcctaaaatgaagaattttatttggagagtctttaatcaatggctcccaacgaaagtggaactcacaaagcgatgtatgactattaaccctatttgtgcttggtgtaagaaggaaaaggaagatatttgtcatgatctttgggtgtgtccaaagactaaaaggttatggaaattgttcggggcccattatctggtttgtgaaggttatcccacggctcctgatgtaattttttctcagtggaacaatctatccaagtctgaaatgctttactttattggcttttcatggctcctatggcatcgccgcaataagttcctcttccaacataaagttcaagaggaccatgcttgggtgaattgggcgcaggagtttctgcacgagcaatttggggcagtgatgcagagtcggcctgagcagaatattcgccccaaaagatcctggcaacctcctcctcctgaccatgtgttaattaacacaaatgcctctgtgattcaagacaaacctgggtgtggtttaagtgcaataataagagaccataacggtcaattaattgttgctgagtctcgtttcataccagggatggtttctattcaattggttgaggcttatgccattcgaatggggctgttattggctcaaaaatggtctctaacaaaggttcatgttgcagcggactgcttgggagttgtttcggcattacaagcttctcctaattctctttcggactggggaatgatgattcgggaaattcttgtgttgcggaaactattttactttcgtttcagttttcctttgttcctcgagattgtaatgtgtggctaa

SEQ ID NO: 202891 - DNA, 719 bp, Cannabis indica
tatgttgtttatgccttttccagagtttcaaccaatcacgtggttcgaattttaattgaaaatatgaatgcataattctaaccagtcatgtgactcgaattgtgaatttttaatcaacacatacacaacattctaaatttaatgaataataatagtaataatgaaatactattttcaatttaattaaaataaatttacccagctgggagaatttacagagggaccatcccagcctatatgggccacatgcttcacatcagttggaaaacctatctgcatttctggttctttttcattatctgaattaatttgaaatttcattaataattatatataacaatattaaaattcataacaaaacaataataatacaattaattatataaaataaatttacttaccaaatatttgagagatgtatcttaagcctttcaacaagcccttcatcttattgttgttgttagacatttttatatacatatgtatataaaaaaaacagtaatggaaaattaaaaaaacaataataataataataataataataataataatcaaaataatactctctcttagtgataactcattttgtaataataaatttataaattgttagagtattggttgatcatgaaaaattcagaatcttctgaattctcatgcactgaaatattttgtgtgcattaattcaccttttttttttcaattttattttatttttt

SEQ ID NO: 202892 - DNA, 794 bp, Cannabis indica
tttcttctgttcaagtcgtgtatggccaattctgaacattgtatttattatacattattatttttatagcacaactattattcaactaaaatgaaactgaaatgcaactaaatatcaaccagttgaataaatcatataactaaccatgttgtagaagtttctttgaagtgatttctcttttgctctgtcaaatgaaataccagtaaatttgataaacaccattatgaaatgataatgcaactataacacaacctaaaaaactagaagtacacttcgatgtacgtggctctagatgcattcgaattttcttatcttttcttgattataaattaatatattcactattggaaatctaaaatcaacgtcaatgcaactggataaacattagatctattattgatgcatttttttttctttcatttggattatacttaatttggattgattgggagctccagatctgtttgttagagatctacattatatgaatctaaaatttgatattaagtttgttttgttcgaagaaaactgaaattcagtgttgaatttcagtttcaaaccaattttcatgctctttctttcatcaatacgaatcaaactttgtttcgatcgaaacttttgtcggtgattgttctgtttcgtgcgggtgaagcttttgaagaggtggtatttttgtaattttttgtttgtgagctatataactgttgaaagggtcggcccactatattttaataatattgttattttttttgtatattcttgttttttcacttttaatatatattaaaaaaaaa

SEQ ID NO: 202893 - DNA, 1381 bp, Cannabis indica
tacgtccaattaatttcatcctatgtatactaaactaatataaataaggaagtagtatcttcgagttgtccaaacaataaataaataaaacacataatttagttaactaacaataaaataagaaaccaacatacatacatacatacatgtctaatactaagtttagccttttccatattaatttttcacttcaacttttttggcaagaactaacctcaaactcctcctaagcaacaccaacactccttcaccatcaccatcaccatcgccgccaccgctacctgagctaggcagcggaggcattggttgcagccacagcagggtcttggtcctgccaccaactgtgaccatctcagccttgaccacccttattaatccaacttccccactacccttagccgatcttatagcatttatcaactccaacatcagccctggcctgtcctcaacactcaatgtcacctttataaacacttgaccatctttttcttcttcttttaatcctccagagtattccaagctcaggctatcgtccccgctcgggacggcggtgccaccacaaacagaatccacttcctccactgccttcttcagctccctcactcgctttatcgtttctgccaggaccgaagccttgtccatcttatataaatgtaagactttgaaattagatgtgataatactacaaacaattatgtatgtataaatggattttctttttatgttaaaatatataagaaaatcttactttgatcaaatttgggagaatagtacgaagagtggcgtattgactattgatacgcattcttctaattctttcggcctcgctgtgtttgaaggcaacaatttgctttgaataactccttgatgtgttacgcccaccagcttgaaccatttgcattgtaatgaaagaaaatgtatactaataccaaagattaattaattggtaatgtaataatctgatatatcggtttatatgtatataaatggggaaaacaaatatcagggggttttatatatatggggaagctttcttttttttttttagaagagaagaaaatatttatgcatttcgagtccttgtcatatgattgtggtagtcaaggatatatatatatagtgtggtatatctgtgtttaaatgagaaagattatagtaagatcatattgtactctcttcatgattattgattgccataatgtatttatttgggctgatttttctcccttaaattataggatcctaatgatcttaaatgttgaaaaaaaaaaaagcttggatattctttatatgttgaaaatcttgtaatggatcttttgaattattaagctttttttagtatatcattaattgcaggatgatacaggacaacaaagtgacc

SEQ ID NO: 202894 - DNA, 1059 bp, Cannabis indica
aaaaaaaaaaatcacccaatagtaccagtataatttttgtatttgtgattctcacattgatctgtttcaattttctttaatttattttctaggtaccacatccctcgatcatttctcaaagaatcagaaaaccttttagtgttgcttgaagaagttggtggaaatcctcttcaaattacattggacataatttttgtcaccgatttgaatgaaaacaactcattcaatcacctccaccaatcatccttctaatgctgaaataatttgtttatcttacaattattttacaatgtatggaactatcactaaaaaatatgagttaatgtgaatataattcataaaaatatgaaataatatgtgagaaatgcacatatgttcgttttttcttaatgcagaaattatatagagataattccgttcaaaatactaatgtattttgtttattgtacttttatatttattattgtacgattaaaaaatattaaaatatcacaagaatagtatgatcatttgtaatgtatgacattctgagagagtattttataaattttggttaatttttttgagcatgataataatatgagactaatatttttagctaaataatcataaattacaaattacatttcattaaaaaaacaaatacaaatttagtttaataatactgaaacggtacaacttactcatactcttccggtgacaggaataaaaactaaacaaattttctcaaaactcacaaagcgtttccttttttcactttgtgtgatgtatctattccacactgatgaacttcaaagtttcatcggcagatcgcttctactgcaagccttttgctaacaccaggacacgtactagtgctgaaattctcttcactcaattcgatagcgcagttgttcttattccggcagaactgcatttcagttaaatatatcatgaagttgcaaaagtgataataataataataataataataataataataataataataataataagcagcaacagtaagagagaaataaaaatagtgcagatacatatattgaagtgtatgcaagt

SEQ ID NO: 202895 - DNA, 890 bp, Cannabis indica
tttatatttttttgtattatttatttatgtcataaaaaaaataaattttattatatttttctatatttatgaataaggcgaatactaatttagtgtaaataaaactatcatgataatcaattaaattttaacatcttagtctattaaatgtattttatatatgcatttaagtctaataacaaacacatattgataggattttttttttttagtaatggaaaggatgttatatgtgtaattgagtttaataaaataaaaaatactgtcaacaatttgttaaaaaaaataagaacattaaaaacaaagctattgtaaagaagcaataaattgaaaaacattgacatgcttgcgaaagaattgcaatattattagcctattttgataaatttcaaaatattgctttacaacaacacttttttttttgctgaattattttacagaaatactttttttttttggcagaagtgttttacaacaatacttgatatgtatttcaaacaaaaaaaaaggatgacatgtgtgaagaagatccgagtgttatggttggtgaaacaaagggcattaaggtgatgagagtgaaatgtataaacagccctaattctcgtcatgtaattattattgatttggcaatcaatatacatacgagcattgaatccgtaacaatattgaaggcaggtacagacagataaaagttttaaaatatttgaaaacaaatctttaatgcccatctttaggaattgaggttgcgagtggtgaatcaaaaccatatcaacctggccatagaggttttggtggtacatgaggtgtaatacaaaaacaatgtatatataaaaattcttctaagaagattcaaaaccatttcatataattcccaacaaaaaaaaaaaaaa

SEQ ID NO: 202896 - DNA, 988 bp, Cannabis indica
atataattagtataggtgtggataaaggttttacaatttggacaattacataatagcatattattgcttaatgtttatgaaacagcgtatgattgaccgtacctgacaattagaataaaatttcttagtgaagatttctgacaggttataaagatattcacacagaacgtttggcaagagattggtgcccgcttcttcaacaacctgtaaatttagacagcaattatgctcgctactcttgcaaccaaacatatagatcagagggcaacaatcaaattcaccaatatggatgcacttacctcggaaaattgtagcaaatgaaggcccaattcacgctcaccagcatgatccaaaacaatcaccccagcctgttaaaaacaagtagttaaagtattaatataataaaacctttttccacagaaccagtacagttacaagaatttgtccagtgtcaagtgacttcaattaatatttatttacgaaaaataatgcagacgaagaaagattgtaaaatataaggtttagcaatgacaattaccaaagtagaaataacttactttcttcaactcgtctatgtctttgccagacttcctaatgattgaacagatcctagcatgagcatagagcaagtagacagcagtattgccctgctcagacatttttaggaagacaaagaaaaaatgccatcagcaactagtgttaatgcattgtgcttcagaaaacaaaaaaagtaactatcaagtggaaaacatatacgtccattttcactaatgattaacaaatttaattagtattctttcttcaattcaatattgacaaaagaaaactacaacagaagtcaccacaccttatcacttaacatctgatcaaaatcaaatgtataattggttagcctgttattcttcaggtcagcgtacctgccaagtacagccacattaaatgagaagagtttatgaccaaacattttgaataataatagaattaatct

SEQ ID NO: 202897 - DNA, 874 bp, Cannabis indica
cttttgctattttaataacgtttgaagggaacgggccactgaaataggcccaccaaaaatattctgcacttccttctttgattaacctgccattttttcttttcatttctcgttcaacatatttcaactctccctcttctctcaaacttcaaaaattatttcctatcacatagctatttgtttgagcttaaaaaaaaatacaactataatctatattattttttaaagtattattttttttgctgttttaaataaataactattaagttacttatgatactaattatatactaattagttactaatctacatacattttatttaagttaacaagtttatttttaaaatttatttgattggactacattataggacaactaattagttcttagaataattttacagttactaaaaatgtatcatataatattaaagaacaatagtataacttttataataataatgagtattttagatatttacaaattccactagtaagttatgtgagttattttacttaattgtaatgtattaattttttaaataagtttaaaggcaacaaaaatattattaaaaaaaaataaaaaagtttcttaaataacaaaataacataatataatctaaaaataaatacataattttaaagtaactaattgaaagaggtgaccaaaatgtttatgaaattatttttatcttagagttgatctttttatgaaaaagtaacttattgatatctaatgtgtatatttattttttttaaaactttatagtattgggatgcctcatttttaggttatatttgagatgaagttgctgctaattaagttttttcttaggcattatggattttagtggatgaaattttaatatttag

SEQ ID NO: 202898 - DNA, 981 bp, Cannabis indica
gacccgtttagtcgcaagcattctatgaattaagaacctcgagagattcatgattttttatcaaaccccgagaggttcatacatgaatgcctgatacacgacccgtttagtcgcaggcattccatgaattaagaaccctgagaggttcatacatgaatgtcgaatacgcgacccttttggttgtagacattcaatgaattaagaaccccgagaggttcatacatgaatgcccaatacgcgacccgtttagtcacaggcattctatgaattaagaaccccgagaggttgaaacatgaatgctcgatacgcgactcgtttagtcataggcattccatgattaagaaccccaagaggttcatgctttatatcgaaccccaaggttcatacaataaaacaaaccctgagaggtttgtgcatttattcgaaccccgcaaggttcatacatcattgaaaacgctgagaagttcatgcatcagttagaacctcgcaaggttcataagacccctgactggttcatgcaccaatgaaaactctgtgaggtccatgcatcaatatgaaccacgagcagttcacacatccaaaagaatctcgcgaggttcacatttttattgtgcaattgtcttataagaagcatgcgagtttagataatcgataaaaaatatgatgcccaaggcatgatgataatcaacaaacgcgggcttggactattttaagttctccagcacagagcgagcaatactaaagaactaagggcatgtgttatcggcataaatttaccctccccgcgagaatgacttgtctatagagagctcgcgttattaaaggtggctcgcaatattatagtactcgcagtaccaaaagaaaggatctcgcaatattaactgaaagagacctcgctagattgagaaaggcacacctcgcatatttaataaagtcgcagtatcaacaggagaaggtacgaacacgcaccaatcaacagaa

SEQ ID NO: 202899 - DNA, 509 bp, Cannabis indica
tttttttttaatttttttccatagaataacctttctctgatgaaaagttgcacacattgtaaataaacctataaaatgtgtattttcctcgtacaaaactcatgacagggttttggtaattaaataaacattatgtttagtgtgatttattaaaaaaaaaaaatgtgtgtgtttgtcccacattgttcatgtatgagtaatgtgtggtgtttatgttacctagtagctaccaagccttaattgataggattttgataattaaataaagaatcatgtgtacgtgtgtttgtccccttcttgtgtgagtatactctatgataagattttagtaattagataaatactgtattcagtgtcatttaagaaaaaaaacacctatattactattacttgaattgtccctggtctctgacattaaattattgagttgtaatcttaattcacaaattaaagacgacattgatatgatttaataaataagttttgatttattaatttttttatttttt

SEQ ID NO: 202900 - DNA, 580 bp, Cannabis indica
aatattttccacgtgatcatttagttagctctaacattgcatgcaatttaccctaatagtgagatttgagcaaataccttaagcgggtcatgggcatgtccatacccaccacttagcctataaataccccacaattctcatacaaaaggggcatcagaatccacacagctaaaactttgccaatattactctaggtcgtcttcttcttcacgaaaaacttagagtaaagagttagagtttcttgcaaaaatatagtaaacatatcaataccactcttagaggttaatagtctggctcgtggactaaaatttattaacactcgaaccacgtaaaaatcttcatctctttatttctgcaagttattatttctttagctcctaaatattagtttcctgaaaatcttagtaaataacatcaaatcagatccaatcacaattagacatctaatattttgcgatctgttgtaatttgatcagtcagttatcattagattagattgattatgtacacttctacactcaagggcagaggcaagtagtgttgtaaatacaggctggactttttaacacaacacgaaatt

SEQ ID NO: 202901 - DNA, 1551 bp, Cannabis indica
cttaaacagtttcagattgtccattcattattgagtatttagtgggtagtggactcctcatatacgagtaaaatcttaatatgtaatcatgcaatgcaccagaatggatgaaaggacacagctcattgttcttaatatcacattacaaacaattggaaaataacaggagttccttttcatttttcaattaacaggctatggacctctttctttagtacattagaaacagaagagcattcatctttaagctaaatgatcgaacacttacaataatacggaactcccggtgcacataccatatttcttttaacccatggcatacttctgggtccagctcctagcagtcgtctcgtacttgctcctgtctgtcttgtacatgtgagcaatctcaggcaccagtggatcatcaggattcgggtctgttagcagcgagcagatcgaaagcagcacctgaacattaaaaaaagataatcacagatcgttaactctctacagcataaacagatcaatctgaaggagttatttatttatttcaaaatgcagataagaaactaaagtagttcatcgaaagaatgacttgagaggaaacatcaaaattatgatatttagtggtctaagtaacaaggtttaatgatacttggcaatcaaccagtcaccattctctccaaatcagacaaatttagaccagcggagaaattctataagacaggcagaatggccatcttctaaacctttatagatatataatatagagagacagagagagaaggccctgtattgattatatagtggttaaatagttgtaggtaaaagataatgcacctgtattccacacaaaaaacggtttgacttttgttctagattggaaattttaggtttataagacaaaaaccttcgagatggttagagctgggctccactgctccttcaagatgtcaaggcaaatgctaccattgctgtttatattcgggtggaatacctttgttctaaatgccacctgcagaagaccatcaatgtcagagagagagagagagtttaaccagaataacaattttaatgaaatagttcagactagcttagcatgctggaaaatgacccacaaaaactttaacctcaataatatactctggagataggtattaggtattgaatgaatttgataactagtcaaataagtgtgcaagggcaatagaatgaagttaaaagcaatcatgcaaacacaaaatagaccagatataataatggccacatgcaaacacaaaatagaccagatataataatggccactgtcagttgcacctccactaaggtgatactgataagccccaggtcccactcctataagttaatctccacaatatagattattcttggaacaaatataccacctgagcgagtgcgagattgcagtattccaataaagaaatgtgatcacataacttatgcacaagaatatgaacaaagatatgtaatgaaaagtaacccaagaaacatttcaaacttagaatacaaatgaaaattcaatgttgcaagatattaagaacttactga

SEQ ID NO: 202902 - DNA, 633 bp, Cannabis indica
aactctaactgtctggtctaacaatattgaattttctgctttgtttctaacgaaaattgactaaagttgaaaaaaaaatgaatttttgatatcaaaacatcaaaaatttatataataaatcaaattcagtctctcatatcaatggtcatgaggatgagaaatcttaacccttcatcaaagacttgacatcatttaatgttctcatattggctcataagaattattctccatatatattcttaattttatattattatttatagtctaaatattaggacatcatttcttataattaagaggcttatttcctcacttcattaattctgatttttagagcttctctttttagaatttaagttctaaggctctctttagactttatactttactcttggctcacaacactggtcttagtgttgtttgattaataaagctataaaaaaacactatcgttggccatttttaagtgccaacatgcatgtagtatgtagtgttatattagtaattattttattagttaatttttaaattaatcacaactgatgaataacaattcaagactacaacaaatgttactatcatagttacatattaaatattattttatgtataatttaaaaaaaaataaaaaaa

SEQ ID NO: 202903 - DNA, 645 bp, Cannabis indica
aaaaaaaaaaaaaaaaaaaaaaaaaaaaaaaaaaataaaactaagaccattacagtgaaatcaaagacagacaaattttataatttcagtactgaagttgacgaaaaatcttattgatcttatgatgatatatatatatatataaatataaatatacttacgtcgctgctagattgctacatatgatgaagtaagctatagatttggtgagtgaaaaaagagctggaatccatttaaaggataaaataaaaaagatctcgaatccaaaataatagcaagtgaccaacttagttcctggcggtttgaagttcagcaagggagtgctcttgttcgtaaccaaggtaacaatctgaaactagaatcagcttcattccctaaaataacaaaacaataaacgagtcaaccaccgtgactcaagtattatatatcagaaatggaaccaccttactagacatagtgagtacatttggaaacattaacgttttcccttttgcattttatacaaatggatatatagattttgttcatcaaaattatgtcacatagttcaatcgaaaaggatattttatagtgcaaaatttacaacatttgattctaataaaagaaaaataattattggattatactcatgacctgagttcatgg

SEQ ID NO: 202904 - DNA, 832 bp, Cannabis indica
attttgaaggaaggttgataactgaataatctagtattgaggaagcctaaaaaatactgcttatatttttgttaaactcacacttaactaaattgtggaccacagaattaaaaaatttgaaattttaaaaaattacatacatcatatgtatgtatgtatttctcccttaattttattttattttttcaaagagaaagatgagatcacactctgtgcagtctgtgctgagtcagaaaatgaatgagataattaaggagtcatttattatttattatatcacaacacagcagcacaaaggtccacagtccacaccacacacctcccaacccaacccaaccccctccctcatcactctctgactcactcactgatttattctgccactcaaaccttatcatacaagcaaccaatacacactcaaaataaaccaaagggtatttcctactttcatgcttagtaaaaaaaaatatatatgtactttcatgtttttaattccaaattgaagattgcccaactccttcacctcaaaaaaatttgaatgaatgcccatgtttttgtcactataaagttctctagggctactttaccatttttatacatctttcctctatgatctttcactcatgatccataacaaaaattctataccttcagtacaaacaaggatttaaatatataaaaataaataaataaatgactcttcatcaaaatttacttttgtactttaccaaatagtgaaatataaaaaataagtattataacaataataatttacattatagtttttttatcattgctccataaaaaaaatatatatagttatggtaattta

SEQ ID NO: 202905 - DNA, 727 bp, Cannabis indica
agagtttgggtgtttgttctttgctgctatttatttcgttaggaagaagatgaagaaaatgaagctgataaggtttttatataatcctatcccgtcagttattacgaaataatcgacgacatagggacacgtgtcaattatcgtgtgtaccctatgccatcgattatttcctaataaccgatgtgatagggttattaaaccaccctcaaaaataaaaatcatccaaccgactctaaatggtatagtccaattctatacctacgtttttttttttataaataactgcctctaaatatcaattttcaataggtgagtatttatacaccctttatcttcccttactataaaacttgcagaaaaaatagcctctataatgttgttttgtagtagtgactccagttctagaacaccactaaatcctctttattgattgaggaagaacaatgtacaatacagttgagaccgattctctgttagattttctcaaagtgtttatctctcacacttttacccaaaaatcttcttcatctacagagaaaattcctcatacaaaactcaaatccaatctctcacttttctctgtacctctcaatctttctctctcgcgatcacctctcaaaactcatcagaactccttgtccttcttcgtcctctaaaaaatagtaagtgtgggtggtatttataggtgcgggatatgaatcctaaggtcagtggttgcaagtgctaa

SEQ ID NO: 202906 - DNA, 863 bp, Cannabis indica
tcactcttccttatcacaactaatggtccataataaattaataattccatttcaatcagagaccaattaattaaggttaatacttatttggatcatatatactttgtaaaaggtaccaagttgactttttgttctataaaatgataaacttgagctaattttttgcaattttttttttttaatataaaccaacttgaaaataactttcaacacgaacaaatacagaaaatatacataattttgttataacaactctagataagattattattaacttttttttttgataaaagaatcagttcaaggtactatattgtattattttagaaaatacatagtttaatttattatttaacaaaataaattgtccaatcaataactttgataatacacagagtttaaaataatatttatatattaattaagtaacccattaatttggcttaaaacaaaagttaattaagccatttaagaatttatatatttatttttcatcaagaaaacactagaatgttaaggtggtccaattaattatcagtgtatcatgacatcattcacatgtgacaagaaaaatatgatcagatgtagggactaatgtgtgtgaataacatggatagttaatgagtcaaaacatgcattattgtcttagtggacatcaaattggtaaataattttttcataattttatgtttttaaaaataaaataattaaaaaaatttgtatgttcaatcaaggtaatttcacttttctttcaaaaaaaaatgtgaaattactaaattatagtttataattactcaattaacatttaatttgttgagtttgcaacaatcttgtatgtgaaataaacatgattaatttgttat

SEQ ID NO: 202907 - DNA, 1749 bp, Cannabis indica
atagctataacgtacatgaatatgaaaaaaattagactaaaaaatttttctagatgccgaaacaagtcaagggtgtatcagtacattccttttaagagggtgtattgtagaatcgccctattaaatatatagtgcatgcatatataaccttttaagtttatttgaagttttacctcttcattaataaaattgttccttttttttaacaaataaaattgtccttattccatgcatataatgagaaatttaaatgtgtgtaatgtacttgttggaataaaaattggttttttttttagttggaaaaagataaaaatggtttgactcacggataatataatattatgtggggtttgtaacattttttttaaatcaattttttatttttaaaattagaaaagtaaataattttcaaaaaggatgtatttttaaaacattaaataccaaatgaaataaagtgtttgttaatttattacatttctaaaagtgacacttcttacattattaattaattaataacaaatataggtgattatgaaccttagatatcaaatatcttgggaaaataataacttttttttcaatattttgatataataatatttacataatggtgttcctttcatacaagcatttgatgtatattgacacaatttgtagcctaatacatttaatgtaataagtttttagtacataaatatcatggcccggcacagctcctacagtcaataatttttacttctctgagtagtgaataacaacaacaaataatataaatataatcaatcatcatgtatatcacaaacacaaactatatctatatatatatatatatatatcatgtatagtgtatatatccatattatccaagagccaagagtgtgtctaggttcattgcatgtgccacatcccccaaatagtttgacacgtcaaaaaaatacatacatgagtgacttatatattttctattatttttgtttgatgaacaaaatggaattacgttgtaaagattatttctctacccttttaatattttgtaattttcagaattatatatttttaccatttattaatggacatttgtctgaaaaaagtactaaaaaaaatattattctttatatttttttttcttattttattataaagtaagaaaattgaattatttaatatatatttaatagcaatataatattattttaataatttatagatgtgtttattatcagaatattttagaataaaaaataataaaataaaatatatattatatttttaagtgatatagaaatttttgagactcttatagaatatcatcattggcgatattcttatatacttcatgctttaattgaattatctcgatatgcactttgagagtttctattcaaataagggtagtcccgccacaaggtaacctctcaaagagtactcaaacataatctctctcattaagattcaaactcataaaaaaaaaaaaatagattataataacgtttaaattaaaaaaaaatactaataactaaactatcaccaccacacacaacacgtggtatataataataataattattattattattcatgatgcatcaaattcttatatattattagaaaaaaattgtattataataataaaaaaagattattataaggactatcaacatcatcccaataataaaatttggcccataattagtttgatggtggaatttcttattaagggcattttcttttcttcgattattcttattc

SEQ ID NO: 202908 - DNA, 693 bp, Cannabis indica
atatgctagtggaactcttggttggtggagtttggaaagaaataacaaggttgggtcaacaatttaaattttttatacggattatgtcatatagataggttaacttgctttattgtttctttttgtagtctaatatgaatctggcttatgcttactccctagctaagtaagcaactctcaaaaccagcatgttcaccaatgatctgaagaaggccttggaggaggccaaaggtgatgctgaccagaagagcattcgacttagtgaaatgaacaagcaactcattgttgtggataaaatgatcaaagtcttaaagcagcgaattgaggatatgtcgtccactactaagcaagaggaggacctggagtaggagtccaaaagagtacaggagctcactgatgtgatggaaggactctaaaaacttcttcaaaaccaggaggctaagattaaggagttgaccaaggctcttaagcaaaaagatgaatcctctttgaaggagaatattgctcttgaggaagcattggttgctgagcgggaggcacatactaaagatgttgagtatcatgaagaaatcattgcagaactgttttatgaattctagaaatctaacctcgaggctaactttggctatcttgaagatgacatttgtgaagacatgctcgagtattgcgagatgaggaaagctgaggatgagg

SEQ ID NO: 202909 - DNA, 652 bp, Cannabis indica
aagttgttaaaaaattttctccaactattaaagatattggatttatagatttctggccaattccgttttattttactaacgcaacaattgttcatgcactaaatctcgttcctccgaactttgacatatacaaaattatgctccttgatttttttatttacgctagacgatctgttggtaaatttttttagttatttacttgacatgcatgtactaaattatacccccaaatattttaagttgttaaaaaaatttctcaaactattcaaaattggatttatagacttctggccaatgtcgttctaacgtgacgattgctcatgcactaaatctcatttcccacccccaaattttgacatatacaaaattatgcctcttgatttttcattcacgctagacgatctgttggtaaaattggacaaaaaaattttaaattcaacaatttcagttatagtttgggagaaattttaaacggctcaacaaatttaaagaacatgattttgtacttatgataatttaaaggaaaaaatcttaattattccttataatacactatgatgcaattaaccacatcacataaatatataatatggtaaattaacaagaagaataaattaattttcaaactcaaacttgatctatatatccaatt

SEQ ID NO: 202910 - DNA, 932 bp, Cannabis indica
aaaaaaaaattatgaaaaatattcaataaaaagctgataaatatgataaccagttactttttacatgataaattgtacaaattcaaaacttaagaattttaatagaaatataagccatagaaaaattttattttaaaagcattatatttctttactcaccctataaaaagtcataaaatctataattaattaattttctataaaataaataaagaaagaaattatctagaaaattaacaagaatatgtgtaccttaagttcaacaaaatgaacccaaaaacgaattattgctctttcataagggtctttagggagcaagctagggctttgaggccatgtctcttcgatgtactcgataatcaccatggactcgcatatgggttttccgccatgaacaagcactggaatcttcttatgaactggattgtattgtaagagtaactcactcttgttgggaagatcttcagctatgaattcatagggtaccttctttaaattaagagcccataaaaccctagtactgaaaggactagcccaatgtccatgtaacttcaccacatcataatcattaccacccatgatatgatctttaatttgcacaaaaactagctataatgaactcaagtttatgtaaactatatgtagctataataattcacccaagactataaattatttatatttatgtatacatttgttttggtcattaatttgattaagaaataaatgatgtttccattaaaaatatatttatatgtgagtttgaattcaaaggttttttattgttaatacattatagtagtacattttttcattatttttattatttctatgataggtagttttatttaatatatagaagtacacatgttagcttaaattaaaaactaatacaaccaaatgtgcacatgaacatgataatcaaccattaa

SEQ ID NO: 202911 - DNA, 1131 bp, Cannabis indica
aatatgaagaaaaacttatctataatattcactatcttccaataatctttaatgtctccaaaaatctacacacttaaaaaataaataacacaaaaaaacataacacaacaaaaatacactaacaaactaagaaaatgtgagaacataatatgactctcctttgtgtacaaaataaaataaaataaaataaaatatggtgaaaaatataattttgaaattttttttgttaagaattaatattataagaaaaataaaacagatatgatatcaaaattaagattatgagtaaactaaaatgagtaaaaattaataaaatatttcttatactatttaaataatagaattttaaaaagaaatcattacaaaaataatgtatataaataatattttattttagaaaaagaaattatttaatttaaagaatttgaaaaataattatattaggcttatttaaaataaaattacgaaggcatttatttaagtaataataataataaaaaaaagcaattacaaaataatatgcggaaacaccaatggaatccgaaccgaaccgatgcaaccacttcagccaggacgacaccatcggaaccagaatcgattccgttcattcagtcggagaacaagaaacccacaacaacatctcctctttccgattcccattcccattccactggccaccacaaatcaacaactatatcgtaactcatctacagaaatcccatgacccccgatccgaaccaacccaacgaatctcaaatcctatcggcgttgtcgtcacggagaacgaggacatatgctttacgtgggagcaagaagtaatgatcctgaaaaccaaaaagaggagcccattacacaattccagttcaagatcacctaccgcaccatggtcaccatcgcctagtctacggccacgtctcacacaaagacggcgactacacgcccgacggaaacatgtcggacgtcgtctaaagcccaacatcagaaccctcgtcacgaccattagatctctcacccattttgtcaactattcgagtcaaacctcgctcaaatatgtattttctgataaactataaaatttgtaaaaaaatctgtaacaactattattcctcatctccttctttctttctaatt

SEQ ID NO: 202912 - DNA, 909 bp, Cannabis indica
aagtctccttactctctgccttgtgctgctccaacatttctgcatattttcctaagttacctgtagagaatgcatcaaagttcttcttcatatcttcgaatagagcgttgatttcttcgttcttcattgcaaggaagaacaatgaaagcaccaattgataggaaagggagtcctcttcgagacaggacaagtctccaagctaggactggctaatacatttcatgagaaaaaagaagaatacatgagaatttttttttatatataattcaaaaaccagtagaaacaaaattaaaaaaaaataactgaatttagctgatcttcagccatacttcagtgcgctccatcattacgaaatcctggagccatctcggcttcatacgaactcagctcacccgctcaggaccctctcgaacgactcctgggatagcactccttcgttggttgaagagcttggttggtttgaacttttctcctaggctgtattttcaatgatattctttatgctttatttctaaactccaatatcaatagttattgggctttctagttaggcctcactaacattgacgtgttaaatttttttaaatttcttaaaattttgcaaaatatattaactaattataacgtgcataattatgagaaaaaatttgaataaaaaatcatttcaaataccaaaacgaattggaatacattgtacaatttttttaaatatttttaacaaattaattaactttagtttgatccagtacttattgatctataacttcttaagcttcacacaatactaaagtagtttgaattttaagtgacatcattttcgatcatacgagattactattcaatggtacaacaaatattaatacgcaaattaaaaatgaacacggtactttagccatcagaaaattttcc

SEQ ID NO: 202913 - DNA, 1016 bp, Cannabis indica
tttttttttaataaatcacactaaacataatatcaatccaattatgaaaactttattattggattaaggtttagtaactattaactgtaatataaacatcaaaaattactcacacatgagcattgtgggacaaacacacaaagtttctttttttcttgtaaatcgtatttatttaattacaaaaaaatatatatgattagctcaataaataattatctctatatttagttaagcactatttattaaagtaaaaaatatgtaaaaataaaatatataattttttattttaactcatctgttaggagttatttagagaatgacttggcagagaaagaaaaatataagacaataccatatacattaatgaatctctcgctcatccattttggcattaagaatcaagttgtcttttattgattgcacataatttcttgtgcataaataattaatacactattagattagattaatcgataaaatgaaaataaataaataaataaagtagctaattctgccctggaattccaaaccccaagtggttttctcacttaataagccaagtgggaaagctcgcacctttactttacccaaaacatgtaccttccatgtacttaggcttgaccaagtactatcaatacaatttaaattaaataatcactaccaaaacccactttttttggtctcattctcaaattatgtgtcatggaatgatgatcaacttgcgcaaattgttgtaacccgttcatgattataatagataaggggaaaaagctgaaatagccaaactaattgtttattttcttaaatcagataatatttcctgaaaataaggtaatttgatagtattttctgaaatcaatttaattctagtaatatacatattagtgtgccatgtgtgcatgaatcttactgtcatagggtcatatcaaatgtaaataaaatccattagtgataagctcaagcttaacaatttccgattttgtaggggaaatttgattaattaagcatttattaga

SEQ ID NO: 202914 - DNA, 1301 bp, Cannabis indica
aaggaaggtacgttgcggggtgaggccatgcaaaacgaaggtacaatcgtgggtggtgaattgcatggtacggttggtacgaatttggttggcgcccccaatcctgcagaggtggtccctactgaaccccaagtaggacacttggcgatggtatttaaaagtgtgttgagccctacgaggatgaatgagtcaaagggcccaaggaaaaatcatagggctaaggggcggaaggaactaatgggcctcctaaggccagatgggccgagttttagtgaactgcgagatgggccatcagtgggaaagaaacgaagattgggccagggagataatgaatttattaatgggaatgatgaggccacaattgggccggtctgtctgaattgtaacaagaagacatgcattcagacgattaaggaaaacgcggaggtttctatctcctcttcttctcttattgtttctgaattctctggggaggtgacggttaatgaaattgaagagggagatgctgtcgaagatgataacttacaggatttttttcaggccgaggaggcgggccaagacatgccccccaatcctccatgttaatcctttcctggaactgccgaggtcttggcaaacctcaggcagttaaatcgctacgggctctgatccgtagtgtaaacccggatgttgtgttcttgatggaaactaaaagaagtgagatcgatatggatgggatttggcgtaggctgggttttgctaatggggtagctcattcttctaatggagcggctggtggagtggctctgttttggagagcgggctgggatgtgcaggtcattgaggtctgttttgacaaaattgtggttaggtttggggaggatagaaattttaaagcttgggtgggctgttttctgtacgcccctccaagaaggagtgagagaatcccgttttgggaggctatgacggaggtcgtcagggggtttggggatccttggattgcaatgggcgatatgaatgctgttctttgtcagcaggagaagattgggggaaggccggtttgtgagagtgaaggtcgaggtctgcgtaatttcttattcgacagtggggctgttgatttggaaggtatgggggctcttttcacgtggactaacggacatgattggaataatcttatccgggagaaactcgatcgtgttgtctgctccacggactggttatctaacttcccgaaggctggaacgaagaatctttcgattcgctactctgatcatgcagcaattgttcttgacacgttactggattcggccccgttcaaggcc

SEQ ID NO: 202915 - DNA, 1187 bp, Cannabis indica
agtgatgataatgttatatcaataactgatgattgttatttaatatattgtgaatatgattgtttattttaaatttaaaattatgttctctatgtatagtatgtctgcagcaggtggaagttcttaccaaaaaagaaaggggtaggaagtaaatataagggtgcaaatgttgaggaagcgatttttgaaggaaaggagctcaaactacatattacacttcctgaggagatggtcactccatgcgagaaaaatagaaaatactttaacaacatgtgtagacatccctatgaataagtttacatggaaaactgtttctaaagcttaaattaattcagcgcgggataaacttgaggtatttagtatattattcttaaacttataatttagtatattatttttaaatttatagttaatgcatcaattttaatgtgtaacttttttgcagacaatttgtgtgcccacgagataatcaggttttcgtgaaaaagtttgtgtgattaaaactatgcatactccaatactaatagcaaccccacaaccatcacctctcatccaaccaagttctaaacaaaaatcccaaccttttttcttccctcccaagccacaattggaagaaaaagttccaacgcggatggcccgaaccccataattctaaataagataacttaaaattggaaactaggaacaccaacaagaacaagcaagaccacaatccaattgctctcaaacattatcaagacccccctctaccattcatccaaataaaaaagtacttcataaaaaatatcatgaatcccacaatgatccttaaaactgtgaaatcaacgatacacttttaggaggcccccctccttctcttgattcgacaaaatgacattttaagtccctcataagataacaagaaagggacagcaacgaagctatatgacgaagcatctcccaagtatccttacatcaataagagtttaggttaccataactacctgtaaactaccaaagtgtcaaaatgcaatctatatgactctgagaatatcgaaaaagatcaacatttacctcagagtcccggagaaggataaggccccccactcttcccacaataatcccacatgaattccattaagaaattccaacttctcacgaacttgaccagcactgtgaagacacagtaacaactgtccatgacagtt

SEQ ID NO: 202916 - DNA, 560 bp, Cannabis indica
tgcggattggattgaattggattatgcgaattggatttgatcatatacttgcaaaaaaataaaaataaaaaaacttgttttttaacctttagggtgttttggttgtgactattcccaatacactttttttcttcattaactttctaaaacaatacaaaaattagcaaattcatagttaaccagcaatagtatgaaccttgcaacaacaatgaaacaactaacaagatcatcacatttgattttgtctaataataatatatgttataattagttttagctttaattttttaagtctctaaaattagttattatgtcaccatcattgtcctcaatttcacagattaattcggagaatatatagccatcttacctctctttctctcttttaaattgaatatggaggatcaaagtctaaaaaaatattcagaaacataacaaaaaaaataaaatacaaactaggtggttgactacacatagttattatttgatacatttcttggtctttctttttaattattgtattttgactacgcaattgtatacatgtttgcattgttttt

SEQ ID NO: 202917 - DNA, 2426 bp, Cannabis indica
gtcgaaagaattgcttcagaaagatctaacaaaatacactaagagatttcattgtgagagctttaagagaggaaacactgtattctttcttctttagttgattcaattcaaggggagtaggctattaccaaactaacgaggccgaaactctttaaaatcttgtgttctttagtactcattaattcttattttattttaattatattttctatcgcttactatttgactcattatcgctggctaagagcgaggttaacattttggtgttttcattgagagcaataatccaagtttgctattttctttaagtttaattagacacatagaatggtggaccaaactcgcagaggcatggtcgatcaggttaatccatttccagatcctacattgcagactcctgggaatgcaagtgtcccaccagtccccaatcttgagcaactaaacacacaaccacctacagtgggtcatggtgtgacatctgctctggcttggatcacacctggtgtgcaagagactggaaatacaagtttggccgccaacctgggtactcccagtattagaatcccttcagcaaacaatattcaaacgaccataggagatgacactaagattcagaacctccgcaatgctcttgggcttatgcaaggtcgtaccaattccttgcatcatgattaggaagagctccgtgctgtacagaaccttgcatttgaagagcaaaggttttagttcactgaatggagggacagagatatggaaatgttgaaggctcaacaaaccgccatcgttgaccgaacaagacaagccaccatattgatacgaagagcctaccaagttgctaaccagcaaccagcgtccagcatcccactgggcggtgcggaagaaattcctgcttggcctatcgacaaaactctgaacgatcagccatccaatccatggtcacaggttccacctgtgggccatgttgtaggcggccagaccttatttggaaattcatcaggaggtattatacttaataactctgcccagactagcagttctggccaacatatcggccaaccaaccagtccctgagacaacatggtgtttctatattcaacagactgggaacaactcatgacctcagggatgatctaaatagaaggaggggttaggacgaacaatatgttcaactgcccactcagctcggtatttgcatccaagaaccagctcaaagagaccttgacgtggcacagattcgccaagagggcgaacaagttcacccatctttgcaggcacagttggatgaattgaaaaatatgtttaaaggcccggccgacaaaaaattcaatgatctcgagttggattaagcacgtagattgtccttcattcttgagatcaatgttctagagttacctctcaagttcaaaatatttagctggaagatgtacacagggaaagaagatcccttatcacatctgaaatattttgaaatgcaaatggatttgcaaggggtacgaggagatgtgcgctgcagagtattccatgccacaccttcagaagccacacagcagtggtatttcaagttatcaccaagaaggttcaactcctggaaagccttctcctcagagtttcatgcactgttctcttcttctcgctaactcccaatgcatttagaagacctggttgaagtgaagcaaagaccaggagagcctctgtaggcctacatgagcagattcacgaaagaggctacgaaagtagcacggttaattgaagaggggaagctagccacaatactagggggcatcgagattctcagaatactatggaaatacatcaagaaaacttgtcctgtagactctttgacggatatcctcgaccgagtagatggtttcatcatacttgaagaagccattcaatgggtagatgtcgagcctagaccgggccaaccacaagctccctggacaagagcgtctgcccaaaaccgccagtaccctagtagctcaaatccgatcggcaaaggatctagcaacaatggcagacaaggcaatgggaaaaagagaaagttcgcaggcaaagccaaacagacccttagagaaaatccttccaagttcagtactttctctatcttgattaacgacttggagaccatctacatggcaactcagtcagtggtcccgtataaaaaacctgctcccatgaaaaagtacataaccaggcaagacatgtccgaattttgccattttcaaggagactatggccatgacactaacaagtgcaacaatctgaaatgagaaatagaattatttataagaaaaaataacctgcacgtgcaaaagtatgtcaaggccaacccaaatcaaagaccaacaaagacctgttcgtgtccccaccagtggacgggcatttgcaagttatcattcgggacccacatattgctagagatttgg

SEQ ID NO: 202918 - DNA, 1234 bp, Cannabis indica
gcactatatattattattattattattattattattattattattattattattatttcttgtttgtatatatcaagcaagaaccccaccacaattgccaccggcccccctcgtaattttcagatcatgacacatttttgtaccatcaaaggtgcaccattaattaatatatcctcaatatatattttttaataaatcaaagaattttattaataacaattgattaatataatagtctgcaattcagttagaattttctcgttgtagacatgattagaattagaattagaaaaatgaactaaataattaatcgcctaattctcagatcgtttaacaaaaaaatcaaaataaaatctgataaaaaagattgcaacatcacagttaaccttaagaatacttatattctgtttcatccactgctcaaagacacaacagtaaaaactattgcagcaggttcaacctcgtaatttgagcactcaactattgggtaaggtacgtaattgtactactaacaactcctttagtctcaaaaaacttgttattcccaaccactaacaatgatgtaatggtgagccattgaagagcaaagaagaaccaacaacaatacaaaatcacgtcacataaacaagactaaaacactcaaaattatattaaaaaacactcaaaactatatcatagagacaagactaaaacactcaaaagcatgccacagagacaagactaatcacattagcgaaaatcgaatgaaagtagtgaaatacaacccccactaaactgcacctaagcccaaaaaaagtcagagagcctagccgaagaaaaataacaacctttgataactatttaagaacgaaaaactctattttttgcttaaattagaatttttttattattaattttaacaactataaatgtaaaagtaaatgtttgaatttgagaaagtttaactagttacgtttttttttgctaataatatataattgctaattatccataatattcgtcggccttgcaattagaagataagttgactttagtactagctgttagctaagatgctatgttagtctccactaaaagaatttatgtctaattatccataatagacgccgaccttgcaattagaagaaaagttgactctagtactaactgttagctaagatgctatgttagttattggtagttaggattttgttatacttcctttctcttaactgtattcagttagactctttga

SEQ ID NO: 202919 - DNA, 2099 bp, Cannabis indica
aaaacgagtgttctcactcgtgcgttgttagtaagttagtgtgacttctaatattattaaggtcttttccagttaggaaatccgcccaagaaaataaggcaattattcgtggactgttaaggtgaaatcctacatacatgtgcgagcattacaaagtggtctactgcctactgtgaacattacaaagtgttctaagaaagaaacatgctatcattacaaaaatttcataaagaagatgtgattattcaaacaaaaaggtaaatccaccccaaaaaaaaaatgacctattttagtccatataaagacaaattcccattacccagaataccgtcttttattttcatgcagttttaatcaataagacccagaatgcatgtaattatccaaaattattttacaaaaaactgagaaatagagaaaacaacctttgaatctgaaagcctggttttgtttcctgaaaagaagtttgaatccaattccgagagtttgagcaacaaatgatccttggagaaatttctagaagtggagtaaaaatttgaaaaaatttcagagtaaaatgaaaatgagagggaaaaatgaaaccctcatttttcatacttggggcttttataggaattgcggtcccacattatgatcgtgacacatggcgttggaaaactaatagttacctcatcgaacgattgtcacgagacaagcctatagagacgccgaagggttttcatgtcacgacatcttggaaagattaacatcataattaccaattgccatttcataaacctcgagaaggtaatcaaatgtcacccatgatgtgactcaactcgactatccctcgagatagtttcgccgtgtgatagacaactattatcgcgaaactaggagcatgtgttatagtgtaaattttttcctagaaatacgagcacaatctcgtatatatttgacacgtggacccaatttccagttggaaaaatatgatgtgtcaataactgctccagtagagctatcctcacatgaccgaaacttgcgagaaggtgtgaccaagacaaggtctagttgcacattatgcgcagcatagtaaagtgcaagcagaatcaagagaagtcaccacgagtcgcccatatattagttatatgcgaggactaaatgattcttccctgcatcccacgtacatatcgcatctttacaagcatcttgttcgaatgactaatgtgtgcggcaattcatcttgaacccgtgagtttaatgttgtctatacatgaacactcaatatgtgactagtatagtcccatgtgttctatcttataaatgacctcgaggttttgtggtccaacgactttatatgcgagtaacacaagagaacccgcaagttaatatcttattgaagaaagtgaacaattaatatgcgacttctaaagttgcatacgttccgatattaactaagaacggtcgaaattgttctctcatttatcctataaatattttctattttaactaaatgtgattaatgttataattgatcaatatataatccaaatgaccacttgcttcttatataaatgagtgatccactttaaaataaaaaaaaattaaaaaacttttacaaaagtaaactaaggagactaaactctaactgaactattataattctctgcctctttattatttcattattatactttgagtattgtcacttttaagtgaaaactcagagttctgtaaatgagtgcttctttttttttttttgattgcaagtaaatgagtgctcttgttaacttgaatactcgtgatttttgcgcaatttttgatgttgtctatttttcacaaacaacagattccattgtccaacaatctcctcaatgataccggaagtcacactaagaaaggtgagaaaaaccccctcaattacgacaatatgcataactatatcatgttcattaaaattctgtttatgaatttaataaaatgtataatttttttaaagaaataaaacgcataaattaaatataaataaattattatatattacatgtaaaataaaatcctaaaatagaataatcaaacccacctcatcctttcgtgatgcattcgcaggtccagaacac

SEQ ID NO: 202920 - DNA, 591 bp, Cannabis indica
taatcttatacaaaccgattggtggtgacaaccaacaagggtgggccttagtaggagaaagagccaaggactctctattcggatgcaattctaaaaaaacaccacaccactaattagcacgttgaaaagtatctagaaagtccataacccaatagtgaccacttgatcaagagtaagagtagaattattatgaacaaacttgtttctcctaaacaagattctccacaaaataactaaaattaacttaagatgtgaaattgagagattatacaaaacttgcaacgcaaatcttttttacatgataataatttcttttgaataattaattacaatgtaataagtttaatattcaagaaacttaagagaaactgatatagtggatttatattttgggagtgtaaaatgagagtttataatatataaaacttacagatttgatctttgatttttttcttgaacttggtctcgacaaaagagatctcgtgatagtgaatattgtaatcttaatgtgttctttcttgcactttaatattttaagctctattaagtttaaaataattaagaataaataacactttagaagaataatca

SEQ ID NO: 202921 - DNA, 758 bp, Cannabis indica
aaataaaaccataaacaaaagtccacaccaaggtcggcagcaaagtgccaagaattaatttattattaatattttattatcttctttactgaaaaaataaataaaacttaaatgagtaaatgacaagcaaagcaaaggacacgtcagcaacccaggtgagggtggggtccagaaggacacgtgtcgaatttcgagaacctactgccttctactcggccaattaggaggtcgaaacagatcggatctactcgctttcctttcgtccacgaattttgatacactcttccttgtatcgatctcattgccacgtgtcgatcatttcgtgactcttttttatataacctaagaaaaatattaataattttttattattttttcaacaacaaaaaaaaaattattcttcagcgcagagagcttgttagagagagaaaaaagctcgaggaatctcgcagaaatctcggttcgatttcccgggttggattagggctaatctgtttcgttttccttttattttctttctggttttctcaggaatttctgctgtttatgagaatttgttaatattcaggtcagttcgtttcctttttattcatatttaatatttatttttttgagttgatatttaggtctggtttcttcagattccaatttcgtttacaaatgatgttgtttcgtaattattcttgttgttttggtttgtattctgtttggttgctgagaaaatgttgtaataaataggttaggattgatttttatta

SEQ ID NO: 202922 - DNA, 1641 bp, Cannabis indica
aaaaaaaaaaaaaaaaattccgcaaatgcatcagatacaaaataatggcttaaaagcaatggagatggcttaaagaaaggactgcattctttcttcctctgcgaggtgggtgaaagtaacttctgaagcattgcttttctattttgtctcaacgaaaataaataaacaaacaaccacatggtacctcattactgtaatcgaactgaacagtattgcttagagtacactcgtttccttaccaaaacaataaataaaaacacctactctagttttgtcacttagcattgttattaggcaatagtagtacctaatactttttgacatgtcgttttgcgattatttagcgatactccctaaaaattattatatgaggcgtgatacaccaatagcaatattaacacataatattagacaccactaatactttttagcatttctctttgcgactctttaatgttttcatctcacttgactggtcaagcatttccttctctacatggtctgatgtgaaattctaactatcagcactgctaccaaaaactaaaacaagccacattaaaaccggctcttctactaccaaaaactaaaacaaaccacattaaaaccagctcttctgctcatatgaaaaatctaaaggattaatactattttaaatcttatattttataaaaattatttatcggaccatctaatttgttaaataacaaatagatcatgtattttttaaatggtataaataagactttgaccttaattttcgataatctcatttttaatataaccaacttgaagataattaatacgaacagagtaaacgtaatcagttttgtcataacacctctaaatcggattatcattaaattttattttaacaaaaaatcagttcaagatactatgtagtattattttagaaaatgcaaagtccaatttgttatttatcaaaactattgatgtaaatacgggccagacttttagacacgagcccaaaaggcatgaaaaaaatacaagtttggatgcaatacggcacgatgttacaaattggcacgacacgacacgaaaagtatgccctcaaacatgacatgacagaagaagcacgaaagacactacacgtaaacacgaatagactaaccagaaaagcgcgacacacgacaaacttaaaaagcacgatacgacatattaaaaaaccttctaatttattaataatactaataagatattaatttaccaattataaataagttaaaataataataaaacttaaataaaatactgaatattataattctataattaaaattattaaaacatgaaaaaataaatttatatattaatttatttataaggtgtgatgtaaaactttgaatatttataagtaaatattcaaattttaatgatgtgaataattttttttatatgattatctgtaaaatattattcaaaagttatataaatataactaaagttttgaaatatacatataaattagtaattgtaaaaaaaaaatatatgaaaaataaaacatgaatttaagtccaaatatgaaaattggctagcctcttaaagaaatacaggtcgacagaatttatatttttttgtgacacaacacggcacgatcgaatttttgaaaagcataaataaata

SEQ ID NO: 202923 - DNA, 1600 bp, Cannabis indica
agacgtttgaaaatcacacatgaattatagttttatgatgatgctttgtctctaaaattaaatataactgaggaaaattatatggtgcacgacccacctaaaacgaatgtacatatgctaagtatttatatctatttttctagtttaatttttgtataattatgtatgttatagttagagaaatttacggtataaatactctatgtttttaattttatacactcaaataccacatttttttttaacggattaaataccacatgttcgtttccatccatttccattactaccattccgttaaatattgattgtacgtttattaaaatgacacatgtcatatttttattggtcaaactcatattattttttttaaaaaattaaatattattccaataagtaaaaaatatatattttaaaattataaaaactaaaaaatatgtttaattaatttttttattcttattaacacacttaatcaaaatttaaccacaaaatcttattttaagaacaatgttattttttcttcaaattaaaaaaaactttgtttattaaattcaaagattcaaattctattcaaaatcaatttacttaaaacttccaagaatttaaactacaaaaataatcagatccaaactaatattatacaataacaactaattagttaaaccaaattcaagaacactcataaaaatgtcaaatttattatattgacacataaaataatattaagcactattaatagcttttagcatttctctaaaataattgataaagtgaaacccataatactacttttggtgtttgaaaaatattattggagtggaaatggagcaatgagattagaggaattaattagcacactaattaatattaattaattaattaattaattaattaattaaattgagtttcattatcatcaccagctcatagcctgccttatatatttcgctcttattctccatcattaccacgtattaaaaaatcccttatacgactatactttatacatttttattaattattaattattattaaataccaaaagtaaaagcaaaaaatttgatacacaacatgatgatctagctagacctatatatatatgtactatatagtctatatatatacaatacaacaaagatcaaatttattgacataccaatattcttataaatatattaacttgttcttttaaaatttcattgtgtgataaatattaatacaagtcacacacaatagatttctgatgaagctcttcgaactccagttggtatcataggtatatatataattacatgtctatatatttatattagattttctacaaattcaaattaagtgttagtgtcataaatacgattaattgtctattaattatttaacttaattttcaggaaacatcatatgccttttcttctttttatcaccagtgtaagattatatatatattgatcataattttgattactattataaataattattaatctataatatttgttaatatttttgtaatatataaatatttatacagaccacatttgttcgaatatggaagaaaggggcggtggaagatactcggcgatgccataccttgcaa

SEQ ID NO: 202924 - DNA, 892 bp, Cannabis indica
tcagcttatgtttcctattctcctgaaattacagctaggtaaatacagtttgtgcaatctttcttgatgatagttcatattcttatcaaataaataattcctaacatctaaagctattgaaaggaaaagtggttaagtttctttccctgctataaaaattggagtcttttcaaaattttgcatgttgtacttggtcactatttggtctagtagttttagctttcatcttcctttttttatttcactcttaaaatttattgaagaggacctgaaaaattcctactgtttctggtcatggagtaatgtgagaagatgctcttgtttatgatttcagcttcggtgctggtttgattggttctttggtatatatgagaatgctgggaaatactattgattccatggcagatggagcaaggggtcttatcaagtacgtatacaactaaaccatcgttaatgttaaattcttactacaattacagtgctaccaagtttcttatgtaaattatagcttcaagcgaaggaactgacaacttttaataacatatttagtacaaatttgcaagaacttacataattttcttggcttgaaattttcttatattgtttgcttgactttggtaagttgtgacagagatggtatcttggactcttggtgtagttttttttattcatctcttcaactttaacgcatttatgaaatttctatttaatagagttaataaatggaagtaactttgcctaattagtatccgaaacgaaagttctatggttatgattcctggaattcgattgcaggggagcaataggacagccaaggctattggttcctgttgtattggtcatgctcttcaaccggtggaacgggttagtatcttcgatttacatgcttttc

SEQ ID NO: 202925 - DNA, 1390 bp, Cannabis indica
aattttgtattgaaatcataaaacaattaattagctgtcaaacaaataaaaaaaattaaatacgaattaaatagatacacataaaattgaggaagaattaaatcacattaaaattagaataaaatttcaaacaatctctattaacagaccaataaaaatctagttactcataatcattgaaaacatctgataacatttaagtaagaacataagaaaaatagaggaaaaaaaaaagaattcttcaaaaaatattaaaagtctccagagccgctttttgcttctaattttcgtactctcccaaaatcgcatgctgaaaagtgttgaaaaagagcctttatataggcaaaaaaagataaaaaaaaaccttaattttttatattttaaaataggcaggccgcgacactaccttgtagtgtcgtgtcctgcttgaagctcgaattttggtagcagacttcctggtgcgacgactgatgatgttttggtcataactctttcaatattttttgaaattgaacgattcaagatgttttggaaagttgaaagaaagatctagaacttttattcataatattttctctcaaaagtaaacacatcatagtcgaaaatgcgcttgaaacttcatactttatttttgatcgtaaatagaacgtgttgagtatccaaaacttaaaatttttaacaatttatatcctagaattctaaatttcatgataattcatcatattcatcttatttaacatgtttcttctcattttcaattcacattatgaattttactatttaaacctgaaacaaatagaaaacaatcataattctacacaaaatgcatctaataaattgaaacacacttctaaaatattttataaaatacacctaaaactaccctatcacccccaaactatgaccatcgtattttgttctttgaagttttactaccaataacgtgtcccttttaatgataaaactttgaagagcaaaatataatagtggtcatactttgggagagaagattgttaattttttgattgaggtctaacaaaatttgacattaatgataaaagtagaaagagaatgtttaaattagtgataaagtttgagaaacaagacaccttaaaaaataataataatatgaatcatatatcggtgtgtatatatatatatcaagtagtaaaggtcatggaaattctaaaaaaaaaaaaaaggtacatggaatactttaatttgtggttattattggtgttttgtcaacttaggatattcatggctctatttgaccaattagtcctaaggctatatagctttgctttttgtgcctttgctttaccaagcatgaatgtctcttcgactatatttgtatatatattatgctttatttttcttctccatccta

SEQ ID NO: 202926 - DNA, 806 bp, Cannabis indica
attactatatatacttaaacataataatgcaatgaggaccttaagatgagtacgtaaaaataaaaaaaattcttgtcagaacccattcctaatggggttaaatgagaacgagattggaatgacatcaaatttaaaatacaaaatattatctttactaatgacttgtaaaaatataatcaaatgaagatgtatacccattccgatctgtggccgttgacatcattacgatgaactctgaaatctaaatgattgtaccaaataaaaagggatattggattgtagggtcttcggccaattcaaggtttccaatttatttaggcactatgtgtggcacttgatcgattaattctcatgaatttttagtgcaacaaagtgatcagcacggactgaaacacactgcccacaacacatgattgtttaatttgaccaaaatttcataaagattttatggctgtaataagttagatcggcagaggagagagctgacctaacacattatagtcattgcagtatataaacaaacaaatagagaattattgaaagataggctgtggccctggccagtagtggggggtagaccttggatatcatacactatttttaaataattaaataagatcctttttctcgagaagagaaaatcaacaaaattgtataattttaaaaaagaaaaacaaattctttactaacaataaattaagtagaacgacaaaaatgtgtagtctctccatgcctagctagtagctattaagatgtgacttgtcatggtaggtgtggaaaaatgattggagacaagtatcaaaaaa

SEQ ID NO: 202927 - DNA, 515 bp, Cannabis indica
atttaatttccataaacacattttactcaaaatttggtgaactcggtccgagccaaaatacataattataattatattgtactaacttgtcaaaaattacatgtaaaattataaaatgagcaaactacattataatatagtctcttagcacatagtatagtaaaattacaattttacccttaccaagttaaaattacaaaaatccccctatcacataaatgagaacttaaactctattattcacatagaataatagataattaattatatcataacataatcccatattaatacttaattaagttaattaggatttctaatctatttctcattttaggatattacaaaatttctcaaggaatattgctctagggcgataagatcgggaacacaaaatagaaattgaaagggttaatagtataagccatccaacatcgtaagggtcccagataaaaaaaccagagtcactataatactttcataaaccttgacagatctcttaagcgtaatgataa

SEQ ID NO: 202928 - DNA, 1100 bp, Cannabis indica
caatcctaatgaacaagtcataaacgaatggatttaaaacaagaaaaaaaaaattgaattctgtgttctaaattctaatacattttttcttctgaattgaatttttgtaaagatttagagagagaaagaattttcttttttagagagagaaaaataaggagaagcaaggacgtgtatgaatatgatgagaggcttaaactcttttatatcttttcctaatttttcttttttgctttttaattttaaatttactttttttttaaacaaaataatattgacaaaacaaactcattctcatcagaggtgaatcggctcgtcggccgtagtgacggccacggcggcgatgattttttcttatgtataagttttgattgaatttgaaatagtttttttagtattagacaattcgagcgccttgtaaatggttaccgatatttaaatcaagatggaataatttattctattcaatctgcattattttatttatattattattttatattagttatttttaatattgatctatttaatatttattaaagagttttttttccacataactagcattttaacaacaaattaaataaattaaagataaaatatcaaattcaaagaaattatatataaagaaataattaattttattttagattatattatttatttttttataaataagaatataatatacatttaatctatcatattttgtgcggatgttagatttttcaatcaaattcgtacaagtatagattttcgcattttgtggattgaatggattgaattgaatcgtgcgaattgaattaaattagatattttattgacacctcgagtctcgtacttagttatgatatcttatgtacacatacaaattgatacattataagaaaaatgtaattttaattaattcttttttattcttaataggtttcttttattaaaaatagtttactatttaaccagtgacgaactcaaaattttagttaaggaggtactttattttttacttgataaacataatataaatgtaaaatcggttaaggcattttggtgtacgtctatttgtgtaatttatgtgtgcaattattattattattatt

SEQ ID NO: 202929 - DNA, 1003 bp, Cannabis indica
agagattgaatcagtcttcatttgataaccttgaaactggattttgattggtaatatctcgttctgtatcatcaactgagggagtagaatatggttgatctactggacttacatcattgttagttgaggaagaagtaactgaagtaatcccattatcgattgttgtggtctctaccgtagcagacttggaaatcagtccttgagcttccatggcttcccttgctgctctctctttggctcttctggctctttccaacacatcttcctacataaagataaaaaaaaatatatgttggtgttggtgtcagctgaaaagaactcaccgagtcgagttttacaaaagttttgaacttaaattagtcatggagaaacaaagttgaagtttccattactcatcagagaaatttcatgtaaccagttcaagcaaaatctgctaaactacttttgtctatatggctaagtggagggaacccttcaacatctgtaaacaatcttccataaccagcaatcttaaccatcattgtttctgaatacaatcatttcataccaatcacaaaagaaagaacttgaaccagaaatattgtttgaaaaattatcagtaccagaccaactcacggtgattttggtgagttttgtagcgacgataatatcgcaatagcgtgcttagctaaaacatgagcaaccacattaactgttttaggacaatagagaaaagtataaacaaaaaaaaatccccctcaagatgatatggtcactatctgtatagatgcggatactatgttgaaaatcatggggttccatcttaaaattaattggtgataagtggagtagtccatgttcttatacatgactcaacactctaccatttatttcatgtaggacaatgtccacaatatgtaccaggtaaattcaacaaacactatacttgacattttaatgattaggatagcggcatactatgaatgaatagcaataggccccgcagataaagcttcatatcatc

SEQ ID NO: 202930 - DNA, 827 bp, Cannabis indica
ataaaataatgatattattttttatctcataatttaaaatatctcagatattattttaaacattatcaaatatcaaatgttattctttaaatgtggggaataataattaagaaaatcagtcaaataattcatttatttattatttaaataataataataaatagaatttgaagacataaatctatcacgataaaaaagtgataaaattttaaaaccatacaaaatggtatcaaattctaaatgagctcttgaaatattaaatagatcattcacttcacaaaatttaaaaaaatttctaaagtgtactaaatttcaaagacataacaaattaaatggcattccaaaaaaagaggtgactcacctcataaaaaaaatttgacttgattcctataaaaagatacataggaaatttagttgctaggactgagtgcagtcgccgataccacaaaatgatataaaatataaatttcaaaattccataaaaagtcatacacttaggaatttttccaaattttcaaatagcaaaggattcccggaagtggtcatctactggatccttatattcaatttctaaaacagtgtattcttcactacaagtagtttgatccttctacacataatgtatgtatgcaattccaaatttaccccaatgtaattaagagattatttttataatcttgcatgggttgaacttaaaattaacaaatcttattctatgaatttagcatagataaaattgtgttttgcattattttatagtctaaatgtaaaatttttgcttaacacttggtcaatgcgggatcctatctcacaaaggctcaattttt

SEQ ID NO: 202931 - DNA, 1007 bp, Cannabis indica
gtctgacgactagaaaatatatagtgagtacaataccctaacaacgtccggttttggtgacttaggtccaataattacccaaatacataagcatcttcttttttaatcaagaagaaaatgacttcattaatcacaagcaaaatacaaccaaactatacaaaacaagggccgaaaaaagccgccccataaacaaaaccagccactatctaaacattaacttccctataaacctttcatcttgtaaagaatgcataccacaaacatgagcaatcgttcatgtcagtaaagaatatgatgtaatgttcaaaggaacagtaagagaaatgtgagtaaagggatgatgatacgtttgacagaagagctccccattgactacaggaatagtagtaatatttaacttaaacaactgatctgatggtactgataggctgattcccttatcattatctggggtgttcttgatttgatcaatttatctttgccaactgatcaaatatttggcctgtaaaatcagcatgcatactgatgtgatcaaatgaatgatcagcaaactataaaactttgcctaagctatgcatttgagcaaccactgattatagttcttggatagaaacgcatttgccaagtttgaattgcatctgtacaagaagatcaaaagagctatattacaaaacaaacttaaaaatccttatgatcacccaaaatgccattgaaccaaagttaaagtttctaaattacctgacaatcaagtcttcatgaagttaaattaggtgtctgtctagtctatctttctgggaatcacttgaggtgatttcttgaactaaatgctcatcaagtctctcaaatatcatctttggcagaaatctaaaactctctggttcgagtttctgactaatcctagaacttctcacacgaacataagtagcaaaactaaactgaatattgttctccaccaaaggttcggaaaagtaccacagtttaaacaatgacaaatcaatggaaggaat

SEQ ID NO: 202932 - DNA, 863 bp, Cannabis indica
tcactcaaaacatgagctctcacaattttttattataaatttaggctctgtttatatgatttgaacaaaaagtatcagagcacattgcattccaccttgtgaaaagttcctccaataaaataagaaaatgaaaaacacaataaaaaataaacaattcttacctaccaatagtatcaaaaactcaacaccaaaaacttttactctttatagttcatctgactaaatgccattaatagtacttcaatgttcttagaatccttaaaccacagcctctaaaactcaacctcatcaaaagaacaaaataaccaggtcccgggttcacattttcatcgatggatcacagacccaaataagaaaaacatacgtttcaaaatacaaggtggtcaaagctttgaaaacccatttggcatattcatcaatttgcaccaaatcccaacacccaaaaacaaaaaagagagagaaacccagaaagggtgtttctttagagaagagtgaagaggaacaagtcacctgtatggaaatgacatcaggttcaaattcagagacgaacttggtaaagtcggggaagtcgttcttgatccgaagaaggaaactattggcattccaagtcaagaacttaaggggctctttcttggtatcttctttaaccaatatctctccattctcatcgtttttcttggaaggtgaaggagtaggcttcttggctgagccatttttctccactggttgaaagtaacgtttcatcgtctccacctcctacactctcaagacctttgttttgttttggttaagttgagaacttgagagtaaagatcactgcttttgcttttccttttccgatgttgtcactgtcccctccaacg

SEQ ID NO: 202933 - DNA, 771 bp, Cannabis indica
ttaatttatattttatattttcttatgtacattttttatgtgattatagcagactgatcgaaagaagcatctcagtacctaccccaacccaaagatttatctttatattttttttttgatgttctgctctacatttaattatttacttaatttaatggttgtgagatgtttgacacaatctatttatttattatttattgacaattttaaatacaagaaaatgagacttgtatggattcaaaaagtgagagtagagttgataaaattatattaaaatctacaaggtttgttgtgactgtagtctcttgttttaaattaattcataacattctaccttatttgacacagtcaattttctgtttttattaaaatatttaaaaggtatgatatatatagtttgactcttctttcttcttcttcttttatattttgtttgattttttttaagattgtgaggtgattaatatgtttcaaatccaatacaagtctactgattataccttagtgtattatgatgtcattatttaggatgacattatttaatcaatataattggacactttttttactcttgatattttttcattgaggttttaatgagacctatttttctcaaatcaaaagaaaaaaaaaatagagtgtggcatgtgattgtgaataataatcaccatagagtgagtgattagaatgctcttgtgagatttagggttttgattatctataaatattttattattgttataatttaaactaattataaattaaaaataa

SEQ ID NO: 202934 - DNA, 602 bp, Cannabis indica
gaggcttaaaagtaattatatcaaacaattaaaaggggtcattttcttggctttctatggtttcacaaatcaccagtctgttctgttaaaacaaaataattcaagcttcaaatcaagtaggacccataatagtcataaaacagaaatgagggcaaacaggcaatatatagcatgtcccatagctatatgattatataaaataagaaaaaaaaaacgtaaaataaataaataagtaaaagaaacaactaagcaaacaacttgatctttaaaaaccccaccaacaaaggagtatgactttaaatgaagggcaccttacactgttacacagagggccaattgcctcttgtacaaaaaacattatgaagtgaagaaaattatattaatataggctatatagccaataataagcaaaagaatcataaaatcctacaagaaaattttgtgcatgttctgtgtcttttcttattttcaatttattttatttgacatgatctcaactcactcattagtattttgcatacaataaagtgaagtgatactaaataggcccaactcacttattttcagtttatgttctgggattttttttagggatttaagtt

SEQ ID NO: 202935 - DNA, 955 bp, Cannabis indica
aaaagcattccaagagctgaaaatggaattagcttaacctcctctcctatcaaaatctccagactagaaactaggtgtgtacttggttgtcatagagcatgttgtgagtgcagtcttgataagagaagaagatggtatccaatatccagtatgctacatcagcataagactaattgatgctgaaagtcgatacccactcatggagaagttgacatactgcttacaattagcatcaagaaaactaagattgtactgtccaagctcacccgataagggtatacactgaccagccattgcgacaggtattacagaaacccaaagcatctgaccgactactcaagtgggccatcgagcttggccaatttaacatcacataccaattgagagtggccataaaaattcaagctcttgctgactttgtggctgaatgtacaattatatctcctgaaatctctcaagatttgaaagaaaagtaagagctagaaaagaagcgagagcaagaataatagcaagaacctaaataatcaacatggaaactacatgttgatggaagttgtactgaccaactgtctagtgcaggtattgccctcattacacccaggggcaatagatgcacgggacaattaagtttggccttaaatcctctaataacgaggctgagtatgaagctctgattgcttgcctcaagttggcacataaaattcgggctgaccacctaaacatatacaacgactcatagttagttgtaaatcaagtcttaggtgagtacacagaccgaggtgaaagaatgatagcctatttaaggaaaatttaagacttattaagttaactcaaagactatacaataaggcagatccccagagaagagaatgcaacagctgatgcactcgctcgtctagcaagcaacacctttaccggcaaggaaaattcgatgcccatacagttcttaaaagaa

SEQ ID NO: 202936 - DNA, 583 bp, Cannabis indica
cactgaacacagacacgtgtatatgaacttataatgaaattatgaagatatctttatcatggaaaatttcaaagtcggtccctactttgatagttgaacttgatataaatacattactctacttgagaaaatgaatgaatggctatggctttgcttcttctgtattgaagataagtatgaaacttcaatggactaattaataagtgtgtactttaggtaattcaatcttgcaatgatcaataaatgcatatagactaaactttaaagcacaaactttctgaaaaatgaaaaatctaaaatttaaatataaaatattcaatcaatgggcctcactggttttggaagaatttcttgtgagtttaagagtcaataaaaagaacaaggaacaaaaccattggacaccagtagtgcccaacactttgtataggtggcgtcttacgattagttaataatattttttaaaaattattttcttaaattatataggacttgatacttaattaaaccaataacgatataacactgaggaaggtgctaggcaccaatatcttttactctacattgggaaaaatcatatctatgt

SEQ ID NO: 202937 - DNA, 587 bp, Cannabis indica
tattttgtatgatattttttattattgattcatttttgcaacttttatatcaaattaagttaattttgcagagcttaccggactgcactttgcaaatccaaacgtggtgggtttaaggatacttaccctgatgatcttctggcccctgttttgaaggtttgtctttcttttttgttgtccttatttcatgatttttggttaagtgatgactagaattgtcaatgacaattacccttgtttttttgtatttatgattgggtgttaatttttaggcattgatagacaaaactaatttgaacccaagtgaagttggagatattgttgtgggttcagtcttggcaccgggttcccaacgggcaagtgaatgtagaatggctgcattctatgctggtttccctggtatgctttgtttgcaagttcgagctttattgagaatcacagatgagtttgttatttatggatatgtaatgtataatatgcagagactgtcccggttagaactgtgaacaggcaatgttcatctggacttcaggcagttgctgatgtagctgctgctataaaggcgggattttatgatattggtaatg

SEQ ID NO: 202938 - DNA, 2620 bp, Cannabis indica
taataataaaataataaaataataaaaattagtgttaattgccttttctaatccacattactagagcggtcattacacctgatgcatccaggattctttgtacatctgcctcagtcatgttgcttcaataaacaatcgatttagaagggttaggaaacacgtctgatgtgcgagagaagagtttcagtccctgcaacatgtaatataagctcttgaagtctccattgcaaaacaatagaacatcatcagcaaagcttaaatgattcagctcaagacccccacatctctcatgaaagataaaatcttgcttcttcccaatcttcctcatgattcgagaaaggtattccattcccatgacaaataaaagcgacgacattggatctccctgcctcaaacctcgcttggcctcaaaaaaaccatgtaatgatccgtttgtcatcaaagagaaacgaggagtcctaacacaagtcattaccaagttgatgaattttggtgggaattgaaaaccatatagcatctcttctatgaaatcccattcaatggtatcataggccttccgtagatccaacttgatcatacaatttgctttatttgtcttcctaccatagtgtttgatgagatcttgacaaatcatgatattgtgtccaataaatcttccatggacaaaccctccttgaatctgtgccactaactctggtagaatccttttaagccgagtgcatataagtttggtagcaaccttatatagcacattgcagcaagtaataggcctataatcccccaccatgtttggacacttacttttaggcacaagggtcagtacagtagagttcaattcctttaagagctggccggaatgaaggaatgaagtaatagcatcagttgtatctttgcctattatctcccagttatcctgaaaaaaaagaaactcccatacccatcgtggcctagagctttgttccctgggatatcaaaaatagccttcttcacttcttccaccgtatactcagctagaagcatatcagcttgttccctggatacaacaagcccctgccgtaatacacagttctgaacttgtttcctactactcattctgctgcctaaaagtttttgataaaaggacataaatgcatcgatcacctgatcaagtttttccaccctgtctccttccaagtttgtgacagaaagcaccctattctgagttcttctagcccgaaggtaagcatgaaaaaaaacctgaatttttgtctccctcttttagccaattcaagttacttttctgctgcaggaatgaatgataattttcctacgcctgtgtataattatctcgagccttcttttcttgttgctgcaattcacaatttagagggtctttcctcagtctctcttgacagctatcaaggtcttcctttgctatgatagcagtgacaggtacattattaaagtgcctcctgttcaaagcatatagcccttgctttaagcttctcagtttaatcacaacttgatacattttcgagccttttacttgctttgctcaactatcagagaccaaatccttataagtaggatgcttggaccacatcctaaaataacgaaaaggccttttgttcccacttggcatattatagatagttactatagttggagaatgatcgaaaataccttcattttgaaaataaatctcagcagcatgaaacaaatccaaccaagtttgattcgctagaactctatcgatcttggagtatattctatcttcaccatgttgcttgttactccaagtaaaaaagttccctgtatacttaacatcttccgatttgcacactttcacacactcgtgaaactcacttgcttctttatacattgctcaaaaaccaattctctcttccttgtgaaggatctcattgagatcctcaagaaccaaccatgcctccttaatagccaactccttgagatcttgccaaaggattcttctcccttcatcagagttgaacccataaataaaggtaacaaaaattcttgccttcctatctatggattccacaaagaggtcaatcatttggcaagtacattttaggatattgaccataaagctatccagcttccaacattagttttaaaaataaatttaattaaaatatttttttttatgtaaatttgaaataaaaaaaaaaatatataattaaaactaaattttaaatagaaataaaataaaaaagataaaaaaataaggtttggagtttgttaattgaacctagaattaataatattcaagattaattataaataaaaaaataatattaattatagtgtagtttttaagagttaatttgagccattggattaaatcaagggctataaattactatctctattgataggtaaaatacccaatccctactataatagtcccatatataatatatatatatatgaacgtgtgaatagaatatatatgtatataaaaaaattgagtatgcatatgtatataatcggatcatataagatatgaagtatatatatataatatacaatggaaagaagcgtatatatatatatgaacaaaactcaaacaaaatcaagacatagataaaaaccgttctgataccaactgttagactat

SEQ ID NO: 202939 - DNA, 1189 bp, Cannabis indica
cttttattaaaaatatatatatacatcggtttaattctatttattcaggttaattgggcagtttagaataatttgtaaaccacctaatatatttattgggcggtttgaatttttattgtattatttcgggttgtattttttatcggtttattcggtttggtttgggcggtttattcggtttaacggtttataaattttgttgaacacccttagaggagtgttttgactaaataacttttttttttctttttttggtatattttaatgaatgtttctttaaaaaaataaaagaatacaaataataaataataaaaaaaaaggtgacccaagttaagcaggtcggacttgacttgcccccatcttttatttatttattatttatatttgttatttttttaaaagaaaaattcattgaaatatatagggaaaaaaaaagagttatttagtcaaaacactccccacttcaattttcagttgcagcttatttccactcttaatctttagttgtctcctcacttcttttagtattcttatcgtgtacccctatgtacactctcgaagttaaatcaatgagtaacccgtcgagtgtgaccttggcaatttttccactactctcgatctcgaccgctcattttcattcacattgatcaccatcgaatgatgatcatgatttgattccctatgttcagctttagtgtaatgactgcttaattttagtatgagaattagtagataattagggtctaattttactagtggactttaagttattatttttatgatttcgaagatatatttaaattctagatatgctatttatattatatatgaattttacgctttctcattatttttatgcccgataacagtgaaacgtgacgtatggcctatggagtcaccttagtatgatttagtaacttttagaatagcgggacaatgtagatatacattgagaatattgggattatttgtagtttaaatttgaacaaaatgaccttaagtgacaaggttactttttgattaagcaagggcaaaatagtcttttgccttatgttggcttttgtccattagtggatcattgttgagttaataatctgaatttattagggaatattttagataaacattaagtttttttatcaattattcaaaattagaaaaaaaaaaatacaaactactctctctctcc

SEQ ID NO: 202940 - DNA, 1093 bp, Cannabis indica
ctatttggtaaaaagcctgactacaccatcctatgatcatttggttgctcatgatttccacaccttagaccttacaactcacataaaatggagttcaaatcacagcaatgtatatttcttggttattcaccttttcacaaggggtacatatgtgaaaatgacaaagggagaattttcatagcaagaaatgtcatattcaatgaaaatgactatcctggccacaaacaaacaggcactacaaaggtacaaactcaacataatcctatgtgtgttcctactataactttttttactaatactaatattcattctcctgtttcaaccattactgatgttgttgagactaaccatcaaccaaacactactctcccaactgtccatacccaacatatctcacctgattccaatataccaaatagaatcccctcacctgaacccaatacaactactattgcccctatattacccgttgcacctgaaccaactataccttcctcacctattactatacctcaacaccaaaatgttgcacctcatcctccctctcccattctagatcaacccccccccccctccccccccaccacatatccacctcccccacaaaaaactaccaacacttcctctctatccatacatgctcttgtctcaagcagcatccctcaggaaaatacagtaagaacacatcacatgcaaacacgatccaggagtgggattgtcaaaacaaaggcatatcttgccaccaaacaccccttacacgagtctcttcttccatctgagcctacttcacttaaaaaggcactgcaacatcccaaatggctacaattaatggatgaagagataatagctcttaagactgccaaaacttggagtctagtcccatataaacttggaatgcatataatcagcaacaaatgggttcacagattgaaattaaatgttgatggctccctcatcaagtttaagtcaagactagttgcaaaaggacttctacaacagcctgggattgactatgaagagaaattttcacctattgtaaaactagtaatagttcaaactgttctcagtcttgatgtctcctttgactggtcag

SEQ ID NO: 202941 - DNA, 734 bp, Cannabis indica
acaataaagattcgtgcgcttggaagttgataaatgtaattaaatgtaccatttatgtaccaacgtggccctaggctggtggtgtaggggtctgctgccactagcattgcgccaccatggtagaggtagtttgttcgaacatttatttggtgtcttatctatttatttttaacaggtctatacacctgtttataaccccaaagtaccccaaaaaatatccctgtttgcaatcctcaaagtacccatgttttcactcctttagacaccttctcgcatgacctcaagaaccttcctggaagtcttgcgaagctggtggcgctggtcttgcaccaccatctccttcgtatttgcaaagaatcatcagtaagtattatttttttttcttttataactttttcaatataacgcggaattaaacgattcaagatgttttagaaagctgagaataagatccacaactttcatgtttatgaacaaatctaattctatgtgtaacattgtttaaatccactagcaagttctacctattcaatggtctctccaaccttacttgtgtccagctagaaatacctcaaatgattctaagcagataattggcctttgaaaacccttgtaaagtggggtcttcctcgtttggaactaaatagatatttgggataacttggaaattacacattgtgaaatttagcgaataacaaaaaccaagagacacatgcggtatattttataaccta

SEQ ID NO: 202942 - DNA, 879 bp, Cannabis indica
aaataattacaatatatacatctattaaaaatattaaactagttgtttcaaaaaaaaattattaaactagtttctttctaatacttgtgcattgtgaaatatgtttcttgacggtttgactgggtaatcgaaatcccatacaacacaacacagtacacaacaccgaaaagcccaaagatcaatattaccacaaaattatacttttcaaagtgttaataagaaaagaactattgtggaacattttgtacaccatatcaccattatttcgggtaaaaagagtaattatttgagaagagaatccgaggcttagttagaattccaaattctagggaagaatagatttttttatttatttaaattaataaaacaagatgtccatttatttttattttctaaacaaaacttaggaaagtgtatgattaaaaaaaaagtgtttagtgggatcaaagaaacgaaaattggggtggagaatgacgtattgagagaaaaataggagaccaccacgtttcaaaatattataaaaaaaatcagttaccaaggaatattcttaaatcttttatccatacttctatattcatatatcttactcttgtttcgattcaatgtcaatagattaatatcatttatttttattcgagatgcttgacttatttgtataataaaaacagaaagcaactgcatgcatttatatttactgattataggtatttgtaaatgtgtatttgtatgatgggagaaatagagatgaagaagtgttttaagttgaattaagagaacaattataattcagacaaaatttaatttaaaacttgctaatatctatccttcatttaattatttatgtcatatgttagtcagtaagtaagggcaggttgataa

SEQ ID NO: 202943 - DNA, 1828 bp, Cannabis indica
agctgcattcaataggcttacctacccggaatgtatttcataaagtcatcaccaacactcacagttgccggggtgcatccatgtgattcagtgactaaccccgtgatgattcacgaacaagagaatagaaaaagcgaggatgtaagaatctgaagtcgtgcatgcatgcgagtgtatgcattcgggtgtgtgcctacaagtgtgtgcatgcatgcgtgtgtgcgattgcattggcgggagacaaggggctcgcatgcgagcccttggggggcctcgcaagcgagcatgcatgtgtgtgcgtgtgcggttgcatgactgagatacaaggggttcgcatgccagcccataagggggctctcatgcaagcatgcatgtttgtgtgtgcagttgcatgggttcgagacaaggggctcgcatgcaagcatgtatgtgtgtgtacgtgtgttgtgggtctcgagggcttgcatgcgagcccatgtggggggcttgcatgcgagtcatggtgttgagtgcatgcgtgtgtgcatgttgctcacatgcaagcccatgtagcagggattgcatgcgagccatggtatgcacaagcatgagttgggttgcaacaagtgagtagcaccatacatgtgttatgaatgtaagacgaaactcatttgagtgcatgttgacaagaatgtcattgaacggggattcaaaggacaaggcatgcaaaagacaggcgtaccaccacgccacctgcaaggtctgaggacccgaccgaggatacactacaatcacactcctacaactgaggaccacatgcttacaaccgaggaccacgcacatgctattgggatttaatgccctaaataaaacctattttaatataatcttatttgtagtcaatagaagattagaagtcatttaagtttaaatgttattttcatgtttatggtttaatttacaaattctattaaatccaaaacatatagttattcacaattatagtgatttcatcacaatggaaagtaattgtgattatatgcttcaaagttttagtcctataatttatcagtgcactagatttacgctgatgtgataatcaacgataaagttacttacacattgatatgtggtatgtcctttccaaagcatccgtgaagcatactagtatcagatgtatggagtattcatcggactagaccgacattgacattggaaaagatatcataaacttatcgttatatctttctaagtcaatatcacttagttgatcttaggtcaatagatcttaatcctgatatggttaggttctagtttaactgtattattggtgattttttacttgttcgctaaagctaaccaaaaggatcggcccaataattaatcttagaacacggtagtacaattcagtgggagcgctaatcatagatacgaaatctatagcttctataatgacatagaagtgaaatgatgatttcctttgagcttgacttaatagagataaatggaagagctcttatgtcaataattatattagtttattgaaatatcatttatagtaagttaaatattttaaggataaaatacattgaggggtagaacggtaaatttgtccctactcaatgtagatcatctatagatggtctttgattatttggattgaaacaatgaataattaatacaatatctatatttagaatatatagagcattctatataatcaggagtacaattctgaatctatagtggagtcaggaggaattaataagttagaaaatttacttggtaaatttcagatctacttattgggagcttgaatatatatgcctatggtcccccccactagctg

SEQ ID NO: 202944 - DNA, 863 bp, Cannabis indica
tctaatttttttaagacatctttgattcctattctttgtacgactattatatatagtcacacatgatggatatgatagactaatttagatggatatttttccatctttcactttaatatttatattttaattgttatcaatgaatgtttattgtaaaaaaataatttttcattgacacattgacgaagttagaaaattattttagatggagaaaatatgtacttaaattaaaaaataattaaattcatattcaaatatattcaatttgtttttccctcggtaattttaattttaaaacataattaataacttttttatcaaaataatcttttttattgctattttctttagaaagagatcattaaaatatttttataaacatgtttataatattatgtacatttaagttaaattacaacattttttactaaaataatttatgcaagaatagtgtcaaaagcaaaaaagataaaaaaaacatataagttaaggaaatatatattttcaattattataaaatattgttgaaaagataataaaaattgatatagtgttctttaaaaatttaagataaatgatttatttatatataataaattttggtgagatatacataatttaaaattttagttcgtaaatgacatagacaatatatgtaagatctttgtatagtaataatcaaaattaattactatttatagtgatttatttataacctttagatcttaatgtactcgtttatattattaataaaattattaaatacaataagtaattattattttaaaaaaatataaaataaattggtaacttgtttttttttttttagataaaatggtgacattttattagcaaattgcatc

SEQ ID NO: 202945 - DNA, 906 bp, Cannabis indica
taaaataccctaaaacctaaaaatcgcctttacaattcaaaagctctcttctcacactctctctatctaacttcccccccctctctctctataattcccagccccaaaccttctcagcccagactctctctcctgttcacgagctccgaccgaccaaatctttcttcagccaagaccaagatgacccacgaccaagacaactcacgacagagacaacccacgatgacccgtgacgacccacgaaaacccacaagaagcacctaagatgactcacgacaccccacgacgacccagtgccacccacccacgattctcacaatttctggtaagtttgtatttattttgtattagaatgattcttccaatatgtaggttttttgttgaaattttgtgttggttttgttgattatggttgagattaagaaatttgttcgattttaagttaattttttttgtatttgggcttgaattttaatggtggcagtttgattccattatttttatatttttcgacgtttgtcgacattgattgcaatattttgcgttatcgtcccccaatggcgtttatgttttgtttattttttttaccagtttgtatctattgtgcgacgtctcgtgacattccatgatatttgatcttatgggtttactcattatgacaactagcgacatatgccgtaaaatgtcatcagtagtatcgctatatgtcgctacttgtcctgatgcgtaaaaccataaaaacataaatcgttggatatcatggaagatcgcgtgacatcgcacaattgatacaaactgataaaaatgaacaaaacatagatgccattgggatgatatcacaaaatatttccatcattgtcaataaacgtcgatatttttgtgagtatctgttggaattattttacc

SEQ ID NO: 202946 - DNA, 1007 bp, Cannabis indica
tactcgcacttaaagaggatgttcgggtagatcttctatgtgttttggcaccaagaaaaaaaattaatctaattttttcatattaatgtgtacgtaaaatcaaataatttatagtggtaaagttaagattcaaatagttatttgtataagaataacatgtgtataataaaatatttaaaatttatttttccctatgctaaatagctcaaaattttctaaaaaattacaaacattttttaataactataacatacaagataataaaataaaataacactaaaattttattccgaataccaaaacaaataaatcatctaccaaaatttttttcttggttaaccggccaagcttagctttaaagtccaaacattaactccgtcgacaaatccgaaaaatgtcagtccaaaatcccaaactattctctccacgtggctactaagatctcaataactaaaccttttttttatatataaatatgtatgtataacacacaataatcttaaatgtcaaattgggtttaaaaataaaaaattgaacccaccttataaggcctgcttaacttgagagacttactcaagcttttatttttactacacttaacaaaaaaaaaaaaaaaaaaattacttaaatatatatatatatatatatatatttgtggttttctgtgaagctgtattgaaagtgacccttgtttcttcttcttccttatctaccttaccttcgtcttcttctgtactctctctctctctctttctttctttctcttcttgttgttttttttttttttagaaagaaaaaaaaaaggaattgtcaagccatagatgctgcagcactagtgatacaacacccatgtgggaaaatagagaggctttattggactataagtgcaagtgaagttatgagattgaaccctggtcattatgtgtctttgattataccattaccaatttcagatcaacaccaagataaagaaaatcaacaacaacaacaaacagaagagatcaaaa

SEQ ID NO: 202947 - DNA, 549 bp, Cannabis indica
aattgatttgggaaaatgactctgatgaaaagaatatattttactatgccgtgaagtatcgtcaagtggaaatatttaagttaatacatgaggtaggtttatcaaaacaagtggtacaaagttatgaagataaaaaacaaaacaacttgttgcatcttgctgcccgtaaaccaccggagaatatacttcggaggagtatcgtaggatcggcgctacaaatgcgagaagaaatcttgtggtttcaggtaattattactgtcattattattattacgaataattgtggtatataagtatccaaatttataattaatcacttgcctattacaaattcaaatttttaagtattgatgttattaatttttaagaaaattacttaatatattattttttatttttatttttaaatatatgttgctgtagtagtttctccggaaattttaatatatatatatatatactaaagcctagacaaacttatggacaaatataattttaaggagtgggaaaatatttctttcgtattatagctaggactttaaaagatga

SEQ ID NO: 202948 - DNA, 1048 bp, Cannabis indica
gacttggaagccatgtctatagttgggaggatcatcatctataaacgtaaatgtaaaaggaattttattcaaatagtgtttgatactatatgggaagtgactaagggatgggatgttcgtgttttagcctttgaggaatgtaatacttatgttggatttaccttttatgatgagtttcttcgtaagagagttataggaagagtgccttggacttttaatgaaagtctttttcttggagaatagtggcttgagtctggcaattggcgggatgcgaagttggatagtattattttttgggtcatcggctatagtcgatactataggccataatttaaaactgtcaacctatagtatagctgacggcattaaattgccgcatataatggatgcccacataaactatcatcttcatcctcttcgaaactacttctcgcatatgtcgcagtagctccaaattctttaaaagcttcatcctcctccaccgtcgctgtgctcgtcctcatcctcctcgaaactttcttctacaagtttcaaattgctttcacttgacgatcctcaaaactttcttcagattgcaaactttggatttcttttgcacacaaaaagatcaagatcaagaaacctaatcgtggctaatataaatttaaataataaataagaaaatattgtgcttacctttgtgctgccacaaaagagcagaggagaaggacgaagcaagagaaagtggaggagagggacagcgcaactcgtgattgtggaggagtaagagttgggaaatgaaatgagatttacaaatgactttgaaaaaatgagatatgatttttttttggggcgcttaattatatcttaagatgagggaaatgaatttaagatgggggagtgaaattttgaaattcaagatgcggaaaataaaatttaagatctaaaatgcgttaaatttaagtatgggaattgtcgactgtttaaaaccgctgcctatacctcccggtcgtttaaagaattcaaaaatactctattttttcctaatagttttaaacactcgcttaat

SEQ ID NO: 202949 - DNA, 804 bp, Cannabis indica
agactgcttcagatcgagaaaagattagagatcatcaaggtttgctatatattataataattataaacatcttgatattaatgaatttttcttatgtactgttcaggatatggataaagactatattggtattttatactattttttgtgggcactttggaatcggcaaaataatacttttcgtaaccagcatactctttctcccacggaagtctatgactagagtgttaattttttcttcaagtatttgggtgtgcagcaagttcaaacatcacataacatctctactacgactccacgtggatattgtggatcctgctatcttgggcaatcttaagatatttactgatgccgccattgatccttcttgcaagtaatatagtattggcgttgtggtcttggatagttgcaatcgggttaaaacaggtttttcaaaacctaaggtcatctttcaagctattttgtgggctcaagtgctaagacttcctgtggatgtgttccttactgattgtaattctattgttgataaacttaattcttgtacttgaaataacagtattttggatgatgttttaattaatattaagaacttgttatccttcagtccaaatctagctatagctcattttcatagagattctaatatgttggctcataaagtggctaagttaggtcttggattagataatgagttaatttggaatggttctctactttttttgtaacttgattgctttgtaatcattttcttatctaattaagcacaagtttttttctaaaaaaaaaaataatttttttaattct

SEQ ID NO: 202950 - DNA, 812 bp, Cannabis indica
gtagtgggttagattttggtcctgagggcagtggatagggaatgaaggcatagagtcaggaagagagatacacacgacactggcggggtttgaagtcatgaaattggcaacgaagggttggcgaaagtaagctcttcaggacacaacatagggttagtagtaaccttaactttgtcagtaatggatttgatgtcattcctgagatcgggcggaagaggggcttcatcacaagccttcatatagtccacgcaacccttattatagctgtgtcccatacgaccactaaaaagcaaatatcggggagatttttcgtattttaattcgtaccaaaccaccttgtttttacccgagaaattgacaggaattccccaaaggagagggtgtgccacatcaaacatgactctaatacgaaagtatggtccccaagtttcacgaaaggatggccgatacacttctaagaggtggctaagagaagcagagacaagttctgctagctggccagtgcgtttgaggaaatgagtgttgaaaacttgcacctaaagagggattttaagaaggctgtccccatttagaacatccaaagagtttggaatatccataaagaagggctggttgagataggtccaaagctgctgtaggagaactcggcgtcgatcaccttcacatccaaactcaatcaagaagaggccttaggaacggtcagttatggtgacaggaaatcgggatatctggaaaaccaattgtttagaaattgaattatctggaaaactaattgctcgggaaaagttgtaaccatttatatatatttttaa

SEQ ID NO: 202951 - DNA, 968 bp, Cannabis indica
atatttgtgagatactgaatgtccataaactattgatcaatttgatattttgaattggtagataccaaatgcactccaacttgtactgccaatgtacattataaaatctatatatgttgattgtagttaagtttaattaattatatatataaaatgtattatagaacttctttagtatagtatgaatgctacaacttatattatctggctgctatactcttcaataaaataaaatgtatatgaagtgttggtgaatattccaattatcgatttatatatttatttatttatttatgtggatagacatgagtttcaaattgcaactgatctcatgtaaaagtatattataatgaactaaatgtgagcgtataagatatggaacaaaaatctggcgtattatcagaacaaaaactcgatattatatttttttgtcagaaaaaataattcatttgttaattaatcaatgtttgaattattagtttctttaaaaacaaaatgttgaattattagctatgcatgactccaaattcatgcttcacaattttcctttaatatttagtaagagtgtccatgttcatgcttataaatttataattcataatatcattgtcaattaaagttcaaaataataataataataataatataaattaattttattagcatttttttataaaagaaaaattaacaaaattaaaaataattataatacttgaaaaaacgaagaaatgtaagacttattactggaaagtagtctgaaatctatttagttttgttccaaatacatattatgtttcatttcaaagctaattagataattcagcaaaaaaataattataataattaatttttggtatattttttactcattttggtgtagaacccactctatttaatttatgtctcaccatgttgttggatctgattctctctctctcttcttttttttttttttaattagtaatcgg

SEQ ID NO: 202952 - DNA, 546 bp, Cannabis indica
gtgacattattcctactaaatcatgagtttactaatttaaatttaataaatcatgattttagttacgagtaaataaagatgatataattaatcaattaattatatatatggcataataactcatgcataaaattaatgaaataattcgtacaatatatactttttaaaaatataattaaaaaaatccctaaaatctttttttattgaaagaaaaaccctaaaatattatcgaaactcttaaatatatacaaatatatatagtgtatttaacgacaatgttatcaaataaaatatcaactcatatatgggctatatatctaacaaaaaaggatgaactatgggtgaaataaattaattatgtgtatataaaagatagcaatttcgtggactaaattggtagctatatattaaggatatatttcgtgaactaactaattgatgagcagcaatttcaaagagaagtttatcggatcatatatatcaagaggggttataacttgttatggcctgaaacgggaaagagtcagatggtgtaatgagatatat

SEQ ID NO: 202953 - DNA, 2012 bp, Cannabis indica
atctcagtatttttgtaaaagaaaaaacattaaatacttaaaaatgtaaaaaatttattatttttgtatatctatgaaataattctaaagaaatatatattctttttaatttttttttcattcctatttcctttctctcctattttccttccttataccaaatatagggtaagagaaagaaaaacaaatttgtttagaacccaatacaatacaatgagcattgctattagacactagtggtgcctagtacgttatcgacatgtcacgttgcaattaactaacaatgctctctaaaaattattatattaaattatataggacctaatacttaattaaaccaataataatcctaatacataagaaggtacaagtaccctttaacatttatcccacacaataatacaagatatattgacttaaagaaaatctacgataaaataataagtggcgcaacgagagagaaagagtatacataaagggatcttttttgaaaaggaaggaaaaagaaaagaaaatgaaatggggttgataatagagacaaatcatgactcatcatgctacttggtcgctagctcccccactaatgtccaaattcttataataattataaattattttttttttaatatttttttttagaaaaaattaggagtatttatcaaatcgtctataatgcataaaaatacaattttaaatttttcttggtgagttatagtttgcaattttgtctaatcccacgatacaatgtgattttaaatttaataattgtaattcaaatcatatcgcattatatgttacaaaattataaatttttacaaaaaaatatctatttttttcttttcaagataattcaatataataatttaataattaatatataagttataagttcgatctactaaattaatgattatgatttcaagatcaagatgagcaatctcaacccttcattagaggcgtgacatcattcaataattttagattggctcggaataaatattctcaacatatattctagtatttgtaatcttttaaatatgtagtcatcttttcttttcctataaattggaggctcatttagtttattttttacactcttattatgatgttcaaagcttatttctctagactcaaagcttctttgtctagaatcaaagttgttagctctctctctctctctgacttcaaactttactctccaagctaactttgtaatgctggctttcaatgttgtcataatagttcttgcttatttatcatttaatttttccttttgtttaataattaaaatgtccttacatgcattataaggcttaacacaaacaacatcctaatacagtgactcgtggctattgtacaatccccaccacgtaaaaattgtgttcttctcttgctaattcattcttcttaatatctatactcacattttagtttggttaattaacaaaaattttaaatttgagaatttttcaatatttacttaatattatcaacacataatatataagttatatacacaataattcaattcatttatttatataaatgaaaacatttatcaactgtaattgctttaagggtctgtttttggattaaaattctcaatatggactcatatgtatattagtgtattggtatttgaaatttagcccaaaataaagtgatcagtttagtagttgtgagagattgggtattaaagtgtgttaaacgtgtagataccttaagcgatatttctaagaggaaattacaccttataccttttttatattgtacacttttatttttactctcttttttaaagtctatcatttttacctgtcacttcaagatactcttcatgtgactctcttatgtcagggtattttgagtacaatacatataaaaagaggtatgtattaattaaatataaaattagaggtaaatttgattaattgattaataaaagtggtatttttcaacttacccctatttctaatttattgaggggctaaataagaaatatttcaaattaa

SEQ ID NO: 202954 - DNA, 1294 bp, Cannabis indica
gaaaactctcataatcaccaatctcaacaatattgaatatttcattaggaaccttcttggaattagggctgctaaacaaacaattagaaacaaaatacaacacaaccatcttaacagcataatcatccagcttaatatcactatacatgaatctcttctcaacagcactaactgttacttgctgatcactaaaatacttgtccacaaatacattctccttctttgcataagcactcatatcagaatcaccaacacataataaaccgatcacaactgcaaactcagccaaactaaacttaaaattttgagaaccaaatttgaaccacatttcagaaggatttttctagtgcacctccctatgcaaagcaatgtgaatcaactgagtttgcattgtaattggattcatgtccaaaaaatatccaaaagatgtctcacaaaacagttttgcttgagaaggagtcaatttactattgatattggcaataacatggtaatcatgattagaaaaaaagataataattcttccaccaaccctatcctcatgcttgaaatataactctcagtcttaaaaaataagaaatataattgacatacaaaagtaaaatcatattacaaataaacaataatgtaaacaaaccagtttaccatttcaaaaatattgaataaaacagaacattaagaacaaacataataacattataacaataaagaacacaatacaaacacaaaatcaaaaactaaataaaaactttaacatatacaaaggctagaaacttaataacataaacaaaatcgtcaacaaaaatagaattaaaaaaataaacaataatatatagtaatcagattaacaacacacatacataaacaacaataaaaatatacaaacaaataatttcttacaaatttaaacttaaaaatagtaaagtatataataagaaaataacgtcaaaccgaaaaaatagcacgcaataaatacacaaaaaaaagttaacaacaatttaaaaaaaaaataaagaaacaaaaaaaaaagtaaaactaaaatcatatacaataatatatttaaatagaattaatacctaaaagaaatcaaaccaaaaaaaaaaaacctaaaaataatacaaaaaagtaaagatgaaaaaactagaatcttaaagaaacaaaccctaatgtaaacaaaaataaaaaatataaaagaaactaaccctaatagtaaacaaaattgaagatctcagttgagtaaaaacaaaaaaaaactaaacaaaggaaaaaacaacaataaataaataaaaaaaaa

SEQ ID NO: 202955 - DNA, 889 bp, Cannabis indica
aattattcaagctaagtaattgaatttatgtattagtcttgaccattaaagctagaaaaataaatctcaacataaaaaatttacaagttctctctacattggaaatacattccgactgaataatgtttgggtccctaaaaactagataaagtaatatccacggtaaaatcattcaaaatatattcaccaattttgatttacaaatcaacaacacaaactgatattgcctttggtaatatttttatttttaaatttttaatcacaaaaataaaaaagtaaaatttttatttaaaattttgattttgaaaaataaaaatatatgttataaccacttttgtttttcaattttaaaaatcaaaaataaaagtgtgttctgtaaattttattctcatttatatttgttgattttatttatgttgggttcaaggacaaagctgggatcgggggccgaatccgggtttggagttggggccagggtccgtcagtgttccaagatttaggttcgagtcagaaagtgatttttttgttttcaaaattttaaaattttgatcctcaattaaaaaattaaaaagtgaaaataattttatagaacatgatttcagaaaatatattcacttttttaaatcaaaaataaaaaactgattaaagttacctaaaatgattttacacaaaagttaccgatacacttgaatacaatcaagttctaagatctaagattccttagatctgagaagacaagatccacttgtgcttcgatcaagttgaactccttctagcagatcagtctgaactccatttaaacattgcaacactccttcaacccttaaagatccaacaaattacaatttgtaattgcaagtatagtgtcttttgtcctaacaatttttgt

SEQ ID NO: 202956 - DNA, 1199 bp, Cannabis indica
aagttctctatctttagtttaaatgttatcttagggacaatgtgcatctttattttgggggagggcttataaattttttacttttaatttgttgtttattttatttttttaatttttttttgctttttgtttagagtaaaattttaagccaatattcttctctgttgttgctttatctttacttatgaaaaagattctattaataatcgtgtgcttggtttaactattttggagtttaattgcaatgtttttagaaattgataatatattttgcaattgcaatatttttgactctattttatatgcttgactagggttggaggttcgctaatttgaattggatagaacttgcattatttggactttgaggcgaaatccttgatgacatgtgttttggaaagagatttaggaaatttttagaacgattgagcctttcaagcgagccttaaatatttatccattgttatcctttttgagcttaacatctctttgttgtatgacaccattcttgagcctaattgaaacattttattaattttccttcccttgaattttaccatgagtatatggatgaataattgggaataaattgtaatgtgatggattgcgagtgttggtaatgtaatttaatgataaagagtaaaaaaaaataagatagagaattgttacaaaaaaaaaaaaatagctacactcttgttatgcatcgataaaaataagtttggggaatgtagtttgaaaaaaaaataattattatatggccgtataaaataattttttctcaatattgaaaacaagtgacacaaatggttatttcttggatgcattatttggtttattgttagtttgtaaagtttatatgcttacggtaattctgagcctaaattacaatttcatctaccttgcctaagcctaacattatagctcgtgaaagttcttttgatttcagaatatgtgttattgacattattggagaaagttaaatgatgcaagtatattaaaaattggcttgtggacttgtttgatttgagttgagcatatactatagaatccaattattgtgatcattggtgaattatattattaaattccctaatttgagctttaaggtaattttcaaagtggttagattgaagttctcgttgataatgcaattgagaattcatgagtagtggcaaaacaaatgtagatggaaatggtgg

SEQ ID NO: 202957 - DNA, 1319 bp, Cannabis indica
tacgtaattcaaacaattaataaagtgatatatagcatagatagaagaggcatgaagtttttggtccaatggaagaagatagagagagagagagagaggcacctgaagtaaggacaagtgtaaggcagttattgatgttatgtgggtgtccgtgtcggttcttagtgttacaggtattactttcttagcccatttctctctcttttgttacatttaattacttcttgggtactgagcactactacactagaaactccaaaaacgctgtagctttcttcacaattttcaggggtaataataatgcccacatccacatacatacatatatacaacttatccccagtccccacgtatataaatatatatatatacatagtaatacatacatacacaccccatatcacaaacacatacatgaacgggaccagtgatcaccattaaccaatcaccaccacatacgtgaagatcatatatatactcatataccctacagctacatgtacaactagattttattttagaaatcaatcacacttcacagtgtagtgactcaaaaaatgactttgggctctgcaattcgatccaatagcagcacgggctcaaaataagagcccaacctcaaaactagtcaatcaatccacactcagatagctacaccgaatccacaatatctcaagtctatgaatcatccatcactagttggcagtctaactatatataatcagattgtcctttctgctcaaactatcaaaaggaaaatgttgcttgatttttaacacggcaaataaattaatagggagggagggcataatttgtgaaacagcttgaatctagggctagagatgcttttattttgcgtagcttatattttcggttttttttatatatgtattatggatgataataatgagggttgagtttaatatattttctgaaaagacaaatagttgtcatcagttcatctgtctgacgggagttcaatgccatatgcaatgaacgtttattattttcaacagattattatttgtatcttttcaacaaacaagtctattattattattatttcgtatcttttcaagagatatcttttttgaacaaccttttcaacacattattacttcctaaaatagttatttctctttcacatacttttagttttagtcctaatttcattttctcaccttatatgtggaaaataattatttaatataaaagaaattatatttgcagatatttaattattaaaaaaaataattatatatttgtaattgttgtaacacatgaaaattaatcagaaggagaatagttcacagtgttag

SEQ ID NO: 202958 - DNA, 1494 bp, Cannabis indica
ttttgtaactctcttgggagtgaaatttggtgatgatggcttcagaattttgattaaagtgggggacataacttaatagatcattgaattaacttcgaaatgcaagttgaatcgtgtcaatcggatcaatattgagtgagttatgattgttttactgaaggaagttcatgacccaatacccaggttgacatctgatgtcacttagaaggctgggtaagtgtaaaaatgtttaagggctttatgatgcttaagtgatattttgacatgacttagtctattgttttggtgaagctagtcactagttctcggagatgtagctattctgcggaaatgagagactcgaaactattcattttcgagtgagcttcccatgttggaaatgagaaatgcgaagttgcaaatttgacctttctgacttcatggatcttaattattgtgaaaaactagacagacgatctaaatagaatcagaatcagataagcaaaacctagcttactaggccatttgtcgacttgggcactgggtactcattctggagctcctggatctcgttttgatacttcaaaggttctcaaacttgaggaagaggtctcttaccccatttttgaccattccagattcattggtcaaattagattcgacatttgagcaatcaaaagtagtgccctaagttaattgtcaacctgggcactggcctctatttccaggggcccaagtttgtggttttctccctgattttgctttaatattcattattttttatgacacaaaaaatgcttgggacatttttttgagaacttgattggaaacagcccaagttgacaatatgtcaacctgggcactaagcctagtgctaggtgtcaaactggatgctgggtccttggtatggcccttcaaagttctgtttggtccccaaaaatagttggatcttagtcttttctaaaaatggagaagatgcttgaaagggttttcgaaaaacatcattggaattggcccaggttgaaaaactgtcaacctaggtggtaggccagccccaagtgtcaacctgggcgttaggccctatttcaaaggacttaggtttgtagttttctccccgagtttgctttaatcttcattactttttatgatagaaaaaatgcctcaaacacttttgagaacttgattggaaacagcccaggttgacaatatgtcaacctgggcactaggcctagtgccatgtgtcaacctgggtgttgagtctcgattatggccctttaaaagttttgtttggttccaaaaatagttagatcttaatcttttatgaaaacagagaagatgctcgaaagagttcttaaaaaatatcatcaaaattggcccaggttgaaaatctgttaacctgggcattggccaaccccaggtgtcaacttaggtgttgggccagccccaggtgtcaacctaagcactaggccatccctaggtgtcaacctagaccttgggccttacttttggcaccca

SEQ ID NO: 202959 - DNA, 593 bp, Cannabis indica
attacaaagtgtaattacactcacgtggcgtttgattgggaggaataaaaatatatagtgtcatgagaatcggataatataattaaaacccctcaattacctctaattacaataattacataattagataaacatttaaaattatataattatcttcaattaaacacaaatctaataattttcggccttagttaattattctatatatgacatgtgctatgatttaaaaaattatacatatttataatataattaatataagaattgcaattacctttttcttcccaaacataatgttttgggtggaaaatttaattagtttattaaatatttatttcttgttaattatcttcaacatcaaagaatattaaacgttgacatacatatatagatgaagaaaaaatgtatcgatttttttttaaattagaaaaaaaaaaaattatttgggtcaaatcactagaaaatattaagtatatatatagtactatagtttaaatgattaacaaaattagtcatattagctttaattagttaataatataatatctacatgtccttttctatattgtttcaacaaaattagtcatataatc

SEQ ID NO: 202960 - DNA, 911 bp, Cannabis indica
atttttaaagattttcattttttcttaccaaagaaaaatagtattttcaccttgttttccgtagtggcaacatcaaaacaacattgttctgaaataacggaaaaacaacactttatattattgtaaaaataaattatgttgttttccgtaacaatgtcaaaacaacatttttttttcaaaaacagcaaaaaaaataacactttatatttttgttaaaaaccgtacaaagtgtaaaaagaaaaacagcagattcataaaaaagtaaaatttttcatttttgtatatttatgaaataatccctaaaagatataagttgggcttctttttccattctgccatgggctcacttgggctaagataagaagttctaagcccatataaggccgaacaccatttgaatcacgttggaaatatattggagagtgattggcccacacacaaagatacgaaaaataagtttgtttgtttattaaaagatcattatttttattggattatccattattattattattattattattggtttaattatgtgctacgtctagtacttgtactcctaaaaatagttttacgtaacgatgagacaaaatcgcaataaatatatatatttgttattatttgaacaagtctttgcacataaccactcatttcataatgacataattacatttgtcgataatgattatatttcatttatttatttttgttgtactttgaaaaggtaagaaggtaccacgaaactacaatattttctttttcaattgagatagagatgctcatcaagtttattttttctttttaatttagattgttatcatgttttaagattaggaataataataatactctacaatgcaaagggtttatcatatattatatttgtgttgtcatagttggtaggttttata

SEQ ID NO: 202961 - DNA, 2090 bp, Cannabis indica
ctgctagttcatggataccctaagacgtgcacacaaataattgagtaatgttgcacggtctcagggtttgcatgaacttggagacgagattttctttacctttttggtttggggtgaagggagctctcaattttccttctcttatttcttattgtataactcatcttgttgttgttattgtttttattatatttttttattaaaaaaatgagagctctcttagctccaattaatgctaaaatatagcaataaaaataccacaattgctagttcattgataccatgcgtacacatgatttaataatggtgaacgatctcaggatttgcatgaacttggagatgaggactttttaactttttggtttggggtgaagtgagctctcaatttttttttctttttctttattatataattagtgtaatggccttataatatatttaattaagttgaaaaaaaaaagagctctcttgtctccaatgccgaaatatagtaatgaaaataccacgattgtttgtgtatggataccccaaggcgtacgcacacatgattgagtaatgatgcatggtctcacagtttgcatgaacttgaagaagaagttttctttatcttttttgtttgggggtgaagggagctctcaattttccttctctttttcttattatacaattaatcatgctgttgctattgtttttattattatttttttattataaaaaatgagaactctcttggttccaatgcttaaagatagtaatgaaaatatcacgattgctagttcatggatactctaaggcgtgcgcacacatgattgagtaatgttgcacgatctcaaggtttgcaagaacttggagatgagattttttatctttttaattttgggtgaagggagttctcaattttccttctcttttctttttatataattaatcttgttattgttattgttttttattatattattttattattaaaataaaactctcttggctttaataacgaaagatagtaatgaaaatacaacaactgctagttcatagataccgagagaggcatgcgcacagatgatttagttatgttgcacggtctcaagatttgcatgaacttggagacgaggctttctttacctttatagttataatttaggtttcttcttcttcttcttcttcttcttcttcttttagctataatatctttgctagttcatgaatacttcaaggcgtgcgcacacatgattgattaatattacatggtcttaaggtttgcatgaacttagagactagattctttttacctttttagtttgggatgaaaggagctctcatattttcttctctttttttattattattcatgatgttgttgttattgttttgtttacatgaactttttttttattgatttatgatgatcgactgctaattttttttttttttaaaaaagtaattattatgtttatttttctttttttactaaaattatatttatgttttaaaaactaaggtgacatttggttggaggtaatggaatgaaatggaaagaaaacaatttttattctatttttttgtttgattacatattaaactattaaaatgtcattccactattccattttaaaattaaaaaatatatatatatcattctaatgcatggtgataatttttttatgttttttaaattttatttaatttcattcctaaatatattcttatttctttttcctatgattttattaaagtgatatgttatttatagtttataccataacgatgaaaatattaaataaaataataacataaaaatattgtaattaaaggaaatttataattaattattatcataaagaaaacaattaataaaaaaaaatttgggaaatgattactagaatttgatacactatttatggtctatataacgatgaaaatattaaataaaataataatatcaaaatattgtaatatgaaaggaaatttataattaattattatcattaagaaaataactaataaaagatttttggattttaaaaaaataaagattttttggaataatactggaatgatttagagtcatattcttatacttaactata

SEQ ID NO: 202962 - DNA, 906 bp, Cannabis indica
cttttcattggtaatatgggcagtgcttttacatgaacaaataacaaattaaacatgttgatataaagcactatagaaacatgaaagaattaaaagatagcaatagattgaaaacatgcaattatattctcatcagtcatcaacaaaattgtgaaccaaaataattttcagtgaaatctgaaagaaaggaaaatctggcaactggaaattaagtttgttcgtacaaataaaatattacagaggtttgtttaatcttcctcctcaccctcgttctcggcaatattgaaatacctcaattcataaacattgcggtccttgtttgatgagattacacggagccaatcacgaacattgtgcttcttcaaatacttcttggtcaagtatttcaaatacctaaacaaaaacaacagtatcatcagaaatctcaattcataaatgaaccaaatccacacacaaacataaaatcattttaatacaacaaatctaatggttttagcttcttaaaggtatgtatagccatcagaaattgcattactcaaaccatgtatgtaaagggtcctctttgagacaggacaaatctcccaaatgaaccgaagttctattttcgctagacaattacacatttaataacaacaacacatcaactttcaacaatggcagagcaaatgaatgatacctcttggaaaaattactgtcagatgtaacagtaatcttgctcttttcgcgggtaacagtgacagagtcaccgagagcccctgccttgccaccgaccttaatcctctcttggagaaacttctcaagggatgcaatatccataatcttgtcttccacaggcttagcacaatcaattgtaaatgttgctcccttcttcttccccccttccggagctgctgcacttcctcgact

SEQ ID NO: 202963 - DNA, 2946 bp, Cannabis indica
gtgtgatttttaaatattaaccgcatttatactacatgatatgtaatcaaaccccatgatttcaggggagaattattgtaaaaattacagtcaactctgtaattaactgcctgactatgtaattataaatcgaggcaagttagacttaaaaagggacgaaaaattcataagaagaaaaagggcccttagaaaccatcagaaatctaataagattgactcgtggactaatgcaaaattttaactgcaaaaccacgtaaaaaacctttgtgttcatattattttctttactgtttttatttttctgtgcaagtttatcattcaggctcaaatttgattaacgaaaatttgcgttaacacatatatttattggtacctcggtgcaactctatgtacacctcaccgataccctaatatgttattatgatggcaactaacatgtatactaaacatgtatacatatatgcaaccattatactaatcttaccttgattccgaatgcaagtatgtcggtaaccctgagtggaaattgctgccaacgatttacaggcccctaagtcacaacatacgcgaaattgataaatgatacgctaaatcactttttagggacttaaaattaaaactaaaagttttcctatcgatggataacatggcaataccctaagtatcgctaaaatataaaatctagagtgccaaaatttctacaactaataaatcaaattcccaaccagaaaaaaaccagtttctaagggtgctgcatggggaaatcggtggaccgattctacagggaaaaattgaaccggtcgaccggttcagtgcaagaatcctcaaaaacttcacacacaactcaattctaccccaaatcaattcaaacctcccagaccacctaattaagtcataacaaacctatttcaaccaaaaacaatagatataacttcctaaaattggatttcaccattaaaagtctaagtttgaatttaaaaattcaaaccttggttcaacacaaacatagccaacaaaaacaagtacaaacaactcctactgacttaaaatcaactcagaaaatgaatctcatgcaatttaaacttaaatagtaccataatcacatttttatttcaaaatgaagctcaaaacctagaaaacaaatgcatggaggaactaaggctcttacctttgaattcagccaagaaaaatccttcaaagcttgctgacatcctcaagaacagaatgaaagggttgagttctgctagtttttctagagagattgagacagagagagagagacttagagagaggggctttaatttttggttttgtgatgtttatctaactattaacttaacttaatctaactaataaaaattagcataataatactaattttattttagaaattccacttaacattaccattatatataactcttaaggtaaaatgatcaaaatgcccccttttttttttttctttcctatgtaacccttaacacctaggtaaaatagtcatgaccaattacccgcgtaaacccaatattctataagtccataacctcttgcacccgctaattttaagatacttaactacatctaaataactctataggccaagcattccactgttaccggacataaaacatgcaattcataaacattcacatagaacatatataatgcacctaacattcaaatatattttcgtaattgagaaaatattttcctaagacttactaagaggcacaaaatcacatactaatcattaaacctcttaattatctgctaattcccatgatttaactatgcggtcattacaattattctctttaaaaggatttcgttctcgaaatctagtctgagtaacttcagacattgagcccacaagtcagattttaattccccggtggttccctctaccttaatgtttctacaagtatcttgaccatactatagttctgcttcaaataactttacatttcttatcgagaatttcaacttatttctcttcataagataggtttaactgaagttttagggtttcatgacttttattgtctacttagagaaacaagtaccctgaccataatcttctctatagtcttactggtctacttaacaactgacctcagatctagatatttcttgttccgagcttcaaaataaaaattacacttcataccatttaacattatatagggaatcatccctattatagtttgataactgttggttgcacgagaacttaatcaaaacagatacttgtctatacattcttgtaattcatcacgtaagtttgcaatatgtattttcatacttgaattttccctccgaacaggccatctgtctaaaggtaggaagtcatactaaacttcaattacataataatggtcctctgtagactttgttcaaacctaaagatggatttcggtttcctatccgaaataatggactttagagttgcataaagtcatactatttcccttataactttccatactaactcttgtaccaaagtagtaccatacaaaaagagatactcatggttctaggtaatccaactacaagattcctagcaactacttctcattttactcgagaaattaacagatcataataacctaacttaccatcatcttgatgattaatccattaacaaattaagcatctgaatacattatccactatatccttttgcattctacaccataagtcgatttcaagtcttagtacaccttaatagtactaaaatataataattaaggagtggtacaaattttcattagaatgttacttctgagctgaatactacttgaaacacaaacttaagttttatgacgcaacattcaactaacccctacgaacacataaagaaatcgcataaagaactgcataagtcttaagtcttgacctacatattactagaaatcatgtactgatcaaagctttaacaacttcacc

SEQ ID NO: 202964 - DNA, 1036 bp, Cannabis indica
agggtccatgcatgctgacatgaggttgagatggcctagttgaattcttctccacatgcatttgaattagatctatttgcttttgcaatttaattaccagttccttcaatctttgtatttcctcaggtgattgttgagtaggatcagttgggtcctgatcgctagtaccatcttcactgtagtagctttcaacatctgtaggtatttgatactaagaatgccaaatttgttagcaagtaagaaacatatttattactactcaatacatataggggtatatagttagaaacattctactttaaaatcatcataaagtaatactaacatataatgttcattacaaaaattagtcactatcatcatcatcaatcaaacttaagtctattagtgaaaaaaattgttaacttgaactactttccaatctgaacctctaaaaatttattaagatagaaaccttgttttgtttagttggaaagtatgcacaactcatctttatatcattcactgttgacagatatattagttatttttaacaatttttttcttcttatttagatttatgttgaatcatttacactgacataatgccactgaatagtgaatatgcaccactaactcagcttctccgaactggtcaaaagcacatgatgaaaataatgaaaaaaaaatattatcactatataataataaccgtttgagaataaaaataaaaaatataaatttcatactacaaacaaaaatatgtaagataaaaataaaaaatataatttttatggggacaaatataaaaatatttaaaaacacaaatatcttttttattttttatttttatgggatcaaaatataaaatactccaaaatttatattacagccccacatgtccccctccctcccaattggtaacaatatgcctttcgtttcttataacgaaaattggtaacaattggtaacaatatccctcccatagtgatgaaaattttataacgaagtaactaacatattttattcaatttaaaaaataataattacaattttt

SEQ ID NO: 202965 - DNA, 792 bp, Cannabis indica
atgccgctatactatatcttctcaaatttcaaagcagcaaggcttataaaaaaaaggtttcaagagtgaggggcaaatgattataaaacatcaaagaaagtttgccaaaacataaacctgcaagcggtaacccgatcagcagtcgtccactcaggtcttttctcaacaaagtcatccccaaagtttctatttgatgtcattcgacgatggaaatgagttactttagttcttagacatggatgtgtcttaaacgctttgaggaactctttctctggcaccctgtacagatgattgtgacccttatgtaaataacaagtttcaggcacaaacaaaataataacaataaaaataataacaaaatcagataaaaactataacaataaaaaaattcaatgagaaatcataaaaagagttcagtcaagtaaatacttgtgatttgtgaacttttttagagttaagtattagtaagtcattagtccttccactcaattaaatacccaaaaaaaattaggattgactataaaacagctgcagaacatcaaaaaaaaattaccatgtgcaatgtaaataagataatcccttccacttaacaagatattgcttcacaaaaatttgctttgatccaagtgtcgaagcatcactatcatcagcaacagtaggcgcgtttcacaatccaatatcttatcaatatcactaagagggctaacctgcagagataaattattttaaattctaatatcaccaaagctgtcacttgcaaaatcatttgacattaatgaacaagtgattcag

SEQ ID NO: 202966 - DNA, 1294 bp, Cannabis indica
atcatcttatttaattttgaggggtgaaaacgaaaagtttatgatgggatgatttccaaggtagtcaaagagcattatcccactagtttattagtgcatcaccacatactactgatcctattattcaattttattttattggggaattatataattttgaagtaaagcctgaattatatttggacttaatcgaaatttcattttcttgattattgagaaaatgatcgcatagcaatcacaacaaattaattaattaattaataaaaatctaatcatcatgtaatgttcaatgcttttctttaactaattttgttgctttaatctaaaaaaatcttgaaactgttcttttccccatttatttttccatgtggacaagacagttcatatccaagtcatgtgattatgatttctatataataatttctacctcataggcatatataatagtttttaaattatagaaatactacatctctttttttcttgtatgtatgatttatattttattcaatataataattatagcaaacattcattcatgaaatacatcataatatctttttagtgatgaaaaaaaaacatcataatatcttttgattaagttattgtgcactcctttaaaaaagatgttttgatatatttttttttattcatttcgacattgaaaagaatttcaattaaatatttcaataaccgtgtatattataaaattttaaaaaatttcaaataatttggtgtcaaattaaagttaaaaataatttctatcacgtggtgtatatatttatatatatatatatataaacaatcacacatccaatagaattttaaactttattttagtactacaaaatatttaaaatattctgaaaatttataaataattacaaataaaaaatagtacaaaacacctcttttggggggtctactgtagattttttcatttcactttatgatttctaaatctcaaaaaatcatgtgattatgatttctatgtaataatttctttccttttaggaatggttaaagagtcctttcaagctggggtcattcactcttgcttaaattattttgatctttttatagggtgcctctgtcaaatactcaaattgatttattccttttcctatttaatattcatgctagtggcacacacaacaaaaccatcaccatcatgatcgatgcattgaatttcagagatatgcatgaaagtaatacaagttaaataattctaacactattgattattgatgattaaaaaaaaaaaaaacaaaaaaaaaaaaacaaaaaaagaaag

SEQ ID NO: 202967 - DNA, 1276 bp, Cannabis indica
tcgagaatttctggaagggctcctctcggggtaaagccctacaaatctagttttaaaatattttggtctttaaaaatcctttgcgccttattctctttgattgagttttttcttttattctttgtgttcattttatcatggaaccattaattctaacctataaaaagttttcaccaactattttattttcttgtgctagattttttacagattcttcgcaactggaagctacagtttaatgattcattcaaacaaattttgtactctattttattggagcaaactatgtgactcgaagattaatgatagtcgtatgggcatctctagcgtggtaattgtaattggccagttttccgtcttaagatggctgaaacgcattatagagcttgtgcagctaagttgatattttcttttagattgaaaattctttatgagaacttttccttttggggtcatttttagaatttaagaaggccgggtcaagaatacattaagtttcggtgtaaatgaaatgattccagtcttcactgaagtcattagttgtgaaattagatttgttcttgaacaactagtaaataaaagtgaatactgtaagcttaaaacatcccaatcaaaataattaaaacctatagataactatgtcatctgaaagggagaccgtacagctagagcagtctgtttcatgacttttaattagtgaccattagttgaatgtcgattcattagaagacacgattgacttggttaataaagatagcattctctatatgataagatattgaaactaacatgattgatggtaaaaaagaagaacacttgcaaccccatgttgatgatataataattttctataatgacatttatttttctttttgttttgtgaaacacccagatggctttggcatagcatatttattactttaagaatagtattatcttaaacttatacatatctatatatataaatcaggaccctgatgtagtcctcatctcagtttatagctattagattagttcagtttgatattctagagctattaacaaatagaattatataatattttattatttttttattattttaaatttatggctttcacataaaattgggagtaaccggttatattatttcgttttttgtgctgtctttgaataatataattgtttcttggacaaaataatagctattaaataatagcttttgtttgatgtctccaataaaattaaaaaagtttttgtcttttagatattcttgttaagttagttagttcattta

SEQ ID NO: 202968 - DNA, 1630 bp, Cannabis indica
aattattgttgtgtttcaatgagaggaaataagaacatgtttttcttttgatttaaaaaattattgttgtgtttcaatgagggaaaactatgtattggcacgtaacttttttttcttcttatgaaagattttttaattatcttatttttatgattttttcattacggtgggattgaaaataatatttctaatctttaatttttttaataatcttattttattatttttgtttttcttttcttcttatgaatgattcttttaatgaataatttcttgtacaatatattttgagtgatcggtaagttgtatgtaaaatatgccatgtttgtatggaagcttggtattgtatcttactgaaaatattgacattagattgattttgagatgcagtaaaatatattgtttttatagtttctataagttgtacaaatatatttatatatttgggttagcgactctgtattgataatgacatagtttggttggactaacttatcaaatgtatattgaatgagataatagtgtatattattgttatatcatatacaagttcaataattataagtttcacccattttgttgtcagctttttttcgtattttttgttacgttttcaacacaattggtggccactatcgctggattttaactgtcaactggtattgttctgcttcattggaagtcaggtattttttttactcctcatattaatttatatttatttatgtacttattgtgttatatatattgagaataaaatgatatatcatgcataaaaaactcccacattattttttccttatattttttttatatatatattataaataaatatgcacacatacatttgatggtcatggttatttatttttatttaataactcaaaatatgcaattataatgatgttgatatttaatggaaattggacatcttcatcttaaagatgcatatttttgaatcttattgttttaagtttattttctattttaattgaacatctacatttcaatagtataggacataattctctttattataaaattaaatgattaaagttgcaaatataatatccttatttaaataaaaaattattttacgttacaaatgaataaaaattgacctactaataaaattcatttaaaaataaatatgtatacttaaatgagcctaataattattattctaatcttaatattttattgatgtagaatgatattttacttctgaaacatacatttccttgattgacataatgacagatagtaagattgtacaaatacaatacttaaacatttaaatcaaatctacattagattaaacaataaatttcttaaaaaatatatgcatttcgatttgattttttaaaagatcaaaacacacgaccttctaaaagaatctcatatagagatttgccagaaaagaagaaggaagaaatacatagaaaacaaagagagagagagagatgctaaacaaacagtattgaagaactatcaagttgatacgactaattcaagttatttgaatcgtaacaatttacccacatgtactgttgatcatgcggcatctacaagtacacaacattagtattatcgtgctgatgatattaataatgatcgacaagatagacat

SEQ ID NO: 202969 - DNA, 538 bp, Cannabis indica
ctacttctatatctaatcctagctacttcaacctctcctctctgccgatcatcatatatcttcttctttttttcttcttataattaatgtttctttcatataatttaatttgtttgcgtattgttttttgaatattaattctggatctctctatgttttgtagcatcatcacgtaatcacacctttaaaaaaatcatttcaagcatgtaaatttgttcaatctccccatatatatttttctcctccataaaaaaaatctccatttatctgaaattatatcctttcattgatcaattgtatatatagccttataattaaggctggctaagtactcccttattccttaaaaacacttttataaaaaaccttcaaatcatgtaaatttcaatcctatatagtattcctgtatcaccgcatacacaaccaaaaaaaaaaaaaaattagttatcgaatatatatcatgtaatttcaaagcaattagatcatcgagcttaattatcttcaattatcattgtttgttatatatatataaaaaaaa

SEQ ID NO: 202970 - DNA, 514 bp, Cannabis indica
tattttatattcattgaatttagtcacaataaattgattgatatattttatatatggatttatcaaatatgtgatttctcaatttaatttcctaaattaattattaaactattctaataattaatgtggcagagattttaatagaaggtctcacctatgtaaatatagattctcggtctctgagttcactactgatcattctgtgaaacatagtaaattcatctaaagagagtagagagagtttagatgcccgattatccacactaataatttttcttttatttagcagatccaaaactaaagctcggtatttcgatcctataattatattgtgtatacattcatttaatttcgcatttcatatacacattcatatgtattatgcatataaaatatctaagagtaggtattagaataaattttatatcgttgtcttgatcctttaaagtttttggtgggtacatatattttgtatttttgttcattactagtcctttatatatatagggatatg

SEQ ID NO: 202971 - DNA, 1269 bp, Cannabis indica
tgcatcattgcctactgtcattgggatttgcttcatcaaaataagatcacagtctttttataagatacacaccactcccagtgacacttattttagtttatgttgatgacatatcatcacaggcagtgatcccaaactaatctctcattacacagatgctcttaatgccaaatttgctcttaaagatatgggagatctgcagttctttcttggcattaaagttacttctacatccagtggtcttcactggtctcaagccaaatacatcagggacctctttcacaaagctgagatgaatgctgccaagccttccaacactcccatggtcagtggtctcaaattattagcatatggcagtccccctgttgacaaccctcaactatataggtccattgtaggagccctacaatatttggttatcaccaggcttgcgatttcatttagtgtcaacaaagtttgccaatttatggttaatcccttacaatctcattggcatgttgttaagagaatcttacgatatctcagtggcactatagactatggccttaatctcaacaaatatgatcaccttgatcttactgcattttatgatgaagactgggccacagaccctgatgacaaacgttcaacctctgattttgcaatattctttggctgaaatctcatagcctggcaatgcatgaaacaacacacattgtctaggagcagtactgaagttgaatttcgaagcttagctcaaactgccactgaactcaactggctccactctttgtctactgagttgcacattcctctgcctagatctccaactatttggtgtgacaatttgagcaccatgcttcttactgccaatccaattctgcatgctcgcacctagcacattgaactgatctttactttgtccgagagaagattcttcagcatttggttcaaataaaacatgtcctagctattgaccaaattgctgatggccttatcaaacctatatctagtcaactgttctcctcctttaggcacaaacttacaattggtgatccctccaatttataaggtttgaggggggcgtattaggacaggttgttaggattctgttaattcagttaattctgttagttgttaggtttggttggctgtcaactgtctcttgttagttagtcggttaggtgtttgttattcttgactgttatgtatatatatcaaatcatgtacaatgcttaatcataatattagagacttctttctctcctttttcattttctctctctctct

SEQ ID NO: 202972 - DNA, 826 bp, Cannabis indica
ctaagaaatgctgaagtatctggtataccaacttagaggataatcattgaccctggcattagattcttaaagaatactgaacaaaatttggatattcttatagaactgggaaacatccgaacagaaattgcaaagaaaagcttagccttagtttcgtgaccttctaggaagaagtttttaaggcgaaatatattctcgctctgctgcagttgactgagaacctgcaaacattgtgagagtacataacgtgaaagataacttagatgctgtgaagttatgtgatgcaattttcagaaggaaaaattggttgtgtaagattaggagaagaaagtgcaatttttttctaatgcaaaaaacatgcgtcttattctccacatatttcaatatcagattttcggagaggattttgcattgctgaattataacagggacgtcctattactggactgagacttttttgtcaaagttggcatttgacgatcaaagtgtatttttttgtgtagggctaaatatttttatcgggtttgacccaaactcaaccaacctgcctagacctaacccgccaaactttttgagcgggtttcaggttcaatttttcaagtgactgggtttcggattggcccgaaccgcctatgtaacccagtttttttttactcttacataaacattattaatataaaagtttacactcaacatacattagacctcaaatataataatatttctattacctcaaaaaaaaaaaaaaactagatagtataatatatacacttctttaatgtgttaaaagtttatatgtttaaatatttctattaaattttaatgg

SEQ ID NO: 202973 - DNA, 723 bp, Cannabis indica
ctgtgttggagaatttttaccatttctgtgtatagatagtttgaataatttatctaaaaaaagtaactaaaaaaattccaaataataaattaatgagagagaatcatgatgatcatgaaattcggttatattatagtaataattaataaaaatataataagcttacgtactataaaaactgtacatagaaatctatatatatatataaaaaaaaaattggtcgaattccaacaagaatttggtttaaattttagctcatacatataaagtacaaatattactaaattgatcaaaaaatattaatggtgataataatttgaataataatacttatctttgaaataaaggacataatgatgactatgtgttatagattaatgaataaaaatgaggctatactatatatatagtgtttgcctttaaaattttgaacttggatatttgattgtctatttcaaatgtagataaataataaataaaaaaaaaaatggaaagaattaatttagccaatgagtctttgtaaagatctacaaaactgtttcaaaatgggttgttaataatactttattcgttcaaatagttataataaatttcaaaataattaaagtgcatgctttaatttgtgaagagttataatatatttagttaaactcgatgtggctaatatttaaggctgatcgatgttaagaatatttgtttcagagtcaaattaagtgggttaat

SEQ ID NO: 202974 - DNA, 525 bp, Cannabis indica
aaaggcttgttttgtagtagtgcaatctaaaaaaaatgtgtaaaaagatttaaataaagtcttgtcactagagcatcatgaaattaagtcaagaaagaaatccaaaaggtttggtgtgattgaagcttctaatgctgaggaatttagaactatggagtagcgactcaacataagaattcaatgtcatggtgctaacaagcaaaaatttggtagcaaggtcatatttggatagttgattggcgcgcatcaatattaggatacaattgaggcattgaaacccttaattcttctcttccaaaatttttgcttcaagcgccacaacactaccttgtagtattgcggggtgcctcaaaaatcttgaaattcttgggcattcttaaaaagacacaggctgcaacactcaatgagtaatgtcgcggcccgcctattttaagttacaaaaattagggttttatcttttctagagttatataagtgatcttttttggcaccatggagagatgtgttgacctcagaaattggcca

SEQ ID NO: 202975 - DNA, 1151 bp, Cannabis indica
caaaatgcaaatatatatagagtgtttttataatgtattctcttaaaatgaatgtatcaaagaaaaaaaatttagtctattttttttaatattcgtgtacgttataattatttaagttatcctaaaaaatgttaagtaattcaaaataatttacaatatagaaaattgtatatttcgcacgtgcaacacaatgtttaaattttatttttggtacataacaataacaatgaaaaaaaaaatgaaaaaaaaaaattaactgataaattaataaataaggatgcaatgatgtatgattatgagataaagatgaaggtacttacccaaaggagtccaataacggtatcgtgggtaagatcatagttgtccttaaaggtgagcaaggagtcgacaaaatggtgtttggaagaaccaatttcccggcgagcttgagtatagtcatccatgatgttagaggtgagtttgtctctcctagaaacgtgtttggcaaaagcctcttcctctattgggaacatccaacgcacccaatggatgtgttcggccatactcaaggacgcacctaccttaatcccgtttgtcactattcctttgaactcctttccttgctcgtctaactctccctccgaatttctaaaccgttttccaaacactagccttgttatattgttgaaagccactgccccaataaaatcccttacttgcaaacttttcccataattttctgccattaaataaatcaacaagattataatattatcttatgaaaacaactagtttagattgaaaatagcctactacaaatataatgtaagatgggagaaaatttaccaaaatattaggacacggaaatttttacatttttgtattgagttaacaaaaataatgtattaaagtttcaaaattacaaataatgtatgaaaacaacccttaaaaaacttcacaaacaatataaaaacaactaaaaaaaacactacaaaacaacaaaaaaaaaataataaaacattaacctaattacaataagcaaaacaatatcaacaccgaaatatatttttgtattacaattttatttatttagttttgaaaatatgatttatctttttatactattacattattcttttttccataaaatttgttgtttacaactttaattc

SEQ ID NO: 202976 - DNA, 781 bp, Cannabis indica
aaaaatctactatttttgtaaaaatcccatgtttttgggcctccaagttaaatggacctaagttagcttaggactggccctaatttgaggttatataataataataataataataataataataattgtaaactatgtataatcagattatttttcttttcttttttttttctgaaaataaacttcattaatatacaacatttgaaaagaaagaaaaaaaagatagaaatcagtttactattcactctaagtatatgcataacaattaactaatttatgagtacaaatataaaataggaatgccttaaaaaaattgaaaagtaaactaacaagataaagatcgattttattaggagaagatgaatgtattgatgaagtataagagaccaatccaacacttccattaaaagaattgtttttgcttgaatgattgtgagactctcatatataccacatccatctgaataattgaattatatcctcccatgagagaccagtctagcactatgtaccatcaattattcaactgcttcaacttgaatgacagcaaaagaaaaaatgtaataacgttttgtacgtcatcccttttcaagatcatatctaaagtctgaacataggttcatagaaaaatcttcattgaaagggactgaaattaagcattatttggaataaaataactacttgaattgagtagaattggaggagtcatttaagaaagtccacttctttgatcacactttctagcttatgcacactagtgttgaactatagtgaatctaaa

SEQ ID NO: 202977 - DNA, 658 bp, Cannabis indica
aattataagttcattgaactaatatataaagtggattgattgtgcatgtactgatatcagagtaaattttagcaggttattgtaacctttctcatgttcctttgtttgaataaccatcatcactagttctcaatttgttccacagtgttgatagaataacagaaagttgttactgtaattagttgtaacggtttgtttgtttattgttagctttctctttctgtaattttgttattggcaattgtaatcggtttgtaaatggtcttgagtataaataaaagctttgccaatcagtttgagattgagcaaaaaaaaaccttttaccacatttcctctctatcacttcatctctctctcccttttttgtctttctcaagaatctgttttcagattctttaaatgactatattatattatttgctttattaattaggctataagagtccatatatcatgataatgatatttattagctaggagttacaaattagattttgatatggatggcccggttattgagatatatctatatatatatatatatatatatatatatatatgcacgaagggtcgcgtgggcatggcttgatagactagtgtttaatattctaatctatttgctaattacagagccactgcttaagaatatgttgtgaat

SEQ ID NO: 202978 - DNA, 546 bp, Cannabis indica
tacttatttataaattttttccaatttctaattaaaaaaaattaaaatttttactatacaaattgattaaaactagaattatacacaataacttatatataaaaaaaactatgagataaaattatattattttaaaaaaataataatacttcttataattagctaagaaaatatatcaaaataaaaattcttaggtatataaattattttaaactagaattagtcataataatttaatatataatataaaaaattattactcttaatgtggttatttggcaccttaataaaaaagcaatcacatggtttagactagtatgagtggatattataaatattgtttctattgaatgcttgaattttaatattaattaaaaaaatacataaaaactaactatatgtgagtttttaggaattttttaggaattgctttaattaggtgtaatatatcatcaaaaattattaaacaacaaataaaaataaaatttaaatatttttctcattatatatgaataagtacaaaatatttttaatatgtattacatg

SEQ ID NO: 202979 - DNA, 665 bp, Cannabis indica
caacattactcatagatttacttaaaaatattgttgattaactacccaaaactccatcctcacaaaccaaaaacatatttgccaataataaaatacattcccactctctaataatgtcttggaaacacagcccctcaaagtacttggatttaaaaacccaagttgtagtggattagatcagttttttaattggatatcagttcgacacttgatttttaaaatattaactaaaaaacattaaaaagaacacataaaaactaaactatatgtgagttcttaggattttttgagggatttctttaatcaggtgtaatagagtccatgaaaaattaatgaacatgtaaaaatgaattttagatattttttttattgtatataaataaatataatacataatatatgaaattggattgaatcggtttttaattggactttgaaatattttcaataaccggtccaatctgattagaattcaactattcacatccaatccaattcgattgtaattggatatttaactttttgtaattggattggattggttcggtgttattaaattggattggtttgtggatcctgcccacccctaatttaaacaataaagtcaatagtgtgtatgtacggctaactcagtcaaacctgtagttttattaattctactttca

SEQ ID NO: 202980 - DNA, 684 bp, Cannabis indica
agtgcttgcggactatattgtggcacgaaggttcaaaatatgatggtctagagttgtttaagattaagaacttggacaaagcattcccacggttgagagtactatcaacaacggactgtgatatcaccaagcttcctaattcaataggcaatttgaagtatttaagatatttgaagttagattgtaaatatattaaagacatacctaatacaatatgtatgttgtataatttggagacactattgttggagagatgtagaaaagttactagactaccaactgatataggaaatttaatcaagttgcaacatcttagtgtttcttggaatttattagagatgccattgcaattggggaagctacaaaatctgcaaacacttaatagatttgttgtgggaagaagtagagattctggtggcattaagttgttgaacgagtttcaagatctacacggtagtcttctgatagagggactagaaaatgtgagtagccttgaggaagttacagatgcaacattgaagagtaagaagtttcttagccacctatgtttggcatggggtgattacttgcacaatgaaggagagctacttagtgccctccagcctcacccaaacctaaaagcacttgcaatttcgaactacaaaggcaacaatttcccaatttggatgggagatcatcgctgct

SEQ ID NO: 202981 - DNA, 610 bp, Cannabis indica
aaaacgaaataaaataagggacggatatggaagtggagaaggtagatgtggttcgaaccgtaggtgtccacgtataaggttttggttgcgatattataaagaaattttgttatattgactcatagcctttggtgatttgttcactccaccgccatggaccttggtttttttaatttctaacttcgtatccaacatattggacggtcgtccgtggtcaacaaatatttttttttgtaggtaaaccaataactttagtattttagttacataaattacatcatatttaatctataataaagtcaatatgcaattatgtaaaacattctgattattattttaattttattccaaaatttgatcactgccaattctaaaaattaataatatatttaattctcaataagataacttttaactaatttaatttttctgaattaataaagaaaaaatgttattaaagtgtcacttttaaatgtaatattatatattatataataaatttctaaccaaaaccattatttagcaactaataacagagctggcttaaaactctcaccttttgttataaccaatataccatttgttatacacattattaattattataata

SEQ ID NO: 202982 - DNA, 660 bp, Cannabis indica
catgctagatcccaacagctgcttgtagaaagacagaaatgcttcagttataagttctagctcatgaacccgattgcctgcttcattttcaatagatagaattcgattctgcctcaccgatgtttaatgcacgcatgaaacaaagcagtattactatctccgttcccaatccacgccattttttctttctggtgcagaaatgaagagtagtccttttgcactttgactaataactccctagcttccttttctttgctatgtaattctgcattcaatggctgctggtgcatcatattttgccatgactccagctccatctttgccttgttgactgcactttgcaaatctgaaaatccctccttgttaatttctttcagcttaactttaaactgcctcatttttgtaaccacttggaacattttcgaccctcttatttccacactccagacttcctttaaaaatgattcatattgagggtgagacttccacatttggaagtatttgaatggcttcttgccccccacttgaccagggtgaagagttagaataccaggagaatggtcaaaaaagaccttcattgaggaacacaacttctgcaaattcataagtatttatccaagcttgattagctaaaatactatcaatcttggaaaaaattct

SEQ ID NO: 202983 - DNA, 1042 bp, Cannabis indica
acaaaatcaaaaacaaaaacaaaacaatgttaagaatcttaagattgtgtcaaattataatgcattacatggttatagctataatctatactaatagtactatacatattactaaaaacataaagaaattcaatatcgaatcatatatatttttatttaatattaataaataatatttaaaataaatggtcatacatacatctctcaattattttattatttaatattgtgtgtttaaaaatctatatataataatggtaataaaagatcaatgaaataaatattctttgctacaagaaaaaaaattcattgttaaaagacaacaataatcgaaactacaatatttttttcttaacataattgaagttcataattatatttgtttttaaaatataaatttgtatccaatcaaaaaaataaattagagatttttattcttaaatttatagctaaagaaggttatttttctttctgaccatgacctgctgactttcgcttagtatacgtgcatatttaatattgtggttcaatttttgctattgtgattaatcttatttctaagtcatgattttgagtgttttagtcatgttgttttatttagtttcgttgttagttcttctttgttcttcgatgacttgtcatcaaatcactcttaatggatgtgaataacaagttctccacgactgaaagagttattagtagtgcaattacttaccttacacattgagtactcaaactagttgtaataatttttactattgtgttttctgagcaatatataaaattaaatataagtgttttctgcaactgcgagggttgttaatagtgcagtttttttgtcacgatccgagaatgagatggatgattatttgactcatttttctagaactgcgaggattgttagtagtgcaattacttaaccttacacatcgagtactcaaactagttacaataacttttactattgtatctcctgagcaatatataaaactgaatataagtgttctctgcaactgcaaggttgttaatagtgcagtttttt

SEQ ID NO: 202984 - DNA, 2385 bp, Cannabis indica
ttttttttttagaattcagcttaattatatttcatcaaccaagtatcatcatcacagatattaaacttaatcaattgagtcttagtaaaaccgatctagtctactacagcgaatcacaaaataaatttatgctttggagtaattaatcgaccgtgcccatacctaaccataccacccaaaataaaaattgaaaggctttattaagcttttatttaattataataaaatgtattgtaaataataaatattcacagtttagttgattaggttatatggtatataagtgggttcaaatatgatactttttttttttatatatatttacaatttaggatcccaaaatataaataatcttaagtccatatattctcaaaattggactaactataaacttaattaattattggcataaaaaaagaaagtaccaaacacacacacaacacacatatattctcctcaactaaactatataaatatattcccagcaaaacaaaagaactaatgaattattaattgtcattgccaaaaaagaaaaaagctattgacatatatttcatttatagacctttttcttttcatgaacttttaaatgttccaattttcaaattgaagaaaagaacactatatagatagtacatatacatcttgtgattaaaataacattgctaggccccatcaaatatttcttgagtttcatgcacgtaaatattactatataattaatttatgtaaattaattaataaagtgtaacaaactcaaaacaaatattctctaattacaatagctatatatatagctttattaatgatctcctaccaagtattacgaactctactaaattcaaattgatacattgatttcatttctatggagaatccaaaaacgacaacaactggtgagaaaacgacacaaagtcaaatcttcatctcatggttagctacattcattttagtcttgatagtgttatcaggtgtgaccgttctcattatatggcctgtactcaacccaaaacgactcgttttcactgttgaagacacttcattccaatacttccaaatctcaaacgacaatctaaatgcgtcgtttaacttcaccgttcaatctcaaaacccaaactcccgaatcgcaatctactacaactcaatccatttcaaagtcatttaccaagaccaggccttaggggttggagtaatgggcccattgtttcagcccaaagatgagaagactcggttctaccttaatactactactaataataggcccattgggcttccgagatgggcttccaatgatttgaaggtccagcagaagaagcatggtaagattaaggttgaccttgagatttatggtaagattaggtttaaagttggtgtttggaaatcttctcatcgaaccctaattgcattttgtccatctgtttggattgatttttatgaggttaaatccttccacaaaagtaattgtaacgttcaacgtctttgaattttagttttaattgagtaattatgtataaggttaatactatttttaatcttgtattttgttaaaattattcgactctttgttttcttaagataaaaataaccatgtattttctaaaatagtacaaataggagtttgagctcaatttttgagaatttcatttttaatataactaaaatgaagacaatttctagcatgatgtaaaaaacgtcactagttttgttataacgtctctatatcgggtttattaaattttattttgacaaaattcaattgaggatactatttagtactatgttgaaaaatacaaagtctaaattattttacaaaacacaaggtttattctataatttttgtaaaacacaatgtttaaaatagtatttactcttatataggctaaggcggggtaagcttgtacttaaggccaaataaaaatatatcttttaataagtttacatattttttaatttttttaaaatatcatttattataaaactaaattattttcctaaagcctaaatcaactattatgggtttaacactcatcaataaaaaatatgggcaaaatactttttctaaatttttatgtggtaattttgtaaaaaaaaattaagaatttatgtgaaaataaacttaaaattatgacacaaaccaatctttgtacaaaatatgggaaaataaacttattaaaaattctaaagaaagagccatgaaataagttttttttttcaaacttattaaaattaaaacattgaaatcatgtaattttcactttaattattctgtctagctagcaataatagcaattataatcatgtaaaataaaagaattaatgatgcatgtttgatttcctatatacattcttcttgtcaatttataaaagttacctagattaatatta

SEQ ID NO: 202985 - DNA, 590 bp, Cannabis indica
agtcaatgacccatttggagcatgaagaaaagacacgcatttgttttacctgactcggcaatagtaatgacaggagatgcagactgtgaagattttccatactataagaatttgagatattcatctgtaaaaataagaacagattttccagaataaattacaaatactatgtcccaatgtttgaaattgtgaatttaaacataaaggcatttttttaggcgaggtgtaagcctcaaggcgcattgaggcataaattgaggcgtaagccacaattatttaattaaaataattaaaggaagaaagaagaggaagcagcagcaaggagcagtcattttcctttttttccttttcttagagaggaagcagtagcaaggagcagtcattttccttttttaaagggagtttgttgttttttattgggctttttgttaagttaaatgttattgggcatttctttaattgttgaatgaaaatgggctaaaaaaagccccaaattctggtttttcaattgaggcgtacacctcaacatttcagaccacctcacatggctgaggcgtccgcctctctccattctgaggcacacgcaatag

SEQ ID NO: 202986 - DNA, 770 bp, Cannabis indica
tttttcatatatcatattttaatatattttcgtatatgcggctcaaggcatactttcagttggagtcttggttttggacagactcagagttcttgatgacttttcaatcaagtaaaaacataattatataacttggaagaattgtcactattattcttggatatgaattacttattatatatatataactctcttcttctaacttttagtgcaacattaagttaatgatttaaggaatcttatgaggaatgaaaggatatcccgtaaaaatatatagcaaatggattatatatacatatatttgtgaagttgatgacaataaatgaaagatagtttgtgtgaataggtgtttattgtgaatagttgtacctatatgtgggaggatgcaactcttagtaatttatattttctgttaaaattaactttttattggagaatattctgttaaaaaacataacaatctgttaaatgcacaacaaaaatggttaaatagatatttatataataggtaagatattaacatgtctaataaaataatatggttgcttctataattgcacctcttaaaagtattaatgatacctttgatctgctttaacatctagaataattaatttttagtataatttttttttttcatattttaccaaattaattttgacaaataaaatttaacagttaaaattaatgttaaaaaaagtctattttgctattattctcgtataaaataaaatcctcatccatataacacattgtttaattttatttat

SEQ ID NO: 202987 - DNA, 555 bp, Cannabis indica
cagcagcagagaatttatctaaccacatttgattagctaaagcccgatctatttcggagtagattcgagtttcagcatcttgtttgttcgaacaagtaaagaaactgtcagtgaacttcacatcttccaacccacacacttcaacacattctttgaattctttcgaagcacgttgccttttgtttcccccgattctctcttccacgctcaagataagttacccaaaaccatccgtggagacttcactgacacctcaatttctttcaaattatcccataacattttcctactctccttgtcattgaaagcataaacaaaggttgccaagaatacttccaaaccaggtctcgattgaacttttaaatgcattaattgactagtgcatttcacgatgtttacactaaacatacttggattccaactcaccattattcttccacctttataccaggcattatttgtagagaagcaccaacgtgaaaacatatttacaaatacagcacccaatctatgagtctgtattttggtttcaaggagaccaacaagacctacttg

SEQ ID NO: 202988 - DNA, 1314 bp, Cannabis indica
accattaatgatttttggaattttttttgcaataatttacaattttaatttattaataatcatttactttttgtcaaacctatgcatgcatggtagtatagttgtataatataaatattgcaaccatcataatctaatatactaaattagttttgagatataatgtcatacctttttattctttccatacacatattattttatttttatctaccacacttcaaaattcttaacatagtattaaagccaaataaaaatactaacgactatccgatctaaatccaataaccattccaaaaaaaggaaaccaaaataaattgcttgtgattcgaggagccaaaagtgccacttttgacctaatcatctaagattggtgagcaaaaaatagtcactatctttaggagaatgttagagtcctacattaataatgtataaacttaatatcatatataagatgtatgagctactcctatcattatcgattagttttgagataaaatatcatacaactttttatacacacaccctattctacctttctccaccacatgacttccaaattcttaacagtgagatgaaaaattggtacattttaatatttatcaactcctaagtttggttatgaacttttagcttagtatagagagtgtgtcattacaagattgaatccaaatgaattgcacaaaattcatgaaaagtatatttgatcaaaatcattttaattcgaataacttagtgtctaaaatgattagattttcagtaatgaaataaaatatttaaccaataaaaataacaaaccgaaatgattattttaatagtttgtgttagagagttccacgttgataatatgtgggaatagagtaccataaataagaagcatgagctactcctcttattgccaattaattttaagaaattaagatagaatctcatgcatcttaccatacacttattctacatttgtccaccacactaccaaatttcaaccagtccaaaaacatgagccaaaggaattgcttgtgattcggggatagtaaaaccaagaatacccattgtgccaaaaagtgtcgccaatacaaaaaaacaagattggcgaagaaaaaaaaaattgcaccatcttgaagtggggtgttaatgagtaccatatataagatgcatgcgttattcctctctctgccaattagttttgagatagaatcccataaatcttacctacacttcacatttttttttactttctatcaacactttttcattcttaaaatggtattagaaaaattcaaagttttcacggtcttagcctttaacttccat

SEQ ID NO: 202989 - DNA, 1921 bp, Cannabis indica
gtaagtgtggtatcaattgttttccatctcatccatgctgcaatctcaccaaaacaccctcttattttgctgcaattaaagaacaggggttcatgtgtttcatcctccatgttgcagagaacacaggaagcattttcacagatgccaaacttgtgtaatctatcttttgtcctcaatcttctctgcatagcaatccacaaaataaagctatgtttgggggtgttaaacctcccccaaacttgctcactccacctctgcttttgctgaacaaaacacaacagtttgtagccatctgatatttggtatttttctgttacaaacctgtgtgcatcaataagagattgccaaatcttatttttaagagctacaagttgcctccaataccagctaccttgagtagggatattatagctccaccagctctcttccttgatgtaaacactatgtatccactttacccatagattttcctttttttagccactgaccatatgtatttaatcattgcagcttggttccattctctaactttttaatccaatgtcccctgctgtctttgtttggcaaacattgtcccattaaatagctcctgctccttgaaacatggattgtcccctccacaaataagccttacagatagcttcaatttctttaataactttcttaggcaatagcataacttggctccaataggcatggattgttaacaaaatagagtttattaacactgctctgccagcaaaagagatatgcctagaactccaagttcttatgcgtgcagtcatcttttcagcaagtatggtgcactccttgctagaaatctttttagcacagattggaacacctaggtaagtgaaaggcagttgttgttgggtgaatccagatgcatcaagtactctagtaacatcctgtcttggcatgttactacaatacatagcagactttgatgcattaggaaatagttcagatgtttgagagaagagctttagacactgaagaagatatatcacacttttatattcaccattgcagaacaataaaacatcatcggtaaagttgagatggtttaaatgaagttggtcacatctgtcatggaattgaaagtctgatttcatacccactcttttcagtattcttgtcaaatattccattcccaatacaaaaagtaaaggggatatgggatcttcttgccttagccctcttcttgaagaaaaaaagtccatgcattgagccattaaacatgatagagaatctaggggttttaatgcacttcataataagctttataaactggctgaggaatttaaatgcacttagaacctcttcaatgaactcacactcaactgtatcataagctttctgctggtctagttttatcatactgctaggcttattggatttccttccataatgcctaataaggtcctgacatatcataatgttgtgcccaatgtatcttcctttgatgaatccgccttggttttgagccacgagatcaagaagaacatgtttaagtttagcacatatcagctttgatccaattttatataccacattacaacaagcaatgggtatgatatctttcactgtgttggggcatttcaatttagggaccaaagttatcacacttgaatttatttctttcaggatttcccctgtttccaaaaaagaaatgacagcttcacataccaaatcccccactgtgtcccaattatcttgataaaagaaactacagtagccatcggtacctggtgctttgatgcctggtatgtcaaaaactactttcttcacttcatctggagtgatttttgttgccagtaattcctcatgctgcattgttatctgaggccccaggtccatgacttttgttaagacatgccttctatcatgcatcttagttcccagtagctccttatagtag

SEQ ID NO: 202990 - DNA, 721 bp, Cannabis indica
cttatgattctatgtagttgatcgtatataaaattaaactcctaaaatagaaaaaataaataatcaaaaacaaaattatataggacacacctgttagcgcggatgttcatcaaccatttcctctagtaataaaataaaaaagtaactaagtagggagtgaaagtatatatagatggaaaacgggtatttctatagtaagtggtaaccaccattttccattacgcgctcttctcagacaaaaaaaaaaaaaacggtaagaaaaatccacgctctttatatatatatatataagtgaaatgtgtattttttttttgttcggttaaaaatcatgatagtaataagattttttctaaaaaactttatcaattattatttaaataaaattattatgtaaagaattaaaaccatatttatatattatatttaaatacataaaattgttaatcatatttttcggataatagaacgacctttttttaaaatattattgtttaaaagtatatattcataatatcaattgcaacatattagcttctataattactcaacagaattagataaaaaataagtgagaaaaagaaagtataaagaaaaagagacgcacctatatttaccggtacaattatcattactgaaacacgtttttcagagatcttgagtgtgaaggaaagctctcccaattcaataaaaagaacttcaaaagaaaatcaaattgttagaa

SEQ ID NO: 202991 - DNA, 1713 bp, Cannabis indica
aaaaaattaatgctaaaatagtacttttttggtgattatttaatactaaattcggttttggcattgaagttgcccttataacactataaaaatcattgaatttatgacgattacaagcactataatttcagttcttaagtcgctatatttttttattaacgatattcattatagttaaaacatcagttctgtacttaagccactattttttgttatggcaatgttctttttctttgttaaactcatttataattaatttgactatcgatataagtttaagtctaaatctagtctgttggtttacaatctttttagatcagttaacaaaaaaatcgtgtcaatctattttacaaaatattgattagttgaatacttattaaattaggaatattaaaatgtaaataaataataatttgttagtagtgttaattacaatttagaacacgttgaatgaaagagttaattagaagcatgaggagagccgtttttggatgaagtcttaatataaaccaaacccaagataaggtccgttctcacggggcgccggcttagttatataattaattaactaataataatatgaattaatcattcaactttttattaaattatatataataatgctaaagacaaagtcgttttcaaattcatgaattggtaagcactaactaatttatttatttattccatttttaaatttgaaaaagataatctatacatatgagttggtgtactgtaaggtaagggacttgcttgagtttatatatatagtcatcatcaccacatggattaattaatatatatatatggaaattaaataatattggattgtttattaaattacaacttatgtattattgtctcattaaatttttagtctttaaactatttacagtgttgtaatgttaattattttgtcaaattttagtacacgtgacaaataaaataataatatcgatgcttagttaattgttacattaacatcatgttatatttaaaataaaatatatatttttaaaaaatcattaggttagaaatcaatttattattaaaaaaaatgatgttaaattaaactaaaaaaatttaaattattttgttaaaattaattacatacgtatcgttagtgtgacactgatatatcaatttgtctaaataactatgtcattattctgtttaacacgtgtgataaaacttgacaaaataaccaatttacaatattaaaaatagtttgacaattattcttaatagactgaaaaatttaaaaaatacaataacacatcataaagacaagacactaataacacatgtgataaaacttaacgtaaaaattaatttacaataccataaatagttcgataattgtttttaataggctaaaaaattcaaaaaatacaataataacaaaaactcttaaaataaccaaatattattgatgcaaattatgatttttaggtgttttttatgtttgtgacataatattattcctcacaagataaagatagagatagagatagggatccaaaaaaaaatatagaaataaaggaagatgggcactatactatttcattccttcgaagctaaattaaaagtggtcactttttgagctttgttttgtttttttttttagtttaaacgtaaaataaataaataaataaataaataaataaagtcttttcttatgtgcgttatctacgtgttttttttttttttaag

SEQ ID NO: 202992 - DNA, 896 bp, Cannabis indica
atgtccggcactctatttctttagttgaacgtatgttcccaactacagtgttcctgtggatttgatgtctatctaaagagcgattgctcaacttaataaagaacacttttattctaaaaaaaaaaaatatatatatttaatccccctccaacacttgagtttcatattccctctaaatctacttcctccaaatcaatctcacataacaaacaccctataaatttcaagctctatgaatcaacaaaacaaaacgcaccctcccaaattttatcccgagccctcgactgccacccaagtagcctagacacctcgcgccaccacctgacttccccaacaacctgagcgccaccaacatagttccccaaccacccacgaaccgagaagtcgatccctaatgtctaaggtttaggtttttttttttttttttaaaaaaaaaatatccatttttgttataaatattatttggaattgttgctttgttaaatgaattgtatgttttagtttgatttattattttggttaatttttttgttaaattgttaaagaagggtgtttttaagtgaaatctgtattttttggagggttttgggttaggtttgatggggtacgatggtaggacaatagggtggtccgatagtgtttttttatgttgtttttgattgtggacgatggagaacaattgttggtatgatagttatgttggttttttgtttttttgtataattataatttttgcttggacgatattaggacgatggtaggccaatagtttgcttgtattgatacaattcattaggtccgataaaggacgataagggcttgatagtgggttcgatagtgtttttagattttcaattttgcgatgtgtccgacgtggtacgagtgagtccaatagt

SEQ ID NO: 202993 - DNA, 1089 bp, Cannabis indica
ttcaaattcgttattagtgtatatatttatattgaatgtaatatatctcaactaataaaactacatataaacatcttgtaaattcgttaattatttgcacaacattttcaaccaaaaagattttaagtgacccaaaaggcacgcaagttagctagttaatgcattgatatttcaacaagatgaaaccgtgtgttgactcttgactcttgactcatagacaagtcagtcaagagtacaaaaccaaaccaaaaagagtcctataaaataacatttcctcaataatcactaataaagcaaagatggcctctctcaaagcacaaaacaatctaaaactacccttcttcttgttgttgggacttatagccttattaggcgtccccaaaacttgcaacgctcaaacaccctgcggatcaagcacgtgcgctgcaaacgagtgttgtagcaaaagtggcttttgtggcacagatgcagcctactgcggcggagactgccgaggaggcgcttgtaccacaaatggggtttcggtgggggacatagtgaccccacaattcttcaatgacataataaacaacggaatagctaacaatcaaggttgtcctggccaaaacttttactctcgtgaggtttttctccaagctcttgattccttccctcctttcggtagaagtggctctgtcgatgactctaaacgcgagattgcagcattttttgctcatgttacccatgagactggctgtaagtgtcatcttgtcttctcttactattacttctcattctaacttgtttgttatatattttttgctcatcacttttgaagataaggagatttcataaactatacttaaacaccatgtttaaatttatccttatcaagattactaagagcttctttagaatgcctaccatagatgatatactgttattaattggtgtaattcaatatatataagtctcacacatttttatttaataaataatataaaaaattgctaactagttaacgtgctatatttgtatcgagcaccttataattaataacaatgctcaattattattggtgtaattaaaaagaagaatattatatgtttc

SEQ ID NO: 202994 - DNA, 1078 bp, Cannabis indica
tacaaaaatatagacggttatttgtttacattattttcacaacattatactatgttatttgcacatatatttgcaatatgttgtttacacgttattttcatgtttcatctcaaaaaaaaaaaaacattattttcatgttgcttggctctataaaaatgtaattagaaacaaagatctctaaaaaattaaatcagtctattttatgtatatatatatacatatatataattttaaaaaaaaataactactctgtactttagtttaaaaaaacatggtatgtcttcttagacatcttatttagtgacccttagctgcaagagatacagagcaatgagcagccattgtttttaggtgaattgcccagcttgaattctgctgagaaactagcataaatccatgcctattttaattttattgtccaaatcatgaattgggaggtcattgttcagaagctggtaaatgatgagattgaatataaataaataaaggcccaaatactgatagagcatagcatactagcctagaagtagtacacaagtattgagcatgttatatgacttgtgaaataatgtagcccaataatttgcgtgtagagctttcaatcatccaacaaaggaagtacaaatctcagatacacacatgaagtttaaatacagatgaatacatacatacatatgtgtatgtatgttattcttatacatatgcaaaaactgatagaagtgaggtaactgtatacatatatctatcagtcaaagcaaatgtaaactagcaatagtgactaattttgtctgatatgattttctccaaattttacaaacacaacaacggctcaagtcaagaatgagagaccaaacagtatatctaagccgaaacagagagggatttttgtgctgttaaaagaattagaagggaagtaacatatgaactgtcacaatctaagaccaaaaggagagcattgtagccaaaactataccacaaaaccactgaagcgtaactggtctgctatcaaatgcagccatgttgggcgaactttgtgatggtcgtgatggtgatgtgctaccagacgcagggggagggg

SEQ ID NO: 202995 - DNA, 1123 bp, Cannabis indica
cacaattcaaagtaatttattgttgagagatgtgattagttagtttatatttttataaaaataagatcatacatatatatagttgatattgatatctcccatttattcgcatcttttatcttttaacctttctctcttttctaagcaaagccactttaatttgatcaaaagccaaacaaaaattgttgttttgtgtttgaaaaagaagccactatattatgcagccttttatgtgtatacactttctcattcatgggattttgtttcatttctttttttgtaatttttcttttcaatgcaaaagaatatatgaccaagatcagtcaagccggccaggtgctcccaataattcaaaatattttgaatttttggtagatctagagtacatccccaaggttattttggtaattttcatctgtcttgataataattaaaagaatattttagtttattttgtttaatacttgttatagttatttaaaaccgtttattaattttaaaaaaattcgaataaattatagtgtcaaaaataaaatttattcagttacttatcacgtatataaataaacagtgtgtagtaaaatatttaaattttattttttatattatagactacttataattttttataaatttacaaataatcttaaataaccacaatacagataattataaagaactaaaaaaaattatcttaaataccgaaaaataaaattataccaaaacaactttttaagggttatgcaatacatttttctattctttttaattgttattgtaattgagtaaagaatgtttatatgagagaaaatttcaaaaagggaatcaacaaaatattaatttaacaaataataataaaaatgtggaatataagtctcatgcaaatggacaagggagaaaataacaattcaactctcagaaagtgttcttggtaatataaataaaatatatattttaataaaaataaaaaaagaattatatttacaaatacaattttatttaattttcttccctaataagaaatcttattttcctattactattaaaataatctaatatcattaattgtttttgtctttttagtataatagtaacaatttttgttcaatctaatacttattcc

SEQ ID NO: 202996 - DNA, 1618 bp, Cannabis indica
acctttttttatctggtagagattagacctcagaatcagggtttttggatatgaaattggccaggactgaaattggcatagataagtttttggttacaaataacaataaaattaaataaataaacaaaatttatttttgtttttattattatatatataataaaaaatattgaatataaagggaaagggtgttgacctttgttttccttttttatatataattttcctaaattataattaatattattttaagtatcatcattaatttattgagtaatttaaggcaataattttgtaaagagataaataacaagattctatagtttaattacccgatttaataatttaattagaatcttttgtttccaattatttttttatgtatataattaaatgaatagatttttgtttaattatatgtattagtattctatttttagacttgttatattattcaaatctctaattacatatttagttaaaaatttaaaaatattatctttcctttaaactaggataagtcaatggaggtgaaattaattttttctcctataatgtaggcaaaagcaacgaatattttaagctactttttaaactaattactagaattaatatattaaattgtaattatgttaatatatatgttatattattaatttatttattttgtaggtatttatgcaatattattatttagaagctaaagaattaaggacactaaaatgaatatttttttgtgctaaatccttattttttacaaggaatatttatgtggacatgtgcaatctaactattatatctaatatatataattatttaaatataaataaaatatatctcttttttctttttccttttttttacttcttccaccactatcttcttaggaaaaaagaaaaaataattgtggtaaaaggaaaatggaagatgaaaattaagaagaagaataatatgaatttaaataataaataatttaatattcaagattaaaaaatagaacttgaaactcaaataatgcaaatccaagctcaataattttatttcaaaacaaaattatctataatatttatttcttaagagaatgataaaagaaaacttgaaaatccaatggaatacaattttttttttatttttcataattaaaaaatattccaaaaccaatgtaaaaaaataataaaaattaattttatcaaaaaaaaaaaaattaataaagaagaaactttatatatatatacctctttatgatcttcaatggctttgcagtaagaaaagcttagattgatgataatgaaaatggacaagaaatggtaaaactgcaaagttgcaccattcttgtccatttttcaaaatcacaatattatataagctcttaattataaaaataatatttctaaactatttatacaaactttatttcctcttttaatggctattaattgtgtatataattagaaaattattttaaaggtttgaccaaataaattctatactatttattagcaaggttttgcttattaatttaccattattattagtatattttgaattttgaatgtcattgttactattattaattatgagaaatagatgaatggcataattaagtttctaatttagg

SEQ ID NO: 202997 - DNA, 559 bp, Cannabis indica
tttgtgtttttgattgttttgatcacgattattatttcattcctagtatggctcacagacagaatcagactgaaatcgtgggaagaaatttttttggttttttgatagatgacgatgatgaggagggattgttatttaataatgtatcagacagtttatcggagattgatgataggtggctgttggtggggcgtgtcttaacaaatcgaccaatagattatcaggcgatgcagaataaaatggccacgctttagcagccaggccggggactatatgtcaaggaattagaaccaaacctgtttttatttcaattctatcatgaggtagatatagaaaggtgattgagggtagtccatggacgtttgacagagctccattagtgtttgaacgagtgaaagcaggtgaaaattcaaggcaggtggcattgatgaggctagaattatgggttcaactacataatatgacaacagggttcatatcagaaagaataatccaaggtattgggaattatataagcacttttgttagatccaatcctaataatttcatgggagtttgg

SEQ ID NO: 202998 - DNA, 964 bp, Cannabis indica
attttattttatttttctttcatgttatttttaacaatattacttctaaatgtactccaatggttagtatttcccaaaatttgcttctttagtaatattacttctaaaaatactctaatagttagcactccccaaatttactaccatgtcctacacattattgtttaatatatcatttgttttgactttaatgaaaaatggaaaaaaataatgagtataacatcaatgccaaattttggcatcaacattacttgcattcaaatacctctaagcccacgcccaaggtcccccacctagcccaaaaaaaaaatctttaaaaataaaaagttataaatttatttttaaaaataccatattttgtatttactattattaaaaaaaatataactattttctaaaaaaaatgcttaatttaatttttaagatactaatttaatattttattaagaaaaagatcccattatacttttaaaaatactattttttaaatttttgccactatatatgaaaaagaaaacataaatatataaagttaattgaggctaaaagttttacttttctagcaattaactctcaaaattcattttttggtggcaaaactcctcaatattcccttagcaattgagctattccatccattttcatctgttaagtgacatgctagattgtccactagtacacagtttacacattgcacaattttattagtccgtataattaattattaaaaatataaaataagttaatttaaaattaagcataaatcattttaaaacaaattaaatttaataataaaaccgaaaattcaataaataaaatataaaaaataaaaaataaaaataaaataataacaaagaaaaaactaattcactaaaccatcattctctctctttagtctttcactctctcactcactctcaaccaagcttctcttcccctttgccagtgacctctctctctctct

SEQ ID NO: 202999 - DNA, 3256 bp, Cannabis indica
ccatgagatgtctttgtttcgtcccctttttattggttggcaccagcctttgtagtagtaagtctttcctccggcgggatgttagattaatatttacttataactatagactaaattctacttgaaatagatagagtgacaaaactaggagggctgcagagtatttcattttttttttaacttttctaaaattatacgaaaaagttatttgaaatatctaaccttgtggagggaatcattgacttcattgacttcttcaaaagtatatttttcgggtccgatgttggccgggctattgattgtagtcagttgttcttagagaggatcacccaggatgacagggagggaatcattctatgcccttccccttatgaaattggacgtactctttttgccatgagcaaccacaacgctcctgggccgaatggaatgtcagtgctttactttaagcattattgggagtctgttggtgacgattttttgtgatgcagttttctaaatttttttttgttaaaggctatagtataaatactatgagcattgtgctcatccctaaaaacgagaacccgaaaagcctaatcatttcaggcccatatccctttgcaatgtgatgtacaaggtaatatccaaaatagttgtacatagaattaaacctatccatccttctctcatctaccaaacccaagctgctttcgttgcgagtaggaatattcaagataataatgtgattgttcaagagattatccactctttcaacaggaggaaaggcaaagaggggtactttgccataaaaattgatcttgttaaagcctatgatagactaagttagagattcattgattgtgtgcttgattgttttgggttcccccagaagttctggaattgggttactcaatgcatttctaccacaactctcaacatctgccttaatgggggtcaagtgggcaaaattgtgccaccttatggccttggtcaaggcgacccactttccccctacctcttcatatgtgcagctgaagttttatcaagactcttggaggaggcccttcgagaggggaatattaagggtattagactgagttaaggcggttcggtcttgtcccatttattctttgtagaagaccttatccttgttggtcgcgccaatttgaacgaagttaataggttttggaattgccttgagagattttgcgcttggtctggccaacaagttaataagctcaaaactactatcttctatagcagaaacaccccgaatggcatgcaaagaggataaaggatgccctgggtattgattctccaaaaggtgttgttaagtacctgggattgccactattcagatcaagacaaaaggatgttgatttccacttcatcctcgacaatctcacttctaagttgtagggctggaaggcaaaaacgttgtcaaaggcaggtcaggctaccctcattaagtctgtgggtttgtgtatgcctatctatgcaatgcaaactacaaaagtctctaatcgccttgtgaatcagatcgatggtttggttcaggatttttggtggggattcgagaaagggaaccacattcttcatctgaaatcttgggataaattgtgccttcctaagtatgttggtgggctgggttttcaaaaaaacaagagaaatgaatatcactattctggccaagtcggggcggaaaattttgaatggctgtcaatctttgtgttgtaagatattggaggcaaagtatccaaaagagaaggattttctcagttgtagatataaagactctaattctttgttttgaaaaaatgaagtgaaagccaatgcaattttaaggaaagggacctgtaaattggtgtccgatggcagagatactagcatttggaccttggaaagtaatggactgttcttgtctaaatcagcttacctgacctaggctttggaaaaagcctcacactgtgaggttgctccgttgccttggaataagctatggaacaacaaaattctggagcgtcataagattctttggtggtgcatcctttctaatccgctcctaattagagtagagcttggatgaaaatttcagattgagaatacaagctatcctttatgtgtgagggaggaatctattgaacatttatttctttcatgtgaggtggcgttacacttttcgcgatcttcgccttggggcatttatccttattatgatacgggtattcgggtttgggattgggtcgaattcatatgggatcttagaaacagggggatctgagttgaggatatatttctttatgcatcaattgttgttgacaccatctagaggacgcgcaatgacatgggacacaataattctccttcggatgtgctgaaatgtattgaccatatttgtacttcttttgcagagttacatgcttctcttttgccaagtcctacaccgatcttgaaggagacttggactcctcctccttaggattggataaaactgaattgtgatgttagagtgggcttagcgagtatgtgcacagctgttgtagcaaggaatcatctaagtaggatggttcaaattcacacggctcggttggatttcttggaggctttatgtggagaagctgcggcttgctacttggctgtttcatcggctatagatttagggtataagtatgttattgtggagagtgactccaggatagctatcaatgcgctcaatggaaaggtgctccattgggctcttgaaaactatgtctctttttgtatgaagtcatctccttattttattagttgtaatttttctaatattagcaggacttgtaacaatattccccataatgtggctaagtgggcttttacccaccaattgtacggctctatcctgatctcctctttaccggagaatctattttgtaatgactgcgaggtctaactgcttatttgattaatatatgtatacgcttattaaaatatatatatatgggtgactatgttatatttttaatataaccatgacggttatattttcttttacctttaataacacgttactaacaatttaacattccttttatataattaaagtaattatgattaactatatacttaaaaaataataattaattaatatatttaattgagttttttaagtaattcatatttataaataattttttttttacatttaaatctttattataatttttttaatattcaaactatttgattataatatttacaataaaacctctttctttttttaacaaaaaatagactt

SEQ ID NO: 203000 - DNA, 2550 bp, Cannabis indica
aaaacacagcataaaacaatatatttgtaaccttacatggcttctataatatttctaaatccaagacttgtttatttaatgatatagtatatgtagtaaaagttcatttggtggaaaaggataaactcaaagaattattcgacatttcttaagcaattatgattggtcatggtaacaaaagtcagtccacaaaaatcgttagccggcctcatcagcacgtaatttcttaggttatcaaactcattaatcaaacttaaacaaaaatcaacctaattaattaattcaaacaaaaatcaaaataatttgcgaagaaagaaacaacagcaaaacactaagaagggaagaattactcacacgtataaccatatatgtatatttcccaaaatttgtaactgtataacatcttctgtaacatgatgaaaaaagaaattttagtatatatataaaacagagtttaatatataatttgtaaacaaaaatgaaattaattagtcatcaaatgatcatgatcactgtcgttcaaggtcattatgatgtataacatgatcttcttgaacacaattaggctgaattctttgagatgatctttccctactaagcattcttcgaaaagaaaacctgctcgaactgccattattacttatcttagcagactcagatgtggtaccttccacattaatgcacgaagacatagagcccaaccgctcaagaggcggagccgtaggtggcgcaaccacgctctccctcggctccggctctggccttggcctaggctctgcttcggttcggcaaatcggacaggtcgactgggagctcagccacttgtctatacactcggcgtgaaaagtgtggttacagttgggaagtagcctagccatttcaccttcttccaagttgcttagacaaactgcgcactcattattattactaagactacttctctcttgttctgaaccgttgttgaaagtgaatactggcaaagacgcgatgacagagggttcgagccctgtttttggttgttgcggctcggctgcggaacgggcttcggtcatgctcaagcctagatgatgcagcgcttggcggcggcgctgggcttggcgccggagaacgtagcgagcgtagaggtgaaggaagagaacgaagatgactacgattgagagagagattatggcggtaagcatgatcttgctgctgaaatcgtagctgttattgtggggacgataccatgccctgcggtgatcatcgtcgtcgcttagaatcctcggtgttactctgccggaggacgacatagatgatggccggccggtcgtcgttttttttggggtgagggagagtatatatatatatgcagagtttctttctggttcgaggtgttcttatatatatatatatgggaatgacgtgtttcggtttgggacttaggcttttaatttttaattagtcataatttcagaaaaagttaaaaagaaaataaaataaaatcttgacatttttttgtttttttattaaaatcttgacgatttttgttttctagattcgtaacttaatcgatggcgtctttttatttctttttctaagtaataatatttagggtggttattgattcaatattgtgaaaatatgtttttttttttttttaatattgatgaaaaaagaagtgaaaatggtattgtgtttagaggaattattagttatagtttctttctttattgtgtgtgtctgtgtgtacgtatgactaattttggttgttgtttcaagaaaaaaaaaacttggagaagaaaaacaactgaacttacaagcaagctagagtactccttattttcaaaagggttgactgttgaatgttgacattgcttattttctatttattttttccgaaaggcttgaacttattttatttatttattttttgtttgcattttttattcaaatttggaaccacgggatttgattatgatcatgtgtcaatttctctacttttctttttctttttcattttttgaattatttatttaatgggcttttcctatattacatattaaaaagaaaccttctacattgtcccatatgtttatataataatttaattatttttgtttgaaaatttctaatgctagatgttaaatttgtgctaaagtaaatttatgctatatatttgatccattatttataatgtattctaaggcacaaaatgtaaaataagtaaaaaaaatattagttattattgatcattatttattattttattgaaaatataaaaaattattattttttatatttttaatatttaaataatgataatatagtaaataaaaaaagttaaaattatataaaagtaaatgaattataataattattagcattataataaataaaaaataaaatttactgtgaactaaatataacacaatattatatacaatattatatgttgtgttaaatttagaacaaatgatattaaaatggatgaatataatatagttaacaattagcataagataataatcacatggcttgagttgaattacctactcacctgttcataaaata

SEQ ID NO: 203001 - DNA, 366 bp, Cannabis indica
acaattttttttttttttacatgattaaaatcattaaaggaatttacgaagctgacattcaccattgaaccaggatagcttattatctaatcaaaagacatgttttatcaaattcatgaactgcagaagtaagaaaactatatgaggcaaaattacatttgaaaatttagataataaaactataacgtcctcaaatgcacacaaaaaaagctagagcttcagcttgtaacactgaaaaactacttgagacatcacaaaacaaaaatcaaaatgtaaattgtatcaagtaatactaaattcaatataataatatgtcaataaaacactaaactttcaaatcttatatcaagtaaaataaaaactaat

SEQ ID NO: 203002 - DNA, 1522 bp, Cannabis indica
tataaacatatattttataattttgtttatagtagccttttttaatataaagtggagtgtttgtttgacatgctacattaagaatgttaatttgcaaagaattataaataaataaaatatattttcagaatataatactaattaaaaagaaatcaactgtgctaaactcatgactttatacaagtgatattaatatatatatatatatagtattattatatatgatgattatttaaattggaacctgtttcctaagagtttatggagcctaagtatcaaatcttcttcagcctcacttatgttgcctctcttaatgttgggtctcaggtaatttaaccacctcaatctgcaactctttccacatctatttaaacctaaatatatatattttaacaaaattattattaataataagagttcatatataaataattacaaaaaaaaaaaaaaataagaaagaaaacctgattggatagaaagagtcttccacctccttggaccatgaagtttgatatattgtgaaagtattttatcttcctcagctgtccatgctcctctgttcattactttttttgatgatccttccttttttggacccattaatatatacttataataagtataattaaaaagaaaaatcagagaacaaaaatgaaaaataaaattgctttagaatacaatatatatggagtatatatgtgttgggagagagattggttaatttggagtgtggtgaggaaggcttatgaggtttctatatgtatatatatattagaagagcaaaattttaggcaatcaatgaaatgagtagtgcttttcacttaaaaaaaaaacattattaattattaggtattatgagtagcgtcttatgactaacaatttttataataaaattttaaattaaaatatactagacctaacacttaataataattcatataacatgttgtggttatgttagacaatcacattattagaaaatttattaattttcgtagattgaaaaaaaattataacatgtctttagagtttgtcaaaacaagaaaaattaacatactttatagagtagagactattttttttttttttttgtttttagagaaaacaaaaatattcattaataggttaattggacaaaatccattacatagctcaaagagtaaaatcatcaaaagtagcttaccaagccgtttacaataatatgtaagaaatatttttgataaacatcgtagagttgagacattttggcaaagggttttaatttaatttgacttttgttagttatttttaattggaatatctctctcatttttccattttttttgtatagattgcaatcatatacatagcatctccagttaattatttaactaatttattattaaagtcattatatattttagtaaattaaagtaaaaaaatagcaatatatttatatatagatcctcatcatttaagaaaaacaataatcaatattttttttatagttttttgtggtttaaactctctcaactatatatta

SEQ ID NO: 203003 - DNA, 737 bp, Cannabis indica
gttgagtatcttagaattagcagagaaaaaaagttagacagttgaatgtcgggattgtgcggggtaatggttggtgaccattttaccctaggcatcaagattgcttaacttgtaagaatgggcaattttgtaagtttactttacaattgtctttagtgagattattaataattcttaagtttttacattgattttatattaagaataaacaagaaaaatacttgaaattatccctaaaattagaattatctaagaaaaaaccaaaaataacacaatatcatcctttctctctctctctcttggttcgaccacaaagaaaccccaagaagccatcctttttctttgttaattcagaccaaaaacttgagcaattgctgcaagaattcaagtggtattaaggttatactctaaggtgagccctaactcttatttcattttgattttttttaaagaaaaatgtttggttgagcatgcaattttttgttcggctctctattcgagcttggggaactttggtgctattttggggagttaaatttgggtgtttgtttttgttttgaggcccttgttgtggctttgctaagttttgagaaagtttaagtttttgaactcgaagcttgatcaacaatggaaagtttttatataggttattgatgatgcattctatggttggtatatgttatttatgatgtctataggtgttctgcgagttttggttcgatatggggtaaaattaa

SEQ ID NO: 203004 - DNA, 2178 bp, Cannabis indica
ataataataatcatttttccttaccctatatatattattccatcaattttgaatcatatattataaatatataaatatatatacatgtatatttataacaaaaatctctcaccctcattaactacactttcttcttgcaatgctatagctatagcttagcttagctagctcttcatcattaatttcaactcgtgacttgatcaataatgagctatatatgtatacatcctatagtatatatgtcttagaaactagactatttttcatatataatatgtttttttatggtgcaccaagggtaccagtgcactttttctttttatatttaaataattttaattttaaattttttatataaaaggtaaaatttaaaatattttataaaattttgaataattaaaaataaaggataatttcacaaatacacaaaaataataaaaaaattacaaaaatatgatttcagagaattttaaatattttacgaattttttaattttatttacacacaatacaatctttttatattgtattcatattaaatttttgttatttgtatgttattttttttttattattttgatgttatatctgttacaaattatgcattctcatatgaaaaacataaaattaaaactaatgatagccgaaaataaattggagaaactataaaaatggccactataaaaatagccactatgtttatgatttagtttttgggttgatatggttaatggaagtgattgatttgtgttagtaaaagtaataaggcccactataaaaatggccgccactatgtttatgatttagtttttgggttgatatggttaatggaagtgattgatttgtgttagtaaaagtaatagtcataaactcataataacagttaggtggttatgggtgggtcactcagtgtaatatagttgcatgtgtgccacgtataacatatcatagtagtcttagttggtattattgattagaacttataattagcagtagtactactactatatattgtcacgtgaacatagatttagtatgcatataacttttctcttagaaaaaaaagtggacgaatcataaattgagggttgcttaactcaagccccatgccattggtcactttgggtgtttttaagtaacccaagtctacactttgaaataaaatatataataagaataaataaataacccaagtctaaaatcactaccatttctccccaaaaaaataatctacattcaccaataatttgtaaagagagatgctaattattatatgtattttcgagagagagacacgtgatatatatctagttcgaaattaatcaactagggcttgctcagtcgccctaacaagataatgggccaagacaacttggaaggatgggcctcaacaccatctgagacactagaagcttatattcaagctttcaaaaatgttccagcactaacttcacctgtcaacagcacaacttttactctacaattctcagccctggcagtattgatagttggaagctactagctagtacaccactcctacagtctacgaacccacatcctcaaggcacgtgcctacctagactaatttttctggctatgtggtagtacaaattggatgtagggtcactctaaaaaaaaacaaaaacgtaagccccagaatcgaatgtaagctatttgcggagtaagaaaagaagaagagtaatagtcggggagaggctccaaggaaagaaagaagtcagtatgaaccaaaatactgaatacaccaacttaattaacacttataaggctacttgcaatatggtcctctatagaaaactatcttaaatgttcaaagggggggagcaaaagaaagatcaaagcaagaggtgcgagtaccacaacgatgttgaccacattatcaactaatgcgattatttaaaagacgagataaaactttagcccaagcaggccacctcagtcattgggtttgaatttccataatctatcccaaacaaggtatagctcacaaatagcttgtgattctcggataataggggttgtaaatcctctacagggtatggggcctccctcaagctcttaaaatatgacctccggctctaccggctctggtgatacatgcctcagccattcagaccctttagggagtatcaaatgtgcatgctactgcgacagtccttt

SEQ ID NO: 203005 - DNA, 547 bp, Cannabis indica
ctcgtaatctctgaaaagtttgtgaagatttttggaatcttataaacactgatatcaataaagatatacttgttgtcagggctggcctaaactttgggcaacttggaccattgcacaagccctccatttttaaaagaccaattttaatcttttgcacaaggctcccaaaatttgggccggctttcactgctgctgtttcaactgagatgtagagcattgcacatagctcaaactcgttaaatctggtgttgttcttttctgttttaccgctttattcattattttgaattcttgagatttcttggtttattgtttcttgatcgtgttacgtgtttatcgatactataaattgtatcgtaagttattaattattccgtttttcacaataaatttgacaaaaaaataaaaaaacaaagtacataatatgttagccatcgaaaagaagcttgataaatgcaacaatattatatagctagtagtacttattgtttgtcttaataattaattgcatgaaagatatcctgatgtttagttttatttttttttt

SEQ ID NO: 203006 - DNA, 1299 bp, Cannabis indica
aaaccgtcgggtatactcctattattttttttcgtactgtattaattaataataaccgtcgcctattgttgtagctattgtttaaaaccgtcgagaatactcatttttcccgacggttttaaacaattgcttaatttttttagcgacggtccccgtaaaatatcgttttcaaaaccatcgcgaattcgaataattgtagtagtgtaaggataaccgtttaaggataatgacaaaagagcggttattaaatattatcctatgttcataaaataaaatgcgggaaacgtccatatttcttgaacagttatgaatgattagatcttaaatgaataactgtcaccctatgcacctataaatatggacaaaatccagggtaaaagggatgaccattttgaaagagaaaaagcaagatatcattactactaatattattgtattctgtatcccaattattgtccccaaataagatggattcgtgaactatgaagaattaacttcaaaactacgttaaaaactttccggtgttcatttattactgtagttaattatgtggtatatttattacaaaaaagctaatatttttagttaacgaaaatctgcattaacagtttggtgctttcattaagagcctttgtaataaaaatttaaaaaataccctcctcataagacacaactaaaattctatatccatgacagataatacccattgtgatgacgaaagtcatccaaaggagacaaaccattgccctggaaaggaaccttagggatcaaaaagaaccatatttatatatgtttttttttttttttgaaaaactattcaaattatagtaaatatttttagtggcttccttagttgtatttcattatgttttatatagttttctaataatgtagaactaatttggtactatttgaaagttcttgcgaaaaatatatgtattaaatttcaactaattttagctaattaaataaatatttataagacaactatacattcttaatcataaactatatcaaaaaattattttttttttaaaaaaaatgaagagtagtacaactgaagatgcacatttacctatacaatcttttaataaatattaaataatttcttatactaaaaatataatttaactttatatatttatactattaaagaaaatagctatcactaattataatatcaatgtaatcttttatttttaggtgcaatacaaaattctcatatatataattagggcttatataggtgcaccacacaattttccaatatacatcattagattttatgtatatatatac

SEQ ID NO: 203007 - DNA, 624 bp, Cannabis indica
ctgcaatgaagcgtacttaaatagagattctcttgctaatgcacatttattcaagtggaaagtgatgaacaaatttaattcatttttcataatgaagcaatgagaaaatgattgtattataattgcatgtgttttattttatattcaaaacaattgtgtcggttgtcttccatgttgtatcatctcactaaatattatttatttatatctgtcatgatttcaatctcatgaaaaaaaaaatctaaattcattacatactatttttataatattattataaattctacaaatcagttacattaaagtttgaactggcctaatggctcatgagtttgacttttaaggtaatcttttgtagctttattaatttcagtttcatgtaataacatggcaataaaacaaaacaataaatttattttaattaatcaataattaataataatagagacatatgaaatgtctgaattgccccttaagaagagacaatggactcaactgtaatgacaatggaaaaagggtatttgcagtcattttaaccgaaatttcttcaaacttcacagcgtgagctttggcggcttctctaattgactctctctctcccctttctctctctctctctctgtt

SEQ ID NO: 203008 - DNA, 914 bp, Cannabis indica
atatgtatataaaaaaattctcttaatcgggttggtcgggttagttcaggttgattgggcgggttgataatatttttaacccgcttaatataaagattgggagggttatattttcgtcaagttttttcagtttgcatttttcgtcggattatcttggtttggtttggacggtttgttcgggttgggcggtttacaaaaatttatgtacagccctaggttgatacatgtgatgtccaagtgacatattcttagcttcatggttcatcgttttagggtcattgcgacctgtttgttgaaggatagaactcagaaatgactttgccggatcttggtgcttacctgagttccccagtgtgcaagtaataacattgccatatcccaagatgctaggtcccaagattattttcttctataccacgtgtcaaaaatacaagccaactttttgggtaaacactattccttccttcgacagtgtgatgctttaatgagaaaaaatgatcttgaaagtttgttagtgttgtgatggagaatttggtttcgtcaaaacaaatttcttcgcgaacaccaaattattgatgatgaaggagttcttggatgggctttgaatttccaacttcgatatcgtgaagctaatgtagaccctgatcatgagatttgtttgacaggaggcttgagttcgggttttaaggtgtttccttgggttgctctggcccttagtcatgtgaagttgaagtactgtgatgcggaaatttctgagatagttcccaagattgggtgtggagtggtcgtgtgtgatgtgaatggtaattgtcttgcttctaatgttgttcggtttcattctttttggtggcgcacgcgcacctcatggctgaggttatggaaattctccaagttaatgtgttcaagattgggtt

SEQ ID NO: 203009 - DNA, 1155 bp, Cannabis indica
tttttttggaagtgagtatgtactatggaccacataaagaatacctttggcctgtgggtaaggtttaattaactcacttaaaatattttattttttgaatttattttatgataatatttttcgtaatgctattaattttcaaatttaaaaaaaaaaaaaccatcaaataatttatattaatgattaagttatacatttttttatgttacatttgatacactgtattatgttacattgtattttataatattacattgtattagtattatttaattcaatattatataataggtagtgtaaaattccgaccggagtcgggttatatattttcagaactaattaatgataatataattttcttcaaaaaaaaaatagttttaatataattaatttgcattaattattaatgaattttatgaatgaaattgtcagcggagggattgggagtaaaagagctattaccaccatatgctgatccaaatttaacaccaaaagacctcttaactggggtttgctttgctgttggaggagtaggatatgatgcatacacctccaagcttgctgtacgtacactactttatttatttattttctctacctcataattattaattattataagtaataaattactataattatttgttttttaaataaataaaaaaaacaggatgttccagcactaagtgaccaattggaaaagttcaaagagtacatagagaagttgaaaggaatagcaggagaagaaaaaacaaagatgatattgagtaacagtatcgtttttgtggttctgagcagtaatgatattgctaatacctattttaattctatcagtattagaagatggcaatacgatgcttcttcttacactgatcttctagtcaattatgctactgacttcatcaaggtatatacatatatataaatatatacaataatataaagttataagacaaattaatatatacaaaaagatcttaattaaactctcactttatgaaaatactagtattaatcttttttgcaaattgctctttctgagattgtgtggagggtttaggataaaaaatgttattgggccattattataaattaatatgtagtatttttaaaaaatacaaaattatgtgtacattttttatctcaaaaaaaaaa

SEQ ID NO: 203010 - DNA, 696 bp, Cannabis indica
aattttagttttataatataatttggattatatttatatcttattatttttttaaaaaaaaaattggttttagttataatttaattttttatatataaatataaaattttttaaaaaacattatactggcaatttacttcaccagcaaaaaaaaataaattgtttttagaaagtttagccgacgaagtaagatatgccgacagaacttttgggggggaaaaaaaaattggcgcgaaagttttgccagcaacatttcgctggcaaaacctcgtcgggcaaccctcagtcaacaagttaatatcggtgattccacttatgtcggccaaaaacatcgtcggcataaagaatttttccaatgaagtaaggtgttttgccagcaaaataccttatgtcgaccaagcatccacagtagcatattttctggtgcataagcttgtcggcaaaacaatctcggcgacttatgcctagttttgccagcgagaaaactcaccgacagagggtgtgtttttcttatagtgattgttgttgaatgtagagatacattattcaatagaaatagtagggttaaatgtgtccaggttattgtacgaccaatataggcctgaattatgtatgcaatgaccatgatatgaaaaatggcatgatatgattgtgatgcttatttcataatgtcatggttattctatgagtatgata

SEQ ID NO: 203011 - DNA, 644 bp, Cannabis indica
agtttaggggttttttttttagttttagtattttgatgaattatataatctttttaacataatcgtttaaatttatttatagtaaatatttcaataatttttcaaaaagatcaaataatttattgtaaaaataaaatttaaataatttgtttaacacgcttatacaataaatgaaaaaaaaaaaaaaagaaaaaacacacacatgttgtttaaaatccatttttaacattgtaatttttaaaaagaatctttcaaaaactcacataatatctgtcattatgtcttcatgtaaaaaaatatattttctacaagtgttgaaaaaaaaaataatccccacaataggattacttacaacttttccgatagtaaatgtatatcatctcaatcttcaaataaaaagtgcaagagtttcaaaataatgataataataataataataataatatgtacaatttaaatgagcattatactttataatttgttgacgatttttatattatatataaaatatatgaaccaattattaaaatatactaataacaatatattatatttttaagccgcatttaacatttgtagcatttttctcacttaaatagtgcactttatagctaggcgcgtacacccctacatatgtcaaaaca

SEQ ID NO: 203012 - DNA, 1373 bp, Cannabis indica
ttttgttctattttattacttatgaatgttgctattttaattatttgaaacttttagttgcattatattgtaatgatgatatgttatggagtattaaacttaaataaaaggtgatatttaatttttatgtatttttttttttcatattttgatgttaatattaaaatttaagtgtgtaattggattggattagattttgaggtctaattagactggatcagatgatgattctccatattcgacctagatatatagttttcaatctttctatatagttttttaattacaaagttgactactaatttttcttaatttactgtgtaataaagactttttaatagatagaatgtttattttaaaattcatatcttatttttttattttcattttgaattacattacattgttttttttttcttattattattgtttcaatcttaatgggtacccaatgggtcctcatacctaatagagatctcttaccccgaatccttatgagattaagtggggcgagggaggggatgagtgcataaacagaaaacgaagacgaagttgggaggtgcattatccgcttattacccacaaaaaaaaagagcgatttatattgctccaaataaatggcatgatattttatgctaaattttataacttttaacatcttaggggtgtgcataaatcgatctaattcaatgagaactaaccaatccaattataattgatcgccaaatattgaatatttaattgtgataagatcggatttgacgttatttttaaatattcaattggattggatcggatggtagatgaggtgtccaaaaatctaatacacacaacatccaatcgaactaattagtattttttttaatttagatgagtaattagattttatattgttatacgtaaaatctatatgtatatatgacattaacattaattggatgaatccaatctaatccaatacatactggatctaaaatattggatggatccgattcgatctaaaaaatactaagtctaaaatattagataaacttaaattaaaccaataaatatatatgaaatacatcattggatagagccgatcaaatctaacatccaatggatgttggatcgattgaataactgaaattgattagaacgaatcaaatggtaaaatctaacatctaatgtataattggatcgaatctagatagacttgaaaatattagatgtaatccaataaatacccctacttactagtataaagcacttgcaagttaaagttgtataaagcacatctagttgttcggtcaaaataaagaaggttaacatgaacattgttagaatcaagaaattgtgaatatatttgcatttattgtgaatttcaaactatc

SEQ ID NO: 203013 - DNA, 696 bp, Cannabis indica
ttatggggaattttcatttttatagggtttaaggtaaatttacacgtatagcttattatcaacaaagttattttatggtgaaatttaaaaaaaaaaataaaacatatgagaaaatagtataaagtaattggtctctaaaggtaactacttacccttatttagtttttccattaaatacatatatatatatttaaaaaaagcatatttttgcatagataggagtgcacatcgggtaggttttactaggttttaggatttcgggttcgggtttttgagcttcgggtatatggattttgtgaaccgaagctgcccatgtgagagactaggttttcgagtttcgagctcaggtgggtcggtatgagttgggatgggtccaggtgggttggggtcaggtttcgagttgggctaggccattttttttcttaaaaaaatatcacttattacattttcgggacaagccaaaaaggaggaggagctgctgccaagccccagagactccgcacatgcacgctcgccgccataggtcaaggagaagaagaacaacgacaacaacaacttaaaaaagaacaaaagacaaaaatgaaaactggaaaaacaagaaaaaacaagaaaagaagaagaagacacatcctattacgggcacctgctagggtggtcgctgtagtcagtcctgctgcggtggaacttggggtgttg

SEQ ID NO: 203014 - DNA, 1346 bp, Cannabis indica
caaatgtcattcacacacaatttaaacccaaataattttttagattattcaccaataattaaaatgccaaatatttcaatcctaattgcattttgggcccgaaccccgttcaaccctaaatacccgattgtgactataccgcgccaacctgtcagaacacacctgaaaaagacaacacaggcacattatataataatatagtcccataagcacgttaataaattaatttcatcattttacccttctcgggtcaaaattactaaaatgcccctagctcaccaacggggtcttaacatgtcataaatcatataaattcacatatattaaattatataataatataattcctcaattattcataatatctaattagggttttgctaatctatttcataatcctagggtattacaccaccactacactgttgtcacagtagagcacaagtgcgcaatagggcagccaaggggatccgaccaaaccccttaagatggcaagttcattatctcttcatctcggttaagtatttggaatcctcgtcaactgatatgttgtgcatgctaacttggtcttcttgctgacaagctatactccacgtggtatgaattttgcccatatgggcatgccacgtcatgtgggcaaaaattgggataagaattatttttgttgctgttggaaaatatgagatatatctcatatctggattttttttgtgtcagtttaaaatcgaagggtaaagtgttagcgaccatttaaaacagtcgcatattttatcctccttttgctgtcggttatgaacagtgaggaatgctcaataccgaccgtttataactgacgccaataccatctcgtttggtgtcagtgacaaaggcatcaattttaggaatcgacgaaaattctatatgtaagtgtttaaaacagtcgcccatgtatttttttttgttagtatatattaatgagattacgtgatcttaaaaatataaattgtttatagattgaatagaaaacttttgtatagataactatattagaatattttatttattttttgtataaataaatttatacgtgtatataatacaatgaatattttatatttattgaatttggtcacaattaattagttgatattctatctatggtcagattacaatttaataaacattttaattttccgattttgattttctaaattaattgttaacatattctgacattaattgtgtacaaaaacttttgatgaaaggtctcacctatataaatataggggtctcagtccctgagctaactactcgttctgtgaaaacagtatatccttctaaaaaagagtatagagagcttgaaagcc

SEQ ID NO: 203015 - DNA, 1538 bp, Cannabis indica
aacttcagatcctatcccccaaatgagagacttcctctctcggtgtgttcccaaccagatgtcaatgcaagacaatgaaaatcttatggcagattttacaatcgaggaagtcaaagaggctatagatcaaatccatccccttaaagctccggggaaagacggtcttccagggttgttctaccataatcattggaaggaagtgggtcaagaggttatgactatgtgcttggatgtgttgaacaaaaacaaggactgtagtattcttaatgacactcttttatgccttattccaaaggtgaaggagccgacaatggtaggtgattatagacctttgagcctttgtaatgtaatttacaaagtgatatccaagtgcctagctaatagaatgaaattaagcatggacaaggtgatttccgagaaccaaagtgcattcataaaggggagacaaatccaagataatgccatccttggtttcgagagtcttcattgcttgaagaagggtcgctttggaaatgggaagaaaatggcccttaagctagatatgtcaaaggcctatgaccgggtggaatgggattttctagccgaaatgatgaaatgtcttggatacgatgatcgatggattgccaaagtgatgggatgtgttacaacggtgaccttttcaattcttttaaatggggaggctcggggtcatattgttccgaagagaggattgcgccaaggagatcctctttctccttttttgtttctcatttgctccgaagggttgtcttgtttactcaatgaagctagccgagctaataagatccatggtcttcggtttgggacaatggaaaaaagattaactcatttactctatgcggatgatagtcttatatttttagatgccacagccgaagaaggggcagctctaaaggaagttcttcgccaatattctgctatgtctggtcaatgcataaacttcaataaatcaagtttatgtgttggtagaaagattagtcatgcggaaggacaacgacttgcaaattcaataggggtcactttaatagaaaatcattcgaagtaccttggcctccccgcctttgttggaagaaataaaaaagaagtgtttggtataatccgaaacaaagtttgggagaaactccaagggtggaagatgggtcttttttcccaagcgggtcgtgaggtgttaatcaagtcaatcatccaagcgatccccgtctacataatgagctgttttagaatgactaaagggctgattcgtgaaattcattcgctcattgcaagattctggtggggatcaacaacaacaaaacatcaaatccattgggtagctgggagaaattgagcatagacaaaggggctgggggtatgggattcagaaacttggaggagtttaaccaagcccttctagcaaagcaaggttggaagattgcttctaatccggagagcctgttagcacaagttttgaaagccctctactatccgaatacagattttctctcggctggaactgggaatgggtgttctactgtttggcg

SEQ ID NO: 203016 - DNA, 539 bp, Cannabis indica
atttacaattagtgaccaacaaaaccaatcattatataacctagctgaaaaaaaaaaacccatctgtaattaatttctaaatcattgtccaatcattttcatctaaagtagtaggcttttcagcaggggacatgcttccagacttaggaggccttttcaaaaataaagatgactttccatcaaagaaacttgaaaactgttgacctcttctcctgttttcggagttcttgtgttcttttgaagctggtttccctaagttcctatctttgccaccaaagttaagattgagcctcttaaacagtctttttggttcacctgcaggactaggactatcttctgccagcctcactatctttagcactccctcaggattgtgtaacatcctctccactgtttcgtatacctgtacaattaatcagaccaaatttaacagcgtaatcattttcctcactatgaacccatggagaaaaagaattaagatactaaatctaatgaacccaatgtcacatttaagtacgaagtctttacatctagtttta

SEQ ID NO: 203017 - DNA, 615 bp, Cannabis indica
ccactcccaatatatataaaaaaacaatatatatttaccgtttgcaaccatgttgatggtaaattaaaagggaaaacaaactacttaaaaaactactcatgtaggtgtaattaaactcaaaattgctcttatgtgaaaatagcttaatactctatagatctatttgaaagtcactatataattacaagatattctagtaattatactttattttaaaaaataattagtttttagatgtgaagtgatatttttatcaaatagttactaattatacaaaaaataataatattatttaataactaatatttaaaatagaacattttagtaattacacccaatagtgtaattaagacctcttaaattgtctcaattattgttcaattattagatgggtagataaaaatactatattgtataattacctcaaatttttagaacatacaacttaaatatttttggtgtaaaaatttaattttaatatttatatatacatgtatatttaaggaacatatttgaaaaggagagtaaactagtttgtttgtagtattcatctatttttatggaaaagaatttgattttgtgtgagcaagattggtggagcatatcaaggtatat

SEQ ID NO: 203018 - DNA, 584 bp, Cannabis indica
ctttattccaaggataacaactaaacaaaggacctgaaccatactctattttgcatggtccgctagcaatgacaaaccacaaacagggtgtagggtacacacaggtaggtgtatcaggagtgaaaacatcaaaccagtgaaactcgttttcccatctaaacccacaaaagaagagagtcgtttgccaaaagttgcgcaagaaagtgaaagtaaaagtttcattgaagttgagaactcgaataccgagatcatcatctttcgatttgcagtgaacttttagttcaacatttccctccaaattgtttcttatctcaactacttggttgtaaggagagggacttaatgtttgaagaccatcacatgcataagaagataacaatgtcaccataattagacatggaattatcatcttcaaaattagctcaacaacactagtactactcatgattattatttgattttctcactttgatttttttagtagtgtgttttcttttatatatagcataaattgaaaaaaaaaacgtttttttttaattaaatttaggtctaaatggagaatatggataatgccattcattttc

SEQ ID NO: 203019 - DNA, 738 bp, Cannabis indica
taacttgacacttaatggccagatacttacaaaaatttcgaatttataacttgggtattattaccgccaaaaattaaacttaaatatttatctacaaccgaaaattaaacttaagtatttacgccgcaaattacattatttgataaaaaatattgattttatctgactagaagaatgaaaagtatttttcaagtctttcaagtcttaaaagagaggtttgctgactctttctttgtccaatctgaacttcaaagttcattacaaagacactaaaacacagactacaaataaattaaagaatgaaaatggaacaaaacctttgacacatagcagcaaaaagtaaaacgaagattccattgaaaagaaagctttttttctcagcaaagaccataacataacataacaacaatctcattctcaagataaacagtacctacaaaaatagtaaggtccttctagttactctacaaggattgccattgccatgcggggtttcccgaattccttgcacaaagagtaagagcagaagccgaagttgactgcaaccaggtaagcttctccaatagcctattgatcaacacacctgccaagtaagaagcacccgaaacagcaagaccaatggcaatgtagtacgttactgtttggatatacttggacgttttcaatgcgtaggtctttgcaatcgacaggattgtgatgcatacaagagaggctgctgccactgctgcaagcttgaag

SEQ ID NO: 203020 - DNA, 813 bp, Cannabis indica
aaaaaaaaaaaaaaacacaaatataaccaaaactaccacccatcatcgcacaaagaacacctacaatcaaagatatacacaaaaatctaaataaaacattttaagctctaaactaaaaaaaattaacataaaacttacaagacaatgttcacacagtaaccttcgaacccacacgaattgctctaacagttcaaatacacgaacaagcacaatcagaaggttgagtagctgtcgtacaaaaggaaaaaaaatgagaagttgaagaagaagaagaatagaacgaagcctaagaaaccctaagcacaaagagagaagaaagaatgaaaaggaaagaaaaaaaagaataatgacagaagattaattgaaatggagatgaaaatagcggtaatatactcaaggtggtagctgtgcatgcaaaaagtaagctactacatctattgtagtgtcaacttattttgaaaaatttattaaaaaaaagaaaaacaaaaaatgaaagcaaaagataaaatatgaaattttatgaaatatttacaaaaatatggcataaataaaacttataaaatgtttacaaaaatatatatgatataaataaaactcttaatatattaaaaataatgttaaaaaactataccacataaaccttatttaatttttttttttgataattaagaagctttatttcaaccaaaaaaccttaaaaagcagtcacaaggggaactgtctcccttccaacagattttttgcacacattgttcactctagccaaataggcaagcctatcagcaacagagttttcctcacaaggagtaaact

SEQ ID NO: 203021 - DNA, 1305 bp, Cannabis indica
caactgttgtcaaaactataccagcagccgcatctaatacacctgctgcttcccaactcacccaaaagcaaccaaatctggccgagttatggccaaactgcaacatcttactgactatgtgtgtcatacttcatccacatctcatcccattgaaccttttctatcatatatcaaattacaacctcagtttagagctgccattctagcaacgtattttgaagttgaaccacagaattatgctgaagcatcccaatttaaacattggttactagcaatggacaatgagaccaaagctcttgagcaaaataacacatgggtcataacaaaacttcccccaggccacaaagcaattggctacaagtgggtttataaagttaagtacaatgaaaaaagagaagtagttcactttaaagctcgcctagtagccaaaggctacaaccaaaggcaaggcatcgactactcccaaacttatgcacccgtagcaaaattcaatactttaaaagtgttccttgctttggctgccatgaataactggaatgtccatcaattggacatcaataatgctttcctacatgaagacctccatgaggaggtctacattaaaatcccacctggctataaggcacctccaaacaccgtttacaaactcaacaaaagtatttatggtcaacaggcttcacgacaatggttgacaaacttagtcgaactcttccttcatatggtttccaacaatccctatcagattactccttgttcataaaaaataccaacaacatcttcattgttgtattggtatatgttgatgacatcatcgttgctagcaacaatgacattgctattactcatttcaaacaatatttagacactcacttcaaactcaaagacatcggggtacttcggttctttcttggccttgagattggccgcaacaaacaagggatatccatctcccaaagacccttcacacttcagctcttagctgacacaggatatctaggatccaaacccgtgtctactcttatggaaacaaacctaaagttgagtaaagacaaaggggaccatctcgttgatcctaccccattttctagcctaattggcaaacttatttaactcaccataacaagacctgacataacatatgctgttaatcacctaagtcagtttttaacttctcccaaagtccaacatctccacgctgctcatagaattttccaatacctcaaaagcacacctagacaaggcttgtttttccatcaaatacatctctaaaattgacaggattcgctgaaactagtctttctccat

SEQ ID NO: 203022 - DNA, 1191 bp, Cannabis indica
gtctgttgttttttgttttttttttttttttttatcaagaagaatgagcttcattaatcaccaacaaatacaagaccaacaaacaagagccaccgccaaagcccctaattacaatataatctcatcaaataattttgctcatggctactcaaacatctatttttaactatttgtaccttgtaaaaaataattatttttacatcatttacaatggagttaacagattgagaatattgaaaaataaaattgtttctattagtccaaatataataaacagttgctgcaaacactactatgtgaactctcttgcaccatgttggagaccttcaaagtcagccaactcttccagccactaccatcaagaggccaagcctttgatcccagctaagaaaatagcttttctacaactctacaagaaagagaacaataaaaaaaaaaagatgttcatgagtctgagttgccatttcacaaactggacagtccaaagagtctaacacaatgtgaaattgcattattttaatctcaagttagaagatgagagttaactacttgccacaggatgaaccagtatttaggcaagtttagagagctccaaatagctttgctgtagttgaactggtgttgaggaagtgagctattatacaaccagttcgttttgaatctaccaccagcatcagccttcataatctcattgctcgaaaatttatccatcaagtgacaaagcttacgccaataccagctcaaatcttgtttgagttcataggaccaaaatgtactatttttcaagtaaacattattgatcaatttcacccaaagcaaatctcttttagaagagattgcccaaatgtaattggttaggataacttgattctatttgactccatctttaaacccaagaccaccaagcttttgggagacaaattttctctcaagaagccacatgaatcttacttctattgtcattccaaccctaaagaaaacctctataaattttttcaacttccttggtaacactatgaggaagtatgaatatgatcatctaataatttcaaaagccaagaagagccaaatgaatcaactagactctccctacatagggtaggtgcctgctagcccaagcatgaaacctttgtctcattttcttaatgattataccacagtcttccactctccatttagttggtcttagag

SEQ ID NO: 203023 - DNA, 545 bp, Cannabis indica
cataaataaataatgattgaaattttataaacatattaggtagcacccgtgagaagttggttctaataaattccattatacattaataaattgaaaatagataaaatatttacatttcaatatcgatctattccaaatccaaagattccaaaaaaacaatcgaaataataaactaaattaaaaggatcactatatattttatttttacacaactcttttcgttgaaagaacagaaattattcaaaatatttaaatacgaaacatatatgtatgtgtgtgtaattaaatatgcaccagatgggagaatataaatatacttaaaaaaataaaggtaaatgaaaaagctgaagcaataagaatagagtgatgtggtttgatttggtttggtgagtagtgagtagtgaggtaaaagaaaaggtgggtccgaaggaagaggatgggaagagggttttgacaaagtgtagtttgagctgccgacaacaaatctgaggcgtagatttcaccacacacggtactgtatcatactctgatcatgatctctctct

SEQ ID NO: 203024 - DNA, 702 bp, Cannabis indica
tacttatgtgtcgttgcttttttgtgcttcttgtgtcatgttatgcttaatgacatattttttgtgtcgtgttgtgtcgttcgtgcttcttgtatcatgttatacttaatcacatattttttgtatcgtgtcgtgtttaaactcatattttttcgtgcctaatcgtatcgtgtcaaaaagttctcattgcacaataatgaccaaattttacaatcattgtatagttactgagtaccaccataaccttaacctccttgttttttttttgttagtaactctaataatataggatacacccttaaccatgtttggtacaattaatcaaacaataatgtctatacaacgtattgtttgttgaatggtagatatatacttgtctttactactaaatacactattattagtgcttgacaatttgttcctatacaatcattttgaacaataattttgttttaattttctgttttttcttcccttttatattctaaatacttttcaatagaaacttcatacctaaagtttagtctttttacatcataaaattatagtggatgatatttttcttatataaaaaattttcacacatatttattaaaatatttgatattaatttatttattttttattttgtttgtatgttctttttagttgggacaagaaaaaaaagacacgaataaggttttttttttattgtatattaaa

SEQ ID NO: 203025 - DNA, 925 bp, Cannabis indica
ggctaggaatggaaagaattatgaatatataaggataggaactactcctataatatgagaccgttttgggaacggtgacccaaaaataaaacaggtgagggcttaggcccaaagtggacaatatcatactaatgtgggagtcaggtgaggtagcgacccgacaaggtacaagatggagagatcgatgttaggacctgagtcgaaagtccacctaacaaaggtgatgatagtggcggcataaggtagtttcgttggaggggaggacactactccatggcaggtagcggcccgacaagatgaaagagcggggcccaacatatataaatattaatatatatatatatataattaaatgcacataatacataaacgtataattctactagaattcttagatgtatacggagatacaggactaatttattgtgaataaaatataattatatatttagtatttactaggctgatcaggctctaacaaaaattcttacttgtgtggtgtgttgatgctaattaagtgtgctactgtaactaatttaacatcgaatcttgtttattttatttaaataataattaaaaaacaactgctaattaggtagtaggtgctcggcaccatagcatattatgaatactacaggataaaaattagtacttttttttttattattattttacactttaaattagtattttttttttttacatttcttacataaatttaaagaacaaagattttctcagttttattctcttctttaatattttttcattaaaataatattaaaaaagagggatgtagatttagatattataggaagaagggttgaaaatgtaggcctaaattggagcctagccacatacaggcaaagctatatactgtggagccataacgcaacccaaataaatgaaaatgagagagagagag

SEQ ID NO: 203026 - DNA, 2729 bp, Cannabis indica
aaaaaaaaaaaagagaatgaattagcagacaggtgtgagttagttcgtaggtttcacacttagtattacgtagtaatttatttaaagcacaagtgtcccaacaaaaatgaagaagaaaagagtagaaacaaaaacatctacatctacatctacattaaatttaaaatgttttgtttcttccaaaaaaaaaaataataaaatgtttgtgtagtcattactcattactttcagtttagtactttacccctctctctcagtaatgaaaaaaaaaaagaagaaatggaagaaagtgtgttgaatagcaaatgggtatcgacagtggcgagcatatggattcagatcacgagtggctcgctctacactttctctatctactctcaggctctcaagactacacaacactacgaccagtcaacgctcgacaccatcgccgtcttcaaggacatcggggtcaattgcggcctcctctctggtcttctctactcctatgctacttgtgatactgctactacctccttctatcgtcgtgggccttggcttgtcctccttgctggggcgggccagtgctttttgggctatttccttatgtgggctgctgtctccggcctcattccccggcctcacgtgccgctcatgtgccttttcatgctcctggcagcccatgcccagtccttcttcaatactgccaacgttgtcaccggtattcggaacttccctcgttatagtggaaccatagttggtatcatgaaggtactagtaacttcagtatttcttttttttttttggctctgtttgtatttgtttcttgagaaggtttttgcttttttttttctcttgtgggagaacccagttatgtgaatttattttattatttttttatccaagttgctattggaataaaaagggccttcatttgctttgttttctctgctttcaaatcatatatttaatcaccccaactcgtaacgattttaactgtcttttgtaagataaagcttagtccatattaagattggactccatgttatagagataaaaaataaaatatgaagaagaaagactgagtgaggtgggacatttacagataattaatactgagcagaaaaatatatatatttatatatatataaagtcaaattctagatggttggattaattaatccaaaatacatacagaaatgaaatccaatcaattcaattttgagcttctttttaagtgtgtatttttaacacatcagttatgtttaagttgttttctcacgctaattgtttatgactaacaagtattttttttttcctatttaggggtttcttggtctgagtggagcaatattagttcaagtttatcaaacaatattgtataacaaacctacttcatttcttctcatgctggcattattgccaactatcaattgtttattgctcatgtgctttgtaaggattcatgaaacaaatgaaggcaatgagaagaagcacctcaatagtttctccttaattgctctacttcttgctgcttatcttatggtcatcattatattaggtgacgttcttacaattggatcaatatttcgtgccttcacatttgctgtgctaatcttattgattggctcccctatttgcattgcaattagagcttggaaaatggagttcgatagtaatggaacacaacatcctgctgagtatcacgatttgcctagcggctctaatcaagagatggatgctgatcataagaggactttgcaatcaggagaaaacttaaacctgtttcaagcaatgcgggccgtggacttctggattttgttccttgccatggcttgtggtttgggatcagggctggctacagtaaacaacattagtcagataggaggatcgctcggctacagaaattttgagacaagttcgttggtctctttgtggagcatttggaattttcttggctgtttcggagctggttatgtatcagactacatcttgcatgtcagaggatgggccaggccattgttcatggtgatcactttagcagccatgagtgtgggacatatagtgattgcttctggtttgcctggtgctctatatatcggttcggtactggttggtgttttttatggctctcaatggtcattgatgcccacaattgcttctgagatatttggagtggcacatctggggactatattcaataccatcaccattgctagtccggttggatcttacatcttttctgttagagttattgggtatatatacgataaagaagcatcagctgatggaaatacatgtgttggaagacattgtttcatgttgtcttttcttattatggcatttgctacccttgtgggatcccttgctgccttaggcttgtttttcaggaccagaaatttctataatcatgttatagttagaagattgatgatgcattctctgagggactaatgaggttcctgctactaataataagaaggtaattgctataatctctctttctcaaaaattatttcagcttgatatctcttaatatagtataaacacaattaactcttaactgaaacaaaaattcatttactcaataatcaatagtttttagagagattgcaaatttgccttggctaatagactgcaatcatctatgtctttgaacttgagagagtaatattaactgaaatgattgactaatattagtttgtttaacattagtaaattttatgataaactaacccattataaataac

SEQ ID NO: 203027 - DNA, 2111 bp, Cannabis indica
ggtctcttgcaaatttagaagattttcggattgattcaaataatttcaaaggtgatgtgtctcaagttcattttgcttctggaaataggttcccttccttttctcttgtcatcatgcaattgagaaattggaacttgagtcctcattttcctatatggctaaaatcacaaaaaaaaatattttttaaattgacatctccaacactggaatttcaggtgtcattccttagtggttttggaataattttgtttctaatcgttctattatggttgaaatttatgaaaaccaaatctatggggaaattcctaatcttccaaatgatgtttcaacaagttgacaggtctaataccacgtattccaattgatcagatgctagatctagctttcaaataattatttgtatatggtaatatatctaattttctttgtttcaataaattggtgggaactataccaagatggatcggaagtcttccaagcttgggccttcttgttctccgttcaaacaacttgacaggccttattccagccgagttgtgtaagcttctcatacttcaaatattggatactggaaataacaatttgatgggaaaaatacgaagatgttaaaaatttaacatctatgacatctaaaccacaggaaaataatttattttattacattggtagttattataattaactggctactgagaattcaaatcttgttattaaaggaagggaaagccaattcaataccatcttatttctcgtgtgtctcttagacctctcaattaaggaacaaattatcaggtgaaatctcagaagaacttacaagtctccaaggattacaatccttgaatttgtcatgaaactatttgagtggaaacattctaaaaagattgatagtatgactgacctggaatctcttgatctctcaaggaaccgtttgtgtggtcatattcctacaagtttgtcaggtttatcattcttgagtcacttgaacttgtcatacaacaacttgtcgggacaaattccaataggcacgcaattgcaaagcatggatgcttctagctttgttggcaacaagttgtttggcggtcggttgtaattggatcggtcagttcttattggattggattgatttatgcacacccctaataatgctacgaaaaaaaatactaaaaagtcaacaaagacatatggataatccttttccctcctatttccacataatatttctcatatattgaataaaacaccattttaattggtttaaaaatctttgaaaagttccaaatgaagaccatgaaacatcatttcatatatttataaaatatatttatatttttcttttatatatatatatatgttatttttattttttaagtgatatttgcaaagaaaatatagattactttaaaggggattatgtaattcctactttggcatttatgtaattaatatatattttgtatgcctatataccaaagaagaaggggatttaatcacataaaacttatgaggtttgaatgaatgtagatgtcaatttttattgacaatttgatggttaacgtctaataaagggtacgttgatttttcaaaccctgattttcttcaattttatttaattttgaaatcataaatgactctatgaagtgacttgtttaagtcaaccatcaaatattacaataacaataataataataataataataataataataataataatggtttactgactaggaagacttggaaacagacttggaaccacggcaaacaaaacaaataattaaatgtatataaaacaaagcaggaataaaacaatacaaccgaaactagataattaaatgtattatattacatgtattataattcattctttctacttttcagatatatataatttactgtatatattgtatatattataatatttatgtaattaatttttatattattttttataattaagttgtaatttattttgatttatctttttattgatatataaaatttctaagagagtaatgtgtaatgtgcaagtctacttatttactatattaagtactagacattaaataaatattatttaaaacaaagaggattaaaatgatattttactaaat

SEQ ID NO: 203028 - DNA, 836 bp, Cannabis indica
gaaaatatgtgaattattcatgtgttattcagatatacctgtccacagttccagctattattatgactctctccatcgttgttgtcttctccatttgccaagttatgtttattgttatatgtaaccagatccgccaaagtaaaaccatcgtgtgcacagataaaattgatactattccacggtttccttcctcctttctactccaggattttaaagaacgaatgatattagccacaaaagcgaataagactagctgacagagactatcaaacttaattcattgaagtaaaagtacgagtaaagtgtttctcgggaaacaataacatggtaattgaaattacctggtagagattcgggcttccacaaaggcattcagccagagcccctgaaaaaccatctgtaccctttataaactgtcgcactgtgtctcgatactgtaattgaaaattaaaaaagaaaatcacatcataacaaaatgggaaactaaacaatgaaccgaaaaattcaatattacagacggtgttggtggttgcggccttttcttttcttccctcagttggaatgataaatacaataatttaaataataaacaaacctttccattccattctgaccaaataccccagtgaggaaaggcgccaacttggtacaaaccaccggtatcccatgcttcagctataagctattagaagagggaaagaaagtttagtttaagtgaatcaagttagtagaaaaataacaccccaaaaaaaaaaaaatcaattttagagatagggccataaaacagagacccccaaagtagaaccttcactccatggagtattggatcgttgctt

SEQ ID NO: 203029 - DNA, 2445 bp, Cannabis indica
aaagaaaagaaaagaaaaattcatcacaactacattttcaaaaatattaattacttatacatgtatatacacaaacaagtacacatattttatttacaagtacatatctataaatgatctttttgctttaattaatttgagcaatattataagtattaatatcactaaagtggtgctgaagtcataagtggttgagatacattggtttccttctatcaatatcaatatgtactatattttttatagttccataaatgatactctcataattaagtttattagagtgtgttcaatttaattttagttgagaaaatttattcatcacaaggtttagggcttaggccgactagatttggaggaaattacattgtatatccactttattttatttattttaatttttacttcaatttttatatttttttagatatactcatttttatggataatgtctccattagacccgttaagttatgtaaattatatgctagactttagtagagagtgagagtatattagacaatccactccaaagtgggtatattttaataaaaaaataatatgagagtatttttaattaatggataaaaaaagaatgtatttttcaacttatcccctagatttgtgtttagggctcacttagtccaaagaacaaaaaaaaaacttcctccttttaaaattatatatattgttttgttgattttgagaaatactacattttttttcataatataggcccaaaaataatttttttatagcctactaaatttcaagatcgaccgtgctagtggcggaccaggatttaaagtgagggggacataatttttttttttgtaaggtaagagcaaaagtaaacttaaaaagaaaaaaaaaatactcttgatacttctatcctatatgtattgcacatgcatatacatctttatagtattatatttataaatatcttttattacaaatatacatcgtaattaattaaaatgtatttatatgttttttttgatgttttttttcaaggagtgtgaattcacctttagttcgtataagaggtgactgcaaaatttagtgtgctatatttaatttactattttgaattgtacttcaatattattattaataattatttaaacactttcttctcctaaccaaaaaccagtcttatgtggatcatctcttgatcacattcccatgttgatcaatatcattattttttagaggtgacaatttatattcatgtacacttcgttcgtgttgagactcatgtattataagtgtatgcttgacccaaacataatttttaataattgtatcaaaaaaaaataaaaccaaacaagattataaattaatgcatattgtttaaaagtactaattaataatattttgtattaattattaaatcaaaatatataaaatttagggtagatatcattttagatcctgtgttttgcaaaagttatcaattagactctctgttttgttaaatgaaaaaatagaccttatattttctaaaattgtacaagcaagatcttgaactgatattttgtcaaaataaaacttaataataatttgatttagagatgttgtgacaaaactagttatattttctgtatctgttcgtgttagaaattgttttaaagttggttatatttaaaaataaaattattaaaaattgagatcagggtcctatttttaccattttagaaaatataagatctattttatcatttaacaaaacagagagtccaattaataacttttgtaaaacataagattcaaaatagtatttactcgattttaaattataaaaatagcaataataggaatatattattttgtaatctctttgttattgtctcttgttaattagaatgaattagctataccaaatcaattaatttaatagattttcagagtaaatattccaaagtaaatcttagacaattaataaccattaatttgaaccctaaaacaaaattaataatactgttaatttaatactatactttgttaatataaaatttaaaaatcattatatatacaatatgctgcccactactatttgagattacttattataaagttgcaaatggatttttattttattttacttttatgaagtaaacagttctaaatatgtaacgttcccgctttaagtttttattaggtcctacacgagtacgttactctggctgctttatggactgatgactgaccctacagaccaacatgagtgtttctaacgtgctatgtcctcactcacacacttcctgggaaaacttcacaggaggtcacctatcatgaaattaccccaggtcaagcacacttaattgtagggttctttcgtgatgggctaccagaaaacaagatgcatcttgttgatataagtagtaccaatcaatccatttaagccctattcaattgtgtagtcctatacctacacagtct

SEQ ID NO: 203030 - DNA, 874 bp, Cannabis indica
gactctatactactgtattgacacctcatgggcctattccaattcatgcacgattttttcatgtgaagtctctccttcttcttttaaatcccgcgaggccctttgaaatatccgtttaatcattgcgtctattttttttatcatcgaataattgctcctgccatattaaaaaaaatatcaaaatgtttaccaataaagaacagactaacaatattttgttttggctttgaaaatattttctatcatggttcagaacagtttataattcataatacatagcatacaataagtaaagggtatattaaaaaaatgatatgtgttgaataacaatatcatataattatgtatcgaaatagaataatgcaagaaaggctgccattcaagaaactatatattttccaataaattatataacttaaatattttttacaaaattagtatgacttactttagttgaagattttccagaatcacgtttagtctttaatctcttttcattatctttcttgctccgctgtctctttttcaaagccatctaaatatttagacatataaattcataaactcattataagtaggtaatttagtaacaaattcaagtcactgccaatgcactaacaattaaaagacatgaacttacttccagaagttatgctaacatacattttcatcattaaaaattacacaatacaactatagtactatatactatatcataaatttaaaatttaaaatcaagccatattaaccaacttagaagaaatccaccagaagaaaccctttcctagaaattttaaatctgaacaaatttagagaaaaaaaaaatagcttaatctgaaattctacacaaacaaatatgataatcaaacttgag

SEQ ID NO: 203031 - DNA, 1808 bp, Cannabis indica
acttttcagtgtaacaactatcttcactgactattgtctcttagccaaaactttctctagaaaaatatatgaaaaagattctctgtctcttagcaaatcctaggaatgtgtggtttagaaatacttttgtctgctcttactatatttggacaaagaaaccataagcttagaacttgtaatagaaagggcttcaccccaaaacagtttcgaaaataatcaactcaaaaggatgaaaaagcagtgaagttttggcacttacagctctggtatcagtggccacaccagtaacaataaacataaggaagaagctaatgacaaactccaaagcaaaagcttgaccatgattcccagaaggaacagtgacacctccgcccattatcgggtggaaaatccacttgagagcaaatgaagcacacaaagatgccacaatttgtgctccaatatagactggcacctacaacaatgaaataataacatgatattattcacataattagctaaagaagatcacttttgtgattaagtgcttacatatttccatggaaagtgctttagagcagcaaaagctatggtgattgcagggttgagatgagctcctgagatgtggccagtcgacaaaatgacaatcataacagcaaggccattggaggcagcaaggcccagaagggtcaccgagccaggtgtcttttcgttcactatagctgtggctgttccagtaaagatcagtatcagagttcccatgaactcagctcccacctgtgttaatgttgtttagttagtactcgaaaatcgaaatgtagcataataaatgtaaagagaagagaagagaagagatacccttctggcaagagagacaggaggaggtgacaaagaagaagaaaccttgtgcaaaactgttccttcctccatagcccaatcatcaaggctaaaacatttggtgcagctgttaaggaaagatttcctacctgcattcccacctttatcttgcctgaacccgttgcccccgaaaagaggagcacctggggttcctggtgtagcaggtgtcgaaggagctgaagacacttcctcattctccatcaccatagtattgtattattactccaaaaaacaaaataatgaactcagaaaactcagtttaaaaataacaaaaacacctataatagagtttattatagtatatgtttacttggtttctatgaaaaaaataatatttatactgtatgttaagatgcatggtttgaaatagagaatccccatgaaaagaataacactcagaaaaaagaaaagtttatatttttgctatagtttgcaattggatctacttgggcggtgggacataattgaagacagatttccatttgcattggaccaatcttactgttatttttaatttgaaaaaattaaaaataaaaaattggtttttaactacatgagacaatgaaacatggttttacctgtaacttgtctctataccaactcttattatactaatttatttatctaactctcaataattgagtaataaaataaggtcagatacactgagttcctcactttgattataataatttggtttttatttatatatataaaaaaacaagatgtaaaggtaaaattgccaagagagtgagtacaaatacaaaataaaacaatctttggatgtgcatgaatttgtggttggtttagtgaatgaaattctgcttctactgttttccaacccctatatatgggaagccatcttttagtgggtttaacctattttttattttattattgttttatttatttacatcaaaagatttcatttt

SEQ ID NO: 203032 - DNA, 1208 bp, Cannabis indica
tccttagaactgtcctttctctttgaactactagccctcgagttatcaatccttgtggaaacagtacttgttgaaacattgctgggtttgcgtcccgagcttgttttcaacaaattcatttcctttcgggcttcttccttctgaacgaatacttgagccctttcgttgaacttagtgatgcttcttactggatgaccttgtaagtcatcccataacttccccctacagttaatggatcagtagacatcctcgcctgaagggctgtaagttgtgtgctgtcatccaaattcctaacccttgccctagccgtgctgaaacgaattaagtatgccttaagtgtcttgctagcatgctgctttatattggttagcaaggccgctttgggtcgcctatccctagcagactagaactgtttcttgaaattcctggatagctgctaccaggaagttattaagtggtgagtaaactttttaaactagctcctagctgagcccacaagtaaggtgggaaacaagatacagcgtgaattgttcgtcacatttctcactcacattattgtattaaagttgttcaaatgtgagactgaattagtggttccgtcatatgacgagacaagctggtttttgtatcccgaaggaaaagcggtactcatgacatctggatgatacaactcaagttcctcatctgagtcgtattcagattgtctccctagctcccccacttgatatctcctgaacttgtcctccagcttgtttatccgcaattggatcagatcctcttactgtggacaaagttgttggcgaaggtcaggtttagtctgattcgagtgctctcgcagattcggttgggagtaattgctgacagactccgtcttactaacagatcgcgtcctactcatagactttgttctactcatggacttcgccttagagtgactcgtggatttactggttcccatactttctcgatcattagcttgttgagtactttcttctctttcagttgatcgactgtgggtccttgaccgcctcgaggtcacacttgattcttcacgctctgctctctccccttgagtgtggtttgtcgtatttcctctacgagggtctatactacccctcgctctatgggtgcgggaagaacgttggtgattcctcgtaggtgaccttcgttctccaagctgattcccaagattttcttcatttttatga

SEQ ID NO: 203033 - DNA, 725 bp, Cannabis indica
ctattttgactttgtagttattttaactgatgttcttatcaattattctcattacataaattattaggaaagtctataatgaacaccctaaagagttatataggtgcaccccaaattaaatgtattgataaagaaatgaggagatatcatattgtgatggactgtattgcatggtgttctttcccttaatggacaaaattcaaaattttacatttcataggaggaccattttcatttttcatctccttctttatcagaagcaaaaaggcagaaactcacctgattattgatgtcctcaaagaccttggcgtctctattcaacaacctgttgtcctctattgtgataacacgacaaccattcacatttctacaaactcagttttttatgagcgaacaaaacatgtggaaatagattttcacataatctgcgagaaaaatccaacaaggccaactgaaactcatccatgtaacctccaagaacaacctagctgatatttttacaaaacttctacagctcactcagtttaaaaagattgttaccaagatgaatatacaaaatttgtacactcctcactcctcttgaggcgagtattaaaggatacaataataagttagtgatatttttctttaggtggttacacacttcgttagtccattactctcttattatgcccattatattaagggccaacccacttactctgtacacaaggaaaatacattcc

SEQ ID NO: 203034 - DNA, 586 bp, Cannabis indica
accgtttttttttttttttttttttgtcttcgtctcatgctattctactctaatttcgaatatatacacaaaaatccaagatattgatttagtgcttgcattttgttgtgtgaccaatattataatttaacgtttagttctttgtattacaattttaatgtcaatatatgacccaaataatctgtaaattatgggcaaatgtaaaaatttatattaatataatagaaccacaaatgcaaaaccaatattatatatataacatggactaattgtaaacacacctataatattttattttttaaaagaaaaaatattttatcttaactttcattaaaatataccagaatatgaaattacattaaaaataatataacaattaaataatattatatattattggtagtttggtatctcatatcaaataaatttaataatatatatcattaacctactttaaggagatttaaaaaaaaatgaaagatcacatggcatatctctttcttaggagagattgtgttagctagctattaggagttattttgcttattgtgaattgataatgagatgtttacaaaaaaaaaaaaaa

SEQ ID NO: 203035 - DNA, 593 bp, Cannabis indica
tttttttcagaagactttaaaaacagggtctaagatactattatgtgcatggatcctagtcaaaggacacgcatttgtagcaaaatgaaacaaaaatgaaaagcaaggtgtaaaacttagaagataaatatagaaaatttgccagcctaacctcgtcatgccagatttgaaaagcttcatcatcatcttcataaacactcacccaaactctgtcaactggcaacccaaatctgcatgtaacaacacatagaaatttgtttttatgcattatctagaaattagaaaataaatcaataaacaaggaaattcatggctagggaattgttcaaagacatgtaaaatgtttgaatataacattagcaaatttatgcttttagaaagaaactgctcatattctcatcttactatgcatcagttcaacataaaatgagatagtgagtgaagaaacagtactatctatatctatagcaaaaaagattcattagtaatgtaatagttctcgcatactctacagttgatagttcccatgcccatctaattgcttccttcttgaagtaatccccaaaactgaagtttccaagcatctcaaaaaa

SEQ ID NO: 203036 - DNA, 765 bp, Cannabis indica
cgattttccttgaacatgtcgaaaaatggatttcgaaaagagttgttgagattttagggtttgtaaatcatgctagggtttgctatccaagtgtgtgttgtaagagtcctatggctgttgattttcttagtgataatatgtccgtacgtatagatttattttggaacaagcttgatgatatgtaatatatacataatatatataatatagtatagtactttttttcttggttttgaattttggttatatgatgatgatgatcagaacgtacatttctacacaatatataatgaagttttgattttagtctttatcttcttctttttcttttaattatatgatcaataattttcttgatattataatatatatgttattcttattggtactgtcaaaatttggtggtggtgatgatgatgatgatatgatacatttatacaatatatattagctttttcttttatttaattttttttgtatatacattcaatctcttgtttgttgttatatataataaacagaaaattagcatgaattatataaataaaaaatatatatttattcagtttgattaattattcttttgtttcaaattatgtgttttcatcaagattcacattattttttttagttatgtattgtcagccttttttttttttcatcatccatgaaatagtttaattcgcacggataaaataaaaaaatcacgaatgcaataaattatctgaactgtatttcaatgtgttaatttttttttttgttaaa

SEQ ID NO: 203037 - DNA, 1520 bp, Cannabis indica
gatatgataccaaggtagtacgatatagtaagtttgagcagttgctgaagctgatcggagtcagctgatcccagaggggttgagaggacaacaacatttaaatcaatgatttatcaagcgacttcaacttggtaaccaaggtggagatttgttggttatggttacaagttttggcatttgagattagaagctgtgaatctggagcgcagatattggaagcttagtgtggatccagaaagccctgtgcggaaggcctggtagaatccaaaaggtacttccagataagcttgtaccgtgtatggaatctctcccggatagcttgttattaatatggaaggtacactctcagatagcttattgtcagtctttaaggtccatacgggtaggaagccatgtacatatccggaaggcttgtgtgtttacaatgcttccggattgtccgtaataaaagtgtgtctttccaaaatgacgtgaattattgttgctggtgatgagctagatcatttaaggcaatgtaaatgtgctacgataatttaggagatatttctggcaacaatacaaatctatatatagctataaatttttgtaacatgtgtgtgaatcatactagatttgcttgagtgaaaattgtgatagtgtaaggttgagagaaaaagtctaaactagagagaaatttcttctcgttatctctgagaagtttgtgaagattcttgtaactttgtaaacgctgttccaactgagatgtagaacattaaacatgactcgaactcgttaaacctagtcttattcttttctattttaatgcttaattcattacttgaatcttcatatctcttgatatattatttcttgtttgattgtgttgtgtgtttgttggtactataaactaaattgtaagttattgattgttttcgtttcgcataacaaatgaatacttatatattaaattacataatatttaagtgatatagagaacaaataataaagaaattaatgtttagtataatgtaaaaatttgatgtaaaaataaaaaaaaaagtgagttttcaataaagtattttaaatggtaaattgaataacattaatgtgagtgctctgatacggcaaacattgatgtgagtttcagtaaagtatttttagaaaaagattgtttcttatgtggtggcatgttagaaaattgccttcatctctgaaaagagtgcagttttgttaaagccatctggttttctagaccttgttgtttgggatgccattctttgctccgcgtgttagagtttttgttgcataactcccccagtaacgctagaatgcttgtcttattttatttcggttgtgtcgccattgaagtttggcagcagagaaatttaattagattgaagagtggatcagctgatctaacctcagtttccctcaaagttgaaactctcttttctgaattttcttacatggttcatgaatcttcaaagaggtcgtcaaagccccttgtttgctgtgttgttccaagcaggaggtgtggatat

SEQ ID NO: 203038 - DNA, 664 bp, Cannabis indica
cccaacaactcaatagtttggataatttttacacaccaaggtgtctagagtcccacaaaatttgtgaaattagaatccttgagattattaagattaagagaagcaggaacactaaaagactatacaagccttggaattgaacttatggacacaaaaaatgaatgaaagaaagttggaggactcctgtagaaatttgttagctacctacattagtctcaatgtgaaatataatatatgctagaaatgaaaacaactaccaaaatttaaatttcactcttcaaaacatccaaagtgatgtaaatcagcatcattcttattatataaaacaaaattactcagcaaaatgattgaaaacccacctcaagtagagagaaattcataaaaactttctgccatggccaaaagagagggagcttaacactccttaaataatcaatttatctgccgtaactcttaagttgtagagaactttgatttttctcccaaatgtgattgaatactagaaaattcctccgtcttctcgaataagcattttctagttttgcaatgtgtaatggaagattggatctcctaaattcgtgaacgattccattgtaaaaaatcgagattcctttcctagaaaaaaaaaaaaaaaaaaaaagaagagagagagaaatgatgtcta

SEQ ID NO: 203039 - DNA, 881 bp, Cannabis indica
aaattggtcattctattaaatttttatcacacagtgacaaaataatgacatgattacttaactaatttttatatcaagtatataatttaacattacaaaataattatgtatttctaaaaaattattatactaaaaattaattaataataaagaaaattatgtaaaactaaatttaaaaaaaaaatattttatcatattaattacacatgtggtgttgatacataacactgacgtgataactaatattaagcagttatgtcattattttgtttgccatgtcatcattttatttgtcattattaagaaaattacataaaattaaattaaaaaattattttttttttcaaattaattatacatgtgatgttgacataacactgacgtggtaactgactaagcaattatgttatcattttgtttgctacgtgtgacaaacttaatagaactaatttacaatactttgaatctatttttaacgaactaaaaaattaaaaagcacaataatgtatacaacataattctgagacaaatattctaaatagcctatatttattagatagatcattgaaatagcaaatataagggggaatgcatgccctcacatcatatataacttaattacatctaatcaaattagaagcaacaaaaaaaattaagtatatgtaggtgcctaagcacttataccattattaaaaaaatgttaagttatagtgctacaagagatagtaaactcgtatttgtatattttaatattgagttttatatattttaatttaataactaatataaattactgctaattaattatagaatgtgacattgatatagtattcgaaaataagaaacctagcaaatgctcattatatattattggatcgata

SEQ ID NO: 203040 - DNA, 1028 bp, Cannabis indica
caaatttaggagccaaccccatgggcccaacaaaattggaagaaggctcacccaattggccaagtaaaacaataaaacccaaccacaaaaccggcccacacaagtggctaaaacacaagctcccaggcccagaaaaatgcatattacaatcccaaatcaagtgccaactcagcattgaagactcctccacctcgggtcccacaccacaccactcactaaagttcaaattaaacttcaaacggtcattaagaaaataaggtacgtgaatagtaccctttccatgcatgccagaaagcaaacacaagggattaacaaaaatggtaatcccaccaacacgcgtggggaaccaaacagccaaacagcttcccctccccacttctcgagatccaccagtcaccatcatcaatcttgacaaacccgccggagcaaaaccggccaggccatgaaccgcagctctcacaagaaccatctcaacctccgcaagagcctcggtcggagaagtcgaacgtagaatcccacgagaggtagcctgcgcactcttcttaacatgaacccaagaaggtgacaaaacaggactagtcgtattattattctcgtaataatactgattattactactcctcgaatcgtttcgatccaactcactactatactcggacccaccaccacaatcacagtaaacactcctattctccagttccgtctccggctccggttcctcctcgggcaaaatctttactctccaaaccggtccatgatgatcgtccaacaccgccaaacacgcatgcaaacagttcccttcctctctccgccagattcgaatcgtcgtatcctccgatccactgaacaccatcttctccaccgccacaacgcacagaaccgcaaaccaatgaccctgcaaaaaccctccgtggttgaatctggacgacattctctctttctcccagacatttatggtcccgtcgctagattcggaatacagaaacctcgttccaccaccaccagcgtccgatcccgaagaagacgat

SEQ ID NO: 203041 - DNA, 1168 bp, Cannabis indica
taaggtaatttatagataaactatatagtacatatatacagtacaaatagttatgtactttatgtacctctatatgtgtaatatataattgggttttatgtaatgtgtacttatataaatgaaataaaatttgttttcggtttttgtggaaagaaaatttgctctctaattagtgtgccctcatttcactgttataagtctgccaacttacaagaggaaataatatactgaaatctttatcaaaatataattaaatgagtaatagatatcacactatgatatacaacaaactcaaactatccatgcggacaaaacaggacttggataatttaagtcttaactgacctagcctctataaatgttctaaggaaaattgtgcgcgtgaaaaaaaaaattaatcactagatgataatacaaacacaattgttctatcatatctttgatttataactaaagagatcaaacaagataaaaattttattttatgatatcttggaattaatgttttatgttattttattttaccacctacaagcttttattatcaatttcaaaattatgaataatgttaatataacctcattactaagtaaaaatatttaattacctaacttttaaaattaaataaaattattatttaatattttcaacttattgtttaaaataacaattagttttatattaaatttaaaatttcttaaaattagcaatggccttattttcattttgaagcttctaatttcttaaaattaacaatctttatttttattttaaagtttccaattaatttaataaattaacaatattatttatcatttcaagtttctaatttgttaaaatcgttataaagtttccaattagttaaaattaataatttaatttgtaacatttaaaagttgccaactaatttaaattactaatttttttaatcattttgaagctaccaattttttatagtttaagtgcgagagtttgaggtttgggtgaaaaggctaagagaatgcgagaaatttccgatatcgatctagggtttgaggggttgtttccttattcatagttcttttatgtttaatacgtttaagtgtcaattaataccggcggataattactggcggaatccgccggtattaattaatgtcggcagtctcctctattattaccggcgggt

SEQ ID NO: 203042 - DNA, 704 bp, Cannabis indica
tatatacataatatataggtgaaccatacctaatttggatgttgccaaaacagtacattccaatatatatatagcttttcttttttttttttaattttaatttatatattataattacatatatttatatatataatattaatagctagggttcagtctcaatatatatagttgcagctacagtatcatgattataatatatatatagatgtagggtatccaaagtctataaggctctggaaattgaaagtaaaaactttgtaaaaatataaaataaataaataaaagtgtgaaaacaaataatgagagagacaatatcataattaattctattcataatataaaaccaaagagaggaatgttggtgcgcttaactggtacaactacactacaactgcatcacatatatatatatataaaaaaatatatttatatatatatgtatatatatgggtccccatgcaaataagtatgagaatcttgactattatatatttactatttacacactttttttttagaaaaaaaattaaaatatttacatttctgatatatattttcccacaactatatagatatatatatattaattataataaattttcaatttcaaaactaaatatttatatatattatattatggtaatcatgagctagatatataaataaataaatcatcagttagtggtcatgtaaaaaattta

SEQ ID NO: 203043 - DNA, 636 bp, Cannabis indica
atgagagttttattgtggagtgggcaaaaattggccttttacagcagggattgactttaataaagacatttaaattttgttttcacgaaaagaatatataaattatgatagtatttattatagtcaattaattactatgcactaataagggttaaatataagttgttttcttttttataaatttaatcaaaaaaaatatatttattcaattactaaaatgaagttgaataagttattttcagcacatataaataaattaagtaaattagcaaaacaattgctatggctacaataaatactatcataaaaaataagaaaaattaatatttaaattcctagattgctctctaaaggtatgttttgcaaactctctataacagattatttgaatttcaaatgagttcatatgcttttgaattcgttgggacaaattttttttgactttagagaggtgggaatggaacttagaactttctctttgtgaggagaagtgacaatgtctataatcatatttatggaccaacttattcaatttatttaacgattattctagtcatagtcatgatcacattagttagattttacaatatattcaaatgcatggaatataatgagttggctaattagtaatttttt

SEQ ID NO: 203044 - DNA, 1571 bp, Cannabis indica
gttagtttacgctctcttgtggacctccttacaagagtctcaattggtggtggaggtgcttcttgatcctgttcagttggctcatcatcatcatcaactgtaggaacatcatcatcaatattctcatcacaattttcttattcatctgcttcttcattgacatgctcttcatggttttctattcatatcccccatgatcactatgcaatattggtgaaggacctgagctagtactcacatgaacattaacatgggactttttcttttgaactttttcactatcttcaaacatttgattttcaagaaataccacatccctacttctaataatcttcttgttcatgggatcccataatctatacccaaactcttcatgaccataccctaagaaaatacatggtttttctttatcatgaagcttggatctctcatctttaagaatatgaacaaatgctcttcacccaatgactctcaaatgaccatatgtgacacctttccctttccatactctctcatacacatcaccgttcaaaggaactgaaggagaataatcaaatcaactacagttcttatagcatcccccgaaaaagatttaggtagcttggcatgggaaagcatacacctaatcttttcttcaaatgttttgttcattcgttctcccacactattatgttgaggagtttttagaactaacttctcaagcttgattcaatggaatctacaaatagtattcaaatggactcatatactcaccaccattatttgctcgaacacactttaaattccttccaatttcaatttcaattttggcatgaagttctttgtaagcattgagcacctggtcttaagatttcaaagaaaaaatccaaacttttctagaatggtcatcgataaaagtaacaaaattaagtgcacctctaagagttctaattttcatagtacagacattagtgtgaatcaaatcaataacattatatctactaaatggtggacttgtatgaaaagaaactctatgtgttttttcagctaagcaatgatcacaagtttaataggcgtgccttgtaaattcaataagaattgctttctagcaagagtttggagttctttcttattgatatgaccgagcctctggtgccaaagatcaatacttgcatctttttgaactgcattaatctatcatttgtgtagcttagattccatgatatagagagtattcactttcttttctctcaccactacaagataactattggagagcttccatttactttctaccaaaccacgtttatgaacccctcatcatcaagtcttccaatagatatcaagttaaggcgaatgtatggaacaagcctaacatctttgagaatcaatttgctgccaacactggttttcatgtaaatatctccaatacccacaatctttgatgcacaattatttcccattatgacattgccaaagtcacaaatagtgtaagaagtgaagaaatcactacaagcaatgacatggaatgaagcacacattaatcaccaactgtaatcttggttacaagactaacacacccatcatcacat

SEQ ID NO: 203045 - DNA, 1255 bp, Cannabis indica
ttttttttttttttgaaaaagcacaaattaaaattggtcagatatattggaaaaatgaataaaacatgagtactacgtataatttaaattatctcattgatcataattttttatctaaatattaacattatgcttagtatctttatcttaattatattaaaaaaatatctcaaaatctatttctaaaacaaataatgtcacactttaaataaaatctaattaataacatgataaagatcatgacacaagatcgatttacattgccggcgattctataaactttttccactttcatttttttttattagtttttttttaaaaaataaaagttgttcatttgttaatatttaattaaactctcacaatatggaagatctttctatatctaatgaaagtttatgttttattcaaataaataaataaataaataaactctcacaatttatacattattaattagatacatctttatacaaacaaatgttaattccacatatttttctatgaaaatttggatatcttattatacaattgagtaatagcctaatatttatatttatacatatggttgtgacgcaagtaatgatgaaaatgaatatactaggacgatctaatatatattatttatatatatatattttatgtctatatataaagatcctcacatcatcaaataatatcatcatcaatatatatagaaaggcaaaggtgagtatagtcataaaccttatctatgttaacacacacacatatatataaatatacataatagacctaataatattacttcatgtttctctccttcgtcatgttttttattgtctcttgtatttgaactcaaagcttatctgttctcatctcgatctaattagggcagacaaccaacctcttaattaacctaacttatatcattaatatataagccaaaaatctagcaatacataattacatattaatgatcatcatcaaaaacttgtgtcacctttggcatatccaaaagttttggagggtgatatatatatatataaatttaaccaatgaatgttacacaagagcgccatacctaaaataatacatcactaccattgttatctaccaaacccaattgactctatatgtattatcttttcaaatccctatatatatatatatttctcgttatatatgtatttttgtataactacaaaaactatatatatatatcaaaaggtatacttttactcgtaaggctatagctactagattttttttttac

SEQ ID NO: 203046 - DNA, 692 bp, Cannabis indica
ctgtttaccaattaattaaacatgtttttttttaaaaaaaaaattatttaattaattaaataaataaatattaataataatttaatgaataaattttttctaaaaaaaaaattgacaccacacccaccaactcagcttagcacggacggcagcgtgcatgtgtggtggtctagtatgtgagtactaacccatgcgcacaaacctaggtacccctcggggcccaaacccaagttctaaacttggacatatacaattttaataaagtatttctcatgtgggacccatttactcacacactttatttttttttataaaatttcataaagttccaacagattgtgttttattttgaccatgtaataagttatataaaattgtgtattattttgaccatgtaataaattatataagattgtgtattattttcatcatgtaataagttatatctcaattattattattattattattaataataaatttaatgtattaaaaataaaatttaaaatagttgttgcaacaaaatattccaattatatttttgactgataaattatttagaatattttttcttttaaacgaacaaattaagttgctaatataactataatttacgttgttaaaaaaaaaaagtcaacttatgattttggcatatacttaaaataaaaaacgactcctagctaacaattttt

SEQ ID NO: 203047 - DNA, 1432 bp, Cannabis indica
atttccaaatttaagctaagcggtctttacagttgtattcacatagatacaattttttttttgacaaatataaaatatttacttcaacaaatgtttactaaaatctatagtaatattataactatttttcattattatcaaatatataataatatatattcatcttttagtatatttcaatcaattatacattgataaatattatatttacataagcttaagggtatatgcaaagattttatagagaatttatatatatatatatatatatatgtgaatatgtattcatctcttttattatatttccatcaattatatgattaatattatgtttgcataatctttaagatatatccaagattttattgaagacacataatcttaactatatatgtataatttatatatattctatatcatatcatagataaataataagagcttacaatatatataaattcaataataaacatataaaaacatatataatatgtaaatatctaaataaaaaagaaaaaaaaagttacttaattgttattagtaataaaatgataatctacgttatattttgggccaatatattttattatttttctataattagtatattttttcaatatatatatatataaatcaatagcacttataagtgaaaatgtacatgtgtgagttgaccatgaataggttttacccttatatacatacaacacataaataataacagttttttttatttgttgatgaatttactatactacactttgaaaccatgtaaaactagaaagtagatgcctttatttagggggctaaaattaaaaaactatgcactttttccatttgaaaggaaaatgaaaaggattacacataacaatagaagaacatatttgagagagaaaagtagtaagaaataaagacaatcccatgtggtttttgtgttctatgcttcttttttttttcatcctgacccacctgttttttcaataatcaatataaggtcatattcttgtatatatatcaatattacattcactataattataattgattaattatttggcaaaatgtccatatatatataacagtctcaactatttcataagggacaggaagttgtcagctctagaaactactacctttttaagtagtttcacttttcgatcaatctctacaacttttctacttataataattggaaaaaaaaaatggtgatgaggggagagatagataaggtggatctagcattcgaaatttaaatttctttgttttctagttgtataaaaattactcatttatttaaaaaaaaatactcaatagttatacgtggattttctttttagggttagaacaaaacagaatccatagatataaacaaaatatatattgtataatgtgtacatatatacacacaccatatatatacgtataccatata

SEQ ID NO: 203048 - DNA, 889 bp, Cannabis indica
taaattaaatgggggttttgagttacaattaaatagcttaaaaagaaaataaataaggaatgacaattacgattttaaaagcagttaagaattattctccacctccaacaatcaatcaagaacaacaatgataaatattatattttaccttagaatttaactattaaccccgcacataatcatttctcccagtttccctattacagttaattaccaagcctatataaaccccgcaaacccttcgtacaagggggacgaaactctctgagatttactctaagctttcttcttctctaagaaaaactttgagagaaaattccataacaagaattaggattcttcaagattgtgaagctcacttgtaatacattcaaagccttaaaggcaaatactcatgaactagaattcattaacactcaaaccacgtaaaaattttcatcttatttacttaatcatttatagaatttattaaagctcttatttatccaattttcaaaaatctctataaacacttatggctgctttaaaaaaattgaatataggtaactaaatagttttcaaaatagatttataaatgacttaagagtatgtttaatgatagtgaattgctaaagagcattaataatacttaatatcatgaggtgacatatttaaaattaattaagttcaatatattttgataagaaaacttaccgtcaaatctccatatattttaattttatcacttatccttcttatattttctttgtgtgtcaaaactatcttaaatttatttctgtttgcaaatttaaaattttagttaaacttcactcttaaactcaaactaggactgccactatatacacgtatgtaccgtaatgtgtatctattgttatttttctaaatttta

SEQ ID NO: 203049 - DNA, 1531 bp, Cannabis indica
cacgtgaggattgaaataatttaggaggttttgggctcgtttggaatgtaatattaggtcgtattgtattgtattatattttttttttttaacaatgaactagaattcattgaaaaaaatcagcgttcagtacatcgataaggaaagaaggaaaatcctccatccaaactagctcaccatccaccctaagtgcgtgcacagctaattcatgagcagccatattggccgaacgacggacatgaatcagggacgcctcaggaaaattggatagtagactagaaatatcatctaaatgagaatcaaggtcattacaaagagaagatcttttaggaaaagcagaaatcacagctaggcaatcaaactcaatagaatggagagggagaccaattccaagcgaccaatccaacgccaccataatagctcttgtctcaacttgaataactgtaaaatttcttacaaaaccaacatagaaacataataagcttcaccccaagataaaataataataataataaaagttagtaaaatataaaataaattaaataacgagtctattatggacagaagggaaaactcccttcgtccttacaatccacataaacaataaacccaaacctcatcataccttaattggaagcatgaaaaacaacatcatagaaaattcttaaaccagaaaaaaattaatcaaaagtgccattaccaaataaagatttcgacatgcatgccatcactaatccttgtgagttttgaataatcgctctaattctaattgtatcatttttatcatccaatgatgcatccacattcaatttaaaggcccccaaaggtggagtgatccaccttgacattgatgtacaaatagtcttctcttttaaactgacggtatgttggatactgttaaattcatcagaaagggattgaatacatgaaactataacttcaggagaacgaatttggtgtccatgcactactttgttacgctctccccagatataccaagctgccacaatgaatacttcaaattctatctgtgataacacttcggatgctttaatgattatttgttgaaaagaaactttgatagagagactatttaagagtttgaattttaataatttccacaccttcttaaatatactacacaaaaaatagcatggctattagtatctgaattgtaaccacatagtggacagttggaatggtcaataatattccttttcttcagaccaacattagtaggaagtatctcatggaagtctcgccatacgaagtttaaaatctttttaggtaaatgcatcctccaaaacctcttccaccaaactgaaaacacatctttggaaggagattgagaagacaaatcaaaagtagaagctacaatatagccagtcactcttaacggaataggaaccatccgtcgtaaaatgccaaagccatgaatcagccttaggaaactttccatgaggtatagaaccaatacattgctgatccgcgacattaaaccattgtctaatcataggtaaattccacaccc

SEQ ID NO: 203050 - DNA, 641 bp, Cannabis indica
tgtatatcatgtgatacgcgtttctaaaatttacttttcttaattagcagggaaattagtaaataaagttttaatcttgttagctagactccattcgcagactacattaaactctatttgttgctgattggaccaatacgtgatcattccatgattgatcaaactcaaaaataaattttaataatctttttgagctagattaatcatgaaatatcatgtgtgatcattcaaatcaatgtctaatagagtttaatattaatcaaatattttctaacaaaattattaacttttattttataattgtgtgcattgtaattttttagaactctccgtaattttttttaaaaaatttaaatagtttacagtattgaacataaaatttaaacacttaccatacataaataaaaaaaaaataatcacaaatgcaacaaaattatattttaacagtatttttaacattgtaaactattaagaattttttaaaaatttacaaacagtcctaattaggcacaacatacacgattataaaaataattaaactataaaattgtttacccaaaaattggccatggtgacatgtacaggaatatttgacatgtggcataaatgaaaaaatttacagagttgagtagtcccgagtc

SEQ ID NO: 203051 - DNA, 711 bp, Cannabis indica
ttctaatagtttaaaatttaattaaaaaaaattagtacttttccattctattcaatttcattactttgaacaaagcaatacttatagagcgtcctaataagtttgtggcagatggagaaactaatttgtatgtataattttattggagtaatcgaaataggttatgagtatagtgctacagtcttcattcattagtaattgtgccgtacagtctttactctttattgttatatgtacctttttctacagctataataataatatgactacatttctggtttcctatatatgctgtcattcctcatttttcagcatccattcaaatagtattgcttccaaaaataaataaataaataaatactgtattgcgatataaggcctgcagccacaaattttcagttcagtcaaaatatgtgaaaaatcttaagggcatttttggatggattgttcgggtagactctttaattactttttcacctttagtgtgttttttcttttcttttttctttttctttttttttttaaaaatgttattgtgccgtttggtaacacttttgttttctaattttttaatctacaaaatgaaagtaaaatttttgtttttaaaaatttttgcttttaaaaaacaaaagtgcgttctgtaaccacttttgtttttaattttaaaaactagaaacacaagtgtgttcagtaaagttcattttcattttc

SEQ ID NO: 203052 - DNA, 1836 bp, Cannabis indica
tgcttatctcgtttctggttctaatggagatgggaaaatgcttaaacggacacttgaagccctataccaccctcggaatagttatgttgtgcatcttgaccttgagtctccgcctcaggagagattggatctgcagaattatgttaacgaccatccgacttttaagaaatttgggaatgtgaggatgattactaaggcgaatctcgtgacctaatcggggacctactatggttgctaatactcttcatgctgctgcgattttgttgaaggaaggtggcgattgggattggtttattaatcttagtgcttctgattacccgctcgttactcaggacggtgggtattgattttttgaatttgggtttttttattttgactttttgaattttgattggttgattaatttggtttctttggctttatcagatctgttacacacgttttcttacttgccccgcgatcttaatttcattgatcataccagcaacattgggtggaaagagtatgtggaaaaaaagatctgttcttttcaattattttttgggtaaatttgttttgtttgattttataatgttattttttcaggtaccaacgagcgaaaccaataattgtggatcctgggttgtatatgacaaagaaagaggatgttttttgggttacacaaaggaggagtgttccaactgctttcaaactttttacaggttaatttatttgtatatatttttatatgcttgttatttcctttggcttcttagtgttatttccgtttcagtttacatgatagccagtgttgcttattgtatttgcttaatgttaaatttctattttaggtattcagtatgtccatattttactccttccagttaagggtttatatcaattttccaaactttttttggggagagcatgttgggttaatttggtatcattgctcttactgattgaattggattttctgttgattaaaaccttaggattgcagttgactattatttcatcatagcagaatgatgctttgttctgcatttataatttagatgctgattgataatagcgccaatttttataaagagaagaaaataatgttgcagttgagcattagaatgcttggtttgctccattatttatcagatatatacatgataataaaaattaaggtcacaagttttctgtatgttgatttgggtttcactagcgtattacatgttaattaggtgaagaatataggtttaggactcttaaaagaacaaataattgaaggaatgagagaagttctctctgatctatcaaacaaatgatggagaggttacatattttctcatggcttggtttttctccaaggtgaaaaaggccgaatatagctttttgtcatagaagtggaaatcttctgaaaattcttttttttttttttaatgttgtgttcccacaaaagtgacatagaaaacataattttcatatgacttgaataacaagactttacaaagtctcacatatgatttctctaaatgaacgagtagtggaagatttcaagttgtctgatattttcctcaaggttcttggtaaactgctcttctgaatcatctagaatagtttggctttcgaaacattcactcacagctctcaacctactgctgagcatctctattattttttattcttttttatcaggttatgtaatatgtttgattatatttcaaaagaactagaggtatttaatgccaacgattggtttgggggttgggagtcgataaaatgatgcaccttttaattatttatttttatactggtcctctgctgacctatgatttctaggagattggaaaggtaggctcccgt

SEQ ID NO: 203053 - DNA, 790 bp, Cannabis indica
taacatccttagtgggccttataatcatgtatattgtgtgttttaccacgatagtgagctagcttttacgaaaaaacccaaatgggtcatgggtatgtctggactcaaattttagcctatatacattttgctatccctttatgcaaagggacataatattttagtcaaagctctgctggtttcattctaagctctcttcttctacaagaaagacctagagaaatcctcttagagcaagggttagggcttcatatggtaaagatcatttgtaatgcattttaaagcctaaaaggccaatacactaactttgctgatttttttttattgcactatcaagcatcaagaatgttgagttttaccttgttgggacatctaaataaagaagaccattgcattcaatcttttcttccaccactacttccttaaatgctttaagcctagcaggagaagacctaacatacctcactacatttctgattgcatcaatggactcatgtttttctttcaagtcttcactaacaattaagtttactatgtggacaccatacatctcacatgtaagaactttccctccaaaattagtccattctctttctctttaaacttcctctttaagtatctaatggcaacttcattagaggaagcattgtctaccgttatggtaaataacttaaagatatcccattctcttaaacatatcccaatctgtttaccaatagtttctcatttatgatcgatgacttgacaaaaataaataattctttttggatacttccaagcatgatcaatc

SEQ ID NO: 203054 - DNA, 1058 bp, Cannabis indica
tattttattttctgttgttgaataataattaataatatcctacacaaattatacacgtgacttaattagtattttttaaattattatatttgttaaaaagaaccttaacagttgacattgacttaaaaagcattattgatgatgcatataaaaatcaacatctactccatcatcaatataaaaatcaaatgaacaaataaagtttaaaactaattaaagtgacaatgaatatgtgtcatttgaatgaaaggattttttttttttttagaaaaataaaagaaataaataaattatttagaaaaaagatgttgcttttacagaaactattatatgatttgattcttcctttttcactaaaaaaaattaaaaagagaaagagtagtcttgtttgatgatgatgttcaaattaatggtactacttaatatagtttgttaatttataatcatctatgaccacattaaaagatcaattcgtttggactagctaggctagatgcgacctgtctcttataaaagaaatgatatatggataagcacttgtggaatatgagtcactaataagttttttttgttactatgattgcttgatgtaataatattttttttcttcatctgatttaatttaattagtaattaaatttaaaaaaaaatattattcaattccatatctaattaaacttaaaaatccaatctattccaattcaatctaattactaattaaattggaacaaggcaacaatcaatcatgtatgtttgtaaatatataaataagtataaaggcacgcgcacacagaaaaagatttatacataatattttttattttctttcaatgaatttatatataatagttgattttagaaacaataaataattttaatggtgttttataatgaatatatttatatatttattatcctccttaagaaagttccatcgaacacgagatctgatcttcgatctgtatctctttttatttttattgttgcccctttgttgaaaatagctatatattccttcaaaatatataaaaagtgtattagttatttttgtccctacg

SEQ ID NO: 203055 - DNA, 761 bp, Cannabis indica
gagtaaaaaaagcacttgcattcttgctataaggaatataaatatagtgaggcaaaaattgttcaagatggtgagcacataaaatttctattaaagagagaatattaaagctctcatattattaatgtgtgaaaatataataaaatataaaagattcattaactattctttctattaccaatttttaagataaaatctcatacatcttacaatttaatactcaaaagtctctcctgcaaattagtagaaatcactaaaataagacttagtacgtcgtaagattgtcctttaagccgattttttcatcacatagctaattaataatacctatatatacacataaaataatgtattgtcaactttattaaatgtatatttataccaatagcaataaaacattgttatgaagtactcatagtatctagcatcatgatagagtgtcatcctataattagttaacgatttttcataatatttattaaagtaaaataagtgagatttaatatcaaattgcaccaataacaatatgataaaaaaaaaatactaaagggcactagtagtatctagtaccctcctacatattaatatagttattagtctaattaagtatcaagtataatatagtttattgtattaacttttagagaatatcgttaatcaatacgatatgtctaaaaaatactaagcccactaatacttaataagaatgctttaaaactaatacttaacacgtttcttttaacaattctctatatatatat

SEQ ID NO: 203056 - DNA, 525 bp, Cannabis indica
ttttttaaaaaaaaaaaaagacacaatttcatttatagaaggaaaagatgggaaccacaggggggtccctccccttggaaaatatcagccaaatgactagaatctctagctcttttttccagtccatcagcaactaagttaaaacgacgattaatgtaaacaagcttacaatgcgaaaagactttaataacatctaaatctgcaagcgaaaggtgtaaaattctccaatgaggagggcatagtctattacccagagcttcaataactactttgcaatctgacaaaaggatgaagtgctcccaagaattttgagcaacccactcatgggcaagcttgactgccttagtttcagcttccatagcagaggcagctttagaatgcatcagatagtaggaccaagaattatcaaaaagattcagagccacgactgcaaggccacccgatccattttcccaagaggcatcgacgaccaaaagtaacttactagggggaacattgatgttgaatgtgttggaaattatttta

SEQ ID NO: 203057 - DNA, 1095 bp, Cannabis indica
gtatattttctcatcaaataattagaacaatcaatagtacctttcataaaaacattattagtctcttggagatttgtgattgagagcaaaaatcccttatatctatacaaaagggacatttctcgatgcatttgaaattaacatattaaacaagcgggatttaatctcaattattaaacatcatgtctctatacattattgaaagcttgaagaacaagttctagagtagtttattagcatatccggcagtatgtggcgccagttccgacgatgagtcttgctttggtttcaaaccaacaaaccatatctctattgatatcagtgtttacaaggttacaagaatttttacaaacttctcagagattacgagaagaagtttctctttctagtttaaactctaccttacactttcacgatttttactcaagcaaatatgatctaattctaacattgattacaaagatttacagttatttatagatttgcattgttgccaaaaatatcttctaaatttttgtggcacatttataccgccttaaatgatccaactaatcaccagcaataataatccacgtcagcttaaatacgcactttcagtacggtcaatccagaagttttataaacacacaagccttctggatacgtacatagatcttcgggatacatacatggcttccttcctggatggaccctcaagactgatagtaagctatccgggtgtcactactacaaatttcactattcacgttggtcaacacgactgttcattgcgttgaccgacgtgaatagtgccagattaaataattcgacgttttaaaaacgacacaaataagtaatggtttgtgtcggctctatctcccttgctaattacaaaattgacgaaaaaaggtagatttttttaaaaatatatatagaatttgcgtcaattttaaagcctcgcaaacccattttgtgactttttgaagctgacatttttggatttttcgtccgttttaaaccctcgcaaacccatttactagtcagaaatgtaaatgggccaaagcccattctaaaaaccctaaaacaaaactccacacttaaatatatcttattctc

SEQ ID NO: 203058 - DNA, 1161 bp, Cannabis indica
agtggaaacagactttgcagattttcaagggatgctcacattaaaataaaataaattagtcaatgctcaattgctcaaattagccacgtcgttctcacattacactttcgaaatcaaacacatcaaaggaaaaataaatgtcatttctgatttcatctctcgaccatgcaaaactactaaaatatgatcaatacacaaaaaaaaaaatccaatcctctttgtctacatgcctaacttatctcttatcatttccacattccccaataatgcaaaaaaattgtcaaaacaaaaaatccaagggttataagaatctaaagagccctagaacttcatttgactctcgtcaagggatatcgccagactctacttaagaatttaccttctatcaagactaccctttttccaaactctcgcatgggttatttcttcgagcaattctatttttggttggctcactaccatcttcttttcagaaagcataaccccatacttttcagctatctatggaaattgggctaggaggttagcatggttcttgttattgggtgagaacaatagtatatcatcaacgtagattaggacttagttcaagattggaatgtatattttagtcattgccttctaaaaaagcgatggcgtccttttaagtccggagagcattactgtccattggaaatagtgattccaaatacaaaacattgtctttggcatgtcttcttctttaatgcccaattgccaaaagtcaaattttaggttaaactttgagatattttttattttgagatgctagagaaaagtgaaattctatttggtagaggaaatttatcgtccaccaagaaatggttaagtggttgataattaattactaatcgttgttttcctgtagctttctctgccctgttgttaacttaaaatgtgtggcatgcctatggtgacttagtgtcttcgattagcccttgtgatttgagttggtcacattattcgctttccatctgctgatgttcaagattcattccaagatggctagctttagttggattaatatcttcattttgcttgaatggaagaagatgaagattctttattcttccataatgggtgtcgacacttcttcaaaaattcaaaaaaagagtttgcacgtactcatcgagcataattttt

SEQ ID NO: 203059 - DNA, 1006 bp, Cannabis indica
tcagtgataccctatcacatacacggtccatgtttgcggttgatgaaagaaaagattcgtatgtatgctcactgaaatttaaattttgttccttgttttttattcattgattgagactttctcttcccatttgttaggattattctcccaatctgcatataaattacatagtatagcaataaagtttttaaatccattatcccaaagttaatcttcttataaacttgcatttccttttactaacaaaatgattgttaaattctcataattgccaccttattcaattctgaatattgacacttttagttggaaaagtttgagtagaataatttgtcattgttatcttgtttgaatatcaggagtggtacaaaatgtaatttttttgttgaagtgaataataaacttcttattttgtagttaggctttacattattgttattactgtttagtgtgtatggtatctgtatcacagaagtgagctgaaaaagaaatttacacttgttaccaacttagcaaccacgttggcggcgctttttgccatttgtatgccaaaaaagaccatttgcttttttatgttgtaattattaatcttgtaatttgtcttcttattgatctgtccaaaaaaattagatatcttgtcatataaaataggaagaagttttttgctccttaaataagtagaatgggggtgtaaatcagtagatccatagatgaaagatcagaagtaaacaattaaacgcaaaatataaaattactagtgtaaggagctttcattcttgctcctcattttatcggaataattgcggcagtgtataagtatttaatgttagtaagtaaaattataattttctttacaaattttattttgattttattaaaacaaactggcagtaaagtaattgatattacatatttttattgatattacatatttttgttcaattccaaatgatttagaatacaagtttcacatatgtcctcttttaagtgttagaatgcgaaagtg

SEQ ID NO: 203060 - DNA, 927 bp, Cannabis indica
cactgctcaagggtcctggaactttagaaagtatattggctttctataattcacttaagatttttttttttttggagatatgtttctgaatatgactatattctacatcttctttctgacctacggtgaaccagaattcattttcattgtccattgttagatatctggatttaacttgttattgctactaggcaaatctgcttcaataatacatgggattctaacaaaaagtttggaaattactaatatattcctacgagtctatgacctggcaatctatcagactgcgcctgatattttgttagaatatattctgaactctattattctatgacttggtgttttactgatatatattattagacctgctgatgaagttgctgcatttataggtggcgtgggagcatgaacagttttcaaagctgagagttactgcagccactatctctgaactttctgctgctcctgagttgttagaaagaacgggtggtatagttgacagcaggttttatttcttgttctcacttgatgcttcttattcctggaattcatgtaagtttgtacaggaacacttgctgataagttggttttctgcagaaattttgttaatgaaacttcggtcatcaaaagtgtcaagttaattgctgagagtcttgcggtacggttacattcctgttatgacattttattgtactacttgacattttaaatttctatctgagcatgatgatttaaatttgaatatgcagtagaacatttttaatgtaaattcactggtagaacatttttaatgattggcagagaattgtaaataaatacaattgttttaagttctcgagtctgagctcaatactttctctgaccttgtcaacaaccttgtcctgtgcagagacatatttatggcttccaagaaaagaacattcaaat

SEQ ID NO: 203061 - DNA, 637 bp, Cannabis indica
cataaagcacacacacatcagcagctgtcttcaactgaatttcatgatcagaagtcagaaaacacccaataattatgaacaattattctatgtaatttatcaaaaaaattcatagctttgcgtaactgtaataacactgcatttcaagcattttgttaccaaagtataggatgaaataaaagtaacaaaaaattaaaaggcccctatttctaatgctaaagtgaagttgttactctcttgaaatctgaggagaaaaacaaaaatgaaaagaaaataaaaattaggtggatttcctcgccttgtacttcatagctctacaaggatcaaataatttatgctaatgatagctgtgtactgtagatgttattctgtttaaaattctatgatgagaatactcatggtaaagtgtttaacctttttaaattttttcattgaatgatgctaagagcttatacgcttgacctgatgctttctgcaggctgttataagattccttggatgatggtcttgcacatatatataatgccacttaaggctgaggataatacataccaaactccaaacaaaagtatcagatgttatccgctacttaattaagtttgttgttgaatgggtggctggacaaataagacatcta

SEQ ID NO: 203062 - DNA, 791 bp, Cannabis indica
agtaacaaattaaaatggatatcgtatatttaattagaccaattcaaaaacaaaaaaatactaaagttgaactctgtaatgaataacaactaatttaattgaatacaaaatcaaaatcaaaatcccatgactttaccatataagtttgatgggggttgaataatcccaatttgttaagtgaattaagaaaagcaattccacaaagccattgaaagatctaccaccatgaaagttgaatctgtttaccaaaaaccttcacgagcaaagattgaaattagaccaaatgtgtcactaaacaagacaatcttcttgaaaatttcagatagctattcttgaaatttgtcaactaataccaaactttataatacatattgtctcatcacaattagataatctggttttgttagagattttgggaagaagactaagtaggttagtattacactaccaatttctattatttcttaattacgagtcaaagatcgaattatgagaatgttaagaaacataattccaagaaataatgttcacaacagcaaatctcagtcagaagtcataacaacaatagaaatttaagaaggcttacttatatataacccaaaatgttgttgagagacttggatttatccaatctgaaatctttgacactcaatcttaataatcatcaacatcactgatatgctcactataaatacgccatccactcctgcaaatctattgattagtattcttcaaaatagaaactcagaaaatccaagaaaaattactgaaataagatggatagttagctg

SEQ ID NO: 203063 - DNA, 689 bp, Cannabis indica
gagatttatacttgaatgtatttccagtgtggtgtttgaaaacaaatcttttctataatcctaatataacaatagttttatcttggaaagctactacttttcatgtggatattgtgaaggatacaactcagttaattcattgttagattgctccaattcattgaataattttttgagagacttttgtttacgcttttaatgaaacagcgggaagagtagtcatctacgaatatttaagaattatttcaaccaccagaaaaggtccatggattatcctaggtgattttaatgttgtttgtaatcctaaaaaacgattaaaattcaatggtctaactaaagactataaggttttgaagcaacatatggaatattgccaagtaatagatgtcaagcttaatggtaattctcatacattgaacaataagaaagaagggaaggctagagtctatgcgaagcttgatacagtcaatgcaaatcaatcgtggccagataagtacacaagtgttgaagttaccttcttccctaaaggtgattttgaccatagcttaagtgtcctaattgtgtatcctattaatcctagaggtaagaagccttttagatctttaatttgtggagttatcatgctgattttttctggaaagtggaggctatttggtaagaaccttaccatgggattgagatgttctgtg

SEQ ID NO: 203064 - DNA, 1742 bp, Cannabis indica
tttgataaatggttctgttagtgggtttcttaagccttctaggggtattaggcaaggggatcctctatctccttatctttttatcctttgtgcggaaggtttatcctctcttctcagggccaaacaagatgcaggtttgcttaatgaaattactatctccaggtctgctccttctatttcccatttgttttttgcgaatgacagtcttatcttttgtgctgccaatcgtacttcctgttccactctttaggaagtttttaatatttactctagggcctcgggtcaagttattaacttatcaaagtcctctattctcttctctcctaacactcagccagatattcacactctttttttcaataatttcaatcttgaagatagaccctttatatgtaaatatttgggtcttcctcaatgtctttctagatctaagtatcactcttttgctttcttaaaagataaagttaattatgtgcttagggttggtctgttaagtgttttctagggctaggcaaggaggttttgctaaaggcagccatccaggccattcctgcctatgctatggcctgctttcgtttgccggtcaaactgtgtaagggtattgaagctgtgatggccagattttggtggggttccacaggaaactatatgaaaattcattggaaatcttggaaatttttgtgtcaatccaaatttttgagagggatgggttttcgttctttagttcattttaaccaagccatgcttgctaaacaagcttggagaatattcaaaaatcctgcctctcttcttgcttcagttcttaaggctaggtattttccccgtacttcttttcttgaagctaaacctggtcataatccttctttcacttggagaagcatattatggggtaaggacttgttaagttcgggcctaatttggaagataggtgatgggagcaatataagaattatggaggatcattggcttcctcacaatagggttaaactctttaactctgataatgtgcctccctccccttttctttcatatttcattaatagctctggggcttgggatgtttctaaacttaacaattgctttagtgaaactttggttaatgaaattcttagtgtccctattttgggtttgcaagataaggatgacattatttgggggcatgatagttctggggtgtttagtgtcaaatatgcttatcatttagccttctctcatcaggatatccctcattcatcatcttttaccaactctaagaaattttggtcaaaaatctggacctctaaaatacctccaaaagtgaaagtgtttgtttggagaatgttttctaatgccattcctgttgctttttctcttcataaaaatgtgttattgattctcctctgtgtcctttatgtgagattcaacctgaaactgtcaagcatgcttattagattgctccagatcgaggaaagtttggaagtcatcaaggtttgctacttattattatcaatttaagcatcttagtttatatgatttttttcttagtattacacatgaattggataaggattatatttgtatcttttgttgtttttatgggctctttggaatcaaagaaataatgtttttcacaataagcagtctcttcaaccgtatgatacttatgattggagtgttaacttttactttaagtatttggatatgcagcaagtcactgtttcatctagtgctcctaatatggatccgccagccttgcaagagtt

SEQ ID NO: 203065 - DNA, 1197 bp, Cannabis indica
ttagtatttttgtcatatgtatgcggtgctgtttgaatcatgattattacattttaaaatcgtactgcattgtgcagtttgggaaaaaaacaaacggtaactacactgcaaaagattttaaactgtatttttcttttgtggtgtggtgtagtgcaggcggttggtacggtatgtgcggtttgatgaatacccttgcttttaacataccactcaattagaaatatggtgtctatatatttttaccactctaaaatatccttacatttcaaaagaaaaaaaatctatatctctaactctctcactcggcgttgaaccctgacctagaacccccatcgtcgaaacaaaaaacccagaaccccaatcacaagccccaccgtcctcttctctcacgggctctctcttaagtcttgtcgtctcctcccgaagccccaaaatctatgaactcaaccactctgaaatccccactacccatcgttggagttctcaacccatctctctttctgtgtatttttctgattttctaattttttgcgatttttaacaatatttttactatgatagactaaatttgaagttagggatgaagcttagcaatatttagcgttattttgtgtatttagcgataattttagtgaaatatttgcgatatgagaataaaaaatacaaagcacattgataaatatcgctaatcatcatgaaaatttgagtaacaatttagcaacaattaaagatgtgtttagcgatgtttagagacattgtgaaaaaccaaaaaaaaaacgaagaaccaagcgatgggttgagaattccggtgatgggtggggattttgggagttccggtgatggatttcaaggttttggattggagatgacgagacttagagtgagagaattagagagttagagagatatttttttaagaaataagaatattttttgaaagaaaaaattattataaaagtataaatatcctattttaattggatgtatattaaaagatcatttttcacgttaaactaaatttaatcatatgtatatatgtacacactactacctcttaccagcaaatatatataaataatatatatatattattcctgtatatttttctagtcctaaatttagttggaatctttgatatatcaccaccgtagtcacgaaactgctcaatagccattaaagaaataaagaaaaaataca

SEQ ID NO: 203066 - DNA, 713 bp, Cannabis indica
acatcacgggacaaaatcatatccctatttttatatagtattaattatgtttgatattattttgtatgtgtatatcataatttaatataatattatacaatatgataatatattgtataattagagcaaacagaagcaataacacaaacagaagtactcgattgatatatgtgacagctgagaagtgagaaggtctttctgtttccaatatttgtcagagttgttccataaataaatatataagaagacattctgtgacgaaggtgtggggactttactacaagtccttgacagttaaatggctctaaatgaaaattggatatcaaatgcttaaatagatacatacatacatacatttgatcacatataaccaaaccatgtactaatttacatcaaggcaatcaactgcaaatttgagaataaaagaacatttccatgcacaccatgcttgtccattcttactaaaagtgactcccactttagttacagctttcttgcattttatagcagaaaagaatgttctcctctcatactcagttgacatgcatgaaaatataatttactcattctgagtgatcattttgtaatgatcagtatagtcttttggtaatattcatcacatatttctgtacagaggactaagtctctctccttttggttaatctcacaatactattgttttttaagaatgtttttaaataaatgaaatactt

SEQ ID NO: 203067 - DNA, 698 bp, Cannabis indica
ggcctcttgagtggatgtagaaggagaaggagataccaacgacactgagtatacaaaaaggccataatgactacaaagcatacgaagaagatgattgtacgaaattgattgcattaaggcaacgaactactaaacatgatgccaagatagcagagcaaaaatagcaaaataaaagaatgcaagatgcattggttgctatgaaacatgtgatggaaattatgggtattcatgtgtacccaacagttgtgccatccgtccatgagaagacgagagtgtttgttttatagtactaaatcagatacgcagtggaagagttttgtgttccttattatcattgtaccatatcccaatagatatccaaatgtgtgtacgttaaatcaaaacataagaatagtaaatttagaacaaatacatcttgatgactatcaaggtatcttcaaactttctcgtatgttgtatccctgaatctagttgaagaggatgttgcaattggaatcacaccagtgtcttccgaattgttccaccaacacaaggaatagtgtgggctattaggataaagtgtataagtttgttcttgttgagttctcaacacatgagtaagagcaattgagagagaaaactgttttctttttctccctttaatttcgaaaattatggtttagattaagtgtgttatgatttctcaaatcaggcttcta

SEQ ID NO: 203068 - DNA, 775 bp, Cannabis indica
atattcgcattattcagccctactggcatttgttcagttgcaaagaaatgtttaactgtatggatcacatcactgccaacaatggaccaatatttctgaaaaaaattcggattcatcccgtcaggaccgggagacttatctggatgcatttgaaagactgcctctttaacttcttgatccaatataggccgtagtaaagcctcattatgctcatctcggacagtaggcacaacacaatccaacacctcctcccagctagtaggttcagcagtaaaaatatccttgtagtactcaatcaagcccattatcccattgtctcaaggtccccttagagtttttcaatctagtaatgtcaatgcttaaaattaatttaataggaaagaaaataatatttactatactaatcccatacttcattaattagtattatattaatttgttttttttaatggagagattgaaattattatattttcttttgatatttataaatatatttatttttctttcataactatctattttaataaaaacaaaataagatatggcgcgtgctactgctgctacaggtgaaatatgagccttttatatagtgcatgagtgtgactgccaccctatctaattatatataataatctaaatttatctttgttaatatatttcaatttggacatgtatgtctataacattttcttatgtggaattaattatgttaaatatatattgtacaaagtcttatatgaagtagagttattacaaaaaattgttactttta

SEQ ID NO: 203069 - DNA, 2968 bp, Cannabis indica
ttgattatatgtgaatatttatacttacgttcattgtgagtcccatttttagaaatgggcattagagttgtaatttctcaatttcagaaattttaataaactctaagtatattatttatgttatatgcaaattttacagtttttataatttttgtttggcgacgatgaaaaatgctgcagatggccaatttagtcacatgggttagttagaacttttttatttagagggacattcattggtgatatttgagatatcggggttaggcggggtattacttttggaccattctacccctaggccatttattaggttagatacttaagagaggcattttggtcgtttacttcatggtgattagtgtcccttttctttaatggacaattggtgtctaattaataaaaaggagtgtttaattagggtattatctcataatttatagaaaaaggaaaatttaaaagcaacaccacctcttttcacccttaccattcaaaccctagaggaatccaggaaggttgaaattttgtgcttcatctctgagatttaaacaaagatttgtgattgttcaagttgaggtatgaaccctaagctattctttttagttttctttcaagtttcttctagcttaagcatgcaaatgatgcgtttagctactgtgtaagttagggtttaagttgttatgttcgctgcagtgttattgggttattctaagcttgtttgtagaagttttagcaggtattggttgggttaagcaagttttgagttttgaactcaaacttggctcaacaattgtggattataaaattttgtgctatacttggttttgttgcttgaatttggtttatattgttgattttaggtgttttggagcatttggtggagtttgggttgattttgggtcgaaataaagaccttttgtttttctacagtaaaaaaggcaaaaatggcctatcattttttctggtgcagtacccagaaaaatatggcctgctgtttttttagacaggttcctcattttagggttttttcttgagttttctcgatggttatagctccattatgctttttattgtttgggggacttttagtttaagtttagatccccaaaagattttagaaagttgtttaccggtttttacgattgtgacattaggcatccgttcagcgcgtgagtttccattcaagtctaccggcacgcttgaatctggaaacgaggtatgataagcataaagtatgtatatgtatgtgtgtatggataatatatgcaagcgagtatatgttttataagctaccaacactaatataataatggtactgagtgcatgtggtacaacctaaaggtgtaatctggtattaccaacactagtacaattaggtattgagtgcatgtagtacaatacttagtggtactcggagtacgagttatacccaccaacactagtacaacgagggtatgtagtgcatgtggtacaacagtcgtaccttattttaggatgtttttaagcattcgataagctttataaatagacttgtgtgtttcgcaaaaattatcaattcgaccagttgttttgttaaatgacaaaattgactatgtattttctaaattgtacaaataggaccactgattttttgtcaaaaaaaattaaataataatatgatctagagattttatgacaaaacttattacattttttgtatctacttgtgttaaaaattgtcttaaagtttgttatattaaaaaataaaattgttgaaaattgagttcagtgtcctatttttaccattttagaaaatatagagtctattttaataaaatagatgatccaattaataatttttgcaaaacaaaaggtctaaaatagtatttaccgtaattaaaatttaaaaacaagattattatctcaaaagaatattataaaatttaaatagttgtaattaattaaagaaactcatcaggttactttcagacattatatgtatttttagtgcatgtaatgttactatttttaacattgtcattacaaaaaagatgtaataattcgaataaaatagaaataagaaaaatacaaaatatgaaaataaaataaaataaaataatttcaaacattgtgtgtttttaatgcatgtactgttactatttttaatattgtcattacaaaataagatgtaataatttgaataaataaataaaaaatgctaaaatatgaaaatacaataaaataaattttgagtatttatgtcataatattttttttaatatttttgtatagcggtgtttgttatgcttacaatattatccctgtaaatttttgaaaaatttctagtggtttacaatactgaaattatgtttgaaattttttgaacacgtatggtaaactaaaatatcatgaactctattttcggtactataaattatttaaaaattttcaaaaatttataaagataatactgtagctataacgaataccgctataaaaaaatttgaaataaaatattccgaagtgtgattttgagcgtgaagattgattaagaggttataagtagaactcatcgaaatactaattacgaactcttagtttacttcattcgaaatcacatgttaaaatatttttttacaattgtatttgttatatatacaatattattgctgtaaatatttaaaaaatttcaaataatttacagaacttaaagtagaattactgatattccaatttattacgtgtctttgaaaaactttaaaattattttcaacactataaatacataactaatagctatattaaacactattatatgttagggttctagggtttccatcgtttcaccacagccgcctcttcgcagacgacggcggcggcggtgcacggtcctccctcttcgcagacgacggcggcgcacggttcttccccttcgcaggcgacgacggcaggacaggtcttctttctcgcagtcgtcaacgacggcggtgct

SEQ ID NO: 203070 - DNA, 774 bp, Cannabis indica
ctaatgttaaatttcttcttcttctttttgtttgttttaaagagaagatttgttcactaatttaaataagcaaaattaggtctagattagctaaaagagtaagatgcttggtcacaactctttgttgggtaatatagggtgctcgaaatgagaaagttaatttggaatcataaaactcccatcgcatcaaacatctatgcttttgctgtttcatttcttggccattggaaatctgttcataattccaaattggagtcatctcagtcaggtttgttggccgagaatggggctgagcagtgatgcgtcccccgtgtggtagcatcaagattatcgtagatgtagtggtgtttggaagtgatcataaatatgggattggtctggtttcaaaagacagttgtgaccttttaatagagggacgcttgaagctttttaatggcgtggttcgtccggagttagctgaggcaataggggttcgagaagcccttagttggatcaaagagaatggatggtagaactcaaccttggaatctgattacttggtggttatacaagctactaggagcccatttcaaatgaattctatgtttggtttaattatttaagattgtatttctttgcttgttaaactgaagcatgttgctttactctttattaagttgctcatgattttgtaagagcttcttagtttactttctgatcgtagtttcaatttaagagatgttccaattaagttgttacattatttgttaactgaaattgaaggttaataaaatg

SEQ ID NO: 203071 - DNA, 1229 bp, Cannabis indica
ggtacaattagagattggcactgtctcgaaaaatgtattttagagatttgccctgtctcgaataggacccgttacctatcaatcgaagacgttcatccatatatgtgaaatggcgcttaagcataaacgtcatcttctcaaattgagaattcaaagtctgcttgaaaaaagactccataaatttgatcagttgaacaatctctttatcttccattgttgagagttattacagtgaatttttcactataaattctctcaataaaagcaccaattgataggtaacggatccttttccagataggacaaatcttcgaaatgtactcttcaagatagtgccaatctctaattgaatcaaagttctattttctcattctatatcccgtaatggctacacaattacatatttataggaaaattttataaataaatgataactttatttgataattaattataattattaaataactaattttgacatttataagattgaaattagaaaatatgacattattgaaagaaagataaatggttgaaataaagtgacaaaattgtaactagtgaggcccactatgtatgtccgaccactagcttgaattttgcccattattttatcttttttaatccatataattaaattctaaaccctagttaaaatactataaaaggaacatgatgctctcattctcatccaactcaatctcaaccaaactactaaacctagttttctaactctatcagacaactagtagatgagagactcctttatagtgatttcgaactcctcttgttgttcttccatcaatattcaagcctttagtgataaactgtcatgcccacacatagcaagttaagtactcaatcatagtgcaaaagacggtggttaaccaaatcgaaggagagaaggagatccatgctcagatcttattattactctgcgacagaaaggaacaagggttagagatctgagcggaaggagacattatttccctgctatcaatgtaaagttttctaaactttatatgtgtttatttcattgttttagaaatctcatatttagggtgttaataaaacatactgatggtgaatgtagatcctggtaaataagtttcagtagttataacaccacagtctatatttgttagattaaaataaaaataaaaggcaataatttcaaatttaaaataaaaaagtcaatctaagaaattccaaactatattatataatat

SEQ ID NO: 203072 - DNA, 1055 bp, Cannabis indica
ccatttcctcatttcctagtccaacatccaaaccaaacgatactatatcttatacaagaaccacaaatatcaagccatgcgcaaaaatatatgaaacacaaatgttaatgttcaaggcaggaaagaccggtatgcaaaacagaaccaacttttcctaaacaatgccaacgacatagcaacagaggaaacaagaaacatgaaatataaggcagatccacccaggtagttttaactcatattactcttgcaatacaaatttagaaacacataatggaagcttgcgtaaaagccactaacctgaaagccaccgccgaaaattctaaaacgagaaagcaatcctagatcccaccaaggcattgtaccagcaacgagaaagcaatccttgtggaggtggattaacaacaacaataataacgaagatgtgactattcccaatgcccaatttctcaaccgcacaaagcgtaaaccgatgaaacgcgtgcaggtcccaggtgcagagttggtatggggtgtggcgctcttgggattcagattcagctaggttggtggactcagctacggcggctggccctggaaccagttgaagaccgtcttgggcgtcggaactggattcgggtacagtcaagtaataaggtatggatactcttttgaatccctagagttttacagtaaattataactttactgcatcttttggcaaatgataaagcgtttagtttccaaagcctacttgaagaaaaagatcctttttttatccattttgatgcctactttgttaagctcaataaatcaccatagaaaatattttaagtgtgttctagaacatgttaaaaaacaaaatattactacagagcattagatcagagtgaagtttctaacatgattaaagattaatggttccatgtacgaaagaccatttccaccatcaacagcatctttggtctacaaatcacatttttctcttaaaaaactaaataaaaaatttgggcctttctccatatcccattttacagttaataatcactcagttccaatacagaaaatatgaagaaaag

SEQ ID NO: 203073 - DNA, 3180 bp, Cannabis indica
atggaacctacgtgattctcaatatggttacagagccatagattctatccgatccccacctatacaaataagtgatcatgtccactttgatacgttcaagattgatgagcaaaaaaataagtcatcatcttgagagaatgttgtggacattatccgacatagaataaatggtagagaattgagccatatgtaagaatatagactactctactcattgtcaattgtattttgagatggaaccctataattctcaatacggtttagaataagaaaaaaaaccaatatgtaggttgggataaggaaattaagtaaattaaataccgtagcattgggttgagaaagagagtggcgacatggaagacgaaagcacagccttgaatggcactgtcgaactcatctggtttgtaaatgtcagctttgaacagaaacaatcttctctctgcccctggaaacccctttaaaacacttaccttcgattcgtcatctgtgcttcatcaccacaacaaatcaatatatatcaattatatatataaaattaagaaaagcaaaattataacagtatttacccaaattccttagagttgcatgaactgtgtaacccctctctaaaaatttcttgacgagccaagaggcaatatagcctgatcctcctgtaacgcataccctgcactcatcactcttctccttatttactactactccctccatttgtactgcttaattttctccacaaacacaactattctttttctgtcaattatatatatatataaatcaaaatttactgtagtgtttgtgtgttaaaccagtacatatcaactaatttaatttatatatatacaatacatagtactaacaagaagaaagttcaagagagggtttggagatgccatttggtacggcagaaaatgagccacgtggcatgcagattaaaatccatgcgttcgttatggctattagctaacagccatttcggtacatttccaatgcagtctttgtttttgtttttgacaaattttatttagaccaaaattttttaaagagacacattttaataatttttgttttgtagttttttttttttttttgtaatttatattcttaaaaaatataaatcaaataaaaataaataatattttaaatattatgaaataaaataaaaaattatataactttttttttaaaaaaataatatgtacatataattaaaaaatatataaaaataaaatcaatttataatataagatatacttatcattttattttataagatacaaataaaacttaatttactattattatttttttcttaaatattactaaggctagtatgttgtggtgaagaaaatctcaatttcattcaatgaatactacacctctcaaatttttttgtctggtagcaaacttgtactaaagccaactaacacctcaaaaaccaaacttgttaggtgtggaaaacaagaggttctaaatactcaattcaataccaattgcatgatttaatctaattcaatctggatgatttaatccaattcaatttacataccctcacttatgtagattaaaaaatttaaaatctacacctctacgaattagatattaattgatatataaaaaagattgatccaatataaaccacacatatttatatatatttttaaaagtaatatatataattaatattttaatgcaagaagatacttatttaaaaatttaatacatatgatacaaatatatttcataacttaataaatcaaatgtatattttattcttacgattaaacgaacatgcaacctggaagctaatctgggtacctagggtttcaaccagtgcttaggttaacattcccaactagggtttcaatttttaggaccgtcttggtgaaaatgggtcaaaacttgcattgagacgtaaactagacataccacagacatatttgaggcatcaaaaatcagaatcgagcaagttcatttttgagcacccggggccccgagcacccgagcacccaagttagaaatttattaatctaggcaccttctaagtatcaaatcaattcaactttttcatcttcttcatcttcatcaaaaatggaaaaataagtcttttcaggaaagaaacaacacttcttgggtgctaaaaacaaggcccagcgcccaggttgatacctggggatggcccagcacctatgttgaaacttttttaacctatgctttttttgatgatattttccaagaaccttcaccgttttcagaaaatattaagattcaactattttcgaggaccaaacggaacttctaaaaggccataactgagacccagcgcctaggttgacacctggtgctcgacccagcacccaggttgacaactggggctatttttaatcaaggtcaccaaaaatattcttggcatttttttttcataaaaaataataaagattcaagaaactcgggaagaaaactacaaactcgagcccttaaaaacagtgcccagcacccaggttgacaatcaacttgggacactgcttttgattgctcaaatgtcaatctgattcaaccaatgaatccagaatggtcaaaaacggggtaggagaccttgtcctacagttttagaagcattagcagtattaaaatgagatcttaggagctcaaaaatgagtacatagtaccccaagttaacaaatggcctagtgcattggcatctgcttatccgattctaattttgtttcgactgtccgtctagtttttcaaaataactaagatccatgaagtcaaataagttaaattcacaactttacatttctcatttctgacatgggaaactcactcagaaatgaagagtttcgagtctctcatttccgcaaaatagcaacatctttgagaataggtgaccagctttgtcagaacacgaaaacaaactaagtgaagtcaaaatagcaattaggcatcttaaagtacatctcttgaagatttttacacttacacagcgtccaggttaacgtcaaatgtcaacatgggtattgggatgtcaacttggacgctgggtcatgagcagtcttcagtaaaatagtcataactcactcaatattgatatgattgacgcaatttaacttgtatttcgaagctaatttaatactctatcaagtcatgttttacactttaatcgtaataaactaacagaat

SEQ ID NO: 203074 - DNA, 1464 bp, Cannabis indica
tcacagttcagaagctcttgaatgcacttagacgacttctataaatcaagctccaagatagagttatttggagattttagtgagaaaagggatttttgtgctctgcttttctttgaaaataaaaatggctaaaagagtataaaataatttttaaacccttatataggcggttacaagggcagtttggtaatttaaatttaaatttaggtttaccccaaaaaaagtgatcatcatatattggggaatacatacgtcaggcatacaatattcaataactgtcattgtggctgcttttcaagacaaggcattaaatgcccaaatactgaagagacaatcacatttcccccttcttctatcaaatcctattggatcaaggaatggtacgaagactgaacatgtgtcacccatccgaccagcttggtggcaaaataagtcaatgtgcgagcaagaggtttccacgcggacttggggcaaatattatcccaattgctccgcaagatgactgtgacacttatttggatgacatgtggagaaaattttataatctggacgggaggtacgcttcatgatgtgtcatccaagtcgatttatcattcaaaaataactcgtttcaagaataagctagactattcgagcagggtatattacaccttctgaccagcataaactttgcagctagctcgccgacactggctacggaaaatgtgattggaatatccttagagctactttcaataaatattcaagcatttaaatcttgatcacatgcctgatcttgtgggatagattcaacaccgacaaaaaataaaaggaaacattcctacttttccttttagtttgatctgtttcaggaaagtaaacaagtttatcattttatttattatttattttggtaaacctaattgatgtaattattttctatgaatagtggagtcatttcattttcactattcagggtggcaaaatcagttgtttaagagagctcttatgttgttaaaattgtaagctttcgagagagatcacaaattctttgcttcttttctcacaagtaatacatcaaaaaagggagtaggttattaccacaatcacaaggcagaacctctatgaatccttgtgttcttattgcttagtttcatataatcattattaattattatctatcattctaatcgcttcaattgtctcagtattattggctaaaaccaaggtcaacacataaaattttacaggatgtcataaataaatataagatacacgactatgaaaaaaattagaagactaatttttttttctaaatgtcgaaataaataaagagtgcatcggtacacctttttttggagtgtgcattgtagaaccaccctaaaattatttggcatcaattttttaagcataagattttgcgaacgaaaagaaaataaataaattgggagaaagaacatactgttatgaaatattatttataga

SEQ ID NO: 203075 - DNA, 696 bp, Cannabis indica
gctttaattgttaatgctctctacttacataatagtgttgtgacaatacttattttaaaaaattcagtgcttcaaaaattaaactaattaatgattacattatttaaataatgaaaagcttaactacgtaaatatataaattaatatatttatataaagaaaacaacaacattcataaagagatagaattataaaagagagtatgcatacgggagaattgtaactttttgttttttcttctgccttccttctttcttttctctcatattttttgttttgttctctaaaatctctcactgagagcggcagaaaagagaaaggaacagagcagaagtgatgcatttaggttagggttatttaataatttatatgtagatttaggaaaaagaaatatatgtatatatatatatatatgataaggtatacggtttgggatattggataggaaaaaaatcttaatttttgataaaaatattaaaagttttgagaaatattaattataaatctaataaaatgagagaattgtggtgagagaaacaaagtcacccatgaatttctcataaactaagaattttgttatataggcacactttatatagaatagatatatatatatatatatcgaactatttttaaaataacttaacctaatatcaaacaatctaatttaatcgaagaatgaaattataaattttg

SEQ ID NO: 203076 - DNA, 642 bp, Cannabis indica
aattttttttttgtgctttttctcacacgatggcacaataagctgaaataaatagttactacttttgatcttagccaaaaagttgaaaaacatatgctttgaacagtaacatacttcacttaaattagtcacacatacaaaaaattctctctagataatcaatgcgggactagagttatcataaaattaaaatacatatataagaatcctacatactaagtgttgtagaatcctcaccattggattgttgagaagatctgctcttgaggctccgtcaagcctagcaatgtgatcctctaaggctttagggcgccccctcacctcttgcatctagactatgtgttttagaatcctgaccaccattagaatgctgagaaaatcccaatcttgatctcaaggctccagtaagcctatcgacgtgaccctccaagactcgaaggagcttccttcacttcctgcatctcctgtgagtaggtggtggtagtagtgatggaagaaatgcggtgtcaacattcaaggaaatcctacgaccaagtctcggcagacggcctcgacaacacccaaagaccgactcaatgaggacaatgtcatccttgtctgccaggtcagtagtactcgaactcaaggaataatatcattgag

SEQ ID NO: 203077 - DNA, 573 bp, Cannabis indica
taaacataaatgcactcttctaagaagacttcgtagcgaatttcaaatgatcgaagtctctttcatcagaggagttgagttgaagaagttctcgaaatttaaatctttccaagcaattaaagtaagtttcaatcgtttaacaatttcgattcttcatctaagactcagaacgcacacacacacacacatatatattatataaatatatacatcataacatggacgaaaaattgaaaaagaaaattaaaatcgaaatcaaagttgcagagataaaatctggaaatggaaaaataaatatataaataaagtaaagacctggttcatgacatcggggttagcttcgagaggaagccacctcttagcagcaggagtttcatccaaagtagccattgttggaagatgagagagtgtgggtttggtttttgtagggttctgaagatttgatgaaaggttaaggaatcaggtgagttaagagaacaagtgtcagtcaagtaatctcatttttcttttttatacatatttatatgttatggatctagaaactttctcatttgtcatacaattaagcccatc

SEQ ID NO: 203078 - DNA, 538 bp, Cannabis indica
aatttttgttttataataatatagagtgttgttttatattatttctaatatcaacaatgtatttaacaatccttcaaaaaaacaatgtatttaacaatattattttttatatatattaaacaagctacaaaataagaattcatcagtaattattatgttacatataaatagagttttaattctaaaatatagtataataattaaattgtgtaattattattttagtaactaatatgtgaccttataattacatgacttctaaacacaccattagagtttaaagatattgtagcgcttacccaaaacatatttgtgattaattagtataattaaataatatgtctttacacataatttatttatttataacagaactaaaagtattattggtatgtatctctcttctcggtgtcatattacttttggtgtcaatcagttctcatataatttaataaactaatttttagagaatatctctaactagtcatgagttgccgcttataaaatgtgttgaatattactagtatccaataataat

SEQ ID NO: 203079 - DNA, 579 bp, Cannabis indica
gtagtgtcaatactcaaacatcaacgtctaccttttagggaatcgaatacatagttgaaaccccccacaacccaaacatcatcatacagtatagacacaactacagttgaatctagttctaaaaaaaatgacacataaataatgaaaataaacagaaaaaaatcagcataatattgcacaataatcgcacaagatatcgcacacaaattgtcaaaccaacaaaattgcaaaaaattgcaagaacatcgtttattgtcgccaaaaagaatgaaagtcatccctaacttttgatttctgttggcatcgcacaaaaaatcgtacaatatcactcaaaatcgaaaaaacccaaaaaaacacagttttcgaaacaaactctatctccatttcaaggacacaaaaacgaaaaaatacaactaacaatttttaaatccatacaatacaatcaaaaataacatattttgtataaaaaatacttacccattgctttgttgagtgtggtggatgacttgctgagcttcgttcaaggtccggcttgggggtgagttgtttcctttgggattgtcgagagagagagagaga

SEQ ID NO: 203080 - DNA, 780 bp, Cannabis indica
gttttttaagtatagaaaattaagtttccctttagtaacttgaaggaagagtagtgaataaaaaatatcaaaagatatattaaaacttaaagtatttataaattgggattgatcatgaataatagatatcaaaattgctactattcttcaaaaattaaaatataacacaaaaagaacgaaagaaaaagaaaagtcttgagagaaaaatttgtgtgatatatataatgatttgaatgaagattttttttttttggtaaagataatgatttgaaggtttactttattatagatttacattttttttttcaattaatattgatgaaaatggaaaaaagtaagaaaataaatgtgaataaggtgtgattgatattttttttagttgagttatacgactaaatgggaaaaaatatattttaataattttttttagcttactttttaacaaaaataaaaaatagaaaatttgatgatatttaggatactacatattttaattaactaattaatatttatatacctaataaaaaattaaaaaaaataaaagaatcaaggaagaaataaataatgctatttagaaaaattttggtttttttacacaaatgacaaatttgataaattatttacatttttaatgtcacgtgccatgttttacttttatacaatttaactttttcattttatacctttttaggttttgttaattacaattatacggaatctctttttcctctaactttaacttcatccctatcttcaattgtagaaagctcatctccaagt

SEQ ID NO: 203081 - DNA, 1770 bp, Cannabis indica
atttctacacatattttgagctagaaaataattgcattattaattatctttgtccctaactataccataagtgaatcttaagtttgggatattataatggggaaagtttatgcatgttatgtgggaaataagagtaatattgagagaatttcaagacaaaaaaatattttcaacaacttgaaaagaaaaaaaatgaaaatatagtgtcatattgaaagagaaaaaagagacttgttgcaaggttatcaaataaaaggttctctcatgtaattagtaaaaagaaatagagatattgggatcatttgtaaaaattgtggagtgattaattagagaagcttatggtataagtgagcctaaatgacatttttcatctaccattacataagcctaacgtcataacccaatcaagtccttttgactttagagcacatgttattaacattagtggataagattaattattgcaagcttattgataattggattgtgaatatgttggattgattttgagcatgtatattaaattccaatggttttggccatttgcgagttatattttccttttttagtttgaatgctaaagttgattattgggagccattagattgaaaatcttattttataatagttgaatcttgtgagcaacagtggtgtagtgtgaaatgaagtaaggcttgctttttgttcatttgtgtttagtttagcgttgatttttactcgagggcgagtaaatgttaagtttgggggagtgtgataggctagttttaggcgcattttataaagtgttttagaggtatgtttcaattgatttaaatgagatgaatatgattaattatcattgaatttggagttgtagtatataattggtgaaaaattcttggattcttaacacgcttcctttgtgattgaaaatcaagtctaaagcttcaggtggatttttgagtatgatacattttgtttgaggaaaaatgttgtaaataaaactgctagatccctctttcatgtttctaaaaaaatattgaatcgtccaattctgagcaatattgaacgagttatggtcaaaatattattagtcatcgcaccaaaaaacttgctgccaaaaatcaagcttcaaacgccatgacactttcttttagtgtcacagcccgcaaattttaaactgtcaaaaattaggttttttttaatcttttttagctatataaatgccatttttcaacacttttcaccagacaatcatttgggacgaaaacagaagtagaaagcagctctggagacttttattaatatttttttatgagtacttttcttctactcttttttatatccttaattaatttttgtcagttatttacaatgaatatgagtagctagaatttttattagggtgttaatggagattatttggcactttattttggttttaatatgatatagttttcccctaattttctatgtgcatctatttcattcgtacttaattattttattgcttgatcaccaattaaatattttatgatttcaatacgaaatttgagtgctgctctggttttctcccaatatacgtggcaatcctgcgatgtgacatgtggcagattaagctcgaggactgggagataattaaagaaaagtcattacataggtaaaattccctcaggacaacccaacagctacttcaggagccatgactaggtccagagggatccgtcctgaatttgccttcgtgaggttgatagcgttcaactcctctagatttagggtaccggagatgta

SEQ ID NO: 203082 - DNA, 1934 bp, Cannabis indica
tgaataatttgtttttcacaaacctttaggtgagtttgaaaagtaataagatgaccaatagttgtaggttaaaaaagaggatcttaattacactctaagaatctagtgtaattgttattattttaaaaatgaattattataaagaatattaatttttagtgtaatcactattttgtcgaacataacatgaaaattcatacatagttatcattttacgactaaatataacttgttttttaatcactaccctaatgcttttgtatgcatacatataggtgtgtgtgtgtgtttaagccacgcatgataaacccacttatatggttaatatgaacaattccaattttggatgacaagaagggaagtggggttttaagtgataacaaattatgttcacaagattactcgtatactagagagagaaaaataaaaaaaaaaaaaaaacaaaagaattaaatacaaaaggggttatgcttttatgggtattgaatgtagtaaggggcagggcggcattaagtggtggttggtcctcggacccctcctcaccttttgcttttatttgtaaaatgtaataagtatggaaagcaattacttctctctctctctctctctccaagtgatgatagtggtgcctgcaactgcctatgcttcattcatggccattccctcctctctgtctaaacaacttgacctttcgtatttatcaataggtatatttgtacatgtatgaatgtatatatgtttgtatgtacgtatattattaagtaagcaagttgggaattggggtactaaatatttgctgtcttaaaccgtgcatgtgatccaattcaatgttcgatgagaatgacattgacaatttaactttcacgagacgatatacttattagcttttttttttaatatcggtgttctctacagtgaagtaaataattcttattataatctcttagtcaacttctgtacataaaaatacatgttggaatatttttttttaattttttttcatgacggtattcgttatgcttacaacatcatccctataaatttttttaaaattttcgaatagtttacagtgccgaaaatacgtttgaagttttttgaatatacgtagtaaactgaaatatcaagaactttgttttcagcattataaattattcgaaattttttaaaaatttacagtaataatattgtaagtttgtaactataacaaataccgctataaaaaaattgaaacatgtaatttcgggcatagaggttgactaagaggttataattagtacttttatgagatgatgtcttataattaaggtaacatgcttatagcactgttatgaaatgatgtcttataatttttttttttttggataattatgatttttggtctttgaactttgacatgtatcaaattatgctttctgaacttttcatgtcgttaaaaatttcttttcaattattgaaattgttgaatttaaagagttgcatctaatttcatttaattttgctaatgtggcgaatgtttatatactaaattgtgctcccgaactttgatatctacaaaattatgccccttaaattttaacatgtataaaattgtgctcctaaattttcatccacgccagactttctttagtaaaattagacaaaagtatttaaatctgttcaaagagaatttttaacgactaaagagacaaaaatctaaattagcaatttttttatattggggaatgtagaattcgaacttggaactttttctttatgaagagaggtgtgaaactattaggctatgtctataaccacttatgatgtcatataattagttaacaattttttataatcttttattaagataaaataaataggatctgatattaaattatatcaataataatataacaactcatcaaaatattaggtaggactactttttagcatttctc

SEQ ID NO: 203083 - DNA, 926 bp, Cannabis indica
agtaagacagcgagataagcaacacctggcgagatgataaagatataagtcttttcgggtgtagcatatcgaaactgtattgctggaaagggtagatattgagttctttaagagcttgaaactcattgacacacatactcgtaagtatgttgaaagattaagaaatataagcatagtacaacttatttcaaaatcttaaaagactaagtccaagagttgctgtgaaaaaccacttgagggtagctcaagtggccataggagggtgcgtgtgtgttggaggtcctgggttcgagtcccaaattatgtattgtgtaatatataaacgcttgaaataaaaaaaaaagagttgctgtgaaaagctaaagcaagaataaacatcttaattagcgtctcaaaatgctactagctattcttgaacacttttgagagatgcaagcaatacttagatcatgttacctcaacaacattttctttagattggagcatgtgtcatctagagaaaacacgaagtactagtatgggtataaaattctacatatttgtactttattaaaaagggtttggctgatgttttgtgaaagttataacaaatggtgcaacttaattaattataataactattgattgtaaacataatttgggaagttgggcttgaggttgaggggctcctgaagatggtgatttagaggaaataaattgcactgagtatattgtgccattaattgatccaccagcactatagctaccattgcctccaccactggcacagctgcaaaaattaataattacagcctttagttaggtcacatttttgaaacttttggaacatactttaattattttcacgatggaaaaagaagttaatgttgatagtatacatagttaatggccaccaccagtggaccttatactcttgtactaggtgt

SEQ ID NO: 203084 - DNA, 1072 bp, Cannabis indica
aataccttatttacttgtaataattatttaattgattcatgtacttcaataatctttttagtaaatttaaaaaaaaaaacaaaaatactgtaataattataaaatatataaaaaattacttaatatatattttttttatattagtaaggtatcataattattcaatgatgcatattctagttttttggtatgttgatggcttcttttaatgttatttttggacaagctcattgaaacgttatcacttatgatctaaaagtaacaaatcttaaatgttattcatgttcataagcttcaaagctatgtcaatagttttatgaagttcttctttgatgataatgcttaatttggtaagattaattttgtattacttattagaatcaaatttcaatttcaatttcaatttacttgattatcttctaaagatctatgaattcatgacaaaattggtgaacttctcaacttgaattatcaaaaaaaaaaaattgtccaattggagaagacaaatctttttattgtggttattattaatcaattgagtttatctgaaaacacccatgaacaaaaatagggtgacttagaggagctattaacaaagtctaggctttgggtttggattagtataataaattgccatatttcaaattataacattgcataatttgatgatatgctcatttttttaatttaaataaaatgtctaaaatacattctgaaaaaatgagtaaattggtccttgtaatttttacgttctactttgaagaacaaataaattgacaaatgttttattcaagaattcttgaaaaaaaatcttatatgtaatactataaaagtgtcaccatgaaaacatttcattaccattctcatcataattttcccttgaattaacccgagaaaagggagtggagagaagtaaagaaatacttgtttggttagaaggaaaagtagggagaagagaaaaatggatagaaaattttgagatgggaccactaaaaattttctcctccaatttggcaagaaaaatagagagaaaacttttacaaaacaaaatcaatgtaaaattactaatttg

SEQ ID NO: 203085 - DNA, 1436 bp, Cannabis indica
aaataatttaattgtacaaaaaattatgataaagacttatatataaaaataagattatttatatatattaattactaaaagggattttataaaaaattcaaattaaaaatcagttacaatgaaaatttcatgtaacattgagtagccacctctataatattatataaattctattctagctagaaacaaagaattaaaatgttaaacaatatctttcttttgattgggaaaaatgtatattcaggaatttggaggtggtgggcatctaaatgctagctcctttatgttgagctgggaagaatttaatcaatggaaggtaagtaagaatttaatcaatggaagggaagtaactaatggtgcttagtaacgtgtaaaccacgtaagactgtttaatgagtaggatgagtcaattgtacaagcatgcacctttttttttcttattcttttatattaaattttttgttttatgaagaccatttttatctcattttcacacataataaatttcatttttacacatgagaaagtacaggaaaagcttgtatatgtaactggtaagtaataagttacacgatttcccataggtgaatatggagaaaaggtaaaatgaaaaattgaacgtgttttgaattttctgattgagtcgtcaccaacaagatatggagaggaatagtaactagatcttaatacttgaagaatcaagaattgaacattatcattaggaccctatggcaagtactatcaactctgatgaagtggaagaactgatatcaaagacttgtaatacatggaagagtacatggaagatcaaactaaagaaggaatcaggaagagcaagccgaggaagaagaatggattattgaagaagggatgattgcggagtttgggaaccttgctcttgttattgggaggcttttctcaaagaaaagatataaataattcattagtacaattttcaatagaatgtggaagacaaaaatgaaataggaagtgaagattctaaaacatgatgctatcaatttttgtttggtttcaagtttggatgagaagagaactgtcaaaaagtgaaacgtaaaatgtcaaggatttttgcaggatggctgatgattgaaagaagaacggccaccaaccggacagtggcaagatgcaagatgcaagattgaactttgttccggtctagattagaatgtttgcctttcctttaaaggcctttaatgctagtaatataaagaggaatgggaagatggcagaggcagtattagaagtcaaattaaacaacaatcatagaaattttattgaattgctttggttgtgttaggatagcattttcggtggacataattataatggtgaggaaaagtatcaccatagaaggaagaaagttttgaattttttttttttttttttttaaaaaaaaaattggaaaaatgtcattg

SEQ ID NO: 203086 - DNA, 1181 bp, Cannabis indica
aaaaaaaaaaaaaaagcttaaataagttagctaaatggggccaatactgttgatatccttgaggttggagagaaaagcttccaggaactggaccaatgagctacctagaatcttatcaatccacaagggaaacacacctaaaaaccaaatggccttttgcaacactacaaagaaattgagttggaagtgtagcatcagagaaattgttctagaattcaaggttcttttcctcaattgccttcttgtactgtcagaatttttttttatttttttgatcttgtagcttatgagggtagtgagattcgatctagagtcccagttggaatcgctaatgattttaatgtggtaaaggtgaagttttcactctttactgatcctttctaatctaacaatgtagttggtattgctgttataagtgtcaactctgaaaatggctcgtgggcctttaatatatccaacataccactgctgccagtgcctctgctatggaagcccaagcttaagctatcacgttagctctgtcttgggcttaacagaattcctagcaagaagttaatattttttttcaaattgtcaagtattggtttctttgtctcaagacaaatgccttcttcagtgggggtttctccatattttcttttcaattttagatttagttagtcattagtttttactttcctaagcgtagtagtcttaacttttttacggagggattagctgactttctagccaagaagctagtattgttgatgttatttaaaaaataaaataaaaatagggccaatccgtcatatataaattcaagtaactttaatttaattgcataaaacgacaaaggatcttgcaaaacggcatggtgacaaaattcaaggcatcgaagaccttttactttgtatatatacaaacgtgaaaaacgttggtcatagacattcattatacataaaaactatagggtgaaattgtaaatatacgtaagtagattatattttggtccccaaaaatggaacagagtgattaaatgcaattaattgaaccaaattgatgaaatggagtggagaatggagatggtccgtagcggcggctggggtgtcggtcgactctccccaaatctcctataattttgctttactgcctggaaccagctaagaaggcagggacaaattttaattttaatatataat

SEQ ID NO: 203087 - DNA, 942 bp, Cannabis indica
ctctcaagcctggcgaaggcgaaagctcttaggcggccactgcgaatgttttgagaaacaagccttagatttatcatcatggacataattgacagaagaaaaacgtacaaaataattactgacataggtaacaaaagatataaacaaagcacatataggacatagcacaaaataccaagatcaacagaaacaaaccaatctaccattctttttttgataatgtaaagaaaccataaaatgtatcatgtctcagacatccaaggaaggataaagctgcattagctctcaagcctggcgaaggcgaaagctctttgacggccactgcgaatgttttgagaaacaagccttagagttatcatcatggataaatttggaagaagaaaagcaaagcacataattaacatagcaatttcacccaaaaaaaaatactatctgatctcaaaaaaacatcaaatgtgtaaaacaataggtacatatagttgaccacttctctgatagtcttttctcttcactgctcttctttactaattgacttcccctgcttaaaaatggtacaaaatttttttacataagcagaaaaatcgttacatcttgggttgggctgcagttgagacaccagcttcagttatacataattcacactatattttatccatatatttgagaaaagtaaagcaatattaagtagattgaaatgtagcgacttgttcgaggccataatcaaaactgaattaatttgataggcacggagaatcgcatactgaatttgatattgccaaccttcaatgcaaactgcaccatcatattaatcgacgcttttgctctgcaaattggctttttcaattaaaaactgcaaataatgtaatacaaaaaccccagaaacaatccaatctacttctaagaaattataatgtattgcctcagacatccaaggaaggataa

SEQ ID NO: 203088 - DNA, 970 bp, Cannabis indica
cgagagttttattacttctttctttctgttgtttttttgtaaaaggttctttcaaatgattgaattattttttttgaatggtcaaatgattgaattactaacttttttttaaaaaaataaaaaaatcctaaattatacaaattgttgtaaacatctcattttagatattttttttttttgacgcgcattttagatatattttgttcatttgtaaatgtaactatgtgttacaggtattgttgcaatacaaatacttaacaaattttggaccaacaaaaaaaaattatagaacaaaactcaacaagagtcataattgtgcgagacaaatattggttgaatattttgaccaaatttgacccgaatcccagtcaactcgttcggattcgacccgtgtaacccaaatttgtacaaaaacatgttcattgcgggcagatcgggttgaacccaatcagtaccaacaaggagtccgggtgtgtattttacacatactcgggtttcggattagactcgtacttgtccaccaacccttttcctttttttttttcttaaaatatatattttatgtttttattacaatacatttacactaaaaactaaaacctaaagctaaacccaccctcccccgtgcttgaagagtgagaactcccgagcccgatcgagtgctagcctagcccacgcccatcctccctcattgattgaagctccctttgatcgtaaccccctcccctgacactccttgactcgaccagaccccccataccagatcatccaaacccccctcaatcagaccgtctctacaaacaacgccagagaccaaatttggagccaaggcatacccttaattttagtgggtcatagaaaaaaaaattaggcccttatttaaaaagaaatgtggtgtttttaaaatcaataaaaaccatgtgtatatttaaaaaagagacattcttttgggcccctaggctaagtgggc

SEQ ID NO: 203089 - DNA, 1204 bp, Cannabis indica
agtgagtggggtagccaaggaaaactcttaaatctgttcaaaattaaagataaccaaaattcaaattaaaaatttaattcaattgcttattggtaatggtattggtattaaattagccttttttaatttcctatgataaacttagtggatgcatgcatgtaaggattcaaaactttccggcaaaaataaaatgaaaaaggcttcattaaaaatagatttcgataattaattagaagacatacacattatttattcatgaggttttttcgtttatacatttgaaagaatttcctttcttcttttttgcaaaaatacatgctacaactttttaaattcacattgcaagtagcaactatctgagtaaccaccaacggagtaatctgtaaaaataaaaaaaatagtatatggggtgattgttggagaatcaacccagtgttctacctactcttttagtataagaccttttgggaaggtgctcaaaaataaaactgtgaagacttaaacacaaagcaaacaatatcatactaatatgggagtcaaggtgatgtagcagcctaacaaggtgaaagaaaagtgggagaagccattaatgtgataaccttacaattgaaaatctatattgtgtcttgtatcgaaaatctacctgatattaaggtagtcaggtggcgtgtctgttaataattacagcagtacaatatggagttagtattaggacctgtgtcgaaagttttcctaacaaaagtgatgttcaggtggcaagttccgttggtgatagcggcaacataaggtggcttcgctgatggggaggccacgagtatttggtccttggtttgaggagaggattgttagggaatcaacccaaattgtaagaataagaataaaaagagttgtcttggatgcaagtgttctacctactctattagtatgagcccttttaggaaggtgtccaaaataaaaccgtgacagcttaagcttaaagcagacaatatcatattaatgtgggagtcaaagtgaggtagcggcccgaaaaatagacgaacggggcctaataatgattctcttttatttatttatcttgctcttataaatggatattattatttaaacttttacaaaagaaagagattgatccattgtgggaaaaactggtgtgcttgtgtgattaatacttaatgtacccacaccaaaatcatgattacccaaa

SEQ ID NO: 203090 - DNA, 922 bp, Cannabis indica
taattagagtgtagtagtgatagaatcgtgcatgttggataaatgaaattaattttatgcaacaaatttataagagattatatatagataattagttttaaaaaatactaaccaaacatgacttgaagaaataataaatttaggattaaaaaaagatcaaatataaagaaaataaaaaaaaaaaaataggtttaaaaaaaataaataaataaatttgaagaaattttagacgataaaatctttcgacgataaaactactctttttctataatgtatcatctctgtacttcacaataattaaagtaattattcaactctctattatattattgtagtgcaaaatcattttgactctactaatttgccactacggtatattcatacaatgaacttatatatactgacaacaattatttaaacaacagcaaaatacacatataattaaaatctttaattatacatataaaatgagtgtatatatcgttatagaaagggtaaatatcattttagattttgtgttttgcaaaaattaaagattggaccttctgttttgttaaatgacaaaatggactctgtattttccaaaatggtaaaaataggaccctgaacttaattttttataactttttttaatataactaacttgaagacaattcataacacaaacagttacagaaaatataaacagttttatcataacacctttagatcggattattattaaattttattttgacaaaaaatcagtttaaggtcctatttgtactattttaggaaatacaaggtcaattttgtcatttaacaaaatagaaagtcaattaataacttttgcaaaacacagagtccaaaatagtatttaccaaagcatgccatgatttttctgaatccattattcatatacacatcatatatattttttttt

SEQ ID NO: 203091 - DNA, 1370 bp, Cannabis indica
aaggagagcacataaacaaatttaaagataactacactcaaactctcactcaaaaaaactttgagaaagtcaagcaggaactcacaaaattagagcaaaagtatacacttttatctcaagagtatgacaagcaaataactaatgattttagaactaacaatattaataactaatgatttttaataaaaaatttatatataaaacaaatttaaatatataatatcataatatttgcttataattatacttattttatagtcatcatttttataaatgttggtttattttttatgtgagatttttataaatgaattaaagtttaaagaaaaaaaattagttataatgtgatgaatattaataaaatatgtgatataaaaaaatccaacaataagaattttattaattaatgtgtgtttaactgaaaataacatttcaataaattttagaataattttatcaaaaatgtgtactttaatttttgcgcaaagccttattcaagcttaagtcaatcctatttagtgtttgtttgtgtagtcattttgttaagagatttgtgcgacccgccacactttttatttagttttttttttaccagtaatgaatctcctttccaaaaaaaaattgtaaagtgccttgtattatttctaatcttctctcaattcaatcatgtgttcatttagaaatgttaggctaattaaatatttctccttcattggcgtcactatagtgtatatattggtgttatgtaaaatatctaatatgttgttgaaaaagttaacgacttgacttctcttccatctccaaaagtctccattattttgtaatgaatgaaaatgctatacagcgttactacaataaatgtgattttatatatggagagatattcaattttagaatacttaaataagtaaaattattttaatttctatattacaaatattataaataatctatttaatactttatatattttcttaagataaagtgtacaaataacatttagcttgacaaataaatttttaaaataggatgaaaaagaagcttagtaaggaaatcaaaaagattgtatttggtattgatgtgaaggatgttcaattaatcactttgtacatattaacgaataatatgacaatcaatattgatatgtttcgtgaaagattgggttctcaaaaataattacttaatacttaatattaataatgtgagataagagtaaaataatcattgctaagagataaagtatataatgaagattaattatcattcaattcagcatatttgttgaattatttatttatttatttatttttgcttaatgcatgtttgttgaatttgcttttcctacttatggtttgaagaacgtgagacta

SEQ ID NO: 203092 - DNA, 742 bp, Cannabis indica
agagagagagagaattcaagttggagttttctgcatcatggggtttgattccagagtcgatctggccaaggggtggttagagaatcaccgagaatgaagttagataggaaaaactgctctgagactgataaggctttaaggaggatggggagattgatactttgtctctgtgaaggaagctgtaactcatttcggtgaaattggttactagaaactacatcatccttctaagctctttcaacaacattgtgaggaacttagtgggatagtgcggctgagtgaggagaaggataaagaattaggtctctaaatattaggttcctaaaattagagtttttcatttttttatttttaatttttttaaaattatttacatggaccaataaaattgtgccatgtgtacacgttgtccacgtagatgtacacgtagacttgctaacatggtacttaacatccaaaaattgatgaaaatattaaattactaactaaacacgaattttaagggtttttctgctaaaaaatagattttgggctctagttgcaactaaagttaaagttttgaattttttgaaagttttactgtaatttaccctattttttatcgaccatcaaaaaataagctatatttttgtagactccaaatcattttcgaacatatatttatgatggttagtgagtcatatatctcaaaaaaaaaatataaatacgcttttcaaccaacttattattttggaaaaatgtg

SEQ ID NO: 203093 - DNA, 646 bp, Cannabis indica
actatcttttcaactatcaacatcaactttttttggttgatatctcaacaattctttcttcgaactaaagactacatactcgtggctcctcctttaacgaaaccacctttgtcgtcgttatcaatttatcactaatagaactcattgcctgaccatcaactttgtcaagaagactttcgatataggccttgaacattaatcttcatcttgtaccgccataattattagcaggacacgccacctaaccgccacaatatcaagtaaatttttgttacaaggtatcatataaatcttcaatcgcgagatcatcacattgaaagcacatcgcaaatacaacccactatcccagtgctctcaaacttttgactctgatagttgcgctctactctttcaccttattattccgccacctcatcttaatttgcacattagtatgataatgtccactttgagtaggtctcacgattttgttttaagtaattttccaaaaaaattcatactaatgaaatgggtagaaaactttatattcaatgtaacttttacctattcttcaaatatgagatttaaattgatacccaacaatatgtaatataggagattatttggaaacacttgtatataaatatataaattaggagtatagtac

SEQ ID NO: 203094 - DNA, 542 bp, Cannabis indica
caggttcagggctgtatagaccagatacagtgccgctcccaaaaaaaagaaccaaaaagtaaaagctctagagtccaacataacccactcaagaagcaaatgagtacaaagggtccaaatcagagtgagtctgcgaagaaaggtaaaactcaagaattgaggtacattgagtacacacgtctcatagatactcgggagaatgtatataaggcaacctgtaacatggtacattacatgaagcctccactaatgtacaaggtcaagaaaacatttatcgtatcagagctatggctttgaatcgaccacaacctccataaaatgttgaaccaactgctccactacaagctcaagaagctcctcgactacaagctcaagaagcttcttaaccaaacaaaaatcgactccctttcaatctgcgactcaatcgatcaaatttcactttgtggagatctcttacgctagcttttgtccgtgcttacaatctaattggctatcttcttggcacaattcctcaacctgtttgaaataattttaccaggatc

SEQ ID NO: 203095 - DNA, 766 bp, Cannabis indica
cttaaatccaataattttaatatataattcggaaaatttttaagagtctacaaaattcagagactaaattttatccaggtcaaacttctagtaaaactgaacaaaattttttaaataaaataatctcaataaataattcaagaaatttttttatcaattcataagatacatgttaatttattattagtgtatagaaaaggtaggtatatatgcaattggcttatatgtatatacatggtggggctactttcattaattactatgtacatttatagctgaatatttctatatggagtgtttgacctgtcaaaaaaaatctactggctttgaaaattcaatgatagatcacagaagatttctaatttatttccctatataagggtagctgagatatatagtttatatatgcataatacatatgtatagtacttctgtgaagtaattaatccattataattatatatagtttttcattataattatatattgatcgattgattaccatggctcagaccaacatactctcaacatttctgctcattgggttgcttgttatggcaaccattgaaaaaacaggtatacttctcttcttcccaagaggtttctatgttcaatatacacagataaattgcaactcaatatatgtatatatatatatatatattatattggcacgatggtaatgtagttacgttcgggatatctcgaagaaagttttgacattttattacgattttgaaattaggattcaaacagtttattgcat

SEQ ID NO: 203096 - DNA, 567 bp, Cannabis indica
gaagatattcttaccgcacttaagttgaaagattttgaattacaattggaaaaagaatccaagaaagaagaagtatacttggcaagaggaagatcactcaagaaagaaagttagaagagtaaatacctatcactctcaattaagatcgaagttcaaagagaagaaaactcaaaagtgttatatatgtggaaggtcaagacacttgcaaaatttttacaagaagtacaaagagcaacaaggcttcaacaaatctcacaatggatataggaaggacaagcaacatcaccacaggaaggattcagctgcactcgtgaaagatagtgacgactgctctgtagatggagaattattctccatctcagaatcttcaatgaatagggagtggattcttgacttcgggtgcacttatcgcatgtgcccaagtcaatttttttttatatagatcagttgatggaggtaaagttataatggggactgatcattcatctagagtcattggaaccaagaaggttgccatcaaacaatttgatggtagaatcaaggtgttgacgaatgtaaatcacatcc

SEQ ID NO: 203097 - DNA, 751 bp, Cannabis indica
aacagaataaaagaaatgcagaaaacacaactaagtttatactggttcggcctaatcaatagcctacttcatttcctccaagaagttccactttgagcaaaacaatctgttacaaacgtgtctcagatcaatagagatcgatcttggaacacaacatgtataagacttagatgagaaactagagaacccttttacacccaagaacttgaacaatcactcaaacctcacaactctcttctcacatcccatacaaatctctcaaaagtgtttcccaaaccccttctctcaattctctctctagatctcaattgctctctctttctcctctttttcttttaactttctcaccctttgaaaatgaggatggacttcagagtatataggtattaattagtctgcaacaccaaataccaagaaagcccttcactgagcctagaacaaaacttaacagcccagaccaatctggcaaattgttagttggaactattagaattatgagaattacacaccacaagtccaccttaattcacataagcctaacttgaaacacatcttggaggattgacattcttctagtcaatgccaatgttcataagtttcaaacaatgttgaaacttattgaaagtaagaatcttcgtacctgtaccagcaggattttctttaattgacaccttgtgaagttcaatagtcccttattcaatctgatcccttatctgaaatagtctcacatctatgtgtttttgatctttca

SEQ ID NO: 203098 - DNA, 908 bp, Cannabis indica
gggatgttactttccatgaagctatattcccttttgtcaattctaccacattatcccctgaatagcaaacttttttctgtttacctaagtcagcttccattgcctcaggttcttctcctcatttctcatctaatcctgacaccacttctgtttcttctctgccttcaatcagacctgttagacacactgttaaaccatcatacttaaatgattatcattgcttcttatccactaataatctttctgttgcttctcagaacaacatgccagtcactgcatatcctctataccaggtgcttgattatttcaagttttctcaccagtttagagctatggttctttccatttctagtctccaagaacctacctattttcaacaagccaaaggcatttctgtttgggacaatgccattggattctaaaatagaggctctagagaaaaaccagacttagattgttgttccccttccaccagatcaacatgttattgggtgttagtgggtctacaaaatcaaattaaatgctaatggttctgttgaaagacacaaagccaggctcgttgctaaagggtacattaaaaaagaaggcatagactactcaattacttttgcaccagttgctaaacctgtcacagttaagctggttttggccttagcaacagcttgatgttaacaatgtcgttcttcatggggatttgcatgaagatgtttatatgactacctccagggtatagtcctaagggggagacaccattaccacaaaatacagtttgtaaactaaagaaattcttctatgggttaaagcaagcttccaagcagtggtttgaaaatttttccactgctatgttggaagaaggcttttctcattctgctacagaccattctatgttcataagacattcttcaact

SEQ ID NO: 203099 - DNA, 550 bp, Cannabis indica
attcatagtgcacaaccaaaaaagtttacaacgagggaacaaccattcatgtagctatatggaggaagaaacaatgacaattacacacttaaaattttactaagtgtgaaaaggaaaaacaacacatggaagcatatatttaagaccccgagaggtagacaaacaataatcgtctccaattcgtgaagccacattacaatcgtcacagagcatcacaccccgatcacctatgggcagtctcagggtatgccaccctgacccccactcgggagtgatgcaccaataaccacggtcaaaaaagaagaaggggtttactcggggtgtaccccgaccctcgtctcggggtaatggggtgtaccctgacccctagtcttggggttcatcataggcccatctcgggtgttttagccacgagggtaaaccacgacccccaatggaatgttacttgaggtatgaatagagcacaaatgaccacccgacccccaacggagatatctcggggtagcccaagatcaatactcactcatggggtgcacatcaccccgaccct

SEQ ID NO: 203100 - DNA, 1147 bp, Cannabis indica
tttaattaacttgctgtcatttgtagtttttggatgaaaagttgaagaaggttcccaaatatatgtcatcaattaaatgatacaaacaacaatttctcaattgtattctgttgttatttaattaagagagacaatgtggatgaatgagagaacaatttttcataaatttgagaagtactaattaggtatttgattgttttctctattagatgctcaataattattttcattgaataaaactatttagaaaggtagatttgtaagttttctttgaactaattttattgcactttgacaggtacattacacaattcaataaatcatctcaatgccatccgagccaacaatcttaagaggggatagaagatagatttgatcatcgaatgggaggtctcacaattccctgcaaggaaaatgtcttgattgttgcaaatttttccttgaggatgaacatgaaaatgtccttgagaatgatacaattgaatactagtacaatactagtacacttgtttctttcatcaattgttactgaaacaagaaatcagacatttcatgtttctttcttaccttataatttcaatcattcttcatatgtttttccacgacagatatgttttgattttaagttgttctattaataatcttgtataagtttcttctgttaactagttatgactgtttatagctaactgtgttaagctccataattaggtgttgcttggtcattatgagtaagattagaaaaaaagagaagaaaatccagagagttttggagggttgtaaagagttccgagtctgtttgatgttgatctctcattggtgagctttctttgtaatttcagaagcaagtcttgttggtgtgattgtcttgtactgatctcaattcatcaataaagtttctcatccatttcaaggctgttgtaccccttagattcgatggcaaagacacaatattggatataagcaacttattagaagagaagccacttattaatgagtcaagagatacaaacttgagaataagcaacttattagaagagaatgtctcttcttcaaatgcaagctcatatatgacatataaaatacattttgaattcaaataaatctccataaactaataatttataactaacatacaagtttcata

SEQ ID NO: 203101 - DNA, 1786 bp, Cannabis indica
atccaaacaacacccaaaccagaaaaggtcaacaccccatgaatagtcctccaccttgtattatctttatccatcttcacaacacttttttcgactagacacatctacatgcatagcttgtatcgacactggtgatcctaacaaagaggggagagaacgcaaaattcttatccgctagtaatattttgactagtttaacttttgactaattaatgatcacatgtcagcataaataaatgagtcataaacacaatattgtacattaaaattaatatttaatttttattatatatttaaactaatttaccgactttgcaaatacaaaatatatgtactttagtagcaaatttgaagaaaagaaactaaaataaagtaggggtgataaaacgagtttcgacactacacatgaacacgaacacaacataaattttacaggttagggttggaaaaattagatgcaagttaaaaatgggtttacacgaaataaaaacatgttaaacacgacccaacctgattaacacgaatttgatacgttttttttttaataaaataaaataaaaaattattaataataatataactatgtaaaaatatatatttagtgattgtgttaaaaaaatttaaatttaattatcttttaaaaaaaattgtaaaatattttaaaattttagaattttattatataagttaaactacatataaattagatgtatataagtttttaatgaagccatactaaatttatcattttttttctacaactctagttttagtaatagtaaaataagttaaagtttctgaggtgattcgatctcttatggaggcagcaatgattttatggcgtatttggatggctcgtaacgatctcttatggagtaataaatcaattaaagtttctgaggtgattcgatcggctaagaccagtcttgacaattggaaaaatgctcattcaaatggatccttaccattactaaatgttagttttgatagtggtaaagagcattggactaaacctgtttcaactaagttcaagatcaatgtcgatggggcccttttgaaactgaaaaccggtttggttttggcttcattgttcgagataaacatggcaaatttgtggaagctttctcaaatgtaaaattgggttggtggccccccgagatagcagagctgtaggcgttagagtctagtggattagcgaatcatactgatgtggaagttgaaactgactctttggtagttgttcaggctattaaaggttcagttcaaatgccatctcaatttggtttccttgtccaagattgtcgtttgcttctttcagagttacataatgtttttatttcttttgttaaacgatctgcaaatagggctgctcattgtattgtaaggaagtcctgttttatgtcaggttgtatgttggatgagctttctgctccttctgatttgctttcgattgtaagagaggatattttttcatgttgaataaaatttctaccctcttttttcaaaaaataagttaaagtttacgttaaataaaaaggtcaaagtgggtcaacattaacacgacatgatttttttacgaattgagttaagattgagaaaattagatgcgagtcgaaaacgagtcaacaaattaaaacaaaatacaaaaacgggtcaaaacaaatacaacacaaaaataatacaataatacaataacacgttttgccacccttaaaacaaattcaaattactttaaaagataactaatcaaaaattacaacatcaagttgcattaatttatgttcac

SEQ ID NO: 203102 - DNA, 727 bp, Cannabis indica
attgaagtattcaatcacttatacaaaatttaaaaaaataataataacttttggacaaacagcgcatgaagaaatactttacttattactcttacataatttgtaaataatgtgagacttttatccaaaaaataaaaataaaaaataaaaaatatattattcaatatatataaaattataaaagaaaacataagctcactaaaattataataaaaaaaatgtagtacaaaaaagaaaatataggatgccaccttatttaatttatgtttccctttatataaatatatcaatatatatagatataaatttaggtaaattcacacaatgcacttaaaattaaactttttcttttatattcttacggtttcttttcatagattttttgtttttttttttttgtaaaaaacgttatcatgttgtttttcgtaatgacaatgtgaagaaaactgaaaaataataatttgtatttttgtaaaaagagaaagttaaaattcgtgaaaatatatattagaaaaagatagatccattaaaagtataaaattttgtttttttttataagtgtataaaatttttgttagttttagccttttagatatttatgaaataatcccataaatttaagttttcatgatgatgagatcccattaaggcatctctaacggggtcaacaaaaatagttagcccccattaatctcacctaactcatttagctaattacaattttttt

SEQ ID NO: 203103 - DNA, 1011 bp, Cannabis indica
aaatattaaagtttttaaagtatagtttttcaaatttccctaaataaattataaaataataataaaaaagtattatttttactgaaaaaatatatttttataaataaaatagttgaaagaaaaaaaaaaaaattcgtattaacataatttgataacttttagtctattttataaaaatttcattattttatacattaaattctagcttttcttataaataattatactaataaggacattttgtaccataatcgggaaaaaaattgtatatatgtttataggaaaacaaaaattgtaggggcatgttttctttagtaagcaagcaagtgagaattttattgccaacaaagaactcttttacaaattgaaggggcatgtctttgtcttatatcgtccattggtacgttatttagagcatatatggtacatttataaattataatttttctttttgataaatgaccatttatattgtataagttctcataaaattatgaatacaatttaggataacgaaaataagcttccaaataactatttcgtgttatcaaaataatatatatttttttttatcaataacaaatatattatagtgtttatatatatacatttatatataaagaattattgcaattgtatattaactatgtgtttgatgtgtgtattctattaatttttttttaagaaaatttataataatctatgtattatatggtagtgattttttaaaattataaaaaaaatgtgacatttaaaaataaataaaaagttatttataaattaatgaagtgatttaattaatgacataattgtaataaaattatgactaaatatataagtaaaaatggatattgtttaatacttgacacttgtgtgcttaatactactgattgaattatttttttaaataaaacaaatttttttaattaatcctaatttaaatatgttgcatttaagatcacggtattacaatacaattttcccattagaataaactataaaatgcgaaat

SEQ ID NO: 203104 - DNA, 871 bp, Cannabis indica
tataatatataaaaaaagattgatgctatagcaactcgtgccaaagtcaagtttgtgccaaagtcagcaactcgtgccaagaatcaagtcaccgagaccaaagaatgggggaacagttttgatgctatagcaggggaagtttcaatgccatgtgattcaactcctgagcagaccaacgaagcggcgaactctgcggagcagggtcgccgaggactatgaattctctaatctggaatgtccaagggattggcaacccttggactgtgaacgctcttgccactcatgtgagagactttaacccgggttttgtgttcctttctgaaactcggtctaaaagccattacatggagacgattcgtattcggttggggtttgatggttgcttttgtgtggatgccaaaggtaaaagtgggggttggctctcctttggaaggctcctttctcggtccaattacgatcgttcaatgatttccatattgatgcttggatcaatacggaggacgatctaaattggcgctttacgggattctacggggacccggatccttctcaaagaaaacactcttggactcttttgaaaagacttgcaagaagcgatgtggggccttggatgtgtgggggtgacgttcaatgaaattagaagtatcaaagagaaattgggaggaggaggcaaaccggggtatcgtaatgaaaaattttaacgccaccatagacaaatgtgctctcagagaacttgaagtggaaggaagtaactatacttggtgcaatggaagaaaagcgagaatggtgtttgaacggctagatagagtaatggtaaaataataattggtggaaactttacgcagtagccaaagtgaaacagtataggaag

SEQ ID NO: 203105 - DNA, 1506 bp, Cannabis indica
cttcatatgatgaagccatccaatactaagtgtggcttcacccaatggatgccgaaatagaggcattagaacctaatcacatttctctacaaccaaaccaacatgtcattagcaacaaatgggtttataagattaaatataacctagatgtctcggtcaatagattcaaagcctgcttagttgctaaggggtatactcaaaaacaaggtattgatttcattgacacttatgctcccatagctaagttcaataccttaaaactattattttctcttgctgccattaaaaattggcattaacatcacatggacataaacaatacttttctccatggtaatcatataaagatgtttacatgaaactacatcaagattacacttcaaaaggagtgatgccaaaaatgatgtatgcaaattaaataaaatcctatatggtttaaaataagcttccgacagtggtatgctaaaattagctccactctcctccaacaaggctttcatcaatctcaaaatgatcattcatcgtttattcaacaaacatcaggtgtattattagccattctcatttatgttgatgatagtattgtggcaaataataacactactacactaacaacattcattcaaactcttgatgctcagtataaacttaaagagcaatttttaatcaagaaaataacagctataagtaaattatataacaatcaaagacaacaaaaaaatagcatcataacaattataatacaactataaataaattataaaatagccaaaagtagtttattatttttaactaaaaaaatatttttgtaaatacaaaagttcaaaatgtagaatgatttgaaaaatcttccatgttgacataattttatatttttgttcaatttttttatcttttatgtaaatttttctttagtaattatatttcggtagaatttttaacccatatgacgtttcataaaaattttccataaaagtaggaatagttttcatcttgaagtgatctaagtcattgtgtggtaacataagaatttacagtcttcttgaccaatctcgtgctaccacatgactaacttagaagatgactcgacctcaagatatatatcattactattacaaatactaataaaaaagagattatattcaattacatcactacatctagttatgttgtcaaagagattgggatgctcataataagggaattatgttgggttttatgtacttataaaattacatattttatataatttattcattacaataaagaagtaaaaatcatttttgttttatcaattttgatatttacatattttattacatgattaattatttttttaaacgaacatttataaaatctcaaacatgtagtaagttataattatagtgacacagtcatagtggattataattgtaattacatgttcaaaatacttttgtcttaagattaaatcaatacacttcgcgaatctatgagatgatctgcttacacatctggtgtgatgtc

SEQ ID NO: 203106 - DNA, 1100 bp, Cannabis indica
attattttaaaaacttatacattttgaaaacatggaatgtaattttattagaagattatggatcaagttgattgaggaatttgagcttttttgggtaatgccaagttcagtaccacaaatgtttgtaagtaaattaattggcagcaagcgtagaacaaagttatgaacggcgatttctgcaacaattaaggctgtgtggctggagaaaaacgctagaatctttgaaggtcttgaaaattaaaaagcggatgtgtgggagaaagctatgttttggacagctactcaagtatttaaaaccagactttttgaggatctatcctttctagatttatgtagagattggaaatctttgatgctttagcagttttttttgtttttgaggcctagcaattatttttatgtttttttttatctaggctgaatgctaattgccattgcctcttgtttatgaacaattcttgtaaccttgattttcctctgccacaagtgaggactttcaatgtataacaagcaggcacctgtctaagacaaggggtttcttgctcttcctcaaaaaaaaaaatatattacataaaatcatatattttaatcactaaataatacaaagcattaatgactaaattaattactataaatagattaatataattaatatttgtaatgttattttataatattttatgtttactatatcaatgttttaaaaattattaataataaaatattttcttatattatacaatatgtttattaaaactcaatattaaataaatagtaaatagttttattaaagtaaacaaactaaatattttttttattagagagtagatgtttattatctattttagtataaattataataatttaagaatttttttttaataaaataaaatattaaaattttaaatattaatgtataaaaattttaaatctttgtttattaaaaattaaataatacaaaaataaataaaattcaaatgtgtgttatatattatattattataatcaatatttatagcaatactagtttttttaaaataatatttttttttatattatttataatattacgtgtttataaaaaagaaaataaataattt

SEQ ID NO: 203107 - DNA, 927 bp, Cannabis indica
caaaacatgtcaaatttgacgttgaattacactagctaatgatagtttgacacgtagtggtgactctttaatatttctataaaaaaacagtatttataccttttagatttttggcgatcgatcactcaacatcatgtgatgattctcattcttattacgtttctttatttgcacaaattcaactttattcttatttaaaaagtcaattgaaatgagataaaattatattaaatctcatgtcataaaaagaaaaattgtagggattatttaaaaatatacaaaataataaaaaaaaattataaaaatacggttgtacggaattttaaatatttttacgatttttttgattttatttataaaaaattgtatgatatttttttgttgttattttgatattatttttatgtaattttcttgttgtttttatataaaaaaaaaaccgtaaaaaagtaaaagaaaattttaataacacaaaagtgtaatttttttacaaaagaaattacattttatgtaattattccaaaattgtaagtgcaacccaccccaacgtctgtttttcttttcagttttatggaagagaaatttattttgcactaaaatgttcattattatatttatttatataattgggatggatttttatttaaaattttataattagaaaattgaagttatgttattggaaaaacatgatattgagaagtttattatttttcaaaacaagccaactaattaactatttataaggtctttctgttatgagaaataagaaaaaaaaataataagtattataattatggtaatctcttatttttttttatttttaaaattgcacttatttctgaataataaaccattcaatctgtgtgatgaagatagttttttatttcctttgtttatggagatatatatattttttttattatt

SEQ ID NO: 203108 - DNA, 812 bp, Cannabis indica
ttttaataataactaacagagttaacggagtgtgatagcaattcttattttctctctcaaacccaaaccttatactgtgattgacttatattcaaattctacgagaaaatagtttatcgtcattcttcaacctcaaacacaaacccatattgccattgaactgtatttgaattatcgactcgagtttgagcgagctcaggttgtataatcctcttaggtttgtaatctacgagcaatttcacatcttaatttttttgaaactgtatcttcttgtctctcaagtcgtaagtgtgttgttattgttttggattttggtttagattttcaattggaaatgagagaataatggcggtgaagagtaggaggaggaaatgatcgagtgcggtgtgttatgttacgccattctctattcagaatcttcaatggatctccacaatttcttctgtgtaactttctctccgtctctttttgtatatgtgtatgtataatgccacgtttcagctcgatatctttgttgtatttgaattatcgacttgagtttgagcaagctcaggttgtataatcctcttaggtttgtaatctacgagcaatttcatatctatttttttttttgaaactgtatcttcttgtctctcaattcgtaactgtgttgttattgttttggattttagttcagattttccattagaaacaagagaataatggcggtgaagaataggaggaggaggggatttggtgcggtgtgttatgttgcgacactctctgttgggaatctttaatggatctccacaattttttttgtgtaattttct

SEQ ID NO: 203109 - DNA, 801 bp, Cannabis indica
taatataaaaaactattaattaactaccggtaacacttagattatatgggtatgatgtattacgtggtttactagctaccaactaggcaacaactactctactagttactcctctatactacaacaaaagcagctatatatatatataattctattattattctgctttcaactgcaaccacctcattttatatatataatataaatattgagtagtgtgagtgagtgagagtgtgagagagtatatagtagtagctattactctacttgtctagctagttgcatatattgtgttgttgtgatgatgatgatgatgatgaaatgatcattcatatgagaagattagtagtacttttcattcatgatcaaccaacttgagtggctatgtatatatacctccttttcttttctttatttcttttggtaatattgtgagtgtggtgtttatattataatatatttgtgtgtgtgtgatactcatacgtactactcctttagtatcttattatatagtggtgggcttttttctgtacttatccacacatgattaaagtgatcgatcgatcgctacaatttatttttgtctatgtgtaattaatttttaaatatcttcgttttccaccactaaaattatgtatctatgcatggtataaaattagtttttaaaataaaatattaactataattaattataaactttttgttttcagtgtacgtacatgtatttgggatcattaatgtaggggttgcatgcaatttgtgtttacgggcccaattcgtgtcgtgttgagacttatatat

SEQ ID NO: 203110 - DNA, 3194 bp, Cannabis indica
atttttatataggatttggaatttttaatttgagggccttaattatatcaaatttttatttattaaaataaaataaattttgtaaggaaaattgaaaggtataaatagaaaatgatgaaaaaaaaccctaagggaaaacgtaatcccttctctctttcattctctcgatcccctttctctgctttctctttgtgcggggcgacggtcagcactgcattgttggatcataaaaggaagctggaagagctggatcccaaagctccggaatagaccgagctgaaccccgacgaacatgtcaattcaaatgccgagcacgacgcacctgatggcgaggcatccgaagaaacagagctgaagagacctcggcttgatgacaaacctgatgtttcaggtattccccccactattctaggtttttagtatttagtttgagctagttagaagtggattgtgacacttgcgcaacaccaaagtcggccacagccggcgctagtggttcaaatgaaccagaaaaccccaagccctctccctcttatctctctttcgctccccttctcgctttctctctctctctctctgcattttctcttgcgcggcggcactgccagtacatgatgatggccatttccccgaacgatgatcgtcaaacgaaccgttccattttactatgtttttgtttttttttttgggtagattcgaacgattgtgcttcagccttcgattttttaatgcattttgtaattttttttttctcaaatttgaaggaggtttgtgtgagttgtttgcctgaccatggcattgaggcaaaagctgaaggcttcggtgctcactgcgttcatcaattttgctcttactccaggatcggaggtgcacaagtcgttggaattatgatggccacaacatcgatctggtatgtggcggctatagcctataattcgatctagtttctcccttattttatcttcttttttttctgaattgtatcatatgtattttgtgtaataatctttgattttggtatagttttaatgaattataatatataatttttagaataaattctgtaatgaattatgatatttaaatttagaaatatattaattctatttattttaattaatattatattttttaataaaaattaatactattataatttaatattttaaaaatatatattaaaaagaaattaaattaaatttaaataatacttttgccaacagttataaacaatcatttaatgtgactttttccaacagctgtaaaccgtcatttaaattgacttttcccaacagttataaatcgtcttttaaagttccgcatttttatgacacccacatagccaacagttttaggaaccattggcaaatagtataaatgactgttataaaccgttgtaaaaagccaattttatagtagcggtggtaatgatttcagcttatggttctttaacttgcttgattcacagtccaatgatatcgtgagagaagctacgatggtaagttggaaaatctaagctgttaggaatgatgttgtgtggaatggtaaaacttgctctgcattagaagtggtgcggtcagctagaatagttcttgactaatggattagtgctcaatcacaaaaaataagggcattgttaattgatgatattaacaatgttagtgagcactgaaagaaactaatgatgcatacggttaaggtcaatgttgatggcgctatttttcaaacggagagtaagtttggttatgattgtgtggcccgagattctactggtcatcttatcgaagctatttctgtgaaccgtgttcgttcggtgcaacctgaaatagcagagataattggtatcgaggaaacattaagttagattaagagaaagcaataggctaatgtggtggttgaaactgatgtcttggttgttgttcaagctattaaaagtgtaattgaaatgccttcccaatttggattgcttgttcgtgattgtgaatgcttactctcttcattaaacaatgtttctctagtttctattaaacgatctgttaatagaactgctcattatgttgctagagaatcttatttaatatcaaattgtactttcagtaaacatgatgctccttatgatttcaagtctattatttttgctaaaagttattaaataaaaattacttttcattcaaaaatatatattatatatatcaataaaattattaacatttgttttttctcagcaaataaatgaaagatttcaaattatgggacccattcatacaaggcagtgggattccaaatgtcagatgaaatctacccaaaagatgaaaatttataaggagagataatggaatcacatttttatttttgaattattaaatgtgagagagcgtacagataagaaataacatgtgattttgattaaagcccctcccaaagcaaaaaaagaaaaagaaaaaaaaatcaactatatatggaaataattttttattaaagcccctccatgaagatactttctttgaagtcatttcagtaaaagacaactacattagagaaaaaaaaaaattaaaagaacaattatatatactaataaggtagtttaaagggttacattaaaggtgtatctgattacatttatttttagttgttgtgatatatttaaaaatttaataaaaataaataataaataacttctaactaaatactaacttgatagtttatttttttattaaactttaattaaaatcaactatatttgaaaactaaattaattatagttattaattaaatttttgtaatttgttactaaataacgattatttagcaattaatttattttacacttaaattataaaatatctataacaaaacatcttataattttaaattataacatacatgacctcatgatttaaaattttattacacatataaccataattgaaaattattattaaaaataaaaattcatttggaatcatgtgatgaaatgtgaaatgggttgaatgtattttcgaaaaataaatgtgttgaataagaaatgagtttctcagagtcctcctacatccacccctctcgattaaaatatgtgtggatttagtttagatgaaaattattctctgttattcatctgcaccacaacttctgaattaagatatatgaggaagtctaatttttgttaaaaaaaaattattgtaaatattataatt

SEQ ID NO: 203111 - DNA, 872 bp, Cannabis indica
ttttatataatttaaaaaatatctttttacaacatatcgttaattaatcataagatacccacctataaataatgctaaacacttgtagtgtccaaataataatactccttttttaatttgacatcttttaacgatactgacatcttcccttgtttttctttttttttcttttttgttattattttcttataaagtaagaaaacttaatcatttaatatatattaaataataatataatagtgttttaataaatttttagaggtgtttacaattaaaatattttagaaccaaaaaaagataaaaataatatgaaggagtaaaaataatatatttttaaatgatgtgaatttttttttaacaagtatcaccgttagagatactcttaacatggtaaagataattcccaaaaaaattgttagctctccatgcttaaagaatgcttaaaatattgttaccattgctagctcatagagcaacttctaatataggaaatactttaaacaatatttgtttgatgagtttgatgtatttttaacttcttttacagtagatgtttatttttagagtgaaaataaatgttaattagtaaatatgcctaaaagtgacatctttgctgttttctctctctttcttttcttataattttttttgtaaagtaagaaaatttaatattattataatagtttctagaagtgtttatcaatgaaatattattaaaataaagttccaaaaataatataaaaaaaataatttagagaattttaacacttttaaaaaatatcaccattagaaatttttaactttattactaataaaaggtgacaagaaagaaattataaaaaggttgtttttttttttttttttttgttata

SEQ ID NO: 203112 - DNA, 1796 bp, Cannabis indica
gttcccatcagcacaaaaagtttcagtaagtcattatataatttaaaaataggacaatactaacaacgtcaaagacagctgcacaggcaagctgtacacagtaaaattgagcaattgttttgtatgcatataatatcgtcattggatgctcagtacattttattctaattcaaaaggcaaagccataaggaaagataagttctatcttatcttttcatctttggaggatgaaagaacatgtatattattcatatgattatgtgtaatgtgtgggcaagaaaaacttcctccatgaaaatggagattgaccaaatcactgtttaaaaaatcaggttactttaataaaaataaagggttaagccagtaaaaatgcatgagtttgaaaaaccaaccactaaattattctacttaaacaaacacccaaatgatctttaagctaagtaaagataaacaaagaagaagaagaagaaaagttgcagagaaatctgagtctcaccactcattcttgacattatttcagcaattctcttctgacattcactgcatccaatatcggcatttagaacaatttcctgaacctggtttcaccaaagtcaaacaaactctccagccatataaacaatagacaaagaaaaaagtaaaaaacagagagagagagtactaacaagaggtaaggagagagattcaatcgaagcaagactactggttccatgaaccaacaatctctcagatgacttttttgtgataccaattactggtgtgagctgcttcttcttcttaggccgatcatcgaagaaagccataatcacctaccaacaagctaatgtagaaaaaaataaaccccttttaaatattaaacaggaacaagtagtaagtaaggtacaacgtaaaaatcccattcggtaaagaatgaagcttggggaaaaagatctaagaacaagaacaacagctccttctgtactgaaagagcaatcccatcttttctttttcagtgttttttttttatttattttttttccaagtatggagttttaggaaagtgaaaagggactttggccttgttgaaagagattctcctatgctttttcacaaatgggtagtagccaaaccccacatgtaatgcttggtcactttctattcttctacataattattccgtcgaggttgcttctaagactaaatcctttcttatcaaagagtttttagttcatttaatctcccatgtcattatctcaacctaacaaattgtaattatttattaattatataaagagtttaggtagttggagcagtaaaacttgatgacattaacccaactcagttaataaaagagaaatgctacagggcaccagtggtgcttagcactctcttatgtgataatatcgttattgggcaattaaatattgggtctcatataatttaatataatagtttttagagagtatcgctagtcaatcacaacatgtcaagaaggtgctaaacaccactggtgcctaatagcaatgcacttaataaaataatggagtcatttgttttcagagttttttggtgggcttgacttagttcttgctaaaaacgctccttcatcaccataaataattatatgtttaacggtagcagtttcaaaaagagcttctctaatttgttatcaaaaccaaatgaaaagttacaaaaaactcaatagtcgttgcctatgtatgtctacatcactgaaatagtcatgtaccgttagaaagacatttggtcactatgcctaataaactataatagcaacaataataatagtcagcaaataa

SEQ ID NO: 203113 - DNA, 2069 bp, Cannabis indica
agtggggtcgatgtagagaaagatatgaagcgaatgaaagcaaatttcgaagagttgtgtgaggaagacaagattttggtgttcttcaagaagctgttgaatgagtggaagcaggagttgaatgagatgcaagacgccgagaagcgtaccgctaaagggaagtccatggttgccacgtttaagcagtgcgcgcggtatttgcatcccctcttcaagttttgtaggaaaaaggtaaatgtttgaatttaaattcttatcacttgctctttttttatgacccatgtggagtacatgaatattcactccctccgaaaatttaatgtctgttttcccattttgatggtaataagaaggtttagaatctgttgggaacgacagtatgccttagaaataggtttgctgattgctagattaagcttggattggaataggttctgaatacgataagtgtgtaatactttgttatccgtttacgatcaccaacaagtaaggtaatcaaaatcaactctggtcgatttatgtctacttacactcatatgagtagcaagattcatactttttttatattactccctgtccttttacaaactttttccattttctatttctatgcttacaattttgtactcaaacgagcactaagtttctggctcgtaatagaaactgcaatccatgtgtgtttttcttatcaagagtgattgaatcaaataggcaccatagagatcatgtggtatgggtattgcttaatgactatcataagttttgatggcatcttgatccgcttataaaacacaattaactcatccttgttttttcttctttactcacaatgagtgtgtgtaatgagcttttgcatttacatagttgcaagttgcaactttatctggctaagataatgaaacaactacaaatcattcattatacctttatgtacttttaggtgtcattccaaaatgataccgctagaaaaacttgttgtcaaggtgtttaaatcagttcctggttagtaaagtagtactactatggttttcaatcttagatattcttgttttcaatttttcttgactttgtgcaaccctctctatggttggagaaaaaccaataggtgctgttgttgcattagcactaagaaataggaactatgccattctattttgttctgcttcagggcatgcggtcacccttttcaactattataactacttatattcatcttgtgatatattctttatgcaggttctcccagatgatatccgtcaagcactgatgctattcgtcaattgctgcatgaggcgagactatctagccgcaatggatcactacattaagctggccatcggaaacgcaccttggcctattggtgttactatggttggtattcatgagcgttcagctcgtgagaagatctacaccaatagtgtggcccacattatgaatgatgaaacaactcgaaagtacttacagtctgtcaagaggttaatgactttctgccagcgccgctacccaacaatgccctcaaaagcagttgaattcaacagcctcgccaatggtagtgacttgcagtctctgctagctgaagagggtatttcatggggtagtagtagtagtcaagccggagaagaaagacttcgactaatgcctgctcagaaagagagctaggcctttgtatattatcatctatagaaatgtttgaattttttaaatggtgtcagcttgtatgttaccgtttacttatttggtgcggaagaaaagaaaaactcacgataatttatagtagtttttttcattttgtttcatttttctaatgaagatggaaacttgcttggagaaaacaaaaattaacactaattctattttttctaaaaaaaataatggaaaatttggtttagcatgcttaaattaaagcatggtctttttatataccacataactagaaatgggatacttatggttagaggtgtttattggatcacattaaatgtttttaggcctatttagattcaagtcaattacatatttaataataatattaaattttaccatctcattcgatccaattaatttcagtc

SEQ ID NO: 203114 - DNA, 1229 bp, Cannabis indica
tttaggatttttgacccacaaactatttttactaccaaattgtatatttcttgaacgtttttgccaagtaaaaattcttctaaaactatcatcacaagactgaaatataggtgttcatcgagttttacagaaactaattatgagaagaaatttttaacgtgattcacgtgttaatgaatcttaacctatgagtcaatagtattaagcttttagtagtggtgttttacactttgagtttttgctctataaagactgagttttgaatccccttcatggtgatggtgaggtctattttataagcaaccttgcactttgggttagactaatccgagcctaataagagtatttttgtgtatatttagcccactatattaataaaattgtatttagataaatagcatcaatgttgaagattaagcctaatgatagaagcctaatcctaaaagcaacgaaccacttctgttcatagtaacattgacgttgacaagaaacacgtggattgttgtttggagcatggaaaaaggttgtgttagagtagtggttgtgacaattccaagcttgattgaacttttttctgaatagcctttctatgagttagtaacttggacatgtatctagattttgtggaattttttagaaatgtgacatgtagaaagtgttcaggtcggtaaacaatcccatatgatcctttaggtcttcttcctaaattcttttcttgttcacaccttcatagatcaaatttttatagaggaaagttgtcgaggactcccttacaacatactactcatccaggaccatgggatgggatgtattcaaatccctataaccttcttggattcgttgtggttgttgtttgtggattgaattaatctctaaattagatgtagtaacataatcatccacgaggatggtgtcttgaattgcccggacttagagcatgtgtacagattggacttaggcgttctcgatccagatggacctatttaggtcaaagatgggcttgttgtctgctaggcctcccttaagaggtcacgtgtcatttggataagagcacgaacaacaattggacttttgttaagttttatcccatgtatctagcaaagtagggatgcacacgaggtagggaattggcggggagtgctcgctccgtccccatccccattagggattttaatccctatccccgcgtatttttgattagggataggacggggaatcccctaatgggg

SEQ ID NO: 203115 - DNA, 1330 bp, Cannabis indica
ctcgactattgtgttagtgaggttttaaaaatgatgcaaaatgaaatagtcagagatagcaactgacgcataaacattaaaatctttaaaacataatcagacgcgcgcttactgttcatacacattcagccctaaaactcttgaatgctctggcaaaaccagcccttgacccattcgaatccagccactactctccaaaactagcctcttgatcatcgatttttaaacaagcctcttgaccgttccgatcgtcttctttgaaaccggccactcaagtccctttccctttcgatcttcctcttcctcacggtggtggtttaaagctctctggtctgacgtaacagtggtggtttgaagctctctgctccgacgtagctctcatttaattctgtcatcagcttctcttcaacgatacatagggtaaatatttcagtttattattacgctttattttttctacatcaattttttgaataatatattattaaaattaggcttattctgataattatttgttgttagagtattgaagaccatttttttgaaaaatatattatttaaattagaccaaagtgtcaaaactcttattttctcttgtttggatttttatacgatttcggacttggacatcaggagcagaaggatgagtgggcgcctcaccgtgtagacacgttccagaggcaaaatgttttacctcctaatgcaattatatctgccagttccgttaattgtggtttgtggaggtactgctggtaattagtttttcataagtttttgttacttttgaatttgttattttttttctaaaaagaagagtaattcatatgcgcttgattgtattttttgtggtagattattaaacttatgtttgaattatgaaggcatggatacagtttttaattatgccatatatacgtttatatgcatcatgatgtaacatcttttgatgtagactttaaaagaaaaagatagaatatttgaataataaaattaagtgaagagagacgaggagaagacaaaagagaataatttcaaaaaaaaaatttgttttactttgaaatcattaaaaaaaatctgaaatgctttgacattataagcttatttgtaagaaccatgaccttattggaaaatctaaaatctctagaatatcgtgatcatactatactttagaggcgtgtataaattgattagggtcaatatatctgattggcaactttttgtttttcttcagctggaggccaattatatatgtagtagtttgacagagtttagtgctcttgccctcaccgtacactagattagaaatgtagtttttttttggattatgtgt

SEQ ID NO: 203116 - DNA, 1621 bp, Cannabis indica
ctaaagcaaaaatcaaacgctatagctgcattttatttcagttttcaaaaactttagtagaaaatcaattttgataggaagattaaaaataagagttgattgagagcagaattttaagcttcaactgatttagttgttgctaatggaatattttttcatcattcatgttcccatacctctgaacaaaatggacgagctgaacaaaaacatcgaaacattgttgaaatgggacttacattgctttcacaagctcaaataccactcaaatactagtatgatgcatttcagatctcaatatatctcataaaaaagttgcctactattattttaaagggaaatcaccttttgaagttctatatttcaaagtgcctagttataaatttctaaaggtgattggagcatcatctttcccttgcttaagaccatataaaactcataaattctaatatcattcagtcaagtgtcttaatctaggttatagttaagtgcacaaaggctataagtgtcttagtcttcggggaagaattttatttcaagaaatgttacttttaatgaatctaaattcccttgccattctagcttttttaataactatcaaaatgaaaaatttgtcactgtccctgcacctcactcttggcttcaacttcctactacaactcactaatcaagttcatcagagtgttcctcatcaactcttgcaacaccatcatctccttcctcaccaaataagactataacttcaacttcctcttttgcttgttctcacattccttttgctacttatgatactttagacaatgtctcaacgcaattgttacttgttcccagtcctatgcatgattctgctccaccaactcttgtagcaccttcacatcctatgatcaccagggccaaggtggacatattaaaatccaaatcctaccttggtcacaacaatttcagacagattgatcatctactagcttcagtggttgctgcccttcaacatgaggggtggagtccagccatgtctgatgaaaactatgctctaaaaaaagacatggtctcttatttctaagtcgaacatcgataatgtagttggttataagtggatttttagagaaaaaaacaacactgatggaagcttttagagatttaaaactcgactggtagttaagggctttcattagagacctagtgtagactttggtgagacatgtagtctagtagtgaaggctgcaacaatcaaagttgttcttaccttaattgtttctctagattaagaggtgagacaaatagacatcaataatacttttctcaatggtattcttgatgatgatgtctacatgtctcaacctcagggatttgaagacccacataaactagatgatgtatgaaaattgcataaattgatttattgtttgaaacaggcacctagggtctggtatgatcaactcaaggccactttgatatgttggaaatttaaaaattccaaagctgattcctctttcttaatattcaaagaatctcaagtaacacttatggtgcatgtttatgtggaggacataattgttgcaaaaaacagtcctaaggatttgaacttattcattgaaaggttgaacaagacattcactgtcaatga

SEQ ID NO: 203117 - DNA, 796 bp, Cannabis indica
aaagttttgataagatttgaattttttcaggtagtttttccttgatgatttaggattgtttatgacattaaacattttttttctgctgcatcactaatctgtgtgtttgtaaattgtatgtggtgcccattacttcagtagtttatactcattgtaagagacgttgacttcacatatatgctaaaattacatttgttaaaatgtaaaccaacatgattgtaatttatgaatttttcttttatttatcaaaatgcatgctattattgaaatcatattttactttacatcattcatcactgaactaattttcatggtattctacttgtccagaggttaaggatcttccaacagaagtgtgaaccttttgagactattgttcattcttacacatcatgcccttatgcttgggatgaaccatgctatccacatcgcctcactgtggaggtacccattttatttatatcaactctgcaggggagagggtggaactattcgtaggttattggaattattgagacttttttgtttttggaacacttcaggtacctggcgagcgtgttctaggttcatattcccttgacgatgttaaagaatacatgcctatttgcttaccatcgtcttctgaggtatgactgacactcataggtttagttccatcaacatatgcccatatgtgaaatgaaaaacaaaaaggttaaaacaacggttattacatcaaattgaaattaaataatagaaatttaaaaattatttacttatatacttgctaaatcagtttaatgtttttaattatgct

SEQ ID NO: 203118 - DNA, 699 bp, Cannabis indica
caatacgacttaatacggcattcaaaacgagccatatatatgttattatatatattattatcattttcactttcttatcaacattaattttaatttaattaaaaaatttcgacaatcaattatataaaacgctacatcagtttttaaatagtatattttttataagatttggcaaagaagaaactcagtgttatgggatcaaaagtaattaccagtgattcatgtaattgtaaggaatattagtcatacatgaataattaatttgttggctttgccttatagttgtatttgggttttattgtgaatataaagaatactaatttactcccccaaaaaaatactatacatggaaacattagacacattaataataacaattaagtgatgtattattagtcatgttatatggtattaaatataagtatagtcagagagagagagagagagaatgaattacctgattccttgataaaccagtctgtcgagccaacagatgcttatctgcatcacttggatacctgagaaagagaccagggaaaatgacatcagtgtccttctctaaactctataaagaaaacctcaagctttttgtaccacacacactcaacacttttctcgtttttccttctttttaaacaataacaataactcatttacccacctacctaattaagcgtgaacatcaaaaaaaaaaaaaaa

SEQ ID NO: 203119 - DNA, 1057 bp, Cannabis indica
aattcactggcattccgaaaaactccaaagggtgtctctttcaccttccgagtcaagttaaaagcttcaaatttagcctttattgaagcaaagtatctgttccctctgtatgttatacgccctggaaagtgctctgacaatgggagaataagttctggagccatctgcatcaaaaaaagattaattagcaaatatcgcataaagtcgcacaaacatcgcaaaaaatcgcatcagccatcaacaaaaattaaaagccactgtcaacataaatcgcacaaatatcgcatagtaatcgcatacaaatcgccaaaaaatacagcataacagttggaaatttatgatgtcagtaaaattgcacaaaaaatcgcatagaaaatcgcataatatcgctaaaaatgcaaaacctctaccacactccatatatcgctcaaaatcgcacaacatcgcataatatcgcttaacatacccaacacagaaagtctacgacttaatcgcacaagatcgcacataaatcgcacaaagtcgcaaaaaaataaaaaaaccatgaacgaaataaatcagcacgaaacccatatttttcctacattttttcttgcacaatttatcacaaaaaatacatactaactcaaaatttcagttaaaccacatattcatccacaaattaagccatattttaaagataaattaaaataaaaaatttcaaaaaatacctctttaatctgattgggttggtgggattcgagtgggtgtggttggtcgctgggatcgatttggtcgagagggttggtgtttgttgggtcgagagaatcgtcgttcgttcggtcgacagggtcgtcgttcgttcgttgggtcgacaggattgggtcgttggaggggtgggttcgttgggtcgtcgaagtcgtcggaggttggggtcgattgggtctggttcgaatggagggtgggttcgggtttttgggttcgaatggaaagggaggaggagagagaaggttgttagagaggaggggggaaactgaaaagctagggggtatttttggaagccaattggaaaaaatta

SEQ ID NO: 203120 - DNA, 581 bp, Cannabis indica
ttgaaatggagaaaagaaggatacaacaatgttaaataaatagttttaaatataaaagagattgttgaatactttttttttttttttgagggagagattgttgaatactacatctatataatataaaagtttattaatgtatgtaacttcaattatatttctatatattattttactacataacttcaattatgtttctatattattttacgaccaatacatatatatttgctcttttcgttaacaagctttgtaaatttttagttttaaggtaatgaggtgtatattttacaggttattagttatttattaatcaaaattggatatttagtagtttttcccatcacacatcttattagttgttttgtttaatattttgagatattttaattgtttcttttatattttattagctactttaatagttttgttgtataattgtaaaaattgataattttatgtagtattatatattaaatttaaataattagtaatgtttaattttcatgtgacatatcgtatatgtttaaggtaatagtgaaacttatgttctaaagtaaaagtttattttaaaaaaaaaa

SEQ ID NO: 203121 - DNA, 996 bp, Cannabis indica
ttctaacataactgataattaaagcttagaaacaaacataatacttctagagaaaaaagaattcaagcaaaattcaacataaacctattcttttatttaaagattccaaagagagcaaggattttaggattgccttagtcttttctactaattaacttggtccttcactgatttcttgaagaatcgctgaaggaaaaatccaagattttggtttggttcttcttggtctcttataaggtcgaatatggagaggaaaaaagagagttagtattgtgtttatgtttctaatcttatctctttaatttaatttaataaagtcaacttaagaataatttttatttcagaggtgttactagaattaactaaaaacaaaactcactaaaacttaggtaaaaggccctgatacttcttttcttaattcctaagttaccacaaagctaggattaatttggtcataactaaattcttcgaaacatcccgagtaacaacaacatcactaaacttttcgattaaaactaactctcgcattattaccgttgtgatatttttggtcaccaattgggtctcaatggttgtctatcctggaaaaatattttatttcataaatggtatatacatacccacatattcgaataaaatctccgtaattaataaattttacttataaatttacttcactaaaatccttaattattacatgattaacttaataagattttaatcttatccattatgctctaaacacacattttattccatatttaataaaatatacctttttaaacataataacatttttgggatattacagtatccttagaacattgatgacaaaattcacaacttgatcttctagaccttccaccacacacaatgactagtgtgagctagtaaaataatattgtatataaagctctttattaaatattaacacatttccttcaaaaaaaaaatattaacacatgagcaagatttatttctttagtaatggagaga

SEQ ID NO: 203122 - DNA, 526 bp, Cannabis indica
aagaaaagacttaatcattttatatcctctcaagagtcttggttaaaatgggctcaaatggaagtggattatataatgcaccaggatcctaagttggaaagtcacaatctcactaaaccattgaagcacctcggctgggagccgccctctgtgaacattttctgcatcaacagtgatgctagtgtgcattatacagaggctgaaattgggctgggagtggtaataagaaccaacaaaggtgaggttactgctgctgcaactcaacatgttaatggggtgttctcaattgagttggctgaagctcttgcaattcaaatgggaatttctttggctgtccaaacctcagctatccctttcatcattcaatctgattgtcttcgggtaatcgagtacattaaagggaagttccaagccaaaaccgattggggagctctgctggatgaagtgagagctgaccctgcgttcgttcactgccaggcagcgtctcacaccagcagaaacaacaatagggtagctcattctttgg

SEQ ID NO: 203123 - DNA, 1004 bp, Cannabis indica
ttttcaaaaaataaaataaagataattggaacaaaacaatattaagaacttaattacaaatagtcataaatatagtctatagtgtctgtttgaatttgtcttctttaataacaaaaacttaattacaaacttatttttttttaatttgattaatgtgtaaacgtgaaaagatttggaaaaagcaaatccgatagttgagatttaggtgaacttggggacatataatctgagagaatttttattttctcattttaaataatgtgtagtaattgtgcacaacatgaaaattgaggatggaaatgatattaatgtaacaatataaatgaatgcaatccccaagtattgtgatggtggaaattgacctgtgcatttgggtttagcttttcggcacgaatttagaaagtatgagctattagaatatttttatatattaagtataaaatcataaattgatttttggactattagcataaaatattcatattccatatcaattatttgataaacataaatatgttatatatagttatttactaattaatttattttttgagaaattatcaaaatattctaataattaatgtgacgcaaagtattatgaacttcgaacccgtgacattatataatatgttatacaccttaactaactagactatcaatatttgttatttttaatacacttaattttacttaaataaaagtctaataatttttttaattttttattttgggcccccgaaaagtgtgagtcctaggcacgggcttagcccgcctatgcctagggtcgactctggcgcagatactgatagagtatctcacctataaatatagggtaccagtctttgagctcctcattcattttgtataaagagcaaattatcatctagaagagtatatagagcttggaaacttgattaccccatactaactcattttcttttcttttgtaaatctgaagcttatgtggattgaagcttaaagaataaatagcttaaggtatttcg

SEQ ID NO: 203124 - DNA, 636 bp, Cannabis indica
ggtgataaattagttttaggtccatttgataaagtgtttttagatgtgtattttagttgattatattcattttgtacagaattatgtttgttttctacttattttaggtttaaatggaaatttttttaatataaatcaaaaatgaaaagaaacatgttaaatgagatgaatacgataaatttatcatgaaatttaaagttctaagatataatgggcgaaaaattctaagttttagatgctcaatacgttcaatttgtgatcgaaaattgagtctgaagcttcaagctattttttctactatgatgcgttcacttttaagaaaaatatttagaataaaagttctagatctatcttttagctttccaaaaaatctttaatcgtctaatgctgagcaatatcgaaagagttattgccaaaaaattatcgatcgtcgcacactcgctacccaaaaaataaccactcgggccatgacattgaaagcaccatgtcactgcctgctacccaaatttaggctcaatagggttttcaaaccctgatcacaaaaatttaagggggctttttattagggaactttagaggcaccaaaattagagagaaaaaagggatttttcgtgcacaaccattgttcttcatcaa

SEQ ID NO: 203125 - DNA, 1300 bp, Cannabis indica
atctataaaaaaaatataaaaaaaaaaccacaattaaccataccttaatgttgttacgtgtgtgtcggtggtggtcaactagggttgggctcccgtcaatgacgaggggtgactactaggactctgacgggacgaagagaagaaggggagaacgaagaagagaaggggctgggagaactcgtcgtgtgggtaagctgcatttgggaggtgttggactcggggggttacaacgacgggcagactagtgttctctcagaggtcttggactccgacaaaacagagaatggacaagatgaagagaggagaaggggttttgtgggtgtgggctgtgactgggagcttgggagcttgggaggtcgaggaggtggttgtgtgggtgtgggttgtagattttactaggttaactttttattttaattttatgttatgtaacaaaaattatataatataattatataactttatcgggtttgcgggcgggtccgggtccaacccgaaatccggacctaaaaaagaaaaatcgaaacctgcctggaaagtccaccgagttgtacctgacctacttgcactaaacatgggttttttattttgggttggtcaagtcaggtctaagcgggttggtcggatccaggtcaaactaggtacaaatgttcagtccattattaagtaaatattttttatatagtgtaaaaaagaggtattttttgatatatttttttaattaagtagctaaattaagcatagaaattcaaatttctcttttattatttgctattggaccaagatctaatggtttaatatttttaaaattaatattcatagttaaatttgtttattacccattaatgggtaatacccattaagaagtattccaaatatatataaagaaaagatatgagacggcgactgttactctaaattttttctaaatagcattatttggtctctccttaattctcacatttttttttaattttatattaggttgataattattaatttattaattaattaaaaaaatctttagtatgctaaatattctctaattttatattacttttattttcctttattctctcaatttttaaattttttattaggttcataaatattaattgattaaaaaaaatatttagtaccctaaatattttctaattttctatttaaattaagataaaagataaacaaaaaatcattaaaataatttttttccctaattagcagtataactcaactaaaaaaaattacaatcaccttacttccttttttttttttattttttttcttttcatttccctac

SEQ ID NO: 203126 - DNA, 845 bp, Cannabis indica
ttgaataacaaatttcatattgcaaggaaaataccaacaaatataccatactgaattggggaaacaatgtagatagataaggttgcagacataccctctagcagtcttcccatgagtccaccagtggccagtattgaagacaagaatgtcagcgcgcttccaacgagatgctgacttgtctattcgatcaattgaaagagttggatttgaacttccctgaccattcatgcggactccttcccttacaagaaaatgtgacctcacaaaatccacagtacaattgtagtcctgcaagaaagtttattatgacagtcagtcatagatgttgaaacaaatttgatgaattctattcacctctataactcgttaaaccgaagttggataaaatttacttgttaataaaaagagatatagaaagattctatatgagattgagaactgtgttaaaatttcaggcatggaagtttatttgggttgaaagagtgacaaactttcagtctcaaaaaaccatttaccaagcacatgtaaattcaaagctctccctaccatctaagggaacaccaggaattaataaaaaaaaaatgatgcaacagcattgactaaaaaactaaaattgttctataattcgttggatgaatatgtgactaacattactgtattgcaaaggacaaaaacagagacttttgttatgggtatttatttatttttaagagacatttgcaagacttgaaccctcatcaactacacttactccctaccaaaccagttcatctaacccgagtattaaaagaaaagtagcaggaatttattacattttaacacattgaaacttgcatttacaagac

SEQ ID NO: 203127 - DNA, 1482 bp, Cannabis indica
ggattatttaattttgatttagttgagcaacttgttttaattatgaacttctctccccaagtagttgccatttccatttggctaaacaaatcccttcagaattattttattttatgcaccaaattaagattgtgtccataattattggtgccgtatgcaaactttggtatttgattgattgtagaatttgctaaccacaaacgtgagacttccaaatatcttgttttcaatacattatttacttattaacataatatttaataaatagccgtgttgattgaatttattaaaacctttttgtgttaatcattacattaaaatacattttatgttttagtcctgctatgttgacatagcacaacaatagtccatatgttcaaatcattagaaaataaaaaaaaaaaaataagcctattttgcatcatcaaagtatgagtttatagaactttcaatcaaagttaaacaaaattggtatcatattccaattatttaggtatggaaatatagtacagtatggctttccaatgtttttgcttataagtcatcatcatttttttttattaaataaattatcatcttacttgggccatttcttgatctggtcaagtttggtggctccattaccattataataaatttataatgctttattttgtggtcccaacttaaattattattacttctttacaatcatgtttctgtactaaaaagtaaaaaagaaaaagaaaagaacacgcatatatataaacagtcaatttaattaattgatttgttacttgtttactagcacaaaaacaaactctccacttgcaattttaaaaacttttcttttcttgttcaaaaaaaaaaacttttcttttcttttgtcttgtcttatcttatcgaaaccttcaggaagatgtactctccattgtgaagagattgggtttgataatttattaaaaaaaacaatgcatgcacctcaccaccccaattggaacctaacaacaaagacattgctattcatcacagctgtatctctaatacaatcaacatatttgattgtcattggattttgtaaattttaaaatgggactagtaagatattcctagaaggaataatgagaaaatgtggtattttctttattttttgaaaatagaaaatgtggtatttaagtcattacaattattttttcttgatattttcaaaaaaatatatatattttcttgagaaaaaaaagtccttacaatatatataaatatatattttaacttctatacatctcaatttattccaaaatatagtctacaatagcattttgacacgtactaaattgagttcgataaaattaaagaacatgatttagtaagtatgtccttaaactattgagattgttgaatttaaagatttttgtccaattttagtgaaaaaaatttaacagataaaaattttgaagacatgatttaagttcgagtgacctgatttgatagatatcaaaatct

SEQ ID NO: 203128 - DNA, 776 bp, Cannabis indica
agagagttatagtggttcagccaaagctaggtctacttagtccactgttgcaatgattttagcttggtctatttaattcggatcactcatttatataaaaagcaagtgtcctttaagattacataactgatcggtttagaactgtttttataataaattagagtatttatcaaaataaatccttaaataataaatgaagaacttttgatccgttcttgtagtaagtgcaacaacatatgcgacttattaagccgcgagttgcatgttcatatcccaacacacgagctcgtaggctctatgatgttgtgcttgcgcaggatgtcctttagtccaatcgttttggatgtctgtgttcatcatgattacataatcagacattccatgcattgatattgtggaacatgtgagtccctaatgagtcattgaacacactagtcagttggaccaaacttatgtaaataagctatctttactagtcacaggagaggtttacttaatcatcacatatactcagtatatgtgcgaccaatattaaatcctcccgatcctgtttaatattcttttgactttgtgatatatactatgcgactagaccctgtgtcagtcacattctctcgtaagttcatatcaagcgaggctagctctatgagagctatctactaatacatcatcattttcatcgggaattgggtccatgtgtcagttttatacgaaactgtacttgtacttctaagcaaaaaaatttacactataataagttgtaatttttctttggg

SEQ ID NO: 203129 - DNA, 688 bp, Cannabis indica
atctttcaaaagtgaaagttagctaaagggttctatatcaagttacactattctacaatggtaaatgaaagttcaacattgacaagagtttgaccatataacccatacgagacatccacgcagaaaaatgaccttaattgaatttaaaaatgttcaagaatgtggcgctaagcacttgaactattagtttagttaagcaatattaaaataacattttaagcaaatagttagaaagtcaacatgcctactaacactaataaaatacgccaagaaaggggtcacacgttcagaaactgtctaatgagatactgaaacaattctctcctaaccaatcacacattcgttttcttctggtttttttacacatcattttcccatacaggaaatcaccaaccctacagaatgttaagcaactccaaaggtcatgtcctcttgaaaaggtaccccaaaagaatgccaagcaaaccaatgatgataacatacacaagggaaaggccaccccgacttctgctcgtgttctgcttcaaaagctcctgcaaaacaatagtatctcaacgtaagtccataaggaggtcgctatgaatcctcaaacatttttttatgaattaaaccctcaaaacactcatgattttgataaaaacttaaggtaatcaagctcaaagcagcagtttgttttctttcttttttt

SEQ ID NO: 203130 - DNA, 1222 bp, Cannabis indica
tctatcatcttccaagagcacttcaattccatgtatcatttttctgaaagaaataaaaagggtttttttttcctcatagcttttatataaactccatttgaagttggaataggtttgatttggtttcttggattgaaaaagacactgattcagaaatacccatttcttgtattaaggttttatatattttgctacatttttcccctgaaaagatgtgatttttagggtatttacacaagtattttttttggtaaaattttttggtgatagaccaaatatcttctaactcctctaccagaattttgaagaagtactcaaaagatttttcctttttgaatcaagtgggtctctttttcatgtttgttgctcatcagagttgtaaagtttccttttttttctttaaaaatttgtatgtatatatatgttagtattaattttaaacttttttggttttgtgttaatttgggaagttttaaaagtgatttttatgtgtattgttatgtaaatcttgtgttttaggttactctgatagttgctagttgaatttctaggtagatttttgtaaaaatgtataaattaaaaacttattttaaagtttaaaaattaaaaaaatcttatataatatactagtaatagtccaagttcttactgtagatttagctagtaagaattttacagttttgatgaaacttagttttacctagttaaagttggtgctttgcttaggaaatctctgctcacttcttattgatttcatttgttatgacttaatttgattcaattggtctatagctatttttcatgtaatatagtaacaacatttcttgtataattaatatgatttattcctttctctttttcaggaaaaagtttgtgaactatgtggtgataatggtggcaattttaaacatttactagtaacttgctctgtgtgcaacacaacttgtgaacatgtgtaagattctctctttctctatctcagcatggaagtgcctttgtttactttaacttcgattattgtaagaattgtataatgcacgagcttcatcttaaaattaattgacaatagagagatatagttcatccatcttatttatggcattatacttcgatcacaagcagttctgtttgagctaactttttggatttttggtggcgttttttggccctactttttctcgagcgaccttttgtatatggatcggatgccttttagaggttt

SEQ ID NO: 203131 - DNA, 934 bp, Cannabis indica
tatatatataaaccttagaaaaaaaaatacatgtttaactttatattttccaattttaaatttaatcgtattaagttaatttagttatctaccttaaaatggtttactgttatcttaaactacaaatttgttacgtgttaattttaattggtatgtcaattagttcaaattttacaaataagttcaaattttattaattccaattcatatcatttcccatgtaaaaaaaatctatataatcagattgggagatacggttcataaataacttaacaatggtaaaaatattatagccgaaagcatatttataaaatcaattaagtatattattttttattattacaaagtaagataaaaatattattaacatattttttatataaataattgaaaatatttataaacggcacgcgtcgcgcggtttgtaacctaattttactaatataatcactaaagctcaaattttattgattccaattaagatcatttcccatgtaaaaaaaaatcacatcattgattcatttcagtggttataaaattataatatatggttataaattcttaagttttaatttataaatttgtaattataattacagttacaagaaaactttattattacaaatttataatgttctttaaatgacagttcagttctttagttttttttatatataattttaatctttttccaaaatctccctataatttatgcacatatatttttttttttccaaatatacattgtatttaaatggttaaatttaaaatatcctgtccaaaaataaaagaattaaatacccttgacaagaaaaaaaaaaaaaaaaaacaaaaaaaaaaccttaatttaaaggtaatttgattcttgtatctaaaaaaaaaactaactaaagcatgtatttcatatacacaccttttgcataacatagttaca

SEQ ID NO: 203132 - DNA, 1200 bp, Cannabis indica
ggaggaggctccattgtccaccacgcaccatgcaactgttatattcccgatttgtacagtaataaccaagggtaattgtgcaggaaaataacttgagcagcatctccttctgttaaagagatagtgggctctttgagctttggttacttggagcccctttctttgatagccaggatatcactttgtggctcgtgagagaatgtcagagcataggcgttccctagccttgctagtctcgcttgtaatgtggggtctgtaaataatgacccctaagtgacccgccactaaaggtggcatagggtttccattctaggtagcttgtgcctcagattggttattatacacataacaatgcaagtggggattgttcttccttatgaggaattcaatctccctcttcaagttctgacactcattagtgtcatggcggaagtcattgtgaaaatggtagaacttacaaatgtccctcttgctcatctccctttcaatagaagggggcttcttgtatgggacagttccctgagtggccatgtagtattgttcttggccacgtggacatgccacgtcaggtgggcaaaaatcgggataacaaaatgccaacaagaaaaaaaatacttgtttgggcaggaccgagtagagtacatggggcatatcatcttggcacaaggtgttttagaagacattgccaaagtggaaaccatgttataatggtcatttcctaagacactaaaagtacagggatttcttaggctcacaggataatactgcaaatttttcaaggaatatggcaccatttattgactcttgaatgattagttgaaaaacggctcttttagatggaaccaggaagcccaagcctttcagtaactaaagacaaccatgtgctcagtgctagtcttggcctcacctgaaatgtaaggttcctttataatgaaaattgtgcttctagtgttggacttggggtagtgttcatgaaaaatcagcaacttatgtttttgcatttacgttttgtctcctaggtaatgctaattaagtttatgaacgtgaggttatggccactatgattattattcaaaaatggtgctcacatcatcatgggtgaaaattcgtagtctgtacagaccaacgtaagtaccttttagagtaaagattggtggcagatgagtccaaaaagtttctaactaaggtgccgtttggtaa

SEQ ID NO: 203133 - DNA, 893 bp, Cannabis indica
atttctgcatatgatcaaaaaatgtatcttctaggaaaccaacaagaaaagttaaaagctattttcatttgcagccggagaagaatctagcctataagtctaaaatgaccgttgaagtgagaaatgcctttgatgatattcaatgctaattttaattatgttgaataatgtagtagtgaagattagtatacttctttcctaaatcacttcatttttaaatagcttcaactttcatagtagtgattggattaaatttgtttgtataatttacttacactctatagtatacacattaaccaactaatttaccatcttaatgagttataacacatcatcattaattcgtcctcatcatcatcattaagaatcaagattaggtttaattaaagatacaacaacaactatataataatgttgaatcattttccttaacagatgtttattgaccaattatattaaagtcttcaagatttagcgatactacaatctctattcaaagtttcctcttaaaatattaatcaacgttattaaaaggaaaagtatataaatcaaaatgacctaaatttattgaggcttacagtcaatgttaaattcaattaaactattacttgtataacgactccaatttattacttgaaatataaatccaaccggccttttggctgctacctaataaatcccaaactttttcaatagtaaataataacagaaaaaaaagcaccctataatattattaataattattacaaaacaaaaatgattaagtaaatgacgagaatgtccctgtatatttgcctgtaccagtactagtagtacccggcgtggtcaacatataattttcttttctgttttttctttgaaaaataatataaaatgttattttaatttatttt

SEQ ID NO: 203134 - DNA, 531 bp, Cannabis indica
ttcatttttttttttgttaaaagccaacttgaactctggtgtacataggagtgcaaatgacataattttagtagttcaggtaatatttattatttaaatattataaaaataatttataaatatgtaatataattaaaataaaaaatagaaaatgataaaaattaacattttttttaacttattctttcctttttttttttcttgtttcttgatgcttctttctcttgccaaatgcttcacgctattacaccataaccaaaccaaccactaaatctcatcactacaaccgtttgccctaaatcaaagaaaaaatagggtaagaataaaaaaaaattaaaacccaaatcataaacaatataacaaatctcaaataaaatttaaaaccaaaatcataaatagatgatagatctataagtttatctcaatcaccacaacactcttcctttggttcctcaccaccaccactaccaccacaacacactcagatttggacccatgccaatttcgacccaaacccccaaacccaaaaac

SEQ ID NO: 203135 - DNA, 1448 bp, Cannabis indica
atgacaagagcacccggtgggatcatctccttgatggaggcatcagttgagatcttcacacaggtagcatagtcaggcttggtagtgccctccatgagaccagggatggtgttgaactgtctacgcacctcctcaaccatctttagagctgcacttcctacactcttcattgtcatggcagagaaccaatatggaagcatggcacctacaatcaaaccaatgaacacctttggggttaagacatcgacggttgtaatagctgcgcggctgacgaaagcaccgaaaagagctagggatacaagggcagcagagccaatagcaaaaccctgaaaaggaaatagaaagcaactatcaggcacaattcatcttctaaagagcttttgagaaaattaaactgttgtagatgctgaacggaagaactaatgttctaagttttaaaaataacttgtgagagaagggaacaagacaaaagctaattctaaagagcagggttcacacattccccttgtgcttgctgaaaaccaggacccagatgacaaagtaaaaaagtaacactagaaggtacaagaatttcaaacctttccaattgcagcagtagtatttccagcagcatcaagagcatcggttctctctcggattctgtggctcatccagccatctcagcaatacctccagcattgtcactgattggaccatatgcatcaaatggccaatccagttgctatggtactcagcattccaagtgcagctacagcaataccatacatagcagcaaagctaaaactaacaaaaatgcttgctgcaatagcaaaaatgggaatgatgacagatttgtatcccaatgcgagaccaaagataacattagtggcagctccagtccggcaggaatcagcaacatcttgcacagggctacacagttaaagaaaaaatagtcaactcacaatcattgcactggaataccatataccaagataaaaagatgcttacctgtatgcattgctagtataatactcagttacgaaaccgatgataagtccagcccagagaccaacagcaacacataagaaaagttgcctgtgcagagaaaagaaaatattttagcacaacaaagaaagacatagcaagcaacacaagaaagttttataattacaacttaccagttatgtacaactttctgtgttccaaaattgaagatggtgaaggtagatggaagggcaatccaactaacaacagcaattccaatagtcatcagagcagtagaaatgattagctgcttctttaacgcgggttcaatttcattcacgttctttatctcgaagaaatcagttgcgaagagggtggtgagcaaacatacaaggataccaacggaactgataatgagaggatatagcatagcagtcagctcgtgattaatcccaaaggaggagatggaagcgaacaacaagagc

SEQ ID NO: 203136 - DNA, 3298 bp, Cannabis indica
attttgttttctttctctccttgatctaatttctgaaaacctaactttgttttgaagcttttgtagtcttcttgcttggtgttcttgaatggattttatgatgtttttagtgttagctgctgtatgatcctagagagtttacgatttgatttttggggtggtctatgattatttggagcttgtttgaactttaattgtgggttgtatcttgtgttgaggaagtttaaatttgagaactcaaatttggctcaaaaatgataaatttaaattcttaataattttgatgtgtttagcttgtgttttatatttagaatatcccaatttaatgttctggaaagttttgtagcatttgattttaattggagcaagttgtgggagttggaagattaaaatttttgagcaatttatgcctagacaattggaattctggttggtttagggctgttccaatcgaaattccagttggacagtatcgaatagatccattttgtattttggccataactttttactttgaactctgttttggacgttctttatatcgttggaaagcttatgacaagctttattacttagtctagactttgagtcttaattgtgaataaatatctgatgtgatttaggtttatattgtttaaacttgagattgtgactaggattactagtacttgctcgagatcacctgtggattgaaattctcctcatactttggaaatgaagtaagatattgaattgtgcacatagagtatagtgtagtggcacagttcacattatgtgattaatttgattaaagtgcaagttggggttattaccctaaatttatatagtgtgaactagggttattaccctagatatttatattgagaattgaggttattaccctaagtaaatatactgtgaaataggattcttaccctaaatatatttattgtggattagggttattgcactaagatcacttattgtggaataaggtgattaccctaaatatgtatagtcttcagcatgcgataatatgctatgtgagtgaatgattagaattatataaattagggttattaccctaaaacttcatatagtaaaatatatattgaatgtattatatgtatatatatgttgagagttacgtgtgtataagatataactaggttagacctgataaatattattaggataaaccactgtaagagcataatgtatggattatgtatatatgagtatagttatgcatgtaaggcatcaccaggttagactcagtaattataaccgagacaaactctagtaaggccttaaatgtaaaagagacgtgtgagtgtaacacgtaggtttatggacattaattatatgacattattatacatggaataatataatatgtagtgcgatggcataatctatacgcaatgtcgtactgtaaaaagtgtaattgctctaattattcatgctgtattattattctgtcttgctgggccttggctcacgagtgctctaatgtgcatgcactagttatgctgttttgcttcaaccatgagttgaagagttttgaagatgagttatacaagttctaaccaagctagaccaagagggttgggtccaacagggaattgtgtagaatcaagtgtttacgaggaagaaacaacccacgatgggtgttaggacaagggaccagcacctaggctgacattttgtcaacctaggccaattttgaggagttttctcgaaaagtcttctagctatattctccattttcatcaaagattaagattcaactatttataaggaccaaatgaaacttcaaagtggcctgaaagtagacctagtgcccaagttgacatattatgaaactaggttgtttctaattagttttttgaaaaagtgtttcgagcatttttttttttgccatcagaaataatgaagatacaagtaaacttgggtagaaaacaacaatttcaagggaatcaaaactgagcctagtacccaggttgacctggtgttgggtctagtgcccaggttgataatcaacctggtgtgttggttttgatcattcaaatgcaaattctattatgagaattctctccgaaatggtcagaaaaggggtaggagaccttgtcctcaagttctagaaccttggaagtatcaaaaaaaatcctggaagctctgaaataagcacctagcgccctggttgacatgtggcctggtgcgctgggttttgcttatttaactctgattctttcttgaccattaatctagtttttcataataattgagagccatgtagctagaaaattcaaattcacaacttcattatttcacttttccgacaaggtaatttacttggaaactgggtagttttgagtctcccatttccgcagaacagcaacatctccgagaattggtgatcagctttgctagaacacagaaatggactaagtgatgtcaaaatatcacttaggtatcaaaaaatacaccttgacatattttcccactcacccaacatccaggttgacatcacatgtcaacctgggcattgggatgttaacttgggtgttaggcccagagcaaccttcagtaaaatagccataactcactcaatattgattcgattgatgcaattcaacttgggtttcgaagctattttaatgatctatcaagtcatggctcacaattcaatctcatttctgaatttatcgactccaactttaacctccaagggagttacgaatttaagctacaattacctagagcgggtcccgctagtgcgactcaaacaatcagcctccaaatttaatttttaccgttagatcatcatctacaatcaaaaatatcctaaatttattttccatattttttgaattattttattctcatataatatgatctccttcacctataaaaggaatgctcaactagctcattttttagttttagagaagtagccataagttcagagcatctctctctagtttctctctctaaaaattagagcatccaaacttagccatttttaaggaaaccaacctggaaaaaagaaaaactcaaagtagatgtagcttcattactatcgtgacacagggagtgatctactataaattccttgtgtctctcatgtgtatacttaacttataatttatttttgtcaatctagcgagcgggtgtggctcaggaatctgtgtctaaatttctgcgtcaccaccaagtatgccacattttatacctcctatattgttcccaactatctctccttctccatctacatctacaaacacctcatcaacaaacactattattatttctctat

SEQ ID NO: 203137 - DNA, 1482 bp, Cannabis indica
tttgagctacagtctgcatgtagctcagatctatttttcataccatactatccttagcaagcagatcggtcctattagaaacatctagatactttaaatagattcataccaattccaaatcaatgtaaattaaagatcctatcacaatgttcacacaacagaacccaaatatcccaactaactcttgactaatcccagtaccatccccctgctagacatcatctaaacattcacactttaatttatatggttacactaatcacgattcacaaccttctatttctaataccttacaaccaactctctgctctagctcatcaaaagcagattcatgaataagatatagtaataagccatcaacgaaacgatgaaccaagaaattgaagactacctgttcttcaaccttcatatgctttgagaatagcttcactgcatggcattctttagtaagtgatcgaagacccctacagaaacacaataaatacttggtcaaaagcaatgcatatcaagtatatgaaatgaattcagtactttcaaacagactttctgaatataaataaatatatatatacacaaatatatatatcatttcaatctttgaagtttaaaacaacgaaaatgcttttaccttagaaggtctattgattttaaagcagatgcactaataataaggacagcgggattccctggatcaactttcccttccaacaaccgctttccacacagaatttctttccatgatgagccaaaagcagccatcatatctttccccaaggattctgtttcttgacttgcacattgagatagttctagaatgcatgaatctacaatgattatcaatcacaaaaaagattaaagcaagtgcataaaatccactgtacaatttcgtttgatcaagggaaaactaagtacaaaaacaatagtatagaacaagttttcatatttcccatattgacttgatggtagcgcattatggttaaaaaaaaacaaattttctgatatatttctccagcattttctactcaatctaacagaacataacaaagcaagacgaagataccttttaggggttccaactcgagggaagagagttgaatgccattagcggactggaacaggtccagaaaaaacttcagttgtgctgaagctgaggctggagctgcaacgacgccatcagaagttctgccgttggcaggtcccgcttggccatcagggttgctgttatcgtcgttggtgttgctatgccgttgcttcttcttcttcgacttgtccttgagttcagttttgttaggggccagaggttgtcttttcttgctagggtttttggaggaaagctttgacggcttcttcatttttcagctatccatttctgaacttgcgttataacggggaagaattagggtttagggtttagaacttgcggctattccaaaatgatagcgaagttacagatatttactatttacatattttcaaccctaa

SEQ ID NO: 203138 - DNA, 694 bp, Cannabis indica
cattctccgatggctctatcagactgcgtgtgatcccttttcccgccattgagaaacagttgcttctgcccgattccgacttgacccatggcccatacatctgaaccgcttcaccattcttaggaaataccatagccgtgggaacatggcaaaccctgtccaaatgcgctagtttaccatagttaaaacataaaaatggcagtttttcatatttgaactgtatccatgtctcctcccttccttcagctttaagaaagaatcccaccacaaacggatgggcgatccaaacatcgagccagcatctcaggtagcctctacgtaccagttccactttggatttatcatcagatttcacgaactggccagctttttttgcaatgataattgcattttcatttgataaacacctagttgggaggccatgaaactgaacccagaatctggccacttcaaaatctgcaactcttacttctccctcgataggccaaggcttgaggttgagaagcattccattaacaagccagggccgtttgtccatgataaacttgcagtcttcctctgtatcaaagaagaatcccagaactccttcgccacatttcttcatccgccagcctccaacattcctccagattcccataaggattttcttaacaactgatgctggcatatctttgcatcccatgactttcccaac

SEQ ID NO: 203139 - DNA, 1129 bp, Cannabis indica
attagcattaaagggttgattattggaccaagacctcttaacagtgagataaaagtcaggattctcaagccagacattctcaaaacgaaatcttttattaacaaaattaagacaagtattattgtcctcatggagcataatcttcaaggctctatggtctgagccataaaaaggtaattgataaaggacaacactagggaataaatcacaccaattgtcagaaccaacaacccaatcaagacactcataagtaaagccatatttctaagtgaatttatttccaacataagggaggggaaaaagactaaatgtatataaaaaacaagcaaaggacttcatatcaacattggaatagaaattactaccaaacttatcactatgtaaaagtcaactattaaaatcacccatgataaaccaagggagattaagggcattatagaaaactttacgaaggaggttccaagtatgatgcctttaattatgtactagagatccataataaccaataaaatgaaacatactattatcattaaagcttatattactaatcacgagaaagttaaaatattaacatagacattaaacttccataaaagcataagtctccccctcctccccccaaaaaaaatatttccctagagacctcaaaaccaaaatcaaaacttaagaagtcttatccctattaaccgcttggaagcagcctagtttccactaaaaaagaaataaaggttgatgctccttcactagcagtgagagtcttcggaatgcactggtactcccaatctccgtgcatcccagctaatgagggtcgtttttctgggcacgtgtgcttagcatcacccgcctgttcagagtaaaaataaaatgaagaggagacaccatctccttcaccaacacgaacccttttaagcaatgatcgtgaagaacctccaactgaagccttataagtgtgaaacgaagcacgtttcactccagagagttttaaaaactaaagaaaaaaatgtgacaaaaaaagggtatttttgtaacatagggacattaccttgtacccaaagccacctaaaatcataaatctcaattcccttttcatttcgcttgctttgagttctctctctctctctcagatctc

SEQ ID NO: 203140 - DNA, 523 bp, Cannabis indica
ttttttttattgatttaacatttaatgaggtgtcaacgaagtgtcatcataatcaataacaggagaagatgaattctcaaatgggcaattaatatcctccatgggtttgcttttagaaaaaaaaaaaaaaaatactacaaagtaacatcaatcatgtgtgataataaattcatattgatcacgtaataagttgctatcaaatttaatgccaacctacagcgtgatttaacaagtctgattgaggagttttaactttttctcttctttgttttttgtgttgataggaagtgtttgccaatgtaattagagatatttattaaaaattatttttttaaatatctaaattctatatttaattatactactaataatataaataaaaaaatacttccaactatcaatagttattttttttaacaattttcttattactttgtatagcattagcatgattattaattaatttcgaagtctatcaataaagaaatttgaaattcaatgctccatgtgacttgttatggtg

SEQ ID NO: 203141 - DNA, 524 bp, Cannabis indica
aaaaaaaaaaactttgtataagataaaaacatgaattgaatgcatgtgttcacccaaaaccaactaaaaccatagaattttaatttgttttcaaacacaaaacttgtttgggtaaagaaactcttaagaaaaattcatttgcttgtacttctcaattgaaggagttgtcttcatttaaaactagcttttatttataaataaagaaaaacaaaaataaacttaaatgaaatttaaggaaaatcaatatgaatatggtccaaaacaaacaccctccttctgaactggaccctattgccaatgccaactaaagaagaagaatccaaagactctgaaaagacatctcagctccacgcctccacccacccctacaataaaattgttttcgattccagtgatatttttactacaaaacaatgggtatgcatttcactaaagttttggtacacaaggttattttcgtaattttcattcactcaaacactgcaactggaagaatcatgtaacacccaaaaaaaaaaaaaaaa

SEQ ID NO: 203142 - DNA, 531 bp, Cannabis indica
gaaatattaaaaaaaagtgataatgtatttgcgagagagatgccgagcttgtatatataagttgacattttatcattttcagtataatgcatttactgaattttttttatttttaaataagcgtgtttatatattcgactaaaaacattagaccttgcggtcattacataagagatcctctggaactgacgaggccggaatatatccgcacaacttgtgagtaaaagcctaattaatcacattatgggcaacaaaattacaagttctgtgagcatacataaaattacagcaaataaaagagggagcagacttaatacaaaaagagacatagttctcaagcgcccaatgtgattctatcccattgagagcattgataactatcctcgagtcattctccaccaaaacaaacttaacgcctaattctagagccaccgaaacaggctaaacaacaagtcgctgcttcttcacataacacatccgaaaagtctaactgagccatatgaattcaaatcacttcacccaagtgattcc

SEQ ID NO: 203143 - DNA, 575 bp, Cannabis indica
accgctagacgatgggggcatacaggaaaataatacacataaataaaataatattaagacaaccctatgtaaaaagctttgagcactgaaaagagaattaaagttataattctaaaagctcaaaatacaaataaagaaaagattagcaaggtagaagattagagttactcagtatatattacatataaatatgtaaaagtaatataaaacataagtataatatagaacaagtttaatataaagtatagatatataagattatggtgaagagatgaagagtggaatataatatataaaagaaggggatagttatatagagcactattttttgtaaaaaaattacatttttatgcaccactacaaaaacaggttttctcgacgtttttaaacagtcatttaaagtattttcgtcgatttctataaccgttgcctatacgaccgtcgtaaaacgggcagaataggagacggttcaaaaccgtcgctaatatgggtttcctgactgtttaaaaccgtcgcctatatctgggtacaggcgacagtttataaccgccaagaatgtaaaaaaaaagagaaaa

SEQ ID NO: 203144 - DNA, 843 bp, Cannabis indica
tactgttgctcatttatgtgacatgagaggagtttgaatcttgagatgtttgcttgtgtatttatatttgttcaaatttatcaaaaaattgtaatatctcatttctttgtatatacatatataaatataatagtatatattccacttatactacacattccattattttatgagaaactctaaatattatttttataaattattcataattttttttaaaataataaaatgtatatattattatataaaaaatttctactataatataagaaatatagtaaaaacagtacaaatatagtggcggtggcggaactcctggctttacgtgagggtctgatgcgggcggctcgcttggggttttctttgacgcgtgtggagacggattcctctgttgtgtgttcttggattaattgccttgataatattcttatgtttaaaccagttgttgaggagattatttctcttttagctgcggttggtggtggttcttgttgtgccattgcgcgtgatgcgaatggtgtggcccacacgctagctaagtctgttactagttttattgagagtcatatgtggacagatatttgttctagatttattagtgcccctgtaacagccgatttaatttaaattaataacatactttctttcaaaaaaaaataaaataataataattgtaatcatacaaatgttaatgtaccggatcctatcaaaactcagtaattaaacaatgttgtgcttttaaaatttatttcagccgaaagaaaaataatattaccattgtgcatacgtttaacagagaaacttcattatcaataattgtattttttttttaggtggggtaag

SEQ ID NO: 203145 - DNA, 1211 bp, Cannabis indica
gttcttacacatgtatctgtaagtatccataaagttgggtatttccaatgaatataccatgggtgatgcatggtcaaatccctaggtgctgtagggtttttatgaggaatgtcctttttgccttgtgattgacgtgactcttcgcagagtagccgtcgctagacttaaatgatcattactgtagcgctgctgtttgggggttgtgccgtcagactttattgcgtgttacagtcccaacacgcttcctcccatgcggcattaaatgcgacttgattgctcaggagaggcctgacacatcccggagaggcttcatgctatgcgagcttccgggagtaccttgtactccgggtgcctcctccgggacctatgcccagggtgcttccttgtggcgtacaaagacttatcaaatatttacaagttatctgatccacgtgtcccttttcgactggtccacgtattttgggcgaattcaggggcaacaaatacaataaaaaatttaataaaaattaccacatatttgtaatataaaaaaaaaaaaaaaatctcatatgtaatttcctcatttggatatatgagcttaaaaataaaaatacaaattatgttctcttttcttatttcaaaaactctaaatattattttattttattttttaatttaaaattatcaatcaaccacaagtttagatttagggggtgtttgataacacttttattttttaatttttaaatcatatagttgaaagtaaaattttcaaatgtgttatgtaattacttattttttaaaaatttaaaaattaaaaaataaaagtgtattctgtactttttttttatttaagtgaggaatgagattttgatgtgagagaaagtgggataggggcgaggaggtctgcatatggggtctaagttgaggtctatgtctgaggttagaatccgggttcaagtttcgggttcgaatctaagtctgagtccgagtttaggattcgagtgcgtgtttaggtccatagtcgaggtcggctcccaggtcctaaattcgagatccaagactaggtcctaatccggtgtcctggtccagattcaagttgggttaatgaaaaaaaaaatgttataattaagaaaaaaaaagactatttaaataattttgaaagtaattttcttatatttttaaaattttgatatttattttaaaaattaaaaagtaaaaacatatttttt

SEQ ID NO: 203146 - DNA, 826 bp, Cannabis indica
aaatttaatagttgtgatgagaaatttatttataatttaaagctattattataaataaattaaccacaattattaaagtggttaatatgtattaattctaagaatcaataaaacaaacaaattaatctaaaatagtgagtgagagaaggaatacatgtcaatgtaacctacggtctccattattggtcaacactaaaggagtatagactagccttgagacaactttgttttcgcccccctaaggaaggtattttgtctatactattgttcacggttaatctcttgactaagatagaagtaagtgatgtagtttagtgcaatatcgaccctaaggaagcgttactaagttaagtcatagaatttaaaataataggttatactcacaaagttcacctaagcttcaatgtggttagttgttaacttgaccaaatagcgatactttatatttttttaaaaaaatatgacatatttaaatttcaaaattataaggatgagaactgtttgataggataatgaaattgattcaatattgacccaaaggcggcaatcaattatcaaagagttttatcgtgatataacttaaacattattttatgtgttttacatgtatgcgctcatgcatcatgtttacaatctttccaaaatgatatttattattcaagtataatcattatgttatctttatttatttcagtcatgtctactatgctaaatccactcactgctttactaggacttgaaaaactgaatggttaaaatttcatgaaatggaaatctaatttgaaattgacgatggattgtgaaaatcacaaatttgtcctaagtg

SEQ ID NO: 203147 - DNA, 1184 bp, Cannabis indica
attttttataataataataatatattaataatttaattttttttttcaaaacaatttattaatttaatttaaagcactgaataataaattagtgttttactttcaattggtctcactttgcagcagcaacttccatgttggttttggtgaatgtatgccgaaaatttaataaataaaaataaacaattaaattaactttactaatactaaaaaaaactctgcatttaattaattatttttgggttaatattattttggaccctgtatcttgtaaaaattactaatagtattttgtattttttataatagtacaaaataataacataaataaattaattttttgattatttttaatataattaacttaaaaaataatttttagtacgaacagatacaaaaaattttgtcataataactctaaatcgaattattattaacttttattttaacaaaaaaattagtttatagtactattttatatcattttgaaaaatataaaatcaaatttattattttacaaaaccaaggatctttatccataatttttacaaaatacaatatttaaaataaaatttatcatagtactatatatagtgaattattttaaactataaggtttaattattaataatcttaaccttaaatgtcttgtcggtgcttggccaaaaattaataaattaattttaatatttaattttatttttactttcgtcgaaacatcccattaaagagttcttagctatattaattgaagcttatttggtttgacaaagagaaaaaaataaataatataaataaaaaaataaaaaacaatttttgggaaaagttttgccacgtgaaatctccctcatatttcactttcaactcttttataataaattttatttattttttcttaaaaatatatagaataatttttatagtatactgttagagattttataacaatggaagaaaatcaagatttattacaactctattgtaaaataatacaaggactaaataagagattaataaatatatgttacaatacatatatatacactatatatattacatatatatatatatgaaaggtagaagagaagattacaacacatgtaatataatatatgtatatatataacaagagaataatatatataaacactcactcacaaccttgagtgtagattagtggggat

SEQ ID NO: 203148 - DNA, 559 bp, Cannabis indica
gcaaccaaaagtagttgaaggttgggcgttactacaaggccttcgatggtgctctgacaaccacattaacattcattacatggaggtagattgtaaaaatctcgtcactgatttaacatcaaacgaagttattctctcaagctatggagccattatcgatgctattcggcatgtgttatctttacttcccactgttttccttcaacatattcgtagacaagggaatacaggagctcacaatttagcccagatggcattaggattagataacacatggtgttggaatagtcacgacccataccctttacctttgtaactttctttgggtcttccctctcaaaaaaaaaaaaaaaaaaatcagtgatagacccaatatttatacttggtagggatttatatattatatacaaaataaaatttgcgctttctttaaacaaaaattataatcactcttagaattattctagattcatttttttttttgtttattatttttgagtataatcatcaaatcaaaaaatatacattcaatttttgtgtaattatcaaattaaaaata

SEQ ID NO: 203149 - DNA, 786 bp, Cannabis indica
tgtaaaatagctactatgaatattcagatttggcttggcttattctctttcatataagtatatatataaagttccatacgttttatgttttgtttttttttttgtttaaaattttgtaaaagtagtttggtttatgatctttatttttttaagttagttgattagatttattgattactttgtgttggataacttgtgcatgtttctcgccttacacaatgaattttattgcccagtctgtgcaacggttgttgcatgacaacaaggagctaaagtacgaagttgccaaattaaaatccgacctccaaatgctgaaggaggctagttcagagagggacaaagaactagcctctcatcatgcggagtttattagtattctcttgtccacattgtctcttcaacatcctacacaccctaccacttcgaaagcagcaggtaagagacctactcagcctgagagtggcctccctgatctgaccttgggattgtccaatgttggtcccaaactttatgaatccgcgagcaccatactcgagtgcaaggtgagagttttgttgttttccttgttagttttagttctgttagtttattcatgtttgaattgttataaattatgtcatgcttatttcgttttgtgcaataaacctatatgatcatgatagagtttcttggactctttctttgttggaggcaagacattggaggtttctggtacatccacctagcacgggagcaattcttaccgttctcaaggctgccgacgaagggtataattttgtttgagtt

SEQ ID NO: 203150 - DNA, 874 bp, Cannabis indica
taggtcctctgctatgattcgggactactcaactccgagatgttatctttctttctacgtgtcaaacattgatgttgaagacaccaaggaaagttttttgagttaacatttttccccaagtccactttacaattgtgtgaagctgacttgattacgtgaacagagcccgtttctcttgaaactacgcatcaattttgataatcttagacaaattttttgtagttcttcaagcattcataacataattaggactttgaattctcttactcttgtatttgagaatttttgaaaattatttagccaagaaaaagaggaaaaacttatcatttttcacttatgttttatctttttctttgaaaaacttaaaattttcataaatttcttatgtccttagaattagttgaattgaaatcctaatactttttgtacatgccattcaaaaattagagaaaaaagaagaagagaaaatatctttgatatttttcttatcatttgtatttttctttttaaactctctattctcataggaatttcaaaattactaagcctaaactagaagagaaaaggttttgtctttttcttatcaattttcttttccttttaagctaaatttaaaagactccaaattgcattaggattaaggtgttaggctcacatataaataagagagctttcaataaaaaaatttcacttcccacgcacaatcctttactgaaagccttagatttttatctttattagttcgtcaggtgctcttcatccatcaaggtagaaaaaaaatttcttttttttttttcggctaccgtttgttttttttttttttggaaattttttcttccttgttgagtattgcttaaagggttctacaactccc

SEQ ID NO: 203151 - DNA, 811 bp, Cannabis indica
ttttttttttttttgtggagatagatttactgatgatatccctttttggatcttgaaattttgaattttgctttgtaataatcaccatatctttcaaattttaaattcctggccaaaatatgtattggatttcatattttctgtattctattgaactttgttttcaattttgattagtggacctgaaggtgttttttggtccaattattattttttggtcagacatgctctgacagcaaactatgttttattttctcttttaaaaaatgctttcgaatgtttgaaacattcactttctcttataaatttcattattgtatgagtttcttcatctgggtatctctagatctttgttcgttatgttgtgcattctccatggtttatatgtttctggtcatttttttcaggtgttatttatttatttttcgatgtcttaagttttcagcgcgttatatatagatcaaacctttgaagttttctacctctaagtaacgctagtactgagaatttgtaggtagctgctttcgcttatatatatatatatatacgaatcaactgatctccatacttactatctgaaaatgatgatgagtattggtagtggttcattgtgggtgggtatctgtttgttgggcctaactggtgttgtaacatctgaagatagtactaaatgggtactactaagcgacccaccccagtactcctacggaattccaagggtcctggccattctgtggattaacaagtttacgtaacagggtatgtatgtgtgtatttctcttatatatttttattattacatatatatata

SEQ ID NO: 203152 - DNA, 642 bp, Cannabis indica
tttcactaacataaaatatacatttgttttccccttaaataaaaggagagaagcaaccttatataaattacgtattcgaaatgatgtaacaaataacaatggataaaatactcattaataaaccttcccaataaattcaagtccacgtgaacgtgtgaattaattgataaagttttgggggacttatgtaacaaagtatcttattctcaacagcaatattgtattcatttttttaaatgaattttgtattcatttcaaataccataactgacataacacatcaatctacatattataatcaaaaccaaaatattgtcaaaaaaaaaaaaataacctcatcctctttttttttttaaatttttactttccttattactaattgtcaacttttaaagtacaatgaaacaatttccttatataataattacaattagtagctgtcattgttcactagcttcctatttactatctttcttctatttaatttagaattagtataatagtattaataaatagttctctctctctgtctctcaatttgttaccatccctcgtgtgcgagtgcgagtgagagagacccacgtcttgagttgagtggcgcacgagacaccaaaaacaagaggtccagcgcatatagcgcca

SEQ ID NO: 203153 - DNA, 734 bp, Cannabis indica
acccaattgagtcatgagaaaagtaacccctgaaaaatatcaagctttgaaaacttcggtcactgagcaattaggccgagtcgaaaacctccaactttgttttcctaaaagagcaaggttataatcccttagattcctaaaactcattcccctaacaattttatgactacacaaacagtcccaagacttccaatgaatgcttttatctttagaattgagagccttccaccaaaatttcaccatatgttgttccatatccatagtgatctccaaagaaagaagaaacacactcatggcatagcaagagagggcttgagccactgttttaataagaacctcctttccagccttcgaaagaaatttagaatcctgcaccctctttttgaccctttctttaagataccccaaaattgcagtcttgtttctttccattgtacttggaagacccaaataccgattgttttcatcctccatcatcatctgaagcaaaatacaaattgattccttaaattagtgtccatattagcactaaaaaagattgaagacttccccaaattaacttttggcaccaaagcttattcaaacattcttagtaattcttgaattcacaaatcttccattattgttgccttgcaatacagataactatcaatcgcgaacagcatatgcgatactcgcaaagccccttttgccactttacaccaatgaatccaacctttcctttcatatttttt

SEQ ID NO: 203154 - DNA, 1306 bp, Cannabis indica
aattaatttggcatataggattaattttttcaattaaatttgacataatatttatgtgattgtaaaatttacattacaataattatattactttattaatttttttaatatactaatattttttttatttatatttattttatttgtattattttattaatatattttattataacattaaattataaagcatttaatttatttcctaaattattattacttttaagtatttcatgcctttaattttttttttattatgatattttgttggtgttgatatggcatgttgtcatatgttgtgcattaattcaattaaaaattcattaaattcaaacaataaattaataaataaaaatatttaagatgttgatatagcatgccatacatatatatatcttcaccaacaacaaaatgttgactaataaaatgaataagtgaaaaggattttcaataaataaaaaaatttgggagcataacttaagagtagtaatagttgaggaatgataaatctaatttattcttcttcttattattaaataatggttgcaaataaggaggtctgcaggtatggctgctggactacagtttggtgtgcatgtggggacctaaatgactttcgagtgaaattattagccatcttattcttatgggtaatcactttccttttgaaactcgtgttcaattattaacctgtaaatacaatcatacttttgttaagagaattgctaaaaggcatgacattaaattatattattattattattattattagtgtaattaattatcgagttttatataatttattaataaaataattttaaaaaaatattactatcaaattatataaaatatataaaaaaatattaaatactactaatatttaataacaatcatctttattaatttagcatacactaattttttttaattaaatttgacataatataatttgtattatgatataaaatttatattacaataattatattattttattatttttttaatatactactattttttatttatatttatttcatttatattattttattatataacattaaataataaagtatttaatttatttcctaaattattattactttcaagtattcatgcactcaaaattttttaagtttgttaaataaaatttttacttgaactattcattttattgagttattatgcccttcgttgtcctatatggctaagtgcttatatgatattttgttagtgttgatgatgttatgttaacgtcatatgttgtaaattcaattaaaattaaacaattaaaagaatcatt

SEQ ID NO: 203155 - DNA, 734 bp, Cannabis indica
aaaacacatactaaaatggactataaaaatacaaaaaaaatatgactattttataataataataatggttatgactattttaacccatcctcttgatggattatattgtcccctccttatgggactaacctaattgattggattatattgtccaattcttctatatccaaagaatgtaccaaacataggataaaataaaatattttaatccaagcctcttatcaaacactccaaacatgccctatattcacaataccaatgttttttccaaaatcaaaagtaaattcacataagaacaaaggataaaatatttgtctagaagattaattaatatattgtctaatttctctatgaattgtctttattacttttggctttgtgctttattaataggattattctttttccaaaaaaaaaaaaaagattaactaatataaatgtagaagttaaaactattttcataaaataaataaataaatattttttaaaaaaattgtaaataataggttgaaaatggataaattttgtttataattaatatagtattatataatattatttaaaataatgttaacttaaattaaggttaatattatttaaaattatcatataaaaaaattatatttttgtactattaattaaaaatataaatactgtgctaagtaacataacataaaaataataataaacataaaataataaatacataaatatatgaattttaataaattaaa

SEQ ID NO: 203156 - DNA, 1134 bp, Cannabis indica
ttaaatttaaattaaagatttatattaaacaaatatctaattttgttaatacttttagattaaatttaatatttaaatatatttttaaaaatataataatttattaattttacggtgttagtttaactattaactttaatagaaaaataaaaaaactgtcaaactaacaatattagttaaataaccatacatatatttaatataagaaaaataaatttaaaattaaattaaatattatatatttaaaaatgtaattgaattgtattaaattttactttaattattattatttaaattaataattaagtaataacaactctaatacaattctaaataaatatcatgcattttatgttattaatacttaatatattatatatatgtttgaaataaaataacaagtaaaactgttacacgattcagcaaacttttataatagtgatttatcataagtattttataattatattttgcaaacaaaaaattgtcagtttaaaataaataaaaacaattttcaaataacatgatcatcatgatttatattataacaatcattcataaatttaataacaattatataaggtatgatcttattctaacaatataaaataatttaaatttaaataatcataattaaattattttatttttaaatatattattaaaatgattgcacgaggtggagacacataagtggatataccctacatttctatcatgttttatatatatatattcctaaattaatgacatgaatattgtataattgttcttataagtcctaaataaaaaatgtgctgtgcttcaatttaaaaattaatcaagaaggattggaatacaacagctctcattaaacaggacaattgctacaaaaaagaaacttatgggtcaaatgaatccataatatttacataaaacaagaaaattggtgagattacaaagcacctagttaagagagttggtattggagaaaaattgtagaaaccaaagagagagtcaaagttttaattgatccagtacaattctcactagattcatacaacattgcagattgctaaaccaagacttggggcatgctattggagtagagaaatatgaggacgattaaatgtgtaaagattgtagaagaagaca

SEQ ID NO: 203157 - DNA, 1009 bp, Cannabis indica
ttgttcttagctctgagagctaaatgaaaatctcgacgccattgttgaaaattatggtgggacagcggtggtgtcataagaatcaacccgggatggtcaccggagctaacgaagtatggattgtcttcattggctggacagtcatgagaaggaggcagcaaagaaatgggatcgtgagcattgtgtgaaccaaggtgagggagagaaatgttaccaatagtcacaaaagcattggacttgaaggtatgatcgaagtatccatggaagcggttccgaccggaggaggaacgacgaaggagggacgagcatctggagaaggagacgggatgacgtgttgcgaagctttgacggaggacaccacaagagcagtggtggaaccggcgaggacattgctggcaatggaagcagcagcaaacggaagatcggagttaggagcagagaaccggtgagactgtgccatggaagacggtgagcggttgaagttctagtgagccgtttgaagaaccggccaaatcgagagaaaggagagtaggcctgagaaaataggatttagtctcctaaagggaaatatctgataccatattagtaaaatgaagcttttattattattgattgtataataaatgtatacagaaaacactatatataagaggaggatatccaatcctaagatgcacactaaacacaactaggaataaccttatctttatacccaaacactaaagtatatatttaatatttaataattctttccatttataaaaatttataatctatcttaaaagcatactaaactaatttataggcagcaacattaacattgcaacttatgtaaacaaatcactaaaatgtatttgtctcccaatatatctgcaaaacaaaaaattaattagtatcaaataagtaaaaatggcaagaaagaaaattattattaacatttttgcaatataatataatcttggttgagacttgagaggacccaaccaaatattagatgttttagtaatat

SEQ ID NO: 203158 - DNA, 1063 bp, Cannabis indica
tttattcaaattatttatttttaattcaagtctaaaatgataataaaaatagattttatgttatttatataagcttgtttacttgttttttcattatttttaaaatacacaaaaacaacaaaaaaattataaaattacagttgttcggaattttaaacaattttatattttaaacaaattacagaaaatacggtcttttgatgtatttttatgttctacttttgttaatttattgttgattttttgttgctactttgatgttgtttagatgttattatcctgatactttcatgtatttttcttgttgtttccatattatttttatataatattgtgaaaatgtaaaaaaaaaaaatctttgaatgtaaaaaagaatttttttacaataaattatgctttatgtaattatccattttttatgcaacatattcacttttgtaataataagaaaaatacacaattacatttatgctcaaaacttctagacttgttcagatggtccagacttatgacataaacaaatacttgaaccactaatagtgtatcattgcagctggcagcattggacttcattgcctgtgcaacatcagatgtattcgccatgaccgattcagggagccaattgtcatccctagtgtctggatttcgaacgtattatgggaatggtgatgcgcctactttgagaccaaacaagaagagaatagcagcaattctatcagagaattacacaatagaatggaagagttttgaggaaagagtaaaaaagatgattgaggaaggtcaaagagtccgtgtgaggggtttaggcagaagcatttatcgtcagccaaggtgtcctgagtgcatgtgcaaaactaattaaccatatactttgttttatcttcttttttctttttctttttgttttggtaaatatcattttatgctctctattttgtaaaagttactgattaaaccttctgttttattaaatgataattaaacactatattttgtaaaacttaaaatttataacctaatctaaattttgacgagaatgattacattttctttatctattcgt

SEQ ID NO: 203159 - DNA, 1633 bp, Cannabis indica
actattatatatatattctatatcatatatatatactctatttatatattatcttatatcatatatatatatactctatttatatatatattctatatcatatatatacaattattatttatatatgctttttatatagttttacatttacttgtatctttgagtttttgagttgtaactcttttcttttatttgtattttgtgctttgggattgtaactctttatttaatatattgtccttgtaatattttgtttatagttgtaattgtcttagtcttttattcatcttatttttatttttccattgtaatctctctatttttctaacaaatagttttggatttttttgaaaagaaaaacaaaggaatagttgtggttcttttacgtagtatatttttgttttgttttgggagaatcaaactaatagtaatgaagttctattaatcggggtcatgacaatttagtgataaaatatccacaccacgtagaaattatttacatgctcaccaaaagaaaattaattactataataattttaaaatacagattactaacagggattttgtgtaattataaatatagtttagtagtgttacagtttcttataatttttttttatgtgattaactttaatatatgttatgaaatatcattaatcattcataatacgtgatctcataaaatacttccacataagggatttgtgaagaagctgttatgtagggagccggatcccctgtcaaagaatcctgtccattttcctgtccatccaatagaaaaatgccacaccaactaataaattaacagcatttcaattccccgttaattttatttaatcgcacatgccacatcttttacacattttttttaaacggcatcgttttatacattcttcattaatatattatttttttttttatagaaagaatgtttaaattactgggatccactgtacattctttatactgaactagttttttttttttttacaaactgtttatatcattcttttttctttatctgtacttaataattgtttaattttttttttttgtcaataacaatataattatttactttttttgtgataaccatataattgcttactttttcttagataaaacatataataactttatctactctattagataattactttttttttaattataatatatcgtcatttatgaaattaaatactaaactaatagtttaatatataattattaatatactctcaattattattataatcatttagtttattggtaaataatttagtttcatatacaactattaaattttaaattttttaaagaaattactaaaaaaaaaaataattgatttaagaaacatatcaaaaaaattaataaattagctaaatataccacctggtaaatattcataactatataataatcttacttaaattgtcaaattattattattgtatgaaaaaatttcaaaattagtttaatatagtatttaaaacctagtagcttaattaattttaaaattaaagttaactttgtttattgtaagaatatttttggaatattattttttttctttgatatatatttttttgaaaataattttgtgaacaaaaataattattgtttttctttt

SEQ ID NO: 203160 - DNA, 601 bp, Cannabis indica
tttttttttttcttaactatatgtatagtttcttatagtttgattatctacatttctaagtctttgttttctaatttcactaaagtttcataaagtcaattatttatataaattaatgtaggaattttattccttctttgccctacacacacagcaagctttaatcaacaaaagccaaggtcaaatctgaccatttacccaattcacccatgtgtttgaccctcaacatataaacacaaaacgacagctcactattctttcagctatagatcgtttatcccaatagaaaccctaaatgccaattacactcatatttgtattatcttatatctcttatttcactcagccacacacacacacgacacatatatacacaacccagaaaaatcaaaccctagcagagaacaacaaatacaactacacctccctatccgtgatctccttcttcagtgttcttctctgaagaacatgaagaagtacaacaaaactcagaaatatcccaaatctaaaccagaaattaatcccttccaaaccgaattaaatcccagaaatcatatacacacaccatacataatagtaaatgcagaaaattaaaggaaag

SEQ ID NO: 203161 - DNA, 498 bp, Cannabis indica
acgaaaaaaaaaaaaaaaaaatacgaacacacatacaaattcacaacactccaattcaaaaataatgttttcctaagcaaaaaaatattttcctatctcagtcccaagctagatctcgaacccagaccccaatcttcgatgcagacttcagaccttgggtcccataacctaaacctagtcctgaccctgcacccgaacccacaatcgacctcaaccccagacccaaccctagccccgaaatcagactttaaacatgtccctatccccagggccgggcctgagctaaggctaactacgcctgcgcttagggcccacccacctaagtcccaaaattttttccttgaaaaatataaatactttttagtattttctaaaaataccacatatttcttccttgagggcccaataatatttttttttgtcacaatagaattcataaaatttcagggtcggcactgctgctgtccctaccttgacctcgaaccaggaccccgatcc

SEQ ID NO: 203162 - DNA, 2342 bp, Cannabis indica
atagaggcattccattttgggtcggcaagtgcagctttcacagatgttggctcagatggaagaaggacagtgggcagtttgtgtttggtggctaggtacgattttggtttaaaaatgcctctctgagatcgggtgatcattagatgagtgcgagtgatgttttgtggttcattggcaatatcaaaaccgggttgggtagatgtgatatcatggtcaggtgcggcaatatctgaggtagttggtttggtgagagagtgtgaggaatctggtgtggttggtgagggagcatcaggtggtgagggagaatctggtgtggttgctgtggtcgtgatagtaggcaaggcaggggctgttgttagtgtattaaagctagccaatggtaaagttgttgatgaagtgttctctgtagcacagggctgtggaaaactgaatatttgctcattgaatgtgacatccctagcaatatatctcctaccatgcaaactttcacatatgtagccgttgtgattgggagaatagccaagaaatcggcatggttcagatctgaagctgagtttgtgagagttgtatggtcgaaggtgtggataacatatgcagccgaatgtttttaaggacttgtaatcaggaactttattgaataacacttggtagggactgctattgtcaagaattggagtaggcattcggttgattgtgtaaactccacactgaaaggcatgccaccaatatgacatatcaagatttgcttgtgctaacaaggtgagaccagtttctgttatatgacgatgttttctctcggcacgaccattttgctcatgtgaatgtgggcaaggatgttgaaagataatgccctgttcctgcaaaaatttagcaaacaccctatattctcctccccagtcagattgaaccgatttaataggtaaagaaaattgtttctcaacaagtgtcttaaagcgggtgaatacaatataggcttcagatctaagagtaagaggaaagatccatgtgaatctactataatcatctatgaaatgtatgtaatacctaaaaccatctatagagggtgtgtgtgaaggtccccacacatcagtgtgaagaagttctagaggctgtgtggctcggctatttgacagaggaaaaggcattttatggcttttacccttttgacatgcatcacaaaattttagttcttttaatgaattaggcagtgacatgtgagataggatttgtcttagagtatttgagctaggatgcccgagttttctgtgccacagatttacatcactaccagcagaagataacagtgcttgagattgaagattttcattaatagaatctttattaatggaatgatatgtacaattgatgggtgaactattgttcacagtattgagggtacaatcattattacaagaacatatactactgctggaagaatgttgtattgatttatgtgattttgatactgtggcaagatggcattgtaagctggcttgagagaatttggaggagttttcatcaagaacatataagccactcttaagtttccctcgagctagaaccttccccgtgtccttgtccttgacaaaacaacaatgtttgtgaaattctaagaaaatattattgttatgagtgagtttagatacactaattaaattttttgtgatagtaggaacacttaaaatagaatttaattttaatggggaagaagaattaatatgaatgcattttttgccaatatgtgaaattagaagttgtttaccatctcccacagcaagtgtttctgaatcaagatatggtgttgcactgtccaagtgttccatgccaagagcaacatgattggtagccccagtatcaacataccatcttaagtcatcaccaaagtcaggtacagtagaggttgaataggcttgagaatcacttgcttcagatgcttcctgttcagcaagataggcctttggggattggttattgttctttggtgtgacatagtttttgtcaaatctgtagtggcaaaccgaggcagtatgtcctactttaaggcagacttgacaaataggccttgagttcgaattgggataccttggtggaaaattgttggggtttcttgtggcttcatttgatctgttctgttgaaagaaggatctgaaatttccatttctgctgttattataaccagatcttgaatttccaacaacaagatttgcagccattttgttggaaatatcagaaaccgagtgatgcctttccaaacgacattcatgagccatcaataaagcttgaatttcttcaagactttttgattcatttgttgaggtaataccagaaacgactgagtcata

SEQ ID NO: 203163 - DNA, 1981 bp, Cannabis indica
  modified_base (1916)..(1916): a, c, t, g, unknown or other
tcaaagaattattaaaatgattataattgatacaattttatagcgaattttgaatagccaaaaagaatgttaaataaattgtattgaaacatcaaagtatatgaataacaatgaatatatgactaataatatttaaacacatgagacatgtatttcttgttcatcattccctgcagaaaattgaatttattttattttaaagagtattcatattctatatattagtcatattattatatattgttattaattttaatgtttatatatattagaatttattgcatgtgaccagggccggcccaagcattgggcagcttgggccattgcacaaggcccccatttttctaaggcccaattttttttttttgtttttaaaaaaggtcctttttttttcttattatttatacataaataaaaaaaaattaagtgaaaatttatgaagcagtattttttttaaaaaaaaaaacttactaatagaattgtagttttaatgtacatgatgttttttttttttttaaagggtcccaattttaaaatttcgcacaaggcccccaaaatgcttgggccggccctgcatgtgacatacattaaatatcagatttggcatacatcttaaagattacacaaaaactatattctttgaaatattgtaaatttcttatatttttatagatgagttaacaagtttttaagaaatttataataatacttttcttgttcaacgtcattcttgaagtgaatgcaataattttaaataatcaatgtcattatttactactcaaatatgtctagaaaaaattagaaataataagaagaagaaatactacacacaatcaatgtgaatgaaatctatatatgtgtagaattgaataatagtggtcaagtacatgtagaatagacacacttataatcaaggtaaaattatatttaattattaaatagaatgtgaattgtacatttagaataattaaatatcattccttgaagagaatgaatagacatgaaattatatttaaaaaatacagtaatgccaaaagtaaattaatatctatacatattttattatttcttaaaatcaatgattttaaactattgttgttacaatatatgtatatttaatttggtttgcatattcccagaaataaacatataatttactaatatttagtgatccaaaataatctaatataattaaagtgataaagaatcataaaatgattatttaaaaagcttcttgaatgtcttacatacaattactacttgaagtagttaatatctttgtatgtgcttagtttttattaatttatcaaagtgacaagtcatgataattagagtgctaactagtctattaataaattagaccacttgttaaaaagacatgagaaaatataaataatatattatgatttttatgatcagtatttcttacaatgtatataatttactaatattgagcttgcaataatgcagtatatatttagtattttaatattgtaagatgtttatgaattatgaattaagaccccgtttcactgttttgaaaaggcatgatgaaatctaatcaaatccttctttgaatagtgtgtttttcaatcgttttagtattactaattgaaaggtttattgatgagtgttatttgttagtcacattttgcatatcttaataaagatttaaactttatgacctgagttgaagggttcaggattgtggagccgctggttggttttgccacataaaaccactgaaaataaaagaatcttaattatgttcttgactagagaactatcatatggtctcaggtgccagcatgatattttctgctccaaagattcaaaaattttagcagagaagtgatgatgatcttcgtgacatagtgtaagtatcagcagtagagaacggtctcgcgattctcatntcttgaacaatatggcatgattttgaatgaaccattaatatgttcctataacaatacttttagaa

SEQ ID NO: 203164 - DNA, 1292 bp, Cannabis indica
ttactcatatcaagcttgagagctgccactcctttacgaccagatgttttgtgcttgattccatggatgagttcaaaagccactagtatgttgtctgtgattaatcgattgggaagaaaagcgctccgagtttctgaaatgacatacggtagaacatgcttgaaccgactcaccaaaaccttcgtgatgagcttggaaatgacattgcagagactaatgggacggaagtctttgacaacttgtggcttcttaaccttcggaataagtgtaattaaagtagagttaagcgaaattggatcagcaccttcattgagaacacaaagaacagcggctataacttgtggaccaacaatatcccaattctgttgatagaacatggctgacattccatcaattccaagactcttatccagagccatagactttaaagcaacctcaacttcgttggctgtgaaaggcttagtaagatcatcattcatttccatagtgacggttgttggaatagcatctatgagggctgcaatagcatcatcatcagtagggcttgctgaaaaaatttcagcataatattgacaggtaacatcagcaatgtcttgtttagatgtaactgtgactcccacatcagatttgagagaaacaattttgttgttagcccgtcttgcattggctttcgtatgaaaaaatttggtgtttttatctcccgattgcatccaatccaccctagatctttgttgccaaaaaaatagtattattaattattaattttttaaatgtatctatttcacccataaacttttttaaaatttaattttttttgtaaatgtttaaaatttaattttaatgttaggctatttaaaaattttaatgattgacttacatagatgcattttacgtttttttttaggagaggcattaatctttctttattttttttctatttttattatttttttattcttttttatgtgtatttattattatttttattctctttacatataatttaaatttattaaattaattaactaaagaaatatttatttaaacttatatatttattttctccttttttctaattatttttccaaatttgttttaaagtcaaataaaaaattgtttctctttaattattttaccaaaaccactaccatgtgtatttttattttttcaacaccctatatataaatattttaagtaaataataaataaaatattttcaatttatatatatatatgtctatattatttagtttttttttttttttttatttattatatatactattaactaa

SEQ ID NO: 203165 - DNA, 1301 bp, Cannabis indica
tttcatcacaacaataaaataaagaaaaatcaacttttgccaacaattgtgcaacattattgccaagtataagacaataagaaaatgaaagatgactaaaagaaaaataaaataaaaaaagaaatggtgtctccaataatacaaaactaataaggtaaaagttatcatccaaacacttaaaaataacgttaataacattaatgcatccgactcaataaataaaacatgcaaatagccgagacgactacaaagagtgatcaaccccaaattaatgcacaaggcttcaacaacaaaaggagaataaacatgattgaggtaaggttctaggttgccgaggccttgacaaggacaacaataagaccatttcattttgagagactttattcagaccagcatcatagttgagtttcaaaacacttagccaaggccttctctaaagggacaccgtatagcacctacctgttgtgacggaacagtcaggctatcttgagcattagtgtagcttggaaacaatcgagcaaacccaaattctaattaatcaacaacaaggctaccttagatgagagatttattattgacatgtttattcatatgttacaaatactatatttctcaaaccaaaacatttgtaagttcatccataaattagaaaattcatagaaatattaactcagaataagtataacattcaaaaaagagagttcctaagttaaggcatcacagcaagttgccctctagcttgatgataactttttggggaatttgccaaactagcaatgtgaagtatacaataatctcacttagtatattttatgtgactatgatagttgcacaatgtaaatttatagtcgttttgcaaccataatagtcttttatagtcacatagtgtaatttatgatcgtttctgcgaccatacaatattattttactaataaatttttttgtaaagttattttgctaataaaaaatttcataaactaattttacaagtctttcagcaaaataataacctttataaatacttttactagaaaaatgacttttaagtatttttcttagtaaaaaaattttgtatggttgtagaaatgactttttaatgaattatattgtgcgatcataaataactattaaagtcgcaaaatggttataaatttacactgagcggtcatcatgatcgtatagaatgtattaaatgagattatttcacaaattttaatatttcacacatatttttaatttaacaaatttcatatttttataaaacactctaattttttaagtaattttatgatatatattgt

SEQ ID NO: 203166 - DNA, 784 bp, Cannabis indica
ttttattggattcattggatttttagaaagatgcttattataactataatatatataattataaaaaaaaatattcatacaagacaaacaaaacttaaatatagaacattttttagtaaataataaactgacacgtgtgcacattttttatacagcttgcaatgtgatgtagcagataatttctgtttttgaataatttattatttaaaaattgttttctcattaggtttatcgatttagtcaattactttcttatttctcaaaaatttgaaattaaaaatataaaaatttaacgaattcttcaaggtggcttctattcttcttcttcttcttttcatcggtattttccagaacttagtttcttctctctgcttcagtctttttgatatgtttcaaaactgcttgaaagcatcgagcggtctcatatcaaaggggctatgcgagttcaaattaggtcgccagaaagacaagatgtcgatctctaataatgggggttgattttacgttctggtgtcaaaagtgttgaatctttcaaaaccatgttctatcttaatccttggtatgctcttatcgaaactctggattaggcttttgataaaacgagttcttcgtagccatattcaaaccaatgttctcctcgttgtctataccttcattgaaatccatatcttcatcatcttcaaggtctttcatcaactcctccacatcgataacatcgggttcttgcactatcatgcaactccagttgattttcttctctgatgttagctctctctctctctct

SEQ ID NO: 203167 - DNA, 1284 bp, Cannabis indica
tatgttgaaatgggcctccataacaaaaatattagggcctttatctaacaattgttcaatcaagtttgtttgtttatttatttatttttaataaattcaagtttgttttttagttagtttcttgtctttagtgatattttagaataaattaaagaggaacaataatatttcaagtgcatttgtttgagatatttcttggggaagttccaagaaacctcagaagatatgattttgaaccacttgaagatgtgggcctaagtgttacaaaattaggggttattgggctatgggtaaactaggtgtgggcctggctcaccttaattagagattgtatcatatttaaatattaatttattatattttttcaaaattaaagatttatatcctaatacatgttaattttaaccaatagaaaataataaaaaaaccatcaaatgacaacttttgttagatacccaacacaaaagcttaaaatttaaactaaataaaatccaaaattaggacaaagcagtaatttttcaaattatttatcttttttttgcttaatttagtaatagtttaattttcacatttttccagttgtacactattatctgtaatattgatattaatataattaagtattacattttatataatttaatataataacttttaaatatagctaactaatcataaaatattacttttaaaaagtgctgagcacaactgtatggatgttaatcaaactgcccgcacggtaagaaaatacaatttaaaattttttatagtgcggtcgtgatttatatttttcctaaactgcgcagtgcagtgcaatttgtggttttaaattattaatatgcgattcaaatcggatcgcaccgcatattataaacatattaatttttatatttatttagatctaatatctgaagactcagcccaaaactcactaattattgtattaaaacttgtaatttttttcatatttattttcaagcttatagtatttttgacaagtgttgcttaagcttcattgtatttatgatagttaaattatttaatgatagttcaaactgcaaaaactacactgcaccgcaccattttttgcaatacattttctacaattttttaatttaacattgtgggtacagtttgaaaaattaaaaaaattacatatacgagttaatttaaaaaaataattaaaaactacaccaccaggaccgcgatcagaaccctacaactgctcactaataacactatttttttttcactaaattttcacattagttaattaattaataa

SEQ ID NO: 203168 - DNA, 1561 bp, Cannabis indica
atagctagtagtactaaatgagggagacatatatttatatatatatatatatttatatattttgtttgtaaagagatggtcaaagagacagtagtataatgctctgtcaatataaaaaaaaattcatggttaattgtcaggaggggtggggaaatgaaagcactgaaagctcctttggtcatcatcatcatgttgttttacagggaagaaatttacagatttctctataaaaccatcataactacactatactcttatatatatatcatcatttctttgattttcttcccttaatatatatataaggaaatttataccatacatgaatctttttttacaaagtttttttatttattcttttacggttttgtattgttttaacgttatttttatattgtcgcaataatattatatttattttttcactagcattttaaataactattttttagaacaacatgtaaacaaagatttgtaaaaaaaaatctgtaaaaatataattaacttaaaaattccgtaaaaacgtaaatcttgttggtatctctgaaataatcccatatatataatatattatatatataattgatcatcacaatactatgccctacaactaactaaatcttttaaggtaatgcaatgtaggaaattaatgaattaatttcatccattttaaagtattgaaatatcattttctatattataagcatttcattttgaaatggatcaataaaaactattttgcaagataaaaaaaaaacattttttccatcaatttttttatctattttttcattccaatctaattttattttctctaaatatacatttacatatttgcttatatatatatatatatattatatatatatataaatgcttgaaggccatatatatataacattttctttaactaataatatttatttaaactgaaattaatttattgttttgaaaagcactacatgccacactacattactgtaggttatatttaatgtacataattactcatttattaactcatccataattaataagcatgcattagccaatatatagctatatgatctatatattgataatattaatattattgtacttcatgtttgcctagctttctaatttcagcatatatggtatatgtaattaatggcattgtcatattaaaatgatgattaatgtatatatatagtattactattagtatgttataataaattaaatgattcaaaattactttcatatatatatagccattttgaaagtttaatttagtttaatatataatagatatatcattatatataaaagaaacaaaacgaacttaatttgatggatggttaccttacgaaaaaatgatagtaactacaattttttggtcaaataaattaaatgtaatataataatggcaatagtggtatcgtgtactatatatcactgcatgtcactttgtttaaaactgtttaaacaatgaaaagagcaagaaaatttgaacttggtttttagggactaaaatggggtagagagactagagaaagatcgtaataataataataataat

SEQ ID NO: 203169 - DNA, 972 bp, Cannabis indica
taagctttatcataaattatttaggttctttttaataagcaaacaaacatgccttatcataagaattttgaatcatggatagtggagaaatagaaaaaaaaatgagaatttttatttattttttctaatttttaagaactaattaattaaataaacatacttaaaaaaatatagtcaatatagctttgtctccctttgtttggattttatatctgttttgcaagacttaaaaaaaacccaaaagcattaataacataatctagttaaagagataaataaaattaaatttctctcttctttttttcttagcttcatataattatcttcttcttgtagctcatatccaagtttataatcttgttggagcttaagcccaaatatttaatatggagatgaagatgaagatatataaccaaattccccttttgtctaggattgcccacaagtcccatataattcctctctttaaggaagactttgccaatgaatgattttcttgttgaattttcaagttgatatatatcaacaataatgtacaccaacaaagtttacttacctttatttttggttaggtattttattatataaattaccaaaagaatagttgttgaggttcaaaaggatgtttacctaaatatataaacaaacttccttccctctcttcttcttcttcctttccttctcttctcttttcatgatctctcataaccctccataaccacccatttttatactttacttgatcattcactttatctagtctctttcaccttccatttattgtaaattggttgacaactacttcacaaaacgtttttttttagctttttttgtggtacctttctacattttctcttaacttcgagatttagggttgttcatataatactcaatttaaggtcgactctaaactaaggcgggttaggcctgtgcttaggacctatctactttagggatccaaataaaaaaaaa

SEQ ID NO: 203170 - DNA, 1303 bp, Cannabis indica
tataaaattaattatagtgacatgacatggtcctacaatgttgatatataatatttatttgaaaaatataaggtttttgtactcatcatttcacttcttcttcttcttgctatatttgtttgtttatttgagaaattaagatagactaaagttttaggagaagtttcaacaagagagaagaaaaacatgggtacttttggagtagttattgcttcaaggaatttcttaataattcacttactatttttccaggtaatattctacaaattaaaatccatttttttcatttcattaattatatatgtatatattgatgtaatgtttttgcagcttggttatgggaatcatcatgatcatcatgaatcaatctccatgatgagtagaaaatacatacaacttccaagcgaaagcaatattggcaataagattgaagaaaaggcaaaaacacaacatgttcaagctcatgaccacatgatgtctcacatggaaaaaatggatccaaatttaatgattttcttcaccacaaatgaccttaaagtaggcaaaacaatgcccatttactttcccaagaaagatccttctactacaccaccacgcttgttgcctttacaagaagcatcatccatacccttttcactaaaacaccttccttaccttctcaaccgtttctctttcaccccacaatctccccaaggtagtgccatggaagacaccctaaagcagtgtgagtctagatccatcataggagaaccaaaacgtgtgctacttctctagaatccatgctcgattttgcacgtggcgcgttcggattagaggatgagattagtgttgtcacaactactcacttgaccaatttgagagtgtctcttcaaaactacaccattttggatgtgcctaaacagatattgggtcctaataagatgatggtggcttgtcacaccatgccttatccttatttagtgtactattgtcattaccaagttagtgaaaacagggtgtataagatcttattgggtggtgaaaatggagacaaggttgaagctattgctgtttgtcatatggatacttctcagtggagtcgtaaccatgtgtcatttagtgtcctaggaattgaacctggtactttaccagtttgccattacttccctgaacagaatcttgtttggattccaaaatccaaatacatctagtaatcttaggggatggacctatatgtaaattgtactagtatgcatgttagttgcctagtacaatggttatgtttgtgtttttccctatgttatatgtcaatatgaaataaaga

SEQ ID NO: 203171 - DNA, 706 bp, Cannabis indica
gagaggtcaataagaagctccttagtattaagaccaaagttgctgaactgactaaagatctgcaggaaatgtcgtccaccgagcagctcgaagcggacattgcttctttatctcgggacgttgtcagtcttcatgacgaaagagagggactccaaactcttctcaacaagttagaggatgagaataaggctaaggaggaagaacataaagccgaagtagtgaggctcagggaaaaggtgaatgccttagagacagctggtctcgagattttttatgatttttggaaggccaatcccgaggcaaactttgattatctgggcccttccaaagacatgtttctcgactaccgtgctgctcaggtagcctacgggaattccgaggcgaccacttccacctcccttaccaatcagagtgttgaggctcttgttgcccagaatgacgatcctccagtcctttcaaatcctgctgacccatacaaggagcctgggagtcctgctgtttaagtgccttctttttatcatcttctttttcctattcaactaataagccttttttttaaagacaaagtgaccggccaagcggtctttacacttggaatatatttttcattttttaaacaacttgctgactgggcagcctttaatttcggacttgaccgctttagtcattcaatgaatttcgttcctcgtttataatcatcgtgcaa

SEQ ID NO: 203172 - DNA, 865 bp, Cannabis indica
atttctttctttctttttttgttctaaaaaaaaagcacagattcattccaatatgaaagtctctaataagacattttatgttgagcaaaaaagctaaactaatatataaagaccaagaatccaagatatctgaaaaaaaaagttgtagtgcaaattttatattatactaccatgttaaattactgtttttttaatattcattatataaatatattaataattgtggattagatagttaacatgtgaatcaatattcaatttgtgtgaattttaaatttttcaatgtaagtattggctttttgcaaatttgattatattgattatgcaaataggattaaattaagcatattgaattggatcatacaaattgatttggataaaaaatttgtgaagaaaaatattaaaagtacctaacaacacttaatgtaacatatctattagtaaaattaaacatcaaatctcgcttgaatttttgaatttataaaagggtaaataataatgtaaatactcaaaattttgaatttggtagaagtgtaatttttttctaatttcgttaatatagacctcgattgtatcttaaacaagacacatgtaagattcaaattctaaatcattaggtttggacaaaattacaatgttacaaaaatcaagtatttatgccgctaaaaaataatttgataatacttatatatatatatattttgacaaaaatgagaaaatttcattaattcaaattattcatcaatacagaaatgaactccacgggagcattgctcacacgtaaaatacaatcagctataaaacaagttagatcttcgctagaaagtagagactccattgtttgcagaccgtttaacaaacttta

SEQ ID NO: 203173 - DNA, 1274 bp, Cannabis indica
aacctaaatggttgaatttaaaataactcttaaaatagttgttcttcctgttcctaatgttgaattttatgggtttcatatataagatttttgtttttctccattaaagagaagatggctactatattttgatataatattaaatgtatgcaatccttttatttgaaattaatgatatgaatatggttattttagttaacttattatttttgtacgtataatgtagggctcaaaataatgaaaccgatcaagagaaaaaacaatgactcatcaaaaataagtatagcttcaacaaagcaaatacagaaaaatagcaaaagtgacctaaaattgatagtgaatgataatggtcttccaattaattcaatgaagaatattaattggcttcccaatgatttaattgtggatatattagctgatgttgctgctacatcaatttctgatttcttcaatgctaaattaaggtaactctatataacttcttttttatttattttttatgcttattttaattttttaaaaaatacatggtcgaaatacttttgaaaatagtcaaaatgagtaaaagagtaaaacataagatcacaaataatatatttgtattaagagtaatttgaggcaaaagtacttaaatttaattttcggttgtaaataaaaatttaagtttaatttttagcggtaataatacttaagttatatttctggaactctgtagttatctaatcgttaaatgtcaagtcattattcatgtgtcatttttttatttgtatgtttaaactatttttaaaaaaaaaaataattaaagatatgtatcaatcaagaattgctacgtgaaaatttacttaacatgtacttataaaaattttagaattataacttaaatattattactttcaaaacttaaatatttatttacaattggaattataccgtaaattactcttgtattttttttaaaaaaaaaaatgtgcataaaattatacaaatatgaaatatataattttatttcaaacttaattagtattgtgtcatttcttttgtgcagttggaaattattcaataaactagccaaagataatgatgaatatattcacaataaactatcacttgatgagctttcttgtcatccatgggatctatacctatgcaaggaagcaattgccctcttcatgaaatgcctacacagtcaaaatttagaagctatgtatagacaaggagtggtgagtgagtagtccatctaattttgttttattagaataataaacatatatatg

SEQ ID NO: 203174 - DNA, 882 bp, Cannabis indica
gctgataaattatccaaatggggctcgaatgtgactgggaatttttagctctgaatcaacaaatgtcgtactgaattgaagaagttgaagaagaaacgagatgctttttctgtccaaagacatggtaaagtgaaaaaggagttatttttggttttggaccgaaaggaagtattttggaaacaaagagcaaagcaattctggttaaaagagggtgatcaaaatagtaaatatttccactgcgctattagcaatcgccgtagcttcaaccaaatttcaaaacttaaagacaatagcggtaattggaagattgggaaaatggccttgctgatgttgctgtggagtacttttcctctctttttaatgcttcaagtttgggcagtgatgaagtggttcagtgcattcaaaggagggttacggctcaaataaaggaattccttcagcagcaagttgttgtcgaggaagtgagaagagttgtgttcagtatgcatcccaataagagtcctggtccggacggtatgacacctgcatctaccaaaaatgttgggacatcattcgtattgatgtaactgtagtagtacaaaaattttttcacacaggggagtttgatccaggttgtggagatcctaatgttattctgatcccaaaaaagaaagtgcctgaaagtatgggatatttaaggccaattgctttatgtaatgttttgtataaaatcattactaaagttatggctaatcggatgaagccttatatggataaaattatttcagaatctcaaagcgcgtttatctcgaggcggctcataactgacaacattttagtatcctttgaagtgctacattatttgaagaggaaaagaaagggcaaggatgggtttatggcact

SEQ ID NO: 203175 - DNA, 1002 bp, Cannabis indica
aattatttacagttcaactctattattctgataaattatttatagcagagttttaattttcaggtgacggagttagagaagtttgagattgtccaatagacatggtagagatctggtattttgctctgataccaagatagaaaatttaaacaaaatgaaattatcaacccaacgagactaaatgttgaatgtttattatatagcaaaagtgaatacatgaatgaccacttaggcactgccacttggaaataacaaaaatcaaggcataacaaatttttgtaacaaaagaatattctggaatacaaagaaaggacagccaatcattgacaatgattgggtgcagctgcaatatcagaggtgcaacgtaccctttacacattattcttaacagtctgtgatggtctatttgactaagccagaaataagatatcactaatgataaacaataataaacaatagctcaataacaatatcaatatgaagatagaagtaaaaattacaataaattatattttataccagccaaattaaagggctctgctctgaaccttgtccacgaactctatagagtgtcttaaacaaaaggcatcacttaattaaatcttaagagcttgctgtggtttctgaatacaagtatatgcagcaattaaatggtatttcctactcttcttatataagtaatatgaaaataaggaaaagaagaagtttttcatgaagccaatcagtctctccaaaataatcttcttagtaaaccgcggcgacgagatctacgttctatatcctcggctgaaatattccaatttccaaaatcatcatgagaagcatagaagaagaaaaaaaaaaaaaacatagatagatacattattccatgttcgtaaattgcctagatttgattcagtttatgagattaaaagggtcacctttcaatcttccagcttggtacaaagcttcttctgcgatgggtctccattgttcggcacatgagtagttgattcccagacc

SEQ ID NO: 203176 - DNA, 1018 bp, Cannabis indica
gctttgtgttacaaacaagaaacattaaccacttgcagctgactcactaagctaaccaaccacttaacagatttctaactagctcaactaattatacaaaaaaaagaaatagctcaattaactaatctaataatgttgaagagttattctaaaataaaatttactgtttactttttcgaactgctcttaaaatttagtacgctagttttcattttctgttgtacattaaatttcaaagctgtaggctgggatattcactggttaagtactgtggcacattattaggtgctctttgggcggaatactggatgtgatgtccggttggtggtggcagaaagtacggatggaggccgtgctgttcaagttgtgctagagaaaaatggaaagaggtatgctctttgaatgcatttttagtctgaattagtcagtgtcgtcaaaattgagagtaaagaatactggaatatatgtccattctgctcaattgatttagaaaatatcgtttataacttgtctgtttcttttagatctgcatgcttatttgaagttaaattctgctagtggaaaatgctctctaggcatcgaacttttttttctttcactatggatcttttaaattatgattttgcagtttgttcaagagtttttatgtagattgttaaactaattggataacatggaatgtcattttgaagttttactgtcataactctaaacctttcaggcaaccaaaaataaataaacatgaaacactcatttgtaaccttaaaaatgtacatgaatatttgttaagaattatttgacgatccctggaagctaatttttcatgtagcttctcttttcttgttttcagttatgctgttttctcttattggcatgagttacagcaagtcctcttacttaaattttacagcactgcaacctatccatattcattctctaagcttgacaggagatttatttaaacaattatttttaaattttaagtatggtaagacattaagaactttattttagtttc

SEQ ID NO: 203177 - DNA, 1208 bp, Cannabis indica
agtcaaaaaaactgtcattaccttcggttagagcagcttcaattcgatcacggcttcttgtgccaatacccactctattccataccacttgaattttaggacaagtaaccaaggcatggacaattgtctcctcagcccctttgcaaactggacaggaagcatagatgtttactctttttgttcgaagttggcagagagtaggaagacaatttttacaggcacaccacaccagattttttatcttgggaggcagtttgagacgccagaaagcagtccaaaacttggctgctatgtcatgatttccttcccatcttccttaatcgacttgcaacaatttatacgcactctttacagagtaaaaacccgaagattcttgcttccaagtcaatctgtcctcaatagaagaaaaatggggtaacatattgattaattctatctctgtcattgagcaggtcttctaatatctcttgatcccatctcccatcatcactcaaaagactttgaattgttacattctctagagccgagtgtgttgaagtaacaaaaggatttccttcgcaaggtagccaaggctcattgaaaatagtaattgtactcccatcaccaatacaccattgaactccttttcggaccaattgttgagcttcccaaacgctcctccacacgaaactcagattatttcccagcatagccgagagataattaccatgaggaaaatatctggctttgaaaatctttgcaaccaaagaattaggccggactaggagtctccacccttgtttccccagcatagccaaattgaagtctcgaaggtgtctaaaacccataccacctctacctttatgttgacaaagtcgatcccatgaaagccaatgtattcctttcccgctcttattagatgattgccaccagaacttggtcattactttttccatatcccgagtgatctccaaaggaagcaaaataatgatgttatcttaaattttctttacacatataaatcaaagaaatcattaatataggctgagtagtatataataatagaatcatataaactaacgtacaatttaaacaataaaaaaatttgagattaatatatcttacttgtattgtattacgtgatacttgcaaatgtaattagtttaataataaatatggatgatgagattgtgtgatttttttttttgtacagttttattagctcattc

SEQ ID NO: 203178 - DNA, 514 bp, Cannabis indica
acaatcctaaatagcctattaatgaattaatttgaaacttttaaaattaaaattgtacttgaaatttagccacaaaaattgtacttaaaattcaatcacaaatatttatatatgttaataaatcaatgagaaattaaaacatttacattgtataattttttaatcttcaacttcatcttttagtccaacaataaagtataagtagataatagttttggggtacaaattaataacaaatagctttaatatttttttttttatttatttaagcgtttacatattacaaccatgcataatttgggactcgaacccaggagatccaacacacacgcacactcctatggccacttgagctagcctcaagtggttcaaatagctttaatattaataaatgagaaacaaatcttaatatttttttttggcatttagaatgaaaagaaaaattataaagaaaaacactcaatttaataaaattttctacatcaaactttaaaaattaattaatttatttttt

SEQ ID NO: 203179 - DNA, 2574 bp, Cannabis indica
tttttgttgttttcatattgtttaaatatttatttgggatttttgtatggtatgctatgttttggcatttttttttacaattttactgtttaattttgtatcatctttttgcaaactgtgtcaaactttccttagtccctatattgacatatgtgtatgttatacctttttttattaatcaacaaaatttagaagaaaaagttattgatgtgatgttgtatacattcatggcaatttcttttttaaaaaaacaaaatgtaaaatataaatttcaatatgatcactttgtaaccaccattgttatactcttctttttcttcatccttttttcttgttttttagtttttgaaattttaatattttgagtcgtggattggttttgagcagtgtaattgggtgtttgatcagtttttctagtttatttgaaatctattttctctcctatttgacacttacggttccctcaacttctggtaagagtcgcaacgatcccatgcaccttctgtccactcatactttccatattttgcaaggacatatctgattcaattaaaatgaatgtaactgttattatttttataagtagatgataatcacaaatacaaatgcaccatatacttaccctggatctaatgtactactgaaaacaaacttgtaaaacccaaaaagtttaaggggcatcgcatccttagtcttgaacggcccaataaccactctgcctaacttaataaattcctcataagccttctcattaaagtcatcttcaattaaagccacattttcagtttgtgtcttcttcactttcacgagggaattgcatttgttctgaaaagatgcaacttcaagtatatcaaagtgctcatcctcaatgttcttctctccataacattctttaaaatctacattttcctccataacttcatttttaactaattttgtagcagataacaaaggtgttgatactgattccaccacattctcctcgaaatgccctacagtaggtgtcttcaacatggaatcatctactgcgcggctgtactctggcttctttcccacttcctctacaatatcctcctccaaatctttctcactacgaccttcaccttctcctttctccaaaagtttcaaagaaaatgttctaaagtgagattttaaccccttcgaaaagtacaccttcaactcagtggttgcgttgaaaaagtgttcagtactctttgtcccttccgagttagaatagtagttgggcagtattacaggagttgaagtcagctttatctgttaaacataacaagtttaaaaaaaagtaaatattgaatgtcgaaataatatatatataaaaaatcaaatgaacacaatataaccaaatgttgattgttgggacccccgttgtttttgatccatttgtaagtagactttcattgtttattacaccaaaaatcaatggggagcatagttcggtcaacataaccaaagttccactcaacgtgagtcaagtaaagcaactatgacaaacacacaatgtattcagtaagagattcaaataataaatcaaaaacataaaatatcaagttaataaacacattgacataaattcaagagaaaaaaaaaaatcaaagtacctgcaagaaggtggtgcagccagacacattcttagtatacttatttcgaaatctaaaaaatggagttcatcaaatacccgaacccggtagttgcctagttcttatggcgaatgtcccttgtaattaatagggaatgtagataccctgaaatcacatcgcagccggttttaggcactaggactttccctatcacaaccaaacaaaacttaatcaaaaataggctatctgcttcaacacattctaacaatgatttctctaatgttgttaagaacacggtgtagtccacaatgttcaaaatcttctccatatacaaaatgtcgctatcaccctcggtgattacaggatcacctccatcctccacacccataacatctccaaacatggtggcagacaagtgaatctttctaccatacaaatctagtatgctagtggtggggtcaacatgtttgattaaccaactcactagttgggtgtcaatgtatgggccatcctctctaataaatgatccaaatccagcattgaggatcacatcgttttgctctaagttcaagtttttgcaaatacgaattaaacacttgaaggagcatcgaccgtgcaatgacgcttcttcaattctgacggtaacctcttcctcttcaacctccaccttcttccccttaccctccactacctttggtttcctccctcttgtttgaacttgattcttcgtgggagttgggttagggtcatatttactcactcagtctttttatcatcgctcaaacttttaaatttaattttcaatttattagtaacttgaaatatggggaaaacttacatcaattccagagtacatggaaagcatgttaaacaagtacaatgaattaaggacaattgattaaaaaaagtgttatacccaaaattcggttgcacttcaaaagttgatacgtgccctgcagtggaatatgagccacct

SEQ ID NO: 203180 - DNA, 575 bp, Cannabis indica
caaggcagagaaggaaattacaagaaaaaaaaataatttctcaatattttgaatcttctttcagtgatgctaaagatattcacaaattcatgagttataaatcattgtgaacaagttaaaggttttcaaaattgagctttctgaagtatttcaatttggtgcaattgcgacaaagttgccaccaacttgaaagggctttaggaaaagaatcatccataaaaatgaggattattctttgatagagatcccaaatcatatctaaatcgaagatgaatcgagactgagagataagagaaatgtgaaggagcctggagaggaggtttcttaggtcaatgcagtctcaaacaagcattccaaaagaaacaatcataataaaggcggtgtaaaatatttgggtctaagaaaatataatagccaattcaaagaagtgagaggctattgttttgtgtgtggaaaatctgggcactacgcaagagattgtaggcatccaatgaaaaataagattaatgccatagaagatgaggatgtgattatgacatagtatttatgttgtttttgttggaaatttttttacc

SEQ ID NO: 203181 - DNA, 737 bp, Cannabis indica
agtaaaaaaaaaagaaaagaaatggtaggaaatttcagatctagaatatatataaaaataataataataataaaatagtacagctatagtagctagttatagaataattatacaaatctaaataaatatagtattagctatctagtaataaaaggtaaaattagatcccagatctatggtacaaacacccataaacttttactaaattagtagcatttttaaataaaataaaaaataataattttattattttgggatttaaaataattaaaaaaaaaagaataatgagaaagaagggtgtgaaaatgtagtggattacagcttataaaatgggacaatatggtaaagccctttgtaacagagggttacccacaataatacaatatgccaacatcacatgtagtcatggacccttcaattgggtcccaccaaaaacgaatcttctaacttctttttttttatttaaaaaaaataaataaataaattctgtacattgtctgtaaaaaattcatggatgttagtaccagaaaagaaccctgttccttttaaaaataaaaaaaaatattacactcatttttattctttttttttcctttaataattagaaggttcgttataatctaggcaacaaaaatgaaaaacaatttatttttatatatcagtgatttgtgttttgtgttttttaatttttatactataagttaattaattaagtaggtttagtttttttttttttt

SEQ ID NO: 203182 - DNA, 546 bp, Cannabis indica
gagagagagagagattgatgaacaatacaaattttaaatttaagattgatgtttgtcggagctttgagaccaagcatttgaagataggccaaaaaaggaagatgaacatggtgaatcagatgaatgaatccacaaaacaaattcatatacttttgctttgctattgtttttaattaatttccttttttataatatacatgtactagcctacctaggctattagttttgtattaaatatatacggcccacaacattttttgtcttcgagaccataggaagggaaaggatattaaatttaataatggttgttatacacagccaaacaaaacaaatagctagtatatatgagtgtaaaaagcaaacaagcaaattcactatattaattataattataatgtccactccaccatacacagtcacgaggagccaactccacattatttgttactatttgaaattgtctagttagacaagactcatgcttcattgatcttgttttaatttcttaatgctatatgtttgtcatcacatacgcacaatatatat

SEQ ID NO: 203183 - DNA, 574 bp, Cannabis indica
tttcaaatgattttaatccatcaaattcaccatcaccaccaactagactagtagttgttcaagttcaaactcttcatcaagctcggttcaaacaaatctgaatagttttattggcttgtacaaatattatgagaatgcaccttttatgttgaccagaaaattgaggaagaacgtggaaaatgcttcctggaattggaagcattaaaatttgtgtgtggaaagcattcaaatccttctgttgaaagcttctcttaattggattcgaacaatggttaacctcgctgagtcatgggattccagttgaaaaaatatgccatgcccttattggggatcagaattgccccaatctcgccatttttaaggttgactttccaatcttaatttccttctcttcctcccatatctttttatgagttcctcgatatttttgatacgctctccaaaaaaaaaaattgtaactctgttctggaagatttggcaaaagaaaaaccaattcgctcatgatggattgcctacgtttgattaccatgtgatatctagttcgttggacttcatgaaaagtgaccaacaagca

SEQ ID NO: 203184 - DNA, 572 bp, Cannabis indica
tgaacctaaaattttacaaaacaaaaaaatttccacaatcaatttctgtcgaccacgaacagcgacgaacccttcaccatccagaccttcactggctcgccggcgaaaggggattccaaagtcgagatccacggtaagaatgccaaacactgagaatcatgacgagaacaccaagccatccacctacaaagtaatgatcgagagagaaaagcaaaaaaaaaaaacaaaggtgagcaaaagttgagactaccggtgtgttggggatctcggattcagggattttgggggttgtggatcatggatctatgttcaccggaggcatggggtgctttcctcgacagtctcttgtccaaaaagggagaagggagagagagatatatgagaccacctgtgcattttgggaggcgtagatcacgaatctgaggtccattttgaccatccttcgtcagagattggtcgttcgaccttagaaagcttctcaatgagagaggataacaagaaaaaaaataatgcggctgacgagagagagagagagagagagagagagagagagagagagagagagaaagaag

SEQ ID NO: 203185 - DNA, 563 bp, Cannabis indica
ttactattatatataacaagttgtaaacctaacaacattattatatatgtaatttttttttattattattaaaaattgtatatgttttttttagcaaaaaataaattttaagtttaattttttattaaaaaattatgatagcattgatgctatgtatagcattggcacaaattcttataataacatttttttcactctaatagtataacattttaacattttgttacatcatctatccatctaaacaaatatcctcttttttttttaccattgaagatgctttaatatgtcatacaccttaaccaactaagctatgaatatttattgtttactatacacttaatttaacttaaataaaagcttgataatttttttttttttattttgggtctcgaaaaatgtgagtcctaaatacacacctagcccgtctatagctacagccggccctgcatatgagtccccagtcgtcttctatcagaccaaatggttataaataagtttgtgtatactaatagttagcatttgctatattatttaataaaggaaggtctgggtattgatta

SEQ ID NO: 203186 - DNA, 1149 bp, Cannabis indica
cactacagatttgacaaaaaattcatcacacccaagatcaatgaaacccgtgcctatcttgctgagattgatgaccaagaagatcctcaagcctattccagttctgcaattcaagaatttgcagatgaccacgactggtacgctgacacaagagcaacaaaccatattgctcaaggcatggaatatctggaatctaaaaatccatactctggatcagacaccttggctattggaattggaaaacgtctccccataagtcacattggtagctcctctatctcttcttctaatggttctttacatcttaaaaatgtccttaaagtccttcaaattaagaacctaattagtgtgtctaagcttactagagataataatatttttctagaatttcactccaagtgttattttgttaaggacaaattaacagggagagtcttgatcaaggggaggcttaaaaatggcttatatactctgtctcacagttcctttcccacctccaaagttcatcttgattgtcatcttgccacaaccaataccaagttaaaattgactgctgtgtcttctgcaacagtccctgagagttctttagaagttacatcttgtattactgagtcttgtaataaaagtactgctccaacaacatcttcctcatgtaatagtttacctattaataaaaatacaacttcttttaactccaataacactagttcagttctttatctcactgaaaaatctaatattaatctgtggcattcaaagttaggtcaccttgcccctaatgttcttgccaaaatcttggccacattacaaataccaactaatataaaagacctcaaattctgtgaggcttgtaaaaggggtaaaattcacaaactcccatattccctctctgattctagggcctcccaaccacttgaattggttcacactgatgtgtggggaccttcccacactccttctaaagaaggacataggtactacatacatttcattgatgacttcggtagattcacatggatatttccattatcacttaagtctcaatcatacaacacatttctccaatttaaagtgtttgtcgaaaaacaatttggtttacctatcaaatctgtccaatcagactgcagaggggagtatagatccttagca

SEQ ID NO: 203187 - DNA, 991 bp, Cannabis indica
ttaataactataatatatattttgaaagattgttattaggtattatatggtattttaacactatataaatgttgcgcgttgtaattggttaacaattttaatattatttattaaatcaaattatgtgagatattaccgttgtttagtatctttctcaatgtcatacactgttattaatgtaatttcgtattactaactaatcatgaaatatcatctataaaaaaagaaaaatgctaaatagcacagtggtgtcttgcatccttttatgtgtcaatattgctattggtcaaactacgtatcgggtccactataatttaatataatagcttttagggagtatcgctaaccaatcataacgcgacatatcgagaaaatactaagcaccactagtacctaatagcaatcctcattaaaaaaaaaaatattagattctaataatactatcatctaaataaatagctattcataaaacataaataaattaggacttttattatttattaattaaaaaaaatcacaaaaagagcctatagcaacttagcaagcagagcattcgtgtaaaatcagagagttaaagagtttgaagttgtcaagtgtttctgagtgttataataatttggtagagttagtatatatatagggaatagtactactcctactacttcctaaaactccaatcattttcctcctttttcattctcataatcttaaattatttaattattttaatttaaaagtaataataataataattaaagggagtttcttttacagtttctttgtctttcacttctagttttccggcgacagaggaggaagtagaagagtggaagaaagaaattcctctgcttctacgaaacactctccctctctatacccttttttcttttatttacaatacccattggaaatgaactctttttaattactctctctctctcttttctctctcatatttattatttttcatcaggtactctctctctctctc

SEQ ID NO: 203188 - DNA, 607 bp, Cannabis indica
tcttgctgagtccttgtgacttagatcaattatgaggtgatagtcttctccaacaatgtacatattgaccccaccggcctgtgtgctgaattaccaggagttgttttaggccggctgtatctgctgtgtattttgattttatattttgaattgttgtcgtatataattttttgtaaactttttataatagagatcctcggaacatgtttttaatgatgttatgatgctcgattttagtgttttattttaatcaaactttttaatattatcactgtctttaataattaattaatatattagtattaaactagtttgagagcgatgatggagttgtcttttctcggtagggtagaattttctttctgatattaattaggcctaatttataacgtggattaataacgtgtgtcttatattttaccagagaaaagatcaggaaagataggtataactggcttggcatccaaagatccagaaaagaaaacatgcaagttttctggattcttctgaaaatattaactctgcatgccctacatattaaagtttacgtactcacattattaatgttcacacttaatttgttcaacgccatgagtactactactct

SEQ ID NO: 203189 - DNA, 2318 bp, Cannabis indica
aataaattgatttctttaaagttctttagttttaacaattaacaattttgccctctaaactttcatagtactgattttgcccctttaaatatacttgttaaaaattttccttaaacttttaccttaaacttttacatttttcagaaagagtaaattgtagcataacctccagaagtgtagataattgcaactaaccaccaattctcaaattttgatggtaaaaccacctaaactccgaaattgttagcaaaaacaccccttcgtccaacagatcttgttttgtgcttatgtggctcgggagcccaatcgccaggtagacttgcaaatgccaagtcacaaaaatgccaattatgtggcattatgcatttaaaaacctaaaaaaataatttgaatacaaaattaaaattaactaataatatatttagaaatataataatatttataacggaagaattaaaatttaaaacagaagaattaaatcgaaggttaatgaaatttaaaatagaaaaagaaatgggtaaatgaaattagaaatcctttatgaatagaaattcccaaaacataaaacctaaaacaaactaacctaaagacaaagacgcaataaggaaacccaaaccagtaagacatgaatcaaagagtaagcaaacccaaactagtgtaagaaccccaaatcaatttttcgtaaaatcgaaggaaatccagaaacatccattgaaaatcaaagaatagcaaaaaggaaccagacgtcgttgatgaaatggcctttctttgccgaaatgaggaggatgctcctctagactacggtaagtgttggattttatttttctagtgttttttagggttttgaaaaatattaggtatgagtgttggttttatagtggtttttaattccagtagtggatgtaatagttgggttgtgggggtttgttgatttgtgatccatacaaaggtcaagtgggtagatgggatattaaagtattgcacttttgggcagaaacgaagtagtcaaaagctgttagggagtctaattcttttatcttctgtaataggaacatttgcacatgttttctttttcttcttctttttttttatttttttttattttaacctgttcctaggatgtggggcctaatattgtttagggggttttgtcaaagtattggataaagttgtttggttttgcctagtatacatctatccttaactctgtcactttatattattcttgaaagtttgaacttagataatttcactgtgaaattattccataggggtttttggtttacctgttattgcaataagatgtatgagggtggccgaattacctattttgatcattgtaaggatgaagggttcaacaagctgcatttggaagaaatggctatgggattgggataccagttcccatttggatttcttttaagcctaaagggaaacacctgaatatgagatttagggtggttgaacaaaaaaggaaactgatatgatcttggatgatttgaggtctaaaagccattgggaggccaatatatatttgatactgccagattcacatttgaagtggattggtatttggttgaggatgctgtaaggcataatctggaatcaccatcatcaaatttggagaagtgcactttggaggagctgccatcagattgtggatttattgtagatgttattgtcaatccacatggtcatcatgaccccaatgacaaaaaatttctcaagtggggagatttagcagcacaatgggtggatgaagaggttgattctcatgactgcatcccccaaccgagaaatactattcttgagacaataacaatatcatcattgtcatctaagtttgagtctaaggaagatgatggagattgagatgatgaagatgatgatggagatgatagtggagatgatgatgaagatgatggagttgatggagatgatagagatgagggacatgattcagatgagggtcccgatgaagactttgagaatatgatggcctttgctgaggagcatttagcttatttggatgatgatggaggcatgcctagattcccatacaacccacccctcatgcaccacaaagtcctcctctaccagatattgcacgggctgccaggttagaattatactttttttatgcatgacatagattttaatgcattaagtaagttgatattattggtaaaaaatgaataagttgacactgcattttacaggaattaagtggattaactagtgattcagaggttgtgattgttggtgtaaaagaagctttagaggagaccccaagaagtaaaagactcagagagaggagg

SEQ ID NO: 203190 - DNA, 964 bp, Cannabis indica
aggacatgtgaactaccaaaggtaattaacgacacatcaattgtattagttcctaaaaaggaggccccagcccttgtcacagacttccgaccaatagcgctttgcaatgtctcttacaaggtaatctctaaagtgcttgccaatagaatgcgccacattctcaacaaaattatctcaccaaatcaagcggcttttgtcaaaggaaggtatacagccgaaaactctatgatcgcaagagaaattgtccattccatgtgcaagaagaaggggaaaaaaggcttcatgatgataaaacttgacatggaaaaagcgtacgacaaaatggagtgggattttgttatctcagttctaaatacgttggggttccccaacttgttcacaaagtgggtaagctcttgcataatggtggaagacatcaaactcctgcttaatggtgccgtggctggtcgaatcaaaccggagaggggattaaggtagggagaccctctttccccaactctcttcattctcggggtgatgtgttgtctagattaatcattaacaaggttgacaatggtcaaataaaaggctttcgaatgggaaggaatggagtggtcgtaagccacttattatttgctgatgacattatcttgttcgggcaggccacaacccgtgaagcagcctcttttatggactgccttaatgaatatagcaaactgtctggccaaaccgtaaacatccacaaatcagcggtcttattctctaagaaagtccctgcaagaacatcgcaagcaatatctcagcttttgggcatgaagcggatgtctaaaaaggcctcttacttggggatccccttgttccgatctctaaagcgtacagcggacacaaaattcctagccaaccgggtgctacatcgagttcaaggatggaaagccaagcttctctcatatgcagggaaggcctgcctcgttaagaccgtgggctc

SEQ ID NO: 203191 - DNA, 1477 bp, Cannabis indica
atttagtttatagcctcttgttaaatgtaatctagttttttttttttttttttgcacgttgtcaattattaattaccaactagttttgtgtgagatccttaaagtgacataatatgctttagtgtagtttagtcactctaacatagggaaatcaagtgtatcatactagtgatttcctccgtgttaaaattgttattagtttaattaaatattgagtctcatataatttaatgtaataacttttaaggactattaccaactaattacaagacgacatttttaaaaagtgttaaacatcactaatacacaataacaataaatgaagttttatgtaataaataaattatagaatattaataaataacaataataataataataataataataataataataataataatatttttaacgcggttcttctcctcgcaacataaataataatcttatgatgttttactttgaagataactttttgcgtctaattataatttggaaagtacttcttacgtccttctgtaatgttgagagaggcaaacgtaggacactgtcataatgtgataattctgagattaattatagtgaatgtagttgctttagtcttctaacatactcacgagtatgtggggtcaatgagctgtaagctttgaaataatttattatctactccttccaactcattgttgttttgtagcatattatgtgtatcccaaaatgaaccttttacgttgattgctcatctcgcttatcttataaaacagtaattattattcatggctcgcctttatctttcaaaagataaattcaaatattttatcaattgtattttttaggcgagtttattgaacgtatttactgctttataacatgagctagtatatttttcaaccaattcatacgtgtcatcaccatatatatatatatatatttttttttgagaaaaaacctgtatccattagatgaaaccaaaaagtacatgatacaattataattgtaaagaggaattcttccacaaagcttcctgatctagacctaaagctgttctagctaaacaatgggcagtttcatttgcccctcttggaatgtagctaagaaaagctttaggaaaataagatagcaagctcttaatttctataacaaaagtgttaagatgcaaattatgagtgacatcaccatattatttactcaaaatatgaatataacaccttatataaaaataaaatatttataaataaagccattagaaaaaaaaacaattcttaaataaataagtgatatgaataaagaattatatatatatatatatataaattcttaaaaccaataaaacctcataaccaaccatgccgcaggcgtttggtctgaattaaccaaattgccaaaatgacctcgttgattattgtctacagcagtttaaattattgcggtgataatttaaaacgaagtttgccagttctaataaacaactctactg

SEQ ID NO: 203192 - DNA, 665 bp, Cannabis indica
tcactactcttactgctcacattgaggaaactttcatatttgcaatatttttgaagcaaacatgatacccacggtttctgctcttttgttgccagactccaagccaactttgtcaataaagctttgttcatatcttcacatcttctaattcctagcccaccagaagctttcggttggcaaatccagtcccaagcttttagagcaaggaatctattcttctcaacatttcccagccaccaatattttctcatgagagcatcaagttctcgacaagtagaaagaggaatctttgcagtagacattgcataaatcggcatggaggaggtgactgatttgattaaagtgagacgcccagcataagaaataagtttcattttccatccttcaagcttgttgaacatactatccttcaatcttctatagtcttcttttttccttcttttgaaaacaaaggggttgcctaggtgtctctcattaccacgaacaagatcaatgttgagaacacccataatcttatcttttaatccaccattcatattttttgaaaaaagaatactggatttgggcttgctacacgattgtcctgaccacttctcataaatcgaaatacaatccatcatcatgcttgcttcttttgtgttagctcttgagaataagatagtgtc

SEQ ID NO: 203193 - DNA, 541 bp, Cannabis indica
tcaagcttcagagccatataacccaatcaaagtgtagattaatttagtagaatattataataatgttaggtataaatttaacggctaaactctcttaactatcatttcatttgtatttgaccttttattaagtttaaattttagtgataaaatctttcaaattattgaactgttagtaaatttaagatgtcatccggttaactgctacaatgaattatatgtatttattgtattcactcttatacacgtgacacgattatattaataacttaatattaatattttaaattataaaaaattcattttacctcaattttagatactatgaaacttggaactagctactcaaacatgtaactttacttttaaaaaaattatagtgacaattttttttattgaacaaatatagtaaataaaaaaatcataagctttattcatattttttctaaaatttatagaaaggatgccataactaaacgaacaccattactcaaaaaaaaaaaaaaaaatcttccatataactttttggataggaaaatat

SEQ ID NO: 203194 - DNA, 594 bp, Cannabis indica
tagtaaattaattaattaattattcttcattggtaaagatgaatcctcaactactttcttcctatatgcatgcgttacacgttttaattcactttcgttttgctgctatgagaattgagagccacgtactataccatattactacataaatacacagtagtagtacttgaccttaattaactcaaatactgtagtcatgtcttcactatcatccaactcactccttcatgacttagaagatcaattaccatccaattataaaaaagaaagagaagatttgccactaaaagagatcccaggaggttatggcttgccctttttcggtgccattaaggatcgatgggatttctactacaaccaaggtcaagacggattcttccaagcccgaatgacccaatacaaatctacagtcttcagagccaacggaccaccaggccctttcatggccaaaaatcctaaggtcattgtccttctcgacgctgcaagttttcccattctcttcgacatgaccaaagtcgagaaaaagaatgtctttgatggaacttacatgccttctactggctttaccggtggttacagagtcctctcctttct

SEQ ID NO: 203195 - DNA, 699 bp, Cannabis indica
aaacttccaaagatgattactttacagcaatccgccacatctctaacatcgtatagcgtgatttctacatggattgaactttcaataagttatcaatctccatcaactctgaactcgtctatcgagtcctccgggcctgttctaaatccagcattgagtcactccgtttcttaacctggtcttgaacccaccacccttcttacaaacccacaaccatcaagctggaggagctggcgcgaactctcatccaaacaaaaaagtatgagtcaatgtggaaaatccttcaacagatgcagacctttcatgacttaattgtctcttccgataccatttgtttcataatcgagaaatatgggaagcagggtctcgtagactaggcagtcgaagtctttagcagagcctcaaagattttctaatgtcaccaaatcatcgagctccataactcctttctcttctcgctctgcaacgtaaagctctgtcatggtgcttacacattagtatgaaggatgataagaaaaggagatgagtgaaaaaagaaataaaaaccatttattctgcgtgggagaatgtccacaatattttccctgaagatggtacgaattatgaagttctatcttaaaaccaactaatgataagtggagtaactcatattcttatatatgggtctataatctattatttatttcatgtgggacaata

SEQ ID NO: 203196 - DNA, 1196 bp, Cannabis indica
gaatactcattagctttttagtaaaatttgaagtcccatctccttgattgagttgatgggggtattagttgggaaggaggaagagagtaaaatttgattagctgactgacttgactgttggattaactgtaattggatgcagttatatttgattgtaataagaagaaaaccttctaaacaaattattttttactgacttgattgttgagctgtgattgcatgcaaatatttatatttgattgtaacaagaaaagagaatcttctatgcaaatcatggtcttctttggcttattttttatgagttttttttttagtttttaaaattaaaaatctcctaaggttttattgctcttaaatcataagttgagcatgtaataagaaatatgttatcattctgaatattatcatcacattactgataggctctcttatgaggagaaagaagatctggacccctgattataatgaaatttagaaaatcttgttcttcatgggcaaccttaagattaaggtttaaggtttctagtccagatgatatgtcagtcctcttctttaagcgttattgagatttggtgagagatgatttttgtgaaacggtctttgatttcttcacctttggaacgatgcacagaggtaaatgctactaatttagtgctcattccaaagatttagaacctgaagagagcgaaccattataggcctatatccctttgcaatgtatcctataaggtcatttttaaaatcattgcaaacaggattaaaattattctctcgcgacttatttgtcctacacatgttgcttttgtcccaggcagaagtatccatgttaacattgtgattatacaagaaatcattcattccttcaacaagaagaagggcaaagaaggcttatttgcaattaaaattgatctaatgaaaacctatgacaagataagcagacagtttattgaccatgttctgtattgttatggggtgccggagttattccgtaactgggtttcccaatgtatttcaactacgtctctgaatgtgtgtcttaatggtggtgaagtcgggaacatttctccgacttgtggactccgtcagggagaccctctatcacgttgcctttttatttgggtgactgagattttgtcgagacttcttgatagagccatgggtaatgataatatcgggggcattaagctttcccgagg

SEQ ID NO: 203197 - DNA, 2649 bp, Cannabis indica
gattgtaaatgggctgtttgttttgcagcagcatgagcagcggcggctaaaaattccaatatgcatgctatcactggaaatcactgatgaagagagagcaggctgttgtcttgtagcacgccttatacccaaaagtaactgtgattttttcgtcccttcagaaacaaatttgtttcaatatatagtgtgagaatatattgtatctagctagaaatatcattttacaatgtattcgcttgctaccttataaaaagaacagaatctccagcaaagagtcttttagtgctaacaaagacgctccaacctgtagtcagcagatgcctctttggttggcctgaatgcataaaggaagaatgaataagtagaaggtttaatttgataaacatattggaaacaacccgctaaaaagcaattacacggctaaacaataaagctcataaagcactaagagtagaatatatcagcataatgagcaaataccgcgatagatatgcctgaatgtccatgtattatcatgcaaatctcgagcaactagttcttgagcaggtggttgcattgagtaatcctatcaaacatttcattcagtgaccagtggaaaagagtttatacagagggatgggggtgagtaatattttacaaggactacataccaaaggtggaaagatcttctcagctgcacgtcgaggcaccgaaaacccaccatgggtacttgtgtcacttgctgtaagagttttacagaaaaactcagaaggttgcctgttttgtttgagacccatatcagatgccagtaacgcttccctgtcaggctgtacaccagaaattttagatatctatgtaagagaacatgcttatatgtgaaaagaaaatgctgtaagctgtgcattgattcagaaaatgaacggctgacctactttatttacaggctgtagtgtcatttgtgcataaacctcatctgtttccaaatcagcctgatacacagatatataacagcagatattaaaaaataatccacctgaaaaaaattgcaaaggcagtatgtatccatatgttttttctttcttttcatgaacatctcggatcacttgctatcttgagactatactacccatgggtgagactgtctgcaaagctcgagaccataactcaaatgtatcatataaccattttatgaccgagacagaggtagcaaaaaggaagttcaattgaacgtaaagttttacacccttaaggaagctacagaaatcaccttctggtgtgggtggacaacacacacaaactctctctccctccctttcttagtcacacaaatatcaataacaaaacaccttttataattcatgggagattatgctagaaaagacagtgaaaaagtcccatacatgtaaagtcacattgtggagcatgcaaatcaattttgaaggaaggttggggtagttaggaataaaatcagtctccttctgcattgatgctgcaacctgcaaatataatacattaggaaaccaatctcaagaaacaacaatacttaaaatacaagagaaaacagcatacttgttcgctgtggccttgcgggaaataaaccacgagacttccaacaggaggcaaagaaacgagtggcccagcacaagcatgccataattctgaattgatattcttcctctctcctgtttttaaaatcaaataacaccttacaagttattatgacacaatagtgatatcaagctccaatctactaaattttttggctaaaacaaagtagcaggtaaacaatttattaaacagaatttgcaattaaagttcttggttttgaatgttttttgtgaaatttcttactaaaggtgaagctaaatattattcatactcatttattacaaactattttctgaatatttagaagcaaaacagtctgtctcatcatcattacagcacatataagagaaacgttgagtagagcttatcaccattgagacaaaaattgaaaagaattttcctaatggaacacaaaaacttccaaaatattgcagagaagaaaagtagcttccaggctaaggaaagatatgcatatagcatatgtataaaccaacggctgcattttagaaatgagaaccagaaaacaaaatacttaaatcaagaccataaaaaaccgcacacaatacaagaggagacgccaatacaatagacatcacagaattataatgggaccaaaatatgtcatccactactggattaccttgatcaaagctgtcttagatcaccccacaacacacaaaataccatattttgtgttccattcgttcaagaaataaactattacaaaagtaaatcaccaacaaagccttgggaagactcagataaagggagcagaaaagaaacaaaaaatgttacagaatgcttaaaatccttaccttctccagcagaagccaaaaacccgtttggaggagccttcatgctggcagataagatttgtgacttgttcagaaatcaattaacttctctcaagttctttaccataaagatggtttatctctgacccaattactcaaatattgcagtatcactaattcgagtaatcaacacgaagatcacctttaatgttaagcaaccaatgagaaaaaagacgaagaagaagaagcaggagagagagagagagag

SEQ ID NO: 203198 - DNA, 1340 bp, Cannabis indica
gggttagtcgggttatttattaatgatcaatttacccctaaagtttgagttaaaggttgtgggtagggaaaattgataatttgtcaaggtttaagttataataatttttaatggaataattctttattatcatttttattattattagtattattatagattaatactagggatagaatagaattctctaaaaaaatcaagacaacaccaaaacttcatctccttctctctttcttcttctatgtttagcccaaacaaaccagaggagaaccagctcgaaaactcagacattctcatccaattattcttcaatttctatcttttgatcaaccttaggagctgttcaaagattggggtaagttttcttgaatctcttggtgaaactaagacttttaattagaaatttttgtgggaatattgtgattttgggtctggggtattttgtttagtttggaatagttttgttggctatttgaacttggtttttaagttgtggggttgttgtcttgttttgaaagagaaagcttgaagcttttgagctcaaagcttggctctcccatggtgaatctttattctttgggtatttttagtttctgaatggtaggttatgtttagaacttatctttgaactattctggaaggtttggggcaacttgagtttgaaaactcgagttttctggtattctaggaaaaccgattgaccagtttggaatctggttaattgattttcctggtatgcctaggaaactagttagtcgtttcttgtctaactattattagcaatggattggttgagtatatccgtttgaggacggatattatgctgatcattccctaagtaatgaacatgcaaaacttgcttgtctaacataacgacccacaatttgactctgtgactttagattggatagctcatttccttgggttagttgattgtttttagctagacgttcttatggcccgtactgaggttcagtggggatatagacatctatccttttgtttgaatcctgtataatcggagtatttatcactggaacggttgtcaattccctcttgctgggctctcatgatttccatttattgatccatccattcttggaattggcgtctctactattcgaaagcaaaatttacatgctaatagtggtgaagagtgttggtatgctcttgcacctgctctagagcggctcgcaaattttgcagtttggtgtcatcaccaattgtcctttgaggatctccaatagacggatttttagtactaggagcagtttgcttggcctaggtattggtggttctagtttcttgtgcacccagagtgaacccagccagaagggttg

SEQ ID NO: 203199 - DNA, 923 bp, Cannabis indica
gttcatgggaaatttttaaaggccaaaaaagttcaggggcatgatttggtacatgtcaaagttcgaggggaaaaaaatcataatttgcctaaaagtaattaagtaggaataaaatagaatacatagaaattgagagaaaattaaatcatattaaaaccacaaatcaatattagataatatctatctagaccctaataaactgtttagctactcatgttcatcgtagcaaattcacacatattaatttaagaatagagaagaaaataatgctgaaaactccattgagaaggcctccaatattgattttgctctccaaaattcgtactccttgattgcttgttgaaaactattgaaatccacttcttttatagccaaaaaatgataaaaaaaaaaagaaaagataaaagacactgaaaacctatttttttttttcagtattaggaggggcaggccgcagcatggaatttccatgcctaggcctgaccccccttttatttgggtagtgagttttttgctacgtcgactgatagtattttggccataactctcttgatattactcaaaattggacgatacaagatgttccagaaatataaaagagtgatctagaaattttatgtttcgatgttcacaaaaatctgatcataacatagtctaatttaggcttgaagtttcaactttattttcttgcacaattctctctatcttatagataatctttttgtgagatttgaccaagttatacatgtcaagtgtcaaaatctgatgaaattaacaaacacatgcgtaattccattccaaaaaataataataaagaagaaaattaactctaaaagtaacataaataatagggtaataatattctaacaacactgtcattcacttttgacattggagaggaagatttgagattagatcttgat

SEQ ID NO: 203200 - DNA, 522 bp, Cannabis indica
gtgttctcttttttattttatgttcatacattcgttggttgctaccgcttatcagacggtacatagttgatcgctttttaatgttaatattttggtgctttcattaagaacatcactcgagtattattattttcatgcaaaaacttataatccattttttttatgagctataataaaagtattattattttaagaatttttttttaaaataatttaccgtataaaaataaaattcaaaataatcatttgcatttgtataaaaaacaaaagtaaaattttggtttgacggggctcgattcctaactcaacgaaaccttaaaaataattttttttcatgaaaatatatatacattttgttggcttggatatttttgataatttcaagatttacacatttgaatttagggtatgtatggaaagccattttgaaatggaaattattgtaattcagagtaattaaaaaagtttgacgtatttgttcaactagataatatcataataatcatgtaattagaggtaatt

SEQ ID NO: 203201 - DNA, 537 bp, Cannabis indica
agaagaagagaaagagctcaaaaaagttgcactctgagagagagattatttcaaaagctacttgaaggctcaaaaatcatacaaatatatttatatatatcatttaacttaataaaaagtataaaaattatagtccaaattagataacaatttatatatataattgtattgtatggtgccatggatagactaggactttcttgtgcaaagactagaaaatatatatactacatgaggaaaagaaaactttacatgtttttgttttcgtactttatacgaaatacactttataaaattgatcttttctgaaaatatctcatctacaagatggtatatatttctcttttgaggagatccaaatttcaatcccccctctaaaaaatatatatataaaaaaagtatatactagataatatttgtgttaaaatttatatattattagctacgggctaaatattaaagttaacttttttatttaattcacagtggcataactagctattgaaagtaaggggccaaatattaaagttacttttt

SEQ ID NO: 203202 - DNA, 1347 bp, Cannabis indica
aaaaaactaggtttttgactatgtgttattaccactctagctagttggcccaagtggtagtttgcagaaaatgagagaccatccaatccttataaattggtaaatattatatatataggtaggggtacatctatattttaacatttaaagaaattaacctaattcttttatttgacattcgatctatattataattataataagtatttcgtcaatttcaaaaaaattataataattcatggtacttaaaataaaattcaaaataaataattacacatgcataaaaaatgttaagacaaatttggaatagctaattcaggattattaggcatactgctcttaatctctcttgacctcgatatttctctctgcctctctattttcccacgttttttgttttactcattctgttattctttgtaccagttgtcctctctttttgctatctactgtaatcatcagggtttcattccctcagtataaatataatgatttgtactcagcctctctttgagctgagatttcagtgcattccatttctctacattcttcacttggtatcagagctgacgttggcctgcgccatgtcctcaagtgagaatcaaacactaatcagaggtgctcaacatgctagtgcagcagatggcagagatcagagagctcagagccctggtcaactcagctcccaacaggtcactaatggcttctctcaaccggaaatccatgctggatctagaggttttggaaatgcaccatttggtaacactcttactcaacctttctctatcaagttagatagaaataactatactctttggagaaatctagtttctaccattatcaggggacatcgtcttgagggctatgttaatggcactcggatctaccctcctcagtatgttggagctgctggatcaggggataacacacctggttttggacttcaactcaacccagattatgagcattggattgtttgtgaccaacttctcatgggttggctatatgggtcaatgactgaaatgattgcaactaaggttatgggttgcacatctgcacaaactctatgggtggctcttgagaacctttgtggagctcactctcgagctaaaatggatgacacaagaactaagatccagacaactagaaagagcaatacaccgatggctgactaccttcgacagaaaagagcttgggctgatagccttgctctggctggtgatccgtacccagaggcacaccttgtgtctaatgtccttagtggcttggatgcagagtatttgaccattgtgtgtcaacttgaagctcacgccaaaattgcccacacttggcaggaaatgcaagaaa

SEQ ID NO: 203203 - DNA, 788 bp, Cannabis indica
aaattatagaaagaggaaaatgaccatttagcccttggttgaaactatacaagagaacatggtcttgtactattttggctacttagtttgagaccacacatgaggaagagaacaagaaaacttaagaggaacatggtcatggagcccttggattcttagcttggttttggtacaactcaactacattcaattagattacaataaatggggaacatggtctactccaatttcttataatttaaacatttgaatttagaatttatagataaatacaatgctcatataaaccaatttcagataaagttaacactagtgaacttgttgtgagtaagctcatgtttaaatagtagaattggatagaataaaatgttatcatgtgattttattaacaaatcaaatacaattgcaatgttgcaaaaggggtttttgaggggattgtaagaagaaaagggaagggactgaaaactttcaaatggtttagtctcatccaatcttatgaatcattttactaaagtaaaaatagtgctttgacttagtttttttgtgagttttgatcatatctcatacttaggtaaatgaatgaaagagtattgatgttagacactagtgcactatgaggagatggcctaataagtagttaacaattttatatgttagttattaaattaaattatgtaagatttgatattaaattacagtcgtatgacatcttgtggtggtggacacacaaatgccaacattatctaaatgaaaagtgggaacgatttttcttaatacttgtacctatc

SEQ ID NO: 203204 - DNA, 1228 bp, Cannabis indica
attaaagatttgattttctattccaacaattggaaaatgctgtcaaaactatcaatcccaaagcaattcatcacattaactttccccacttttgtcattccaaaactacctagagagcttatgcttcttaaattgtgaaatttaaccattcactaacaaccaagaaaaagatatcacttactttggttacagcatttgagaattaaggaaaatcttcccccaatccattcacagttatcttttggaatctacagtactctagaataagttccttccaaagctgtattttcttctcacagatttcccttactggctgcaaactggagaaaagaaaacaatttatctatatgacaaaatgagccgctggaaaatgaaggaaaacaaaaaaacaaacaaacaaacaaaattgtgacttttgcaagaagcctaatgatcatgataattggaagaaacaaaacatgacgaaaaggaaattagaatgtaagaaagaagacaaaaattgcaaatagatctttccttagcactaactttatgtcttttgatcaaatacctctctttgaagaaaagggataaaaaataaacaggagaaacgaaaagaaattatctatatgacaaaatgagccaccacaaaataaaggaaaacaaaacaaacaaacaaaatcgtggcttttgcaagaagcctaataatcatgaaaattgcaagaaacatatcattaagaaaaggaagttacaatgtaagaaagaagacaaaaattgcaaatagatcttttcttagcacaaactttatgtccctttgaagaaaagggatacaaaaataaagaatcttttataaatgcacacacccttcactacagcagaaactcgattgcaataactaggctagttcaactaatagctttctatcaacctatatttggcaaacagtaaacaatgctttctttcgaggtttctattacgcacattcagcaaacgagcatgaatacacacaaataatacagtacaccatacacataatatagatgaacatctaaacatacacagcccgtgtaatgtttttcttgtttaatgtgtgtatttacatacgtgaagtggtgcactaaacagagtactagtctgttcagcagcacgagaaactaaattattaaccctccttattacaagtggtctctcttgataattacacttaaaaaccagtagaaaataataattaagaaagagaaaagaagat

SEQ ID NO: 203205 - DNA, 1311 bp, Cannabis indica
attttaagtttttttttaacaaaaagctaccttaaaccaattcaaatcatcaaatgatgtacatttatctctttcgcttagtttttttttttatttaagcctttatatattacattagtataatttgggacccgaactcaggacctccaatacacacgtactccctattttagttatttaagatatttaataaaattttaaaaataaaatttaaatagtatctttcacatgtgtataaaataaaaaaatttcgcgtacaacaaattattaaaattttatttttgacgtagtaaatattttcaaatatctcaaaattttataaaatatctttaataatcagggacagacacatgtgtattaatgtggagactataacccccactaacaaaaatattacctttcaaaaaattaaatgtaattttttaaatttgataattatagatcaaaatcgtaaaaaaagccctcataaaattaaataaatctagtaaaaataattataatataagtataaatatttttaaatattaaataagtccctacaaagtaaaaattatgaatccgttaataattataagataaaatatcgtaaacaaaattaaactaaaaattctgtaaaatagtgtagaagtatcctatgtttttttaattcacgtgtatgtgtttattatatggataaaaatataggtaaagaaaagggtgggggacatgctagtacacttcacgagtactctattaaaaccagcttgatttttttgacttccatgtatcactaactttttttaatgctagatcatcattatttgtaacacaatttgattggatctcattactaggcaaaaatttccaccattaaatgtcttttttgcatattagaacaatatgtgattaattgcactctcttcattatgtcaccaccacaccaccaccacacatataccaaaccctatctaaaaaaaaatgttgaagtgagtaacctatctcttccccaaatcctccataatgtgtcctcctccatgcttggccaccgccaagtcgtcgtcaacaccaccactctctctcacgattattgtaaggcataaaatgaattctctgctcaactatcggagcagagcctctcgtggagtgccgagaaagtctttctcgacctccacctctctcttatctttgttgagcccattttgattctttcgctataaagccttattagagttaattgtagttaatttaggtgagtgaggaatctaaaattttagttgagagtagcgtaatttgttttttttttttattatatatatatatataaaaagggca

SEQ ID NO: 203206 - DNA, 563 bp, Cannabis indica
acccaataactcgaataaaactgcctcatacctgcggtgcgaatttgccatatttgtctggtcctagagaatcaatccaatagatgagactaaaatatattctttgagaaaattattaagttaatattgcattcttcatctccctttgtccctcaactgaaaattggaatgaaaaacctgaaacaaaacaacaaaaaagcctatttcactctcaatcaacgtccaatgtagaaaacaccaattatatacattaaaattcacactactaatccactcaataagcacaaaaattgtgttttggttagaacagtctgatcaatcacagccatccagactccataccaaaaaaaaaaactctaaatgtcatcatgcgaacaatatcccctgtttatacatacgaatttctcataccagtcatacatatatgctaaattttaggacaacattacaagacaaattaatcacataactgaacaaacaaacaaacaaacaatcaaaaccgttattgtgatctgaaaaagcgcaggcagtgacaaaaataagctgagactaaagattcaaaa

SEQ ID NO: 203207 - DNA, 1328 bp, Cannabis indica
caatctctccatctcttgaaatggtggttttcttgttctcctcaaacaactcgaaaaaactcttcaaaaaatgacaattattgttatatataagtacaaatcataattaatagtgagaaataaatttaaggtacttaatgttacctttatttcatttaaacatttttctttaagtacaacatccaccttaggcccactgatatcttgtggtggaatattaactcgcacccaagtctcaagtcgggtagtgaaagtaatcgttcgttaactcacacccaagtctcaacctccatctgcttccccgcgctcttcattttagtaagatctaatcttttgcttctctgtctagtatttttctactatggtattgcttgtggaggttcttctgattctctatgaggttcttttggctcggatggtgcatcatgataatcgacaatgaattagccccaatcatcataatccttgtctagtgttggctccataatgaatagtcctacacaaatatggaaaacatatattaaattataaaaaaaatatatacaaattgataaataaaattaaatatgtcaaaaaagtaaatactaatacgtgtctgataactcatggattatgagttgatagttttattcacccacaatcctttttatcatcacgagatgatatgatatcatccccaacagtgacatcaataggtggtggagtaatttgatgaatttggttactgagcatgagatcatcgccactagactcttggttagcataatattttgcttgagttgtgaggaaaactgaccagagtgcatctaatggatcgctcatgtaaaatatttgagtggcttgtgacgctattataaacctatcagacttatggcctatttgattaaagtccactaatttgaatctaaattcatcatctttaaccttgttatcactcctaacccaatcacaaagaaaaatagggattcataaactactgtaatctaattatcaaatttcttaaattatactgtaaaaggacatatcacattcaataggatttttattttttaaactagatatttgaaaagtcttagcaactatcataacatagttattttgtgtttttctagatttatcacggtcttgagtacaaaattgagtactattaatatagaacaattggtatttgagtacatcacacgaaggacctcataatatacaaagtagtgtgttcaatatatttcttggagtttcacacattttcacatgtaccttacatgcccaagtaatgaattagtgagtacaagtgtatcaatatgatacgtaacaaaataataaatgcatac

SEQ ID NO: 203208 - DNA, 967 bp, Cannabis indica
attatcactaatcttatattcataacaggtagcaacaagaacatcaacaataaagtaacttttccatttgtaatggatcaaagtgtctattattgtgttgtgtcaaaatatttcacgtacatgttatgtcatgccgatataattgaacttgagattcctatttcctctcaagaatcagacgatgaagtacaaaatatagaattatcaatgaaatcgtctaataattctttattttctcaaaaattagaggagacacaaaaaatagtattattagatgaaccatccgataattcttcattttttcaagattcagatgaagcacaaaaagtagaattatcaactgaatcatctgatgattctttatcttcttgtgaatcagacgaactacaaaaagacgtagtattactaccagcacaaaaagtagaattatcagttgaatcatttaataattcttcgtcttctcaagaatcagacgaagaacaaaaagtggagttacttacagaatcatctaataataatttttctcaaggatcagacgaagaacaagaagtagagttgccaactgaatcatctaataataattcttctcaaggatcaaacgaagaacaaaaagtggagttgccaactgaaacatctaataataattcttctcaaggattagacaaagatcaaaaagtagaattatcaacagagtattttgaagattatggcaaaaattttccaccattaaagccttctttgtacaaactgccatgactttagaagtagtactattgtttccatctccttaacctatgatgatttatttatttatttagttttgatttttgtttgaatattatttgcatagtttttttagcataaaaatttagtttttatatttttaatagaaaatttgtggtttatataatttcaaataaacatatttataatttttataaggaaaattactttattaaatattatt

SEQ ID NO: 203209 - DNA, 692 bp, Cannabis indica
caccatagtcttcctacagctcttaatcttttccataagaaaattttgtcaacccctctttgttctctgctctaaaggtcctaaatttgttactcatgcactattagagtgttccagagctttgagagagtggaaagattcaaggtttaaagatttctaccgagttgctaggaattgtgatattagggaatatctgttaagaggcttccaagatttttctaaagctgacttgagagttttcattggaattgtttgggaaatttggaatcgtcgaaatattactttgtttaataagagaaggatttccttttcctctgctgaatttcaggttaaaggtctgcttcaagcttatgataaggctcaaacttttcataatcccaactcatttgaagattctcaagaaggttctcaaaacagtttcactccagatgctcctaaggtgggttcttttaagctacttgttgatgctgcaattagtaatcagttgcaaaaaattgggattggggcttcagttttcgatagtaaaagtgatattgtagctactatgtcttcaccttgtgatggagttcttccccctttattagctaaagcaaaggcactactttgggtgctacgatggtgtatagctgttgagtttcctttggatcgaattgaaactgacagccaactcttgtgaggaaggtgaggcatcg

SEQ ID NO: 203210 - DNA, 717 bp, Cannabis indica
tgttttatataaataaaatctaagaccataaaaaaatattaaaacatcagtacaaaccgttgttttttgtaatttttttattagtttttgtgtttttttgaaattatcccaattatttttacgaatgggcctactagaatgggcctactagcttcaagaataacctaacctcatcaaattacaaatataaatagttatgggaaacttacaaaaatactagaatttgggttaacttttacaaaaatactgtcacacataaaaattttcaaaaatactgtgtttttataaaacactagtaaaacacaaaacaaaagactcaaaacaacagtagaacaactaaaaatacatcagtagaacaccagtgaaaacttaacatagtatactgcaatatgaaacttataaaaaaacacagtaaaaaaatagaaaataccgcctgacaatatttttgtaaaaaaataacaaaaattaatatatgatgtaaattttcctacaaatattactcatgaaattaataattttaatattactaatagaattcggataaaaaagttcttagaagtgttattctttgaatagtaaagaagctttcagtttgatgtaatatattattttgggttaagaatattgacctgaaatcaacaccttaataaacatgttaaatatgtcaagacgattttgacaaaaattaaatgtatcacccaaatttatttattttgt

SEQ ID NO: 203211 - DNA, 1809 bp, Cannabis indica
gtaccatctggtatgtaccagtttattgaatgccattgtaaagttcttcatggtatcaatcgccactgacctccgtctcccatggcttcccacgataacacttcctccactgctgctcaacatgatcctgctcctgctactaccgctgctgctactcagtttcttccacaacaaacccagtcctggaacccgttcgctcattctctctctgcctctctcactgttcgattggatcgcaccaatttcctggcgtggaaatcgcaagttgttcccacagtaataggtcatgatcttgatgacattctattcaccagtgtcccacctccaagaaatcttgctaatggaactcccaatccacaataccttcaatggaagaaacgtgatcaactattgctttcttggcttcgatcgtctatgacagaaggaatccttgctgctgtggctacatacactacatcatctcagttgtggaaagctcttgaacaacgcttcacaagtcaatcccgtgcccgattacttcagcttaaaggtcaattttcccatattcgtaaaggttctttatccatctctgagtatgtggttaaagttcaatctctttctcacctaatcattactgctggttctacaatttctgaacaagatttaattcttcaattgcttaatggcttgggtacctgaatatgactctgtagtgtcgggtattacgtctcgtagtgatgatctaattcttgaagaagtgcaggctcttctaatggctcatgaaagtcggcttcatcagcacaactcctttactgatctaaatctacagatgcaagctaatgttgcttatggcacaccaagaaatggctcttctcgtccttttcagcaaggtcctcgaaatacaactcaagatcatccctctcgatcttttggcagaggcaatggaaggggattcactctcaataatcgtttgatctgtcaactatgtctcaaaacaggccataccgctgctgtatgtcactataggttcgacaaaaattgggttacccccaaacccaatcccactcatcatcgggcctatcttgctgaaatggacaatgatcaagaacccaacaattactctccacaggttgttcctgattttggtgatgattttgggtggttcattgacactggagccacaaatcatgtcaccaacaccagtgataatcttgacaatgctatagtctaccatggaaatgacacattggctgtaggtaatggtaagaaattagcaatttcacacataggctctacttctttgccctcttcttctcacaaatgtcttagtctcaattccgtccttactgttccttcaattacaaaaagtttgataagtgtttctcaattgactaatgacaatatttttttcaaatttaaaaaaattcttgttttgtcaaggacaagaacactggccaagttctgctgagggggcgacttaaagatggtctatacttacttggagaaggttcttccatctccaaatctgtcttgcaatgcaaccttgcatatatgtcacctgatatgactcatgagtcaatttctaattcttgtaatactgatcccagtatcagttgttgtaatcataatacaagtaataaaaattgttcttttactactgatatagatggctatactcattctattttccattcatctcttaataaagatgtgaacacttggcattgcaagcttgggcaccccaatgctcaaaccttaagctgattattacctcaattaccacacactggcaccctaaaagatttacaattttgcaattcttgtcagtta

SEQ ID NO: 203212 - DNA, 1324 bp, Cannabis indica
aacatgctaaatccttacaagtgcaagcattaaagaaaattattatatagaatacaaaataagtgttgtgccaatttcactaaccactaatgtttcaatgcttgcaagtccgtctccatatcattagcgctcttttgaaactgtaaaattaaaatgtacgttattacttaattataagttaatataatagatatgcatatataaatacattaattatatatcttaccttttcattcataataatgaatggatttagagctttcaacatgtacattatgtaccttaatacataaaaaccaaattttatcttaagcacttgaaaacattcgaagtaacacattgaaacctacgacttttcaatatgtcctataaattaaataatttatataacattcaactattcgaattttatgccctaaaaaaacttttttcaatataatcagattatttttttgaacaagaaaataatctttattcaaaacatgctgaaaaaaacagtaataagctgtacaaggacaacatccacaaaaacccacactacgagccagtaattacatttataatatacctctccagatttttttgctcgagtacaacagtttaacactctaattttaacagcccttttgacttccctactaatataacttgcagtattacatttcaaatcaaagatacaacaattcctatcgatccacacaaagtacaaagtagccgtgaccacatcattcataattatatcacgaaagctatgggaaggtctcgatagccactctctaatgttggtttaccaagcaaaacttccacaccatttgatgatctcgctgatcactttgaaagtgaagcagcagttaacgaaaagatgggagtgagactctgtaacaatagagcaaacagagcataaatctgaagataaaggcaaaaacgtactaagatggtctctcgtcagtagctaatcattcacaatatgccaccctataaacatgtgctttggaattatcatcttgttccaaatgtttgccacatatccatctttttgagattggatgaatgaaaagaagaacattttggcgttgaatttacctcttttcatagcttccatgagatcacttacccccaaagtcgatcagagtctaaagattttcttgaagtatcagcttgagtcttgtttgaactcaacctcccaaaagcttggacctttaaaatagatggcatcaatccaacgaacctagagattgtcttgtttgctcaaaatgacccaaatatacttggatattagagtgatgttccatttcttaccctctcgaaacccaaggccaccaaa

SEQ ID NO: 203213 - DNA, 508 bp, Cannabis indica
ttcttgatcaatggattaatgctcaattacgaaagacaagtgtattgttagtagatgatattaacaatgttattgagcgttgaaggaaaccaatgttgaataagtttggtttcgggtgtgttgctcgtgaatcttgtggccacttaatcgaagcaatttctagaaaccggtttggggcgatctaacttaaaattgcggagataatatttggagtcaaagaagcattgagtttgatcaaaaaaggcagtggtctaatgtggaattgaaactgatgctttagttgtgttcaggctatcaaaagtactattgaaatgtcaactcagtttggattactttcatacgattgtcagattttattgtcttctttaacaaatgtgtctttagtttttcttaaactgcaaataaggctgttcattgtatggttagatgattatattttttgtcagattgtacgtttagtgtgcttgatgctttgctttgaaatttattgtacttgatgaaagtttat

SEQ ID NO: 203214 - DNA, 1075 bp, Cannabis indica
tttattttttttctcatccacataaaatttaacatattttctttcaaaaattactcataagtaattctaaaaattatccatggtttcacataccactttttaattgaattttataattatataccttctctttaaaaattagtagtgataaaatattttttataaaaaaatattaaataatgttatatgatcatttctgattttgaacaataatatccataaaattaatttaaaatgttaagcaaaatacaagtgtgacaaatacaatatgctctttatcaattgcaagatgaggtgccgataacaaagctaaaaaaattgtatgatgcaaggtggcctgctttgcaaagagatccccacgaaaatgcaaaggaacacgcggcatgaaattagacaaggaaaaggtagtttgtcgttatccccgccctgttgtcggtaggaagggtttcaccttttaataataataataattaatattaagggtttttttatttttacattttaaaattatttttttttttatatttttacggaattctacgtaaaaattcttattgtaactagcactgcaacctaaattgcaacaaaaagtcgtatagaaatcactattgtaactagcgttgcaaccactttaaaaactcaaaccgtaaatttaaaaaaaaaaataaaaaaaaaatatgtggagtaatttccattaatattattaattaattaataataataataataaattagagatactatatatttctttattatttaaaaatataataatttattttatttttttctatattattttggacacatttattttaaaaacactttgtgaaataatataattataatctcaaatctttttctttatcaaactattatttatattttacttttaattttttaatttaaaaaaactatagcatttaatgtcattgtgtgtcatcaatgcaaatttcaaaaattagtattcgtttatctctaatgatatagcattctttttatttttttacctaagtttttctactatcatcaagcattctttacaaagctaccattagagcatctccaatggtag

SEQ ID NO: 203215 - DNA, 891 bp, Cannabis indica
cgtgggctggacttcacgaggcatcccaaatgtattatttactgtaaactatccaatagagggaaaaaggaaactaaatgtagttctcaaactactattaatacccagtaaatcctatggattaagggttgaattctcttataatacttgctcaggcaaacttgagaacatatatttattgtattcctaaaggcttttcaagctaaagaattactgaataacactgactcgtagactaaggctagttaatgtccaaaccgcgtaaaaaattatttgtgtctttttactttttttttcttttaatggtttatttttccagttcttattttttataattagtttttaaaaatctcggtaaatattttagtactttcattgagagatagtgagaccatctagagattacgttcaagtaatcatggcactaacccgacaaagtctggtctttgttttactggtcctgacaccaaagcaggggttactaatgatccacatgaggtgactagttgtcagaaaggtaaccaagatgaagattggaattgagaataaaagatgtaaaatctagagaaagcacttttgacgatgctgaagacaacacttgggacacacccgaggatatgcttgaagatgaccttcacgaaaaagtcactgatgataatgctggagagtagaaccaacttgatgagtcagagaccccgcagtcatcatggctaaacaacttcaattggaagaaatcaggttgactcgacaggatcgattcaacgagttactgctcataaagatgaccaaaatggaggccgcaatgactgctctgaccaaagacttaatttggctgagaaaacttgacatttgcttagcatccgcgtgcgcatgcaactgggtgtcatttgg

SEQ ID NO: 203216 - DNA, 909 bp, Cannabis indica
aaggtggtccctctcgtggaaggagtctgttcactgtttgggatcaaaaagcccaatgccaaatgtgtcacaaagttcgtcacacgatacaacagtactactatcgatttgataaaagcttttttaagacctgaatctcttcaaaatttccctaataatgtcactgctaatgtagatgaaatgcataattattttgcttaactagagagtgtccttgatcccaattggtacttggatttaggagctacatatcacctcactctaaatgctcaaaatctgttgacaagttctgagctccttatagactagcatatacatatgggcaatggggcatgtttgcatatcagtaaaattggtcatttctcatttctttcaccttatgaatctcaacatcttgttctaaataatttactgtatgtgccttctatagccaaaaactttcttaatgtttctcatttatctcaagacaacaatgtcttctttgaatttcacatttttttctgggttgtcaaaaatcacgtttcactaaagactttaatgtttgggaaacttgacaaagatctgtaccagtttaattcctctcagcttattcttttggcctccagccccaaaccaaataactcttcatctattgttccaaaaaattataatcttagttgtaactctcacactttgtatgataaaaatgatgtttttttctttatgccgtaggaggcttggacatccttcctctcagattgttcaagctgtctttagatcatgtaatatcaaaactaacaataaaaatgtttcccactctgatctgtgtgatgcttgttgtcttagtgaaacaccataaacttcctttcccatttctaaaactacttacactgagccattacaattactacattctgatctatggggtcc

SEQ ID NO: 203217 - DNA, 522 bp, Cannabis indica
aataaataaatagggcgagagacaatcgccttgcctgaggcctcgtttaggatagaaagtcttagttaaaccaccattaagcagcagctgaaagtttacagaagacaaacagtagagaatcattttgcagaaatggtgattaaaaccaaggcaacgcattacctttaaaacaaagctccattccaagcgatcgtaggctttggacatgtcgcacttgaccccaacataagcagagtttccttgtctcttgtttaattcaaagaacaactcattagcaataattgaattctccacaatccatcttccttgcacaaatgcggactggttaggagagataattttgtctaacaccatacacagccgattagccaagagcttggcaataattttatacgatgtgttacacagactgattggtctgaattcatcaaaacagttggcattggctcttttaggaattagaaccataaacgttcggttaatctccttgctgaaagttccaaaacgaaagaattcatgcac

SEQ ID NO: 203218 - DNA, 1132 bp, Cannabis indica
gcgccattagtaaagatattgatcagtacttcttgctcaattgcaacacttcttctggttctcctaaactaatgtttggtgaattggaggttctgaacatcgatgtggagaacgcaactatgaaggttgttaacaaccactcattcgattgttataatgagaatggtaacttaactcgtagaagcggacgcggcgggctaagattgagtaagtccaccacgctctcagattctgagaacaagctctttgctttcggttgcgacacacaagccttcatgtacgcttcagaaaataattttgggagtgggtgcatctccatctgctatgaaaatgtaagcatgttggcccaaacctcgtgttcgggtttaggctgttgccagacctctcttcccaagcatatcaagtatttattagttacagcacgtagcttcaataaccacaccattgtatcctcgttcaacccgtgcgggtatgcgttcttggccgatcagaatagttttgacatatcaaaaatgcgtctcgattctaagcctgaacaaatcaagaatactagcgttgtgctggattgggttgtgggaaaccagacatgtcagcatgctcaatcgaattcatcatcctatgtgtgtggtgaaaatagtaattgttactattcggacaatggtggtggatatcaatgccgttgcaaacaaggatacgagggaaatccttatctcaaacaaggatgtcaaggtatttttagaaaattactaaagaaaaaatgtattatatcatgaacttatatattatgtcaattatatcatgtttcacattttttgttacaaactctgttttttgtggtgttaatatatctttggtggtggtagacatcgatgagtgttcagatcctactatcataccacattgcaaaggatgcaaaaacatacctggaaattacacatgcaagtgtccacttgggatgcatggagatgggaaaaatgataattgtcaaggatttcggtttaccacattagctacaggtaactataattgtaacaatattcattaattgtgtaaatatatcatatacaattaaaaaaaaaaatgataaactttttacatttgtatagagctactgttttttttatatatattt

SEQ ID NO: 203219 - DNA, 525 bp, Cannabis indica
aaaattagactaaaaaattattcaaatctttcaaataattaaggattgcaggagtacacataatgtattatagatacaaactatatatatatatatatatattcatgaatgtggtggtcaacaaaaataatgaataatatttatgatgatcattattattaatttgatgtttacctacaatttaaagatattattaattagttttatgaattttgagtaagagataagaaataagcaacatctataatgcttccctatttgtggcagcctagcttagctatatatttttatcagctacgtacttactattctctattaattgcttctttttattaatgtgtatattaattaagtacttaattattaattacacaaaaaagtaactcttgatagagaaaaagaagagtcatttcaatttaaaatgtaaattaaattttatttatgtataattaattaatatgggtgtcacgtcaaagacactatacatatatacgtacaattgaagccgctcttatataaatggat

SEQ ID NO: 203220 - DNA, 1333 bp, Cannabis indica
tgttcgagagacggaagtgtacacgaggcatacggtcgcacaaaaaatgagctcattgttacttggatggttggaaggctgacattgactaagagaagtcaaaatactatacgagtgttccgctatctgaaaaagtgaatccgtaaaacacgacacagcgcgattcatatttctttataacacgatacaacttatatttcttatgactctacactacccgacacatattttaaaaaatccaaaaaaaaaaaatatggatcgatatcaatccaaaacctctaaattttaagggcaagtttgtcattttgccaacatcatcaaccaatcgaaattttgaaacgttctccccacgatatatggctaattgaggctcccacgtggcatgtggctacatgcaaggatgtttttcaacttttcttttaatatattcattttatttttatttttttatgttttagaagtaataaatagaagggttgagttgagacttgagagtatttttttttcccttttttttcttactataaataatttgatgtaattttttttttcaaagtaaaaaattttcatttcacatggaatggaggcccattgccatcatgtccatgttcacggcgcttatgacgcttcaagaccaaatatattatgcttataatattttccacgtcaccaccatttattatttataataataataatatgaataatacctatatatataatgccaatatttttttctgaatcttttttgggatccagcaaacatgttgttgtaggatttaaaattataattattggttattattttaatttaaatcaaatcaaatctatattagtgtacatatattagttttggctgttattaaaaaataaatgaataaataatgattattagaaaatgactactccatgacaaaattgttgggtgttattgtaaagaacgacacactgtttgtccagatttctaatattgtgacattaacttattgactataatattaatttgaaaagtttattaaaattagaaatttaaaataatgttaagagcttcacacgcatatgtttgtgcgtttgactcatttttagtggagatagattttttgaaattaaatatttttttgaatggaaaatttaattatatactagctagttttgtttaagctaggtatagtattagtatacattattttttctccaattgataaataaactaatttgggttttatattgttttggttctaatgttttgtcgcattatcttattggcccttacatttttaaaaattgatttttcaactctgttttctcaaaatatataattaggatcctaagc

SEQ ID NO: 203221 - DNA, 672 bp, Cannabis indica
ttctttctttctttcttttttttggtcattgaactttaatatataaatagaaaattttggtttctgggttttgaaactcgttgcccaatttagaagttgaatctttttgtggggtgggcttgatatttaatgtggtgttgatgggggatattgttcaggaaagtgaaatttagattggtgatgggttgtggttgctttggtgaattgaattggtgtagaggaagctttaaatctggtgagccacaaactccaggtgagatttgtattctagaatatattgattaaatttctggtttttatgtccttttcacatattttgtctggttcctgtgttttttcggttattttgaactctatttagtgccataaatggtatatctagttgcttagttgctaaatttccagtttctcagacaagggttagaactttaatagccaaagctttaaaatattagattggaatggactgttttgttgtcaagctttattgtcaactgtgtgtgtgaaatttgaaaatggttcctctcctaaccctatgaaacatgaaaactataacaattgttatgtaggtaccaatgagtgattcaaaccttacatcttgtgggagcaaaccacaagtctaactgtttgagctacctcttttgtgtgtgtgtgtcgcccccatctgcttgt

SEQ ID NO: 203222 - DNA, 583 bp, Cannabis indica
cttgcgtgtgcaaaatatcaaaataaagaggcatgcatgcaaaggacgaggcgtgcatgcaaaagggagtacaatcatacccgctgcaagaaggtacaagtagtgggggcactacacctacaaggcctgaaatcctcactaaggatgtcaccatgtcccttggggccgctaatgtatcctaggtcattagagcctataatacccctttctcaaatacgatcagagggggttggaaaattattatagcattaacttcactccaagaaatacaagcttttctcttctcttattgttgctcaaaatatttctttatgtttttaaattttcatattttcatcttcatataaccaacgatattaattggtgtagagtttttcttattactttctaacagtcgcttcatttgttttgattttggctcgtttatactaaccctaaccctatcattcttggtcacgatgttcaatttttttatcgatacaatatatgtcggtctatcagaccaacataattaacggatatctgagtttcaaacccgcgtaaataaacttttttttctggtagtatagtggtttctgaatag

SEQ ID NO: 203223 - DNA, 1024 bp, Cannabis indica
ttttgttgacttactgggacatgacaaaattgagatagcttcatcttgacattctcatcaagtgcctgaaatgaagaagaaacctggtttagccaacatgagaaaccaaagcaaatgaatatagacatggaaaaagagagaaatcgttgtgcttcgacaagtgaggaggtgtggtcaaaccaaggcatctaagccctctaacgttgtgttgagtaggctttgttttctgaacataacaattaaaggcattaatgaacttttatcaacactgtgaactaaaagaataagaacaaaacaagcaaaaaagagaggagaaattaccttttcaccaaccacattcaaaacaggcacaaggctaacatgaatcaagcaaaaattaccaggtcctgaagaaaacaagttaattgttacaagtaattaattagttatgatgattttgttagattgtattagttaattagttaccaaatcatagataaaccaacattaatacatatacatatatagtacctgtatttggggtaaaccaacataaagatgatttcaaaataaatggcatcaatatattgaatcatattctcactaaaaacaaaaatcagagacttaacagtcctcatctacacaaataaaacacccataataaagtactaattaaaaaacttaccctcttttctgaataagtccaacatctagagagtaaaaccattgaatttcctagacttgatagcatgaacaacaactttatatccctacgaccatcgctcaaaggagcttgatatgaatttcaaccaatcaaatatccaacagtatataggcagaacagatcaagaaggagatagacaaccttgaggtgttgtgttttgctaaagatggcgatctggccttggtcgaagggaagagggagacacgagagagagagagagagatggaaagtgagacgaagctttggttcgtcgggctgtttgtgtcaacgatctctggtcggaggtggatacatcgatgatctgttggttcgtcgggcaga

SEQ ID NO: 203224 - DNA, 610 bp, Cannabis indica
gttgcattatgatttcattaagggtttgtgacaatctgaatttgaaatatgaattactacaaactgaaaaacgtaataatagtgtttatcaaatttgtaggtgtttcatttgttagtacaagaaaaatctctttaaagaaatttctataacatagttaattatatgtatatattcaattggttgaaatttaagttagtttacatatgtttaaatgttgtttaaccacatatcactattaatgaataattgattgttattaaatgtttttaagaaaatagatataaagtttcttcaagaaaatcaattacaaaaccttagttgcatttcggttgcagaatagaattgagttacaacaataataatgtatgataaatacagggctcggaattggcaatacatgacttgaacagagaaaagtcgacagtagtaagtttctttcctacttcatacggattattaaaatttagactgacatgataatcatcgatgatgtttgcttatacttggataagtggaatatctttttcagggcatcagtaaagtaaactagcatcggatgtatcggttatacatcgaactggactgctattgatagtggaaaaaatatta

SEQ ID NO: 203225 - DNA, 742 bp, Cannabis indica
ggaaaacattgtaacatagagtatcctaaagcgaaaaatttcatcttttgggttcttgttaagatttccatagttgcatatggtattcttgaaggttaaaaaaactcttttaaatcaatgtttttgtttcttaaatggtatttgttataacaaagatgagcccatcctttctgtttttgactgtgctgcttatttgcactagttggaactgttatactttgaatatgccattcaaagttcctttgtagtttggtgactggatttagtactttgaatttgttttaagtttgtgatatttccaaaatcatgaagatttaagtgttctaactctccctagttatgtgtttaagtttagttagagtgtgttttgaaagtcatgtagaaattggatttgggtataattaaaagtaatattacaatatgaaatatttgtttaattatataattacactataattgtgtaattgaaagtaattaagtagttttaattacactctaattttcattttccctataagaattgtgtgtatttacgtattactaaaactttttattttaaatgtttattacttaaaaaatatatattttatatctaattactaactattttgttaatcaagatattcaaaattcataagtaattaatacgttatatctaaaatgtattttaaatataatttcagtaatacttaataattatacaataaatttcaaacacgctcttaatgtgggtatcttatct

SEQ ID NO: 203226 - DNA, 541 bp, Cannabis indica
acaaaataagcacaatgaggaacagtgaccccacaccaaggagaaattttaacaagaacaacgactcgctgaggagaggcatcaacatgattaggatgaaaactcaccacatcattaggacgttacacagtgtttacagaaattcatgtaagaaatggaagacatgcacacacaaatgaacaaaatacaagcaccgcatgacactggacaaacaagtaatggaaatctagtaacaaatgaagagatactttaggagcatttgcaacaagtatgaatctctctaaacattgcaaaataattaagaaatgaatcataggtatagcaattaataaagagcttcctgaagagataggatcaatcgttgcaaaaaaagaaggatctgattccttatcgacttttgaaaacgttgttggaatagagcaaacacctcagaagtacttttcatcaacaagcaatgacaaataaaaggaagtagaacattgcattgcacaagacaaagaaacacagaagataccactaattatgattcaatctcagcttt

SEQ ID NO: 203227 - DNA, 899 bp, Cannabis indica
taaaaataaaatttaataataagatattatgataatatttataatattttttcttcaaagctataaacttataataataaaaaaattattaaacattaaactcagacattattttaatccaaactgacattaacactaataataaataaatgaacaagtgtgtgtactcttattatgatatgcctttgtttggattgatgaattaaaaaaatttggttgatgacacaaaatgcagagatctcgatgccatgcaatgctacattaattatacataataataaattaaattataattaattagtaatatattaatatatgaataaatttgggctcaggtctccaagatttctagggtttcctctttccctatttctgagctaaagtttgaacagaatttgtctttaccaaaaccatgtaaaccaggttgctcgtgttcccactttccaacatattataaaaatctatattttttcaattattaaataaaataataataataataataataataataataataataataataataataataataataatgtgatattatggtattattgtctaattatttgttctctggtcacaaaagtaagttgcatggaatgttgggaatttttttttttaaatattgattttatagtatcttatttttaaataataaaaaaaacagtgacaaataattattaattaaataatgtattaagtggcatagaatttttttttttaaaaaaacaaattgctaaaaaaacattacatgactttaattctttaacaaaatgtatattattacataagctagttatttgagtacgagaagaaattagaataataaataattataataatactaattaaaattttacctctaaattatatgaatatttattgagaat

SEQ ID NO: 203228 - DNA, 708 bp, Cannabis indica
agatacttcttaccttctcatagctccaaagagcatgagtgagagtttcagcatacctgccacaaagatcacacatgggatcgatcttcatgcccctatggattaaattggtttttactgggagccagttgtgataaagccgccatccaaagagtttcattcgaggaggcaattgaaaattccaaagcattttccaccatttatgaactccttccatctcaaaacacctagtggggtggagattaatttcccgagccactctatatccactcttaaccacatattggccatctgttgtaaaaggccaggccagagtatcttccatatatagatcaattggagtaccctggatccaagggacatcttccttgtgaaagtgatttaggattaaatccatgttccacttccctttcgaggtcaggaggttatggagatgtgtgtgaggcctcagcccaagattctgtgtaatcattgctcctgtgggccgaggtagccatttatcctcccaaatccgaatttccctcccattactgactctccaccgggctccttcggtaatgatcttacggccccatatgattcccttccacacataagaagcacccgaggggcagctagcattcatgaacgaggaattagaataatagttgtttttcaacactcgagccaacaaggagtacgggttgtggatgaggcgccaaccttgtt

SEQ ID NO: 203229 - DNA, 1041 bp, Cannabis indica
aaacttaaaaaacgtaaaaatagtaaaaaaaaaaaaaaatactttaaaacataaaaatataaaatttttacaaaaaataatagcattatgtaattattccttatacatacatataaaaaaattacatgaaatattatgttaatacgaattttgttaactaaattataagttttttggtaataaatgatcttcagaataaattatattattattataataaggataacaataaatgacaagaggatttttttacatagttttgaaattaaatctttataatctacgaatccattttattgagagttgaaagattatatacagaatacaataaactgttttttttttcagaaatgaacaataaatacaatattatctattttttcaaagattagtcgtcccttgttccctgagttctgtccctagttatagaagtctaggatgacagttatttctttaggatctgatcatttgtaactgctcatggaacgtggacattccccacgtttcatttcatccacatgagatcattataaataaccgcctcactgctctttatctttatttgtagacagttatgatgattgtgattcgttattctcgtcattcaattaactctttttttaaacatctccgtggaaaaatatctaagtgtgtagttgtaatacatctcgcatttttccttaaatgttgagtgaagtataggcgagacgcttacttcaacgcgtcaagagcgagatgaagaatgttaaagttgttgtctttattcttctaacatactcacgactatatgggttacccgttccagacaatgccattatgtattatgtttatcccaagatagacttgttcacctcgctgatctcatcaatcagtagttattactcatgtctcatagttgcttatgtaacagcgagttcgagtatttctactaactgtatttctcgaggcgagttatctgtatgcatttatggatgcataatttgatatggtttatatttcaactttattatacgtgtcagcttctattgcagctcgaaatat

SEQ ID NO: 203230 - DNA, 1160 bp, Cannabis indica
aataatatgagtcgtgttgtgttggtccataaaaaatatggatcatgtcgtatcatgccaatatcttaaagagtaggcccaacacgccctgtaagcctatatttttatgtcgtgcttgaatttgtatcatgttgtacttgagctagcgcctttttcataaatatgtcagcctgttttcttatatgggctcgtatttagatttcactttttcactactgcttttacaattaataaattaattactaaattatatgcatttttatattttgaattgcttattattattattattattattattattattataagaattttgaccgtgttacgcttattataagttattctaattaattgtgtgcttatgtattacgcctttcagatttagtgtgtcgtatcgtgcttaagtttattttttttatgtcatgtcgtgacaatttgcatcatcatatcttatgatgttcaatcctatatttttttcatatctatttcatgccgtgtcgaaaatttgagctcatattttcaactgatatatgcttgttctagattctttaagaataaccacaacaattggtaggtaaaaatcctagatttcttgtagtgaaatgaattgattagtagttatatggtttgacaagtactaacacattaatttctgcctaacctggttttgttttaatagtacttattttaagaggggacctaacctagaattttgtagaaagaaaaaaatttgggagccctattccacttgctagatataattacactagaatagtatttatttaattataggttaaaccttcatcctattaggtggttcttatttttttttttattttattttatttttattttttttggtctagtaacagaaaatgatggtataatgcaagttacaaggattttatatctatcaaaatatatatatacacattttctttacaaaaataataaaaataacatattgtaggacttttagtttataccttatggtatgtggtagtttttttaccaataaaattaaagttaaatagagattacgtaatatggtagtatgaacgcacacatgaaattattttttctggttaaaaacaaaagtggttgctttataaaaaaaattgttaaaaaaacagaaaagagggttgttattttatttc

SEQ ID NO: 203231 - DNA, 806 bp, Cannabis indica
tggctgggttgtcttcgtcaaggaagaaggccaatctttgacttcgtagtgccatcatcgaggcctgagaaggggaaggggggttgggtggttcatcttgctcttgggagaggaagaagggtcgaggtcttccttcccaatagtttagcttaagtttttctttttatgttttagtttttaggttgaaacaggttagaaaaattaaaatttaaaaactaaaaaaaaaattaaatgttcaggttggtgggcgggtacgggtccaacctgaacccaagcatgtgtagaaaacaaacaaaaccccgcccgatgaagctgatagggttgcactcaacccgcctgtaaggaacatgtttttccacgcagcttggttcgatgggtcaagatcaggtcaaactcgacaaaaatgttcacttctaatgctaagtgtgcacgatgtaaatttttagtggtccaagtaatttttattgtttaaatattataaaaataatttaagaaatataaaagagtaaataaataaataatttttaagtttttcttttattttatttttttcttttccttacttcttccttcgcccaaatttctaggtgactctttctccctttctctatctccttccctctatgtggcgccagtagccagctcaagtgagtcattccagccactgacgaccctaaaaccagaaagcctgagttggtttgggtcaaaccttactaatcagtcagccatgaaggttgacccaatagtagaatttgaacgagaaattattttttaacaaatctataacaattccaagtgtttaggag

SEQ ID NO: 203232 - DNA, 947 bp, Cannabis indica
ttctcgtgtgttgttgtgtttggaagcaatgtagattcatatgtattatatttttggtttagtatgtgttgctagttttttgttcttgatttacttgttttgatttaacatttatttgtttaagtgtgatcttgaagctgaaattacagaagttaattcttatgtactagaactaaagttcttacattaattttatgggaatgtaaattataagtcccctaaaatttttcaaaaacttatttctacttttttccaaatatgactttacaataaaacgtaatttatcatataatttattataacgtgccaaaacaccacatatacatcttcttcttcttcttttttctttcatttgttaattagcttctttttcatgattttaactatttgcattattttgtaaatgtgtagttttgttttgttattgaaagcaaatatagaacttttattaatttgctaaattagtcaaaatataaggttgtactttaatgggaacatcacccttgttgaacacttgatttggaaaataataagatgatctagcaagactgtgaacaatcatgttagcagattgtttaattaataaaaaataaggaaatattatttgaagaagtaagaagtttacgaaaatcttctataataaccccaaaagaagaaagtatagataaaaaaattcgaataacgtgtaatgctaccaagcaatctgaccccaacttcactttcctccatggttgagttagccatcactaattttccttgagagtctcaagcgattatgccataaccaaacgcaacttgatcacgaaaatggcagaatcaacagttacctttattgtattctcctgcggtttaatccaaaattgagctccatcaccagcttcaaaacttgaaaaagaagcctttgaacctctattctgggttgacttccattgcacaagataactcat

SEQ ID NO: 203233 - DNA, 659 bp, Cannabis indica
atgtatatgatacattttacttctatattttcactttttgtcacacattattaattgtatattaattatatgttgaagaaatgacacacatacgcgtacaattgtacataattcgactaattcttctggttttttgttcagaagattatcttcttcttctctatttgtttgttttacttttcaactttattaattggttgtttctggcgtttggcctgctattcttttatatacaatataatcatgaatatacagttatatccttcttccttctctgttgaggggctgttaactaattataagcaccaaacgataataataaaaatcaaaagataataataaatagtactactaatcataataattgggctaatatttctgaccaaacgcgcaaactacgtacataaccatgcaaattgcaaaagcattaatggaatggaatccaccagttttgattcaatcaaacagtacacgtacactgcagattccagctatatatacctacttacactctacatatatatatatacctcttttattgatcagttccaagctttgagcatttgaccttaaggccggcttttttgacttttcattcttacctcctctagttgaccagctttaaaagcctttgaccttcaaacccatgtcttatatat

SEQ ID NO: 203234 - DNA, 1866 bp, Cannabis indica
tctctttcgacctagaaggaaaccaaagggggattcaagagaaggttaagtattattttgtcaatgatagaagttatgatgattaattttagggaaggaccgtcttctctaagatcagtcttcgatctggttattaccagttgaagattcgagagaagggtatttccaaagtagcttttcatacccgatgacttcgtgaatgttttcattaatgatattctgatttcttccaactcaaactcaaagaaggcatttgagatgtatttttggatggtgttgtaatgttttgggagcctaaacttcatgctaaatacaggaaaagcaaattttgccgaccctaagtaggtttcttacaagatgagatggatatagatagtacctttatagattcggcaaggattaaagcagtttagagttgacttcaacccaagtctacaactaaggttagaggttttctagaattaacaagatgctatggaatatttgttcagggatgtttatacttttagtagaattacgtcgaaggaattgaaatagaggttaactagtgtaccagtgttaacattgcgagataatgaggagaaatttgtgatttagtgtgacacttctaaacaatgattagattatattttgatacagtccaggaaagttattatctgtgcttctaaacgattgaagaagtgtgagtaagagtacgccagttatgatatataattgatagcagtggcttccgccttgggagtctgacgcttttacatttttagtaaaagtgcaaagtttgtacggattataggagcctcaaagactttatcatttggaaaaaaaaattaattaggaggcagcgatgatggttagagctgaataaaaattataacagtgtgatttcctaccactctatgaagcaaattataggcccagcagagtgacttcgaattataggggtacaaagaaagatttggaaccgattcgagaaaggactttttgatttcgtctgaaggaattttctgatatgaagttaaagtttgtgtacaagtcagataaggatattgaatagaaggttctaaatgagttttatataatgtcatactctttacacctaggagcaactaagatatttcaagatgttaaagccctttgctaatctatttgttaaggaaataattcaaccttgtgatgcttcaaaagtaattatctcagattgagatttaaagttcacatctaaatgctgagagagtctgtaacaagcatgtgtaatagattttgagggttcctgaaataagcataatccgctgaatgagttttcgtataataacatttattagtgtactggtaatgtggcactgatgcagtttaaagattcaagtttgtatgtagatttatataatggatgaaagagctatgctgatccaaagtgtagagatattaaattccaagttgggaattttatctttctttaggtggttccaatgaggggaactcagaaatttgaaataaaggaaagttaagtcccagattaatcagtccgtttgagtttctggaaaggagaggttaggtagcttttcagctagccataatccctaccttacttggagttcataatttgtaattcaatgttaagatgtatgaggtagatataattcgtataccgagttacggaggtatggaactttgaataaacttgtcatagaagcaatagtcgattcaggttcaagcgcaagaaaagagaaagtactacgaaccaaagactatatcgttagttaaagttctgtgccggaacaacaaggttgaagaagcgacttgcgagttagagtcacaaatgcgagagcagtatcccgagatttttagataaatttcgaggatgaaatt

SEQ ID NO: 203235 - DNA, 569 bp, Cannabis indica
aataatgataaaaagaaaatagactaaatactcctcacaaatttaattctcaaatacaatataaatatatattaaattagaccatcaattttctccagctaaagactaataaaataaatacagggaaaaaattaatacaacaacaataaaaaattagtgcggacatgttatctagctagcattagattaatatgtttgaaagctaatatctcattaagatttgataatatttgtttgattatggttagttcgaccaacaaattcttttggaaccaaacacttctcctctgagtacaatctctcttgaacaatgggagatgttaacacctcaagctctttcaccttcaacacttcttctttacccatcttctgtttcagtatacaaatattccattaattaatcaaactttcattcatagaaaagaaaaagttattatagtgagaaatagtaatgttaagcagcaattaattaattaatcacttgaggctagcacaagttgctggatgtgtgttggaggttctgggttcgagttccaagtaaaacatgctattgtaatatataaacgctt

SEQ ID NO: 203236 - DNA, 592 bp, Cannabis indica
cccaaatcaatcaaattgcctcattctccttccctcaagatctcagcaaacccacttacctattttaccaataaaaaataaataataaatgaacacagaaatagatgaacaaaaatttctagtatcagattagatcagagagaaagtgggaagatttcttcttcttcatcaacctagaaaatcccccatcttcctcaagctccagcccataaatccaaaaaatccaccacgagctccgcccccataaatctagaaaatcctcctcccgagctccctcttcctcaatcattctcatttttttttcttttctttaatctcaacaaaaaacaaaatacatataagaacagtggtgtgattgagacaaatcaagaagagcctcccaaatcatggtggtccatggccaaaaccaatggcctaacttgctgctacgagaccccaaatctgggctattgattttaaatctcatcaccgtcaaacgctgtaaacaatgtcatcacatccctgccggccacagttggtctcgaagccaaatcgaagcagacttcggcgccgcaccaagccaagaggaagcatcgtggaaagagaagagaag

SEQ ID NO: 203237 - DNA, 1433 bp, Cannabis indica
aaaaaaaaaagaaaaaactcaaagatatgcaataacccatccaatgtcattgtagttggctatataaggtataatttctgtctaataatccacatctataatgacttttcattgttctagtaatagtagttttttggttgtaccatatatagacatatttcacttattattatttttttctaataaaaaatcttattaatattataagataatgtttcagtagaagtattaaaaacaactttatgtaaagttattgttttttaatatgtgttattattttattttatgtccattcaaaattacttccttatttttttttatatatataattatttgttaaaaacactgtcattccttttaaacaaaacaaaaaaattatcatttacttctctcttcttttcctccctctattttttcaaaaattacttatcaaaaaaccttaattataaccaaaactaagagctttgatattttttcttttaagaaaaatagaggtcgagactcaatttttttctaatggcgaagccaaagaacaatacaagaaaaaaaaaattgtacatatctctcctctgagatcatatctaccaaaaataaatttttttttgtggatatagtatttttgacaaataattataaaaagaataaataagaaaatcaaattaaatatggacataaaatgaaataatgatacctattaaaaaatgtactctacataaagtcattttcaatacctttattgaagtattatccaatattataaatattttaagtatttttaattagtgtaaaagatattaatttaaaatgaataaatatcacaaaacaattaagtataatttaaaaatgattttagtgttatatattataattttaggatgtttcactttaattatatataaataagaagagtataataatagaaaaaatggagagtgattattattcaatgttatcattataaagcatttgtcaataaattattttaaatgattaaagtatacttctaaatgattaaagtatacttctaaaattggtttattctataaaattaaaccaactttaatttagtatttaattaatagttataaatataattttttagtgggtatatgactctttttagttaatttatatcacattatataaataatggttgaaattttgaaatattaaagctttttattttatttttactctatattactgaaacaaattaagaggtatttgtaaagtaaattcatttgtttaattggcatattttaaattggaccaaaagtaagagaaatttaaattcacttttaccattttttttttcatgtatatatgttcgttttttaaattttctaattttatgaaatacttttacagaaataacattctattagctttttaaaattatttatacattgttttcttaaccctaattatctctg

SEQ ID NO: 203238 - DNA, 1019 bp, Cannabis indica
ataaaatctaaaaaatcgtaaaaatattaaaaatttcggacaaacctttttttttatatatatatattttttgttatttttaaatttttttgaaattatctattctattaatatgcaatataagtaggtagcgatgcacatttacccatagggggactgttcataataataagttgtgtttattaattaataactaatgtgtaacattataatttttgtatagtttaatctttaatgtttttatacattgaatttttattataaattttattttttattaggagatttcccgaatgattaaaatctttaatggaatggaaatgggggagcactctccactaatttctcatcttggagctattcatagcaactttttttaaaaggcattctacaaagaaagatactaattgttgtgtaaaagtataaatttttctaatattttagagggatcaatgtaaatattttaaagggctacactatgtgtaaacttttattcttttttcatgcttactaatctatgatcatatcaacattaaaaaaaattagggtgttatggccatgatgaattaatacctgtatacataatcacaggcttgttaccaggaagaacagtagcagatcccgaccagcaaccgtttatgtcgtaatcttcggaagggaatatggctggttcaagagattcccagttaaccatatcttctgaaactgaatgtgcccatacaatatttccccatacagctccccatggattgtattgataaaataaatggtaaattcctttgaagtacataggtcctttaaaaaaaacaaaactaaattcaataggaaaattcataaataaataaataaataaaattattgttgattagagagaatacttaccatttgggtcttgttaattttgcccaattacataacaatggaaaaacaaaataaaacaaagttagaactcataatcaaataatctaatttatgaagaaaaataagaatattacataaaatatataattaaaaaaatt

SEQ ID NO: 203239 - DNA, 1273 bp, Cannabis indica
atgtaaatatccatgtatatgtagaaacacaaaaactaaattggaggccaaaagtttaactaataatgagaataaacaaggaattatatatataataaactccattaatacataccgcaaagatcactgtacatgggagcgcgatctcatacatgatttaaaagaaaaagaaaaaagagagtacgtaatttgtacagaaacaactcctgaaccccatatatatatatataatcagaatctcgtcatcgacggccaggagagaaaactgaagctacagagtgagctaatccgacaactatccccatctttacttgccctctctttgggatcggacgactaggaattctcgacgacaagtttctaccgctgatcgttatggttctgctccttgtgtaactttccatggtctcttcttcttctagtaagtaattaatgatctcaacctcaacacttaaaaatatatatatatacttgattttgtgatgagagcgcatttgacaaaggcttcttatataggcttcagtttgtacttagcagtctcttcaccattttaaccttgctgttatttattattataatttaatttcattctatagtataaagtcataattataatatatatataggaaagtatggggtctacatttacatctacaatgtccatacataattaaagggatggtccgattaaagattattaataattataatgatgaattatccatctattttttattgctatgttgcttatgctcactacaaaaaacttcacttttagtcataataaaacatgttgctttctgattgaatttagggcagttgattttgtggctgggaaaagaagtctttggcatgatgagcaacttctacttcaacttctgcttccaacataatgtctgatccttttatattattctctgaattcacattcaccaacttaattaacatgcatgtataagaatcaacaaatttacagcattacaaaatttaattaagataaatacaagatgaaatgaatttatgtgtgtactttatactaaatttaactatttatttatgcttttaaattttgtggttgaataactctaaaaagagctaaaagtagaagcagaaaaggtagacaaactataactaaaatgagaaatttcttcaaataaaaataaaaagcaaagcatatgaaaacaaatgtcatgtttcaaaacaaaaccgaaaatgatttctaactaaatgagaaatttcttcaataaaacaaaaagcaaagcatatgaaaaca

SEQ ID NO: 203240 - DNA, 542 bp, Cannabis indica
ttttttttttttttggtgggggcatcatagcatacaatataagttatataaaacacaacatgtaaaatgaccaaattgcccttattcaaaataagaaagtgaagtgctttcaatatattgtggtagtagttgggtttttcacattctttcatggaataaaggcaaagaaaagaaaagtatacgttatagagttctttttctattatttttcatttatttgaaataagcaagaggcaaaagagtaaggtaaaaagactaaagaggacaagttttcaaacgttggatcccaaaaatctaaatgattacaaagaagagacctttgtttttttatcatgctctttatttacattatgtaacccatttaatagaccatacttaatgaaagatttctattcactctcatatcaaattatataacatgtttttactttgtttgttagctttaattttgttttgtttttgattagttaaaaagaaagtgggaaagagaagacttcacttacaagcatgttaatggggtcaataatcaaagtttttttttt

SEQ ID NO: 203241 - DNA, 824 bp, Cannabis indica
ttttaattatatatttttttattaaatatgttgtacttatttataatcatttaaatatttgattgtaggcataattatttttttttagacgtctgtaaacaaattaattgaattttattttaatatggtaaattatttaaaatattctaaaaatttagaagtaattttatacaaataatgtatatgcactgaaacagttttttaaaaaagtatactgtatagatttttccaaccaaaaattaaaaactttacattaaaaaatcactttcttcaaagaccaaatatacttttttaatttcaatgaagattataagttcattcttcaaaaaaaaaaaagaattatttgactatatatgtttaaacatgaaaagttgtacaaattaggtttggcttttaatactcgttcgtgtgacgtggatgaaacgagcgttttataacagtaataaatataataacgacctaatgaaatgagagccaaaaagtgtgtacctttccatattacccaattacttactcaaccttattcatcaaataaaaataaaattatttaattatttttttgtgtgttttttatatgtaattaatttgtatcctccaatagtcatgttaattaaaaaaaatatgtggatcctatatatatacagagacaaaataagtgtaattaattagtgtatataatattaatatatgtattagttttgtattaattataatggtatttatttaaagtgaaattcattattactatactgaaaaatgcaaaggccacgttccttattatacaaaaaaaaccatatactatacgtactctctctctctctctc

SEQ ID NO: 203242 - DNA, 654 bp, Cannabis indica
ttcgcccgacctctaatgaaattcaaaggctttgcattttttttttcttgttcttgagtttatggtcagtggcggaacgagactccacttttaagagggccaagtataaagatttttggttttttacaatacaaatatatagaggaaatttttaatatataggtgtatcaaaagactctatgcataggagtgtcattcagtgaataaaagagcttcgtggcattgtttttttctaacaacaaatttgaatggtcacctacccattttttaaaaaagcaaacgaaactcagttaattgacattcatatatttaatttaattagagatttggaaattttatcccaatgtttattttggaattttcttctatctttattttaggtctgtaaatccatgtgttctttgtattcttaaacctcttaccacaatggacttttaagactagaatcacaaaaaatatccatttaatctgttttggatctctcaattacagtagaagaaaaagagagataaaaaaaaatgagaatttaattagaggatggattcattgaaagaggtggtggttgggttcatccttaaaggtagtggcgcataaaattttagagacagaatggaagaattgcaagagtgagaaactaacaaaataaaaaaaaaa

SEQ ID NO: 203243 - DNA, 2032 bp, Cannabis indica
cagatagcgacaatgaaaaggtttatttttgctaaacttttatgggttaagactaattttttctgaaaggataaagtaaattgtaatctcatatgtaatctgaagaacttaatcgttagatgattttctgagtaaataaattgtaataaatgtgagaccgtaatgttagtttttaatcaatgttaaaatatctgtaatgggccttaaagggaattaaaatcaagaaagctctttcttatttgttcatgtgtgtattttgcatgtttaagaaacaagtttttataaatcttttatcatgtaagttagttgatcaagttttatttcatgttcatccctttccatctcctttcccttataatatattaccgattaattaaagtgccaatgtgtttaggacgacgaagagcatgaagaggttcaagttcagcctcccactgattccatagagaaaaataacacccatgatgactctaagccacttgctccagaacaaattaatgaaaatgatgcgggtaatatttctcaagttggtatttaggtaatactatatttattatgtttgttttgttctacatagacctgtttatgattgtgtttatatttgatttgaaatagatagaaacaagccaaagttttgagaaaacatgacaagtctgtagcaaatttcataggaacctttttgaacactttcaactacacattgctttgcatttgcattttcacatttgctatattacctgtgttgggggttagtcatatcaaacactgaaatttgttttagtaaaatttactcaatgatacttaacaacaattattttctcaattgtactttgtagaaaagagtgattgtttttttgttgtggctcttgtttttatgtagtctttttgtgatatttttcttttttgtcatgaattataagaagattgatttgttttgttttcattgattttcaacattttaagaaagattgccatcacctaaaacatgcacatcctactagttttatcaaaaaaaatagataaaagatcacatgtatgcttttaaattctttagtgggataattttgtaatagacttctttaatcaaaaaacattttgtagtatacttgtataaatagaatgagtgatgattgtatataatgattctattttcagactatgttgggaaaatttaactgattttgttgatatttcagcatttggaaatattttagtcaccttaaatgcttactaagagactaataataagattgattggtggtgacatagctaggatggtacataagttttctagtttcatcttcttactctcattctaaatataaaatatctttttgatcaaattttgaaatcctaataatatttctttttcttgtaaattattacagccaaaaaaaaaatggttgtccaacctacttgttgggcactttagtgcacttaattaactagattttcaatccaacaacttacatttttctcctctaacaaatactagtgaaattagacagtgggatgtcatgactcaattaatctagctgcacttatgaacctatctatgttgttatagtcactatttcattcagttatattaaaacttaattttcctttgatattgaaatgtttgattccaacccaataatggaaagcttggggcttttgcatcaagaaatggagttggttttctaaacattgagactagaaaagttcatttcacggaaaggtatagataaatcaattatttaaattaacatttttatctacttaactagttatttattaaaatttatatttttaatcaggtacataaggaaaatgttcactaactcaatgttgggcagactaagagaatgattcatggtttgaaatatataattttaattattatgatatttctttttggatacaatttttgacagctttttgctttcacataacactcctataaatgccacaacttatgtaatcataaaatttgattcctagtagaccctgtattttaaagctcactaatattgtcttgaagtcttcaagt

SEQ ID NO: 203244 - DNA, 907 bp, Cannabis indica
cttttttttttttttcaatagaaacacataggataaggcaacctagagcttgatgaggaaatcaaccccaatttttttattttttaaagcataattaactcatatatgagttatatatattattggactcataatagtatacaaaagacaggcaagcaacattatcatgcaataacaaacttttgatataaacaattaactcattgacgtctctacaaccatcttccttactatggactacttaaacagtgtcgaaaatctaattccagtgtgaatgttcaaacgcctctcaaaatcaatatttggacatttttcttaaatattttaaaattttaaaatgagatcaaacaatactctcaaataagataaactttagctattttaccattcctcttaccacaataaataaatagtaccttttttttttgaataaaatttaaaatttcattacaaagaaatttcatcaattacaagagaatgaactatcaacacactgaataataacacgacatgtatggttaaacaagagtttctcgcaatacaatgagttgtcttatttgtagatcgtttaacaaaacgtaaatacattactagtagaggaaagtaacacacgacagctattcacaatcaagccaaatttagagggaagaatggcatttatagatagattgaacacacaatagactttcagtttcaaggtaataataataataataacaataacttacaattttagagcttcatgtcaccgtcttatgtaataataataataacaacaacaataacaacaacaataatgtacgattttagagcgtcatctcactgtcttatataataataataataataataataataataataagaaaacgtgtggtggtatattatatatatagtggttttttta

SEQ ID NO: 203245 - DNA, 881 bp, Cannabis indica
acattaacatcttactttttgagatattgatgaatatctagtttaaacctttaactgcccaagtctcgtcatatagtacaactataaatacagttgaatctgcaaacaaaaatggcaaaaattagtttaggaaaaatatatcgagagatatcgcaagtgatgtcgcaacatgcatgtcgttaaccatgtcgacaattacatcgcagagaatcgccacaagtcgataaatgtctttctctacttcaccaaaatattttctaagaacatcgacacatatcgcaaataatatcgatagacatcgcagaagtcgtaagtaaaaagcaaaaatacactaatgtcgtaaatttaatcgctacatatgttgctacatgtcgttaaaattcattcctaaccttcagcctactctaatgtcgctaaatatcgccaaagtatcgttaaacatcgctaaaactcaaaaataaaccaaaaaatacaaaatttgagcagctcgagtttcaagaacaaaacaacaaaaataaaagaatgatatgtatagatctatattcatatcaatctaaatacaactaaatttaacaataattaccaaataaattacatacccattatttttttcaagaattatgtcggtagagagtttgtaaacacacttggttgtcagacaaaattgatgaactccgacaaatggtgtgtgtgtgactaatttgtagagagagagacacgggaatggaagaggaaagataggggaaggagtttagttttcttattaaagggtaattttagtactaaaaaagatgtagcatattttgtttgatgtttaatagggtgacatataattagatcatgcaacacaatatttaggcatgaataatcaaatttcatta

SEQ ID NO: 203246 - DNA, 1818 bp, Cannabis indica
acaacctcctcacttctgggctgttgatgtaacatccccaaagcagtcgccgcaccaccattgaatcttccagcaaacatctcatctgtctcattcccatcacgcaaccactaagagcccgccaggttgtttcgtcgtcgtggttgagacctcatccaatcaccatacgactttatgatcatctcgactgttgtatcaaaaagcttaggacaaaacttctcagagtgccctattataccacagataaagcaaaatgtggggatatatcatatttgaattcggcccagaaaccatcctccattgcagtctggcggagcttcctacgccttttcaaagggatagtaatatccaatgtaacccgaacacacatataatctctccacacattctaaaaattcttaggatcagccttaacgtacgtaccaacaaaattaccctaattctccacaacactcgcagactttaaccccggttggagaccatggatttgcacccagatgtcgagattgtttagcactacccttttcggatcatctctccttcttagcttgtgaaaaacaaactgaactctattaaacgtccaagggcttccctctaccaccctttctaaatcaatttcatggaaaaaatgaaatagataacggttggtgtcaatgtccttagcataaacccccttgcctggctgccacaaaaaggccataacatggcgcattgcttcaaagtcaatggctcttccagtcaataatcgacccataatacataactcaacattcaaagcttgatcatcagggacaaggaaatcaatccccaactccccatcatcctctccctcaagtgaaatattcgcatattgttcatccacctcttgatacaatgtactactagaagccatgacactttatatgtgcctgccccgaccctataataaccataccaacaaaacaaagccccacccaatatatctaccttccacaacccagctcggaccacaccaaatagagtccttacccacctaacttcaaccggaccccaggaacacaacacccagtcacaccccaacccaacaccacagaccccaggaactcaagaaacacccagccgcacccgaaaccaacaccacagaccctaggaacacaagaaacacccagccgcatcccaacccaacaccacagacccaccaacaacccagaaacccagacacaccccgagcaaacccgaatcaaactcacacacccaagcaaccagattctacccctaagaaaacgttccagaaaccagattcaaacccgaagaaaacgcaccaggaacaaccccaagaaaactcacacacccaagcaaaccagattcaaacgcccaacaacctcaagagaacaacccgatacttgcagaaaattagacacaaaaatcaacccaaaaaaacaacatcaaacacaaaacaaagacaacacaccatgtcacaatagacaagacatacacccgagaaacaacgccgaccgatgaggaactacgacggagaagacgccgccccaaaggattcactgatgcagaagagaaacgacgctgcacacctgtgagaagtagctggatcatctaagaactgccaccggccgacgacttaccgacgactagggtttcttcagtccgtgaatttcttcagtcgcagccgcacatctagaatttcttcagtccgtgagtttcttcaggagagagacgcacgcctagggttttttccttcaagagagggacgcacgccttatacattataatacttaattgcattatatgtgcaaaaaacatcatttacaatttatcatacat

SEQ ID NO: 203247 - DNA, 672 bp, Cannabis indica
ttggaaaatggaatagcttttgggatcatctgcactactacttttggaccttcctgtgaaagataagagccataattcacacgccatcttctttattattatatgttttaatctctcttcatgacttgtctttctcattgacagaaacttggctcatattatttaatatataatggcagtaggagggaggtgtacattgtttgattttgagattttttttttcttcttttttaatccacaccacatgtatttccatttgaggaaagctcaagctgaagttgacagtgatacttttataacccatatgtggtgttgtacgatataaaaccaaaactaccattgtattcggagatcattttggcttttcctaaataatcaaaatatgtacattttttttataatgaaacaactttatgaaacaaagcaaaattaaatggtagcaacaagaggtggtacctccctagcgaaaaagaaacttcaagtaatagacatagcagcacaaaccgctaatctatgagcactaacattaacattagcaagtttaagaatctaagacacaacaaagtaagggaaaagatctatcaaccaaaaagataaagaaaaacagcagtacaagtctagcttgaagtctttgattgaagtatctgaaaattagtgaaaagattactctaa

SEQ ID NO: 203248 - DNA, 906 bp, Cannabis indica
tttttttttttgaataatttatttccttacttatatacccactatccacacatgaatgatcatttatttttttttttttctaaatcaatgattattaaaatttcaatgataaaaaaaaatataaaaagagtttgtcttcagtacttcattcattatataataaaaacttagataaattaataattaattacctagtggtcgagtattaattagtacccactcgcagccgcattttaatatttcatttcatgcacgtaaatttcattttaatcataaagttaattgcaatttgcaaaagtgagcctatatataatatataaatatagtcgaatctataacactaatttgacagccacccactacaaaaatagattctaaataatggatgcaaaacctctaaaccaaaactctactttgtttccaaatgaacatatttatatattgtgtgaatggcatatatatactcaaaaggtatttttaaattttttttgtttgattattctatatgtttctacaaattaatatattataaatttataatatttaaataaaataattatgtcatactagggccggttcttatagtgtgcaagttgagctacactacagggcccccaaaaaataaagaagccaatatatattttgaaatttacacatgtgaatggatgtttgtgtatttagtcccaataataacttagtttttctaattattaatattaccgctactttataccgtttttaaaatttaatccatttctagtactttttgaacacgctgaagaaatggatgatgtcaacgacagttggatgtgacgtgcgtcatgaggcgcagagtgcgtgatcatgcctccttctgtaaacctcctttgtaaacatattttgtaaaactacctcttataaaacatg

SEQ ID NO: 203249 - DNA, 1671 bp, Cannabis indica
cttactggtgcatgacttggattcctacatggctccttactttttggagatattgtcagaaggaatattctagaattgtacaaattatgtacaacaaatattgtgcactgtaatcattgtttttgcaatattccctttgcttaatcttctgccatatgtcctttgttcaatggataagatcaactcttgtaatacttaaatatcaattgaattactcattttcattgagctgagatttgcaacttttgttttctctgttttactaataattccacttgctattagagccattgttggctactgccatggccacaaacgaatctcacactccagggagaggtgcaggacaaactccctcgatcaactcaggtattgtatctcctgggtcatcatcgacaaactcaagaatagtggctactcctttcagtaataccctgagccagcctttcacaatgaagctggacaggagtacctttccactgtggaagacaatggtcatgaccattattagagggcatcgtctggaaggatttctcaatggtaccaaaccatgtcctccagagtttctgatatctgagaatggtgaaatagaaatctcaaatccaaatccagagtatgaactttggataactcatgaccaacttttgatgggttggctttttggatcgatgacagaaggcattgcctctgaagtcattggctgcagatatgctgcaagcctatggacagcccttgaagatttgtatggagctcattcaagagctaatatggaggatctcagaaccaagctgcagacagtaaggaagggttctcaatccatgattgattatctgaaacaaaagcaactgtgggcggacactcttgctctggcaggggagccttaccctgataatctgcttcgaggtaatgtcttgtctggttagctcaatatctgactattgttgtgccccttgaagccaggataaccctctcatgacaggagctctctagcacactcctcagttttgacagtaagctagagaggctcacatctttctctactaactccaaacagattgataatcctactgcaaatatggctcaaaaaccatataatccatgttataatcctagccatggtcgtggtagatctggaaacaactataaccatggtcggggtaataattagcaccctagaatggcttgaggaggtggcacaagaggaagaggaagagggggcaggcacaacaattccaaacccacatgccaggtgtgtggaaaatatgggcattctactgttgtgtgttacaacaggtatgatgaaagctacactggtcagccaccaaacagtgaacactcacaggaaaaacaacagcaatatgccttagttgctacactagagactctacatgatgaaggatggtatgttgacagtggtgccagcaaccatttgacatctgaggcaggaaaaatcaacaacaagactgactatggtggtaaggagaaagtaattataggttatggtagtaagttgcatatttcaaagattggaaataccactctcacttctcttactgactcacctctagttctcaaagatgtgttacatgtgccctctattgcaaaaaacttagttagtgtttcaaaactaacacaagacaacaatgtatcaattgaattttttgctggttt

SEQ ID NO: 203250 - DNA, 679 bp, Cannabis indica
atttttacaactttagttaggttttttattagtaagtgtcaaattaatatcatatataaaataattatacataatttatatatatttcatatataaaattctgtattttgttttctttatttatttattgctatgtgtgtgattggtatagagtacactaagtttactttccgaattagaaaataacaaatcaatcccaagattattaatgatcctaaaggtaattaaataatctttcaaaaaattcttaagggtgaaacattaaacaaaattattatcataaattaaaaaaaaaaagttactaaaattgaaataagattaatctcttttaatgactggtataagattttagagatctagttgtagcaagttagtacataaataaaagattcttttactaataaataaatttatatgttttcaatgagaataaatggatatttttggtatgttaatttaataattaattttattttacatgaaaaaatgtgatatcacaatcaatacaaaacatcatttaaaaaaaaaacaatcaatacaaaacatggcacgtgcgacagtgaagtatgtgtaaattcaaccgaagaaaccgcctaaggacggtggctaacacgtgcgatcagctaagattcccgtcaccattaccttcctttcttttattattatttttagttttttt

SEQ ID NO: 203251 - DNA, 647 bp, Cannabis indica
ttatgtcatatcatgacataaattagcaattcttaggatttgctattcttgtggggctcttaaggccaaataaaacttccaccttagttttgaagaggatgaagacgatttttttttgggagaggggtgtaatccaatatagcgacgatttaaaaccgtcggctgtactatagcctgccgttttcaaccgttgaattttttttctccaatagttttctaccgtcgcttattctacccagtattcgtaacgctgatataagcgacagttttatagaccgttgagaattctttactcgacggtgtaaaactgttaggaattccaaggttttagtagtgctagtacctaaccaaaaacttcaaaaaaatattatatgatctaattttgtcctcattaatatatttaaaatgtttattttattgatatttcttttctcttattcgaattttccccattagggaatgcactttgttcaccttatattaattatattgaacaaacggttgttattagagcatctccattattaaatggtgagaagttaaaatataacttatttaacaaaaaatgtgctataatagtgtgtcaaaaagtggtgtaaatttagcacagtaaatcttgtgtcgaatttgacacaacatttactata

SEQ ID NO: 203252 - DNA, 1305 bp, Cannabis indica
ccgtctgtttgaggatgaaagaccgtactaaactttaaactagtacccatggccctctgcaagctcatccaaaactttgatgtaaacttagggtctctatctgaaataatagattttggtaccccatgaaggcgaacaatttctttcacatacaagtcagcatactgatccaccgtatatgttacttttataggaaagaattgtcttgactttgtaaagcgatccactatgacccaaactgagtcgtagattgttgtggttttgggcaaaccgactaaaagtccattgcaatgtcttcccatttccattttggaaatgttaatggctaaagtaatcatgccagtcgttgatgctctactttgatttgctggcatgttaaatatctggtcacataatccactacatcccttttcattttgtaccaccaatattggggcttcagatcctgatacatcttggtggtacccagatccaatgagtaaacatgaagagtggtttcccttaatatgtaataaataaaataggaaatgacataattccataattacaatgcaaataataggaaaccaaggcatattgcctttattctctgacctaatctcacgaatgtagggactaactttgtgtcttggaagcgatgaggcttatctctgaaatttccaactcacatatccttcccagtgcatgtgggttgataacgagattgtacactggttggatgtcccttgataactctgcttagacatcctactatatactgaggacagacatttatatcaacctttgagggtcgctaggagtacttccttccacccaagtaggaaaatataagacacgtgtcttctaggtcattgcgatgtcatagtgcaaaaaataggataacaaagtggattaaagtcatgacgtcaagtgaaaccattgttaggtttcttacttgttgacttaccttgttaggcaatgagatatatggatatcaggttaggtcattgacttgccttattaggcaatgagatatatggatgtcgggttagggcatcagccttgccttattaggcaaagggatataagaataccggaggagtggtattcaggtttattttgtgagacaacagtgataagtcgacgatcctatttaggtagtggcagtgatatgaatactggggagtggtatacgggttgtctagtttgaaaatgacggtaacattttgatactagggattgggtattcatgcttcctggctcagtaataactatgacatttagataccagggattgagtatcaaggttgttttattaaacaacga

SEQ ID NO: 203253 - DNA, 583 bp, Cannabis indica
gcagacttttctttattggtgttaaaacccctgggatatgttggatcattgcttccatcccctcgaacctttgagagatcactcgtttgatcaaatcctcttgagttagagtatgaatggtggtatgacctgcatcaatagaagatggaatcagattggagtttagcataacttgtctggtagttacctgtgatggtgggagtccttcaagaggagaccttgtagttccaacctcaaagttgctagtcgctgggaggttgactgtaggcaggccagttgtaggaaggctgaccgtaggcatgccagttgtatggagactgaccgtaggcagatcggaggccacatggctggtcgttagacctccatagtttttcctatctgtttgcacatcagtatgttcaaattgttggttgagaacctcctaggacagaatgacttcctaacgttggagtcgatgtccctccgagtatttgttgatcaaagacttgggtctctgttcttattggagttaagtctagcggtgccattggtgtacttggaactctgaaccgactttgagtaacaccaggagtcgtcatggtag

SEQ ID NO: 203254 - DNA, 992 bp, Cannabis indica
aacatcaaatgctagtacatataacggtggatatcatgtgattgaactgacatcgcacagtttggcttttttatatattgtgcgtggaactcattttgatcaatagttaagtgaacatccaataagactattgtttagttataatgtactatctatccattccgattaaggataatttctgtaacagttgtcttaatcttatttcagtaaataatgtacgttattttggtgagttaactatgtattaaattcaaccccgtacgtgcagccgttaaaaaaaattcaatttagtttataactaacgataacggaatgtatgatatcgatggagattttacaaagaaataataaaaaaaaaattatgaaattttattcccttgttcaattcactttgtatgtattttttttttttttttgtaaatggcacttcgtatgatattagtagaaaatcttataaaagaatttaaaattatatctttgtctacaattaattgctccgaaagcaatcgaatgagagtgatgtttttttttttttaaggaaaatgttgtcaaatacttaaaattgacatattgtatattattattggtgtattttaaaaattagatcagtataataatactctttttctaattctgtgcaaataatcatgtaaaagaaaaatatacttcttgatattctcttcttttttcatttttcattgcacgtaggtcgtactaaaaaaagttggaagataaaagaaaaagaaaaaaaaaagtaacttttaattgcattatatcatagtccttagattggatgtaaatagtggtacgtaaaaaactagaagaagaagaaagtagaagggggggcaaatagtgatggtggtgggtagttgggtattgacatagctgtattcgggtaggaagtagcaaagacagttgaatattaatgctctgtattcattaatgcttgtacaagtacaactaccacctttgcctacccatggaatcaaatc

SEQ ID NO: 203255 - DNA, 849 bp, Cannabis indica
attattattattattattatacgcccacatcttcattgatttactcatttttagactttctttgcccaaaaagtgagatagtaaataaatacgactattggtccttgaatttgcatataggtagtaggctagattttttttcttctatatatctgacagctatataaagctgagcaagcggatcaaccatacccgtgctcatattctttcttaaaacaaggttttatttttttttacacattttattttttctaaaagtgactcaaaaattgtgggaaaaagacaaaagaaaaaaatgctattctcacatgaaaagataggcaacaatatatttaaattatgccttctcttacattaattaattaattaacgtactaaatattttaattattgttttttaaaaaatatattttaattaatataactgccgtaacagcttaaaatattcctttttccgggttatattaaaaattaaataagtgccagaataataataacaacttgtacaggtacagtagctcactattcacgagtgtagttttttttttatatataattattatgtgatgtgaggatcttttaatatattatatgtaaagtaaatattataccttaaaaagcccaaggaagcttggaatactcctgcgaaaaatgttgctgtgaaagcaaggtgaagataaagagaaggattctcagtaaaactaacttcttggcccaacattgaagccgtcagaagcgaacccacagccactgtccccaccgccaaatctcttgaactccccatcatagcataaatcaaaggcggaataaaacttgaatctataccatatatataatattattaaaaaa

SEQ ID NO: 203256 - DNA, 1581 bp, Cannabis indica
actataattatcccttttcaaactaatggaatttagaatccacccatttgggatgaattttttattaccgctgaaggtaaagatacaactactatgatattcacatgtcgaggcttaaaaatagttaaaactgataacaaacaatagaatattttgaaattttcaacctcgtgctaacactctcacaaactaaacaattcctcaatgaaatacagatccctctctataaaaaagctttctaaaccaactacatattccattcgccttgagtgcctacataaaagccataatttcactgaaaacctatccgtaatcaatatcttaaaactcagcttatcacatataaccttttgcaccatagcacattaaaaagagtactacaataaaacagttaattcaaaattccagctttttacagattcccaaacataataagtttcagccttgagagaaaactcaaccccagcttgatttagtaacttcttactttcttaggcacatagatgctagcagttgtagtccaaaaatatatttttatcacttaatttgtataaaaatacaccatgtaaaggaaaaaaacttggaacatttggaggagttcaatctcatataaatcaacagcgttcaaaaaccgagcaagaaagatcatcaaccaatgaataacaattaaaaaaaaacaaatcaaatttgagacaaacaatctcttactagcaatatacagaataatgataaaacaatgctcatgtacaaaaataaagcccatcggaaatctctcatcatcattcaaattacagtttacaatagaattcaaattgacattggaattggaaaaagaaattaaccaattgacttgagaaggttctagagaaaataggatcttgagtagtctatcctgtacttccgtttaaaaatgattggtatcattgagatattgagattgcaatcattgaaacaaatcaggcaaagatgattcatcctccattttttttcccaaaaacaaattctattcctttctcacaagaaagacaaataacgaattgaaaagagaaaaagaaagtgagaatatgagtcttcgcgaacagattaagggatgtagtagctgctaatgatcaaacagcataaccatgacattgtgttctgatgtattcaaacaatttacgctattgatcaaactagagcatataaacatatatcaaaatgtaatccttcatcatatctaagcccgagtcaagtaaatgttaattaagcagcatgctgccaatatttccataatgtgtccctgtaaattataatttaaatcactgtactataatatgtgctttgccataatttaatgcagttgacaatttaatgggttttcatacttgcttaacaccagaaatgcaagtgagtttggagcatgcattatctgcatgttttaagtagaacaactaccacaaaaatgtagaagcgatcctcacaaacagcaatagaaggaacacaaaacaaaacatttatcagatagctaacccaaaaattaaaaaataaataataaaaaatagttgaactcttttagagatataattcacagaaacacaattc

SEQ ID NO: 203257 - DNA, 1170 bp, Cannabis indica
cctcttccaacatattgacattattatattattatattccctcctaaaaagtagatacttaaaatgactgctaaaccttattaatttagaggaagagagagagagaaagaaaaagatccaatcttgcattattatttacccttagtttgaattcggtattatattagctagctaggttgaagaaaaaaccaacccatccacacacacacacatatatatataatactatctcctcatttctctttggtttttcttaatatctcatcatctaaacacaacacaacaatgtcctttcttgatcagctagcttgtccttttcttttctcttctcatcagtactgtcttatatacaaataaatccagtcaaatctgagatcatcaacagagcttgcttagttataagcttatttctgatgcttccaaaaatggttgatcaagaaacaattattccaaatgggttttcccaaattaaccctcttcttcaaggatctaataataacaacaacaacatcaaccctcctcctttgaaaaagaagagaaaccttcccggaactccaggcaagctcttcttcttcttcacacacacatatatatatatatacataaagatttatacatgtatactaatattattattgttgttgaatttacagatcctgaagctgaggtgatagccttgtcgccgaagactttaatggcgacgaacagattcttgtgtgagatatgtgggaaagggtttcagagagatcagaaccttcaactccataggagagggcacaacctgccatggaagctgaagcagcgaagcagtaaagagcctaagaagagagtttacgtttgccctgaaaagacatgcgtacaccaccatccttccagggctttaggagacttgactggtattaagaagcacttctgtagaaaacacggagagaagaagtggaagtgtgagaagtgttcaaagagatatgccgtacaatccgattggaaagcccactctaagacttgtggaactagagagtacaaatgtgactgtggaactcttttttcacggtatattcactactactaactactactctactttctcttcatttttaattcattattaattacagtaaatatatagtagtagcaatactgaaatttcagataaattaattaaaacttgtt

SEQ ID NO: 203258 - DNA, 571 bp, Cannabis indica
actactactaactactactctactttctcttcatttttaattcattattaattacagtaaatatatagtagtagcaatactgaaatttcagataaattaattaaaacttgtttaattaactagttatagagaaggagtagtgaattagtatgtacacataataggacaaaactatatatatttatgatcttactttgtatggtctataagtatctattaggatgagtttgttatataagtgtattattaatgttgtctctattttaattgaatatatatataacattaagaatcattaacttcatcaaaacctaggtcaatatctctcttctttgaatttctattaatgtagtgatatcttttaattctatcattgtacttattgtttttcgattgtgtgtggcactggcaggcgagacagtttcataactcacagggcattctgtgatgcattagctgaagaaacagcaagagtaaaagcagcctcagacatgaacataataaatccgataatgggagcagcagcagctggaaacctcgcttatcatttcatttcaggaccaaataataa

SEQ ID NO: 203259 - DNA, 1445 bp, Cannabis indica
tatatatataaatttgtgtaattaattattattacctggacaactccctaagatctttttgaagtgtggcttgaattatgttaaagtttaatttggctaaatcaaccaagagactagtagtagttgtagtgttggtatccgggtcaccatgttgacgataagcttctatttgccattttacatcaaaccactgaaccctccaatgagatggaagttccaaagcatgaaccacctcatgtttgggaatatatttgttgcagttgtcaggaaaggcaattttgaggttttcttccatcaaagctttagcctcagttagagtgtcctcacactcaaaagctacatgtgaggcctctaaaagctctatcatcactttcacctctgttgatgtgatattatgtgtcccaccaccttttttgtaatccacactattgtagccaacaaatatgtctgtaaacatgcatattgttcatgtaatgtcaattaattatatatatataaatgcagtccctacaacagtactactaaaaatagtataccacagtaggatttttatagaagggtatttgcttgggtaatgaaacagaaagtaattaatggaatggaaattatttttatttcatttctttaactctttttttgaaggtaaggaggctagcaggactaagaaagaaagctgagaaacctcattaccaatccaacaaattttcgaatatattggttgctttataaagttttaataatatattctaatgtgtttgacttttttattatcactacaaaaaaatttattttcatcatcacaataaaatttgtgaccaaaatgaaaaaactgtgaattattataaattattcattttatgttataactaaaacatccattactaaagatattagttgcaaaattgtaactaaatgtatttttagtcacaacaattgttatgactaaaattaaattaataacaacttgtatttaaatactatgttttagtcataagtaattttttgttgtaattataaaagtcacatttagtcacaaaaaatttatgttgtgactaaaatgttgttaatagtagttttggttttttttttttaatttgtactatattttggtgaaattctattttcaatccatccaaagaagaaaacgtattaatgcacagattattcagtttaattatataatatattaaatatatatatatataattctaatttcatctcccatatttattcttattgatctgctcttcttatttaaaccatgacttctttaagtaaactgatctaattatactcatatatatacgtacgtaccttgtgaaacatgatatccatgaagcctaagaagcctgaaatataatgcagcgagatagagatcgtctcctacggaggcggggatctttaatgtctttattatgtagtagtaattggaagatgatattttg

SEQ ID NO: 203260 - DNA, 918 bp, Cannabis indica
ctcagccaatatatgcatacgtgtacactactcatatatatcccatctaattcaaactaaccaaactcaaccgctttcttacaaaattatgaggtcatatataattactcaacatttcatcaaaaaaaaaaaaaatatgtgtagagaaagtgaataactattgtaatagacttccatcatagtaaataactacgtaacctaccaaatatatataaattgtgttgaaataaatattttgaatatccatttgtcgaagaaatataaatgttgttacatgcatgcacacacgaagataaaagacttgttttattgatttttcagcaatgcttggctatactcaaaaattcaataaatatatacgaataaattaaatatattattgtatatattagttatgtatatagtacccacttgttagttgtaaaatgatatagaaacacatgtttttgtacttaaaatgtacacctaacctaacccaataagtctaaaatattatgatttattatatattaggaaagaaaaagttggaatatatatatttacatatatatagcatttagtgtgaaaaaagaaaacttcattggatataatcaaaattaatgagtatgaaaacaatgttttagtttcaaattaaagatgaaaactaaattttctaatttaatctcttcatgaattaattgatataatacttaagttgggagatgactatatattaagggcatttatgtttttgatattgaagaaattaattataatctagttttttttatataatagtctatattatagttatagtaggcatttatttatttatttttttaagaaaattaatagtttataatttcaaaaataaaatttaattattattatcattatttctttaaaaaaaagtttctaatatatacaaaaaaaaaaaaa

SEQ ID NO: 203261 - DNA, 539 bp, Cannabis indica
tcggtcaaaattgagtctttacatttgtgggatgaattttatacagccgagaaattgatgggaatgaatatttagtttctcgattatttccctattattttggataaccaatcattgtatttttttctataaatagtggagccattttattatttaagaatcttgattttcaactttctagcgagccattacactgctaaaataattggaaactttctcgagattatttttaatattttattaataattgatcattcaaaaaataaatttttaataagatataaaaaaatataaaattataattaaaaaattagaaaaaattgaattcatgcatgtattgttattttttttttatgagatttggcttaaaatatagcaatattcataaagtgccttcaatgagataatagaaattgttacattaaattattaagaaaaaaaatattttaaatctgagtttatattatttaatgtactgcaaaaaaatataatgagaagaatgaaggaagaaaaataaatcagtaataaaattttagttt

SEQ ID NO: 203262 - DNA, 1453 bp, Cannabis indica
acttgtactgccatcgaagatgagcctgttctacaagttgacgaagataaacacaaaagcttaacagagcaaaagatatttgaccacatacgtgaaaaggccaaaagctttcccggtttggcagccccaagtattgcatgctctccatcgactgagacactgaatcttatacgaaagcacactcgcgaaaatgaccttgaatcccttagtgatgatgatagcgaagttttgggagagatagaaagaataataaatgcaaggttcacttcgcacaaatcagctatagaacctagtgaggcagagcaatacggacataacaatactgaaaaaccacagcaccatagtacacccaaaagctcatctaacttcaaatgcatggaacaaataggttcattcttttcctggatgaaacttgaggtaaatgtttatcttctctttataccaagtttttaatcgtttaaactctgatcattgaaggtggtgtttcacctgaacctgaagactgcacagtcgaaactttaacagaagaagcaatatttgatcacatacggaaaaaagccaagaattttcctcagttaagtaatttgcagccccgaactgagtcactgtggactatttccgacgatcctacggaaaatgctatattaatatcagattcggaagccggagaggtaggaaactgtgtacgtgatagaaggccgggaaaaagggttaaacccaatgcttcttttggaagccctttccaaataaatgagaagagagtgaaggcttctcctaaagtttcaagcaccgatgctgatctatcatcgactaaaatgctgttgtttgatatctcaatgttgaaaaacgacataggagcagccgacaaacacagctcaatggagattgggaggaagaagcagcagcattctcagtcaccaactttgcaacaaaaccagctatgctcttcgagtacactgggcaaagataagaaagttgagtcatttcttgggtttgagagtgtcttttcttttctttgaatttgtcttccattgcaggggatagaaatatggatgtttgggagttggattgttaaaagaagataaaataaacgacaaacaagcctcagtaaacttccgtaactacctaagagtaaacgacataaatgattccaaaaagtttcccaaaaaaaaaattgattccacaaacgactcaataaattgcactgtatgggtgacacttgtcattaaagccagaagtgaccgacgtcattaaatgatgaaaccacaaaaatgacatcacttattagctaggtggtggcattagttagtaagtagagcagaggtgttcgttattattttgctcatatttccattaattacggattttatattttatatttaatttaatttacgcaataaagttcaatctaatctaattcgtaaagatactttattagatcagctattttaaa

SEQ ID NO: 203263 - DNA, 747 bp, Cannabis indica
tttattttaaaaattatatttatgaatttaatttgaggtttattgaatactatgttttcgagctcttatattcatgcttaaatatcatgccttccacttaaagttttttagatgactacagcaaaaatccaaggaaaagtcatgaattatggttttgcaatgtcttatttgtatttctttaaatcctacacaatttattatgtatagtatattaatattacttgttgagctaaaaatattatttagataaaagaaattataattctaatatatatatatatatttatatatatatatatgaaataagtgtttttattggttacatgatttctggtttgagtaagagaagatgattaatgtgagctatatgattttcaacacaatgctcaataaaaacaaaaacaaaaaagaacctttgttgagttgagttgatgaggggccaccaaataataattgcatgcaataatacaatgctttattccaacaacagcatctacaagctgaaaaaaattgctaacttacttactctaaactatatatgtgtatgtgttttgtgttagtatacaaaatattacttttctcattttcttttgttaactacacttgacttgagttgagcctccaccctgaaatttcaaactccaaacagtaagaaaccccgagatcactgagcatatgtagcttagcttgaatccatgagcgtgtcaaacgcactagttcaagggccattaacttgtatcggcgggg

SEQ ID NO: 203264 - DNA, 1203 bp, Cannabis indica
atgattctactttcatggtaattatctgtggccatttctagttcttttgctgtgaagattttcgttgtctcaacaggtcctttctcagtacttgatagtctttgttgtaacatcagcccaccattttgttcaaagaacttctctttaagcattatcaattttctttttcttactccccaatatagcattatactaattgcaatgagactcaggagccctatacttacacctgcacatatatagaaaagataagatgcttaatttagttagaacatttattttattatagattaaaatttacttcggttaatattcactttaattctcaaaaatggcatggtcaaataagttcaattttggtcagtatataatatcattaatgttatagaataatattgtgcgcaaacaacctctttattattatttacataacccaataaataaataacactgcacaactatattacttaaataatgaatatcattgacaaatttctatcaaaaaaataaaaaatcattgataaattttcttagttatattacttctaatttcataaattttattcttatctagactttgccataacaaatgtaagtggtaaattgaatatcaatttagatttgttcaaattatcaattatatatagtactatattacttttttttgtcaggatatatagtaccattattaatataccacttacagcttcatccacagattttaaaacagtctggctagtccccactctctgtttataaatttatcatttacgtaatgtagctaactagctagccatatacctacctattcaattatttcgaaaacttaattgttcctagattcttttaagctagagtcaagtcgccgtgtggatttttttttccattataaaaaaaccaattaatattaattaaaggaaaaaaaagaacaggcaatatcaatttgattaaaataaatatacgtacgtacccaaaggaatatagaggaagagagctctacgtggtccatttctactgcaagttgtttcattgactcgtttataacccttcaggcatgaacagttaaaggtcccatttacatttatacagttcccgttgatgcacggattttgacctttgcactcgtcaatatctgaataattaaaaaaaaaagagcaagcttaaaagcacataaatagtaataaagtcatctatttttttttt

SEQ ID NO: 203265 - DNA, 2644 bp, Cannabis indica
gtacgaaatcaaaaatatcaacaacatcgttatgatgagcacgaatatggatccaaattcataatatctcaaaaaaatgattaatcaaattatcatcatatataatcttggaattaaatataatttttcatatgagatgaaagatgaagaagaacccgataaagcatttagcgcatattatttgaaacagtgcatgatcattttttatcaatatataatattgactataccaaccatattgtgcaaatatcatatgaatttctacaatattaatttatatattaaagcaattcattagaatataataacacaataataaatgtgaggaagaaagtgatcttacactcgttgtcattggcttgtaaaacaataaaaaactaaagtgatcttaccgtcactgttgtcattgacacatcgctataatcttcttcttctccgtacatttcctcctagatttaaatgctaattttatatctataataattataaataattattaaacaaaattactatttaaatatatttattaattagacccacaaaatgtcttacttaacaaataaaacttctctttattttcttctcaaatttttccttccatagtaaaattcataaataagacataatcttctttagaattctaactgatttactaaaccaattaatttattctacaaggcaatattatctcaaataatgtggagactatgagcctatgtaatttaccaagtaaatttcctaacttattagtttctcttgaatccattataaattcagaattgaactcttaattacatagaacactctatataccaaatatagatacactataaattatctattgtttcaatctaaatatttcaaacttgggattttccttttgaaacccgtctctttcacactatcaatttcagtacttttttttttgcttaattttcagtaattgtatacattcgaaagatgtttaatgatgcagccggttgcaaaaccattgttctcaacttaaaaatattaaatatagcggggttcactccacgtgtgcaatggttttcataccatttatcaccaaacgggatagaatcctttgacaagctaaaggtactctttgtatttaattacagtggaatttgcggcataaatacttattttgttcattttgttgctaataagtacccaattttaaacaattgcggcacaaatactcaaaactccattttaaccatttgttattggtacccactaacagaagttggtattgtaaacacgtgtcatcatctcattatttctaattttttttacctaatttatttaaacaatacaaacataaaatcaaaaactaaaaaaaaaaacacccattcccaatcgcaacagacccaaaaaaaaaaacacccattcccaatcgcaacagacccaaaaaaaaaaaaccttcccaatggcacagaccctccattagtggtaccactaccatgatcaaccttagttcatatgttctctcttcctaaactcatattggaccaaaatttttaggtaatttgagctcaatttttttttttcgtatattaagtcttgcatactataattacaaatacaaatttattatcattattattattgtaatcaaatgtatatatgaataactgctctcccttagcctcagtacgaaaaataataataactataagaaactgatgatatcaaacatcaccatggattttccagctagctcacaacaaacccgcatcgatgtggatatcaccggcaaccaccacatactatcggtttgtcgagcagaagcacctctatttccccctctgacaacgacaagttgtgttagatcatcatcatcaaccaagcgattaataatggaagattgctgaaaaatttggtcagaatatgggtttaagaagagggcagatgcaatttcttgatcttggtgatgcgatttctaattcaaggttggtgtcagtgggactgtgaaattttttaatttttttaaaggtctggtgtgaccataaatctttttattttgtgaaaaaagaaacttttttatggttgtgaacagtgagatttaatattcctgaatttttttggtcccaatatggatttaggaagagagaacatatgaactaaggttgatcatggtggtggtaccattaatggagggtctgtgttcttgggaagattttttttttagggtctgctactgcgattggaaatgggtagtttttttttttttttttatttatttttgattttatgtttgtattgttttaataaattaggtaaaaaaattaaaaataatgagagcatgacacgtgtctactatactaatttctgtcagtgggtaccaataacaaatggttaaaatagagtttttaagtatttgtgccgcaattgtttaaaattaagtacttattagcaacaaaatgaacaaaataagtatttatgcagcaaatttcccttaattatatatgagtttcagcactaaagtactaatttgttcatttaagcacggacaccatgcatttatcaaagtttttttcagcatacatgcaactttccagcccttagctcctttcctctttcaaaagaaaacagctactttcattaaactataaatacagagatataaaaaaaaaaaaaa

SEQ ID NO: 203266 - DNA, 1265 bp, Cannabis indica
taaaaaatttatcatcatcatcaagagggttcaatttattaatatggccatcatgtttatctattttatacgacctattaattaaaattactttttatttctaatttataaaatggtatatgagacaatttaaaatttctgttgtctttgtttttatctttctaatgtatgtcaatttatggtgtatacttataattttttcaattttagtcttatggaattctttcgaaaatgtcatgtacgatcttgttttggtcttttaatttttttaactataataaaatttatgactataaatgcaacaaaacttatgactgattatatttattttttgcatttgtttgtgtaagactacaagttggttatactgaaaaagttgataaaaattgagtttaagttattattttgtatgagtccaatcgataatttttgtaaaatatgattatgaaaaatattaagtatttgattggtttaagagaataataattagttctaactatgaattaaagcccaaactaggtgcttaagaatactgtgggtgatgttaatagatggggacaaattgttgaactatattaccaaaacaatggaagagacaaaataattaatttatacataagaatatgtatctcgatatcagtggacctagaaaattattatctaaggtaggcatttatgtaaattttagagagggacatgaatggacaataaaattataggtaaaacttaaatacaaaaaataaaattttgaaaggaataattacataaagcactattttttgtaaaatatttatatttttacgttcaaagaatattttttttaacacttttacagtttttcaaaaaataacacgaaaacaacataaaatcaacaataaaactatataaagtaaaatgaaaataacatcaaaataacaacaaaaataacatacagataacaaataatcaacaataaattaacaagattacaacatatgtaacgtccccgcttcaagcctccattgggcccttacacccacggactaatggctcttatacacgagtacgtcactctggctgcttcatggactgatgactgaccctacagaccaacacgagtgttttcagcgtgctttgtcctcactcacacgcatcctgggaaaacttcccaggaggtcacccatccttgaaattgctccaggccaagcacgcttaactgtggagttctttcgagatgggctccgaaaaacagatgcaccttgttgatataggtagtaccaatcaat

SEQ ID NO: 203267 - DNA, 1037 bp, Cannabis indica
aaacaaaaaataaatagtttttttttttttaggggaatcaccattgtatgtaagtgttagagtggtacgtaggtccagattcatataaaccctactgatagaatgagcaggcgaccacatagtaataaatctatatacacattaacaattcaacaaacaaaaatttgatgaactggaaatatatatattcgtatgactcaatatatatatacatcaataaattaagtacagaatattgaagctcaatatacaaagcggcgaagataattttcagaaaaattaaaaataaatacaatagcagaaatagaataaacattgggaacaatatattatataaaagagagaatttttattcattaaaataaaaattacaaattacacaccaaacatagagtagttctatgggtcaaggatatagcatacttattacaattaaagacttaaataataacattaattattcgaaattccaggagcatgcatatgcgattgtacacgtacgtacacctcagccagctgatccattcttcaaccttaattcttctattaaacaacgaccaaaattaataattttcttttattagaaaatctaaattaataataaactagaattaattaagatggagttagttaatttacgtaccattttgagatataaatgccaattgaatcaatgaagtggcctgattttccatgaaacccacaatggcgccagtaccttgtattgggtgggagaaagtgctgccaaattcgcatccaaacggtccatgtattttttgaagatttgttgtaaatgataatgctaagatcaccgtcattccattataatatccatatgtcccacttatggatgtcaaaaactctgaaggcccattaatatcaatctatacatattcatgaattaacaaagtagctagctaggtcattacatatatatatataatcaaaataatattcaattagttataataaatacttactgttgttggttcaccacgattgtttggatcctggccaccaaaaggtccatactcgag

SEQ ID NO: 203268 - DNA, 1320 bp, Cannabis indica
gaaacagaaagtggataggctctcatacttaaagttcgcatagcaatacactcctccttgcttctcaacctttttcctccgttttagcggacagtcgatattaatcttcacacgaatccgaaggtaatctcgccacactccaatgaaattgttcggatcagctttaataaaagttcccacaaaattgcccaagtcacgtacaacacgctccaacataaaaccggttgataagttgtgtatttgcacccagaaatccaacttattcaatgtgactgttcgtggattctcgccttgtttcagtctttcaaaaatcagggggacacgatcaaatgtccatgggctcccttcgattactcgttcaatatctacttcatggtagaattgaaaaagaaatagattattagaaagttctttgacatacatacctctgcctggttgccatagcgttgccatcttattttgcattgcttgaaaatccacacttctattagtcaagaatcggcccaccaagcaccatctatcatcaatctctgccaaatcatcattctccccagcataaatcagactatcttcttcctcatcttcaattctaaagttcgcatactgctccgcaatgttgggatctgactggttacccgactccatgacaaaactcaaacgtttattcggacatacacaaacaaaaaggacttttagagagaatatcttaccatgtcaaaagacaagacaggtttgtacataaattaaaacccatacatgaccaattttaataactatgcatttaggggaaaaattatagaatattttaagtatggaaattcaaatttcccatttgttatatatatatgaaaaattaaaaattttaaaatattttcaatttcatattaaaaaaattaaattattttttttaacttaacgttaaattattaaatatatatttttatataatattatattattattattattaattttttattttattatatttaaataaaatcgtgtcaaagtcgtgtcgtgtttgacccgtttttatttcatatcaagtcgtgtcgacctgttttcgattcgtatctaatttttccgaccttaactcgtaaaattcatgtcgtgttcgtgttcgtgtgctgtgtcgaaatttgttttactacccctaatcgagatgaatttctaaatggtggttatttattttttgataggaacccgattattatgaaactttgagatctatataaggactttcaaaaggaagacgtaagggctatataccaacatggattcaacttcatgatttggagctaaaatattagggtgaaaggt

SEQ ID NO: 203269 - DNA, 635 bp, Cannabis indica
ttagtatatatggtggctgcatatatatgaatgtactatattcagagaaaaaaaaatggaatgtattataaatataaagacttcaaacttagtttttttaaaataaagtaagaaccataattcaaccattgaagaaaagtataccagcaggaaaactgaagtttggtcaaaaccaaccaagaataattataatagtagtaataatagtaatataatggattagcttgtccaattactttaagatatgccgaaacttcctctagttacctcaaaattattgtaattttattacccataaatacacttaataatactaatatatatttataatatatcactaaattacgtgccgtttacgacatcgagtgtaggataaggaatatataggtcccatggtttagccatcgctctattaagccgccgccttattgtctttaatttcaatcaaaaatctcccccaccttattatactcccctatcatatatatacatttgtgcacatttttattattattatttaaaataaatattttttgtaaggaaaataaatataattatatacagtgtatataaaaactactatatcacaccctttcttaagctaccgccacataaaaatataatactctctctct

SEQ ID NO: 203270 - DNA, 843 bp, Cannabis indica
tttttcatattattttattatttttacaaaaaaatatattttcttacaaattatataaaaacccataacatatataactaaaacctgataacatatctaacttttccactcttttatgaaatgcactatcaataaggttaagacccacccaacttccatctaccttagacgttctttaaattaggattcacaagtacgtgggcaaactctttcttctaattattttacctaattttggtacacatttagaaattggctttagtacatacacatttgtttaccctttcttttgacatttgtcacaatccaagtaaatatgttttctctaactctaaaccaaaacactaacgtgaaatcattattagcctctttttctctaaacctaatggacggtgaccaaaaaaaaaaaataatacttttttttcaatgaaaacgaaaaaggaaaaacttcattataatacaacttacattcttgaattctagcgtaaatatcattttagatacagtgttttgtaaaatttattaattgatttttctgttttgttaaatgacaaaatgaatcctgtatttttttaaaattgtaaaaatagtactttgagctcaatttttggcaattttatattttaataaaattgtcttaaagataatttataacacgaacagatatatgtaagtagttttaccaaaatatctctagattgaattattattaagttttattttaacaaaaaatcagttcaggatcctatttatattattttgaaaaatacatggtctattttgtcatttaataaaataaaagatcgaattgataacttcggtaaaatacaggatccaaaatag

SEQ ID NO: 203271 - DNA, 952 bp, Cannabis indica
tgaaaaaaaaatgatgatatatttattttttaagagttttgggttaataagtaatacctaatgagagatgatttcatttatataatatatttataactaagtatagatcatagatgacaagattcaacgcttaagtattatatatgtatttattgtatcatatatattcgaacaaatacctggcagaaacaaacaaatgattccacaaagttttcgatatatatattgtttgaacgcacgaaaatattaaaactataatgttagttttaacaacttctgtgtacttaatgctacaattattagattgaacaaaaataacagactgatatcagaaactaataaaagaactatcaaaagtctgagacaacaacaaattaaagtgaaagtaaaaatataaatgaaaatagaggaatgaaatgaaaaataaaatacctgatctatgtcaaaagaattattttatcattaataaaataaacacatacggaagaaaatcacaaagttgtttgaggaagacgacaaaggtaatggaattagatttatgaaaaagatttaataattttgaactgaactaccaggaattaaagcaaacctttgcacagacaggtcttgtttttccttttttaccttaatggcttacacactgggtttagatgagttctgtatagatttagattcttacagctttacatgccaagacataagcagccttctctctcgatatttcaatatctctctcctctctctctttttctcttgaacttattaagtatttcattgcaccaattaccatactatcataacaagctagctgttctagcacatcaaacatcacatctctgctctagaatcataacagtgaaaccagtctttggaaagcattaattaataatataaattctctttaaaaacatggcactctataaatgtttgtactcacacccatgtttacata

SEQ ID NO: 203272 - DNA, 694 bp, Cannabis indica
ttttcatttttcacttttacttttctacaaggaaagtaagatcttcacatatgatatagtttggattttgattttgaaaagtatttagaatgttgtttaattatatttaatcgaaattaaattaaattattataattattttttagaaaataattactattaatggttacgggtaaccagggttttcccccactagtttactagttaatacttgagcattgttattgggcaccagtgctgcccagtaccttccataagtgtcacgctacgattggtagcgatattccctaaaacttattttcttaaattatatgagacccgctgcttaattataccaatagcaacatgacactaacgagggtgctaggcaccagtggtgccctttagcaattctcttaatactcgcaccatcaaaaccgtccaattctctcaattctcaaacccttcacataagtttaagaaaagtctggtctctcttcattttccataacacattataaaacaagttcattagatcaatacatacatataactaactttgagtgtaaaagccatggctgtatcactaacaccaccatatattatctacttgtttcttcttctcatgatgttgctatgttcctccactgctcaaactcaaagaaacatatctgtaggatcatctcttatttcatccaaaaacaaaaacttgtta

SEQ ID NO: 203273 - DNA, 1800 bp, Cannabis indica
attacaaactggacgaatgaatccaacaaaaacaaaattgcaactttaatgaagcaataatctcaaaacaaaaatgtcttgcttaattaaattttagtttgcatacgttaacttaaaagatacggattgcacttcccatggtactcttcaaatacaagcacctcacctatttcaacacaaacaaaagacacaacaacataaacacatgattggcatgttaaagggtattgaaagtttaaataaagacatttcacttacattttgccaattcttcttcaatagtgacactagaaaattgacactcatttgcacattctgaaagatctgtttctcctccatggataaatttccaacagcaactcccatacaaaggaccttcttaagttggaacttcaccatggctttggtttcattgacctttgcctccaaagactcctgatgggtaaccaatgttggaaacttacctgattcatttagtagaaattgttagacaattaaaaaagaaaactttaatgcaacagcaattaaacaaaaaactccagcagaaagcaataataagatcaacatttaacaagtcaaatcaatgaaaactcgaatcggtttctaaaatatacatgttagaaggattaagactagacattttttagacaatagacaaaagaaactacaaaccaagagaaagacttaaatgtgattatgtgaaatttgccaaactaatgaaatacttaaaatttacaaaataacctcacttaatctactctatgcgaccatcacagcgtaaatatggttattttgctcataaaattttttgtaaagttgttttgctaataaaaatgctattgttacaaaactcattcagtgaaatttgacccaaaaaaactaattggaagagttacttgcctgccttgttgagtccaggacccagaagacgaggaatttgcttaataacagcttcagaagccaaaaaagcatgaaacttcttggcaagcttcttcacaagtttcttgttcttgttaagctttttcaatccctccacatccatatagtccaatcctattttcacagcctgaataataataataataagaataagaataagccaacaatccaatccaactttaattaatgaatgaatgataaaagttgtacctcttccacgtgttgagcatcccccaacatgcaaatcttcatcttaggacgaggaatgtgaggaagcttaacagagccactgaaacgcttgtccttttgggggtcatagttcttcaaaccgatttgaagctcaatggtttcagtaaacttacgattcttctctttcgagttgataacaatctgagctatgccctctctcacagcatcactactcagcttactatatacaaacaaaaaacattcttctaagatcaaaaaaaatacaaaaacaaatatcaaatctacaagaacaacaagaagattagacatattacctcatactttctctctcggagaaaatagtactctgcaaagaaaaagtaaagaagaaagattaagatttgatagtacaagttgaatttgaattgacgaatggcattggattgattgcttaccagatatggatgttgatggaggagaggtagggtttagagtgccgactgaaacaaacttttattataaaaggagaagagaggagatgacaatggtagctagggtttttatgaaagatgggccttgattgttgggcctacagttccagcccaaatacaaatctagttttgcatttatacacgtttttgtcacttgcagaaatttacacaatatacttaa

SEQ ID NO: 203274 - DNA, 586 bp, Cannabis indica
ttttttaattaatattttaaattacgacacccaacttaaatcttagaaatctaaagtaaacccaccccaacttggaactgccccgatcctgacctcttggaccacctaaataaaattaataaataaaaatggaaataatatttacaaaatacagttgtttttgtattttaaaattgaaaatttcaaagtataattaaaatttatggcttagttgagagctaaggaaacaatagtgggtttttgtcagttgagtgctgacctaaaatttgcgagatccctcaacacacctatgccagtactggtacatatgcgtcagtcgatagctgcacaaacattcaagttttgcgttagctcccaactaatctgaatcaacaagtttttccgtcaactctcaacgcaagaactctcaaaagttgagatacatgaatttgcattacatgaacaagtgatgcaaaccacgagtttacatgatcagtatacttttttgtatattaatgtagtgcaattaaaaaaacaaaaaatgtaagtgaaattttcccacggtatacgtcttttaaggccgtaacgtatataaggtatttttcca

SEQ ID NO: 203275 - DNA, 1070 bp, Cannabis indica
ttgcattattttctaaagagcattcctactcatcacttcacctaaggtatctagtacaaacaatatatatatagatagatatatatttagtgcttttcatcaaaattatcatatttcttttgaacaaaggcccattattttgctaaaactcaaacaaaggcctatataaaggtttgtcaaaaattataaagtgtaatcccattattaagacagagagagtttgagaggtgtaagtgtgtttgagctctaagaactaagtgtgttaattgtaaaattcttagacaaactttgtactatttcattgagattcaataaagattatcaaagtttgtgtggctttgaaactgtttctacaatggactaaatcgagagattgcaaagctttcggtggaaccacttaaaattatggtgttcatcatttttcaatttattagttttcaatctctggttagaattgtttctgttagttggtgcattgaatcttgatgtttggtgatagtttttcacgacaaatgatatcagatttgagggttaaatcgatcaagatttgaaacatataaaaatattcttgaacatacttaaatattttttttaaagatttgaaactaataactgaaaatgtggtcataagtagcacaatagttttatacatttctcctcataaaaaacaggtctcatgttcgaatcttcctcttccaatataaaaaaaaaaaaaaaaaattaaaattattttctcataaaaccttctatctagaatgttttaatgtttgcttataaagataatttccttttgcagtatacaaattagttaggagtggcaaaacgtatgttcgtgtgtcatgttttatttgattcatttttatatttcgtgtcaggtgtgtttatctatttttaactcgtgtctaattttttcaaccctaatccaacccgtaaaaaattgtatcgtgttcgtgttgactcactttaacttattttgctattcttgaaactaaagttgtaaggaaaataatagatttaggttcattaaaaaaattgtatacatatatgcatatataattgtttatatatat

SEQ ID NO: 203276 - DNA, 883 bp, Cannabis indica
gcctaatctatgccttcaatattatggtcacaactgccttagtgctttggttagcaccataggaaaaccaattatggtggccaaagttacactgaaaagataaattattagattcgctaagtccttgtaaaaatggaggtaattgatgatcctccattcattatctactctgagaatgagaaaggaaaaatttaagagcaatttcaaatatgaatggctccattaagtgtaagaattgcaaaggctatggtcataatatggatgagtgcaagaagaatggaccaaaagcttgggttaaaaaaaattgaaggaagaaaaagttgctggtgagctaaagcaggtgaaagagacctcagtttcaataggggactcggttgtagatatggttggagtggataaaaaagatgatttaggaatagagagccatcaggttgataattttgctagtttcgggttcaaaaaattgtagccggactcaacccatgaaatggttcgggttcgcgagtttcgggctcacgaatttgcgggtttggtttgaccgggttggctaggtcaatggattgacctggtcaacacgtcaatttttttttttttaaaatcaaattttatgtgatttttttttatatatatatatgaaattaaatataaaaattataaacttataacaccataatttatatttattagattaaaataaaataaaaaatacattaatctataaatatatatagccaccaacttcaaattgtgtttttttttttaatgtaaatatatatgtagagaaattaagaaaattcatgtttatttcaattgggacccactaatgtaattttatgtgtataaaaatcatgggacaaaattagtagattttaagttgaacatt

SEQ ID NO: 203277 - DNA, 568 bp, Cannabis indica
caatatttttcttatatttttcagggtctactttgatttagactttattttttttagccacaaaagatcattaaaagtgagatatagccatggaaaatatatgaaatttaaaaaattaatactgttatgctactcaaattaatttaaaattttatatattttttgcatgatccactttgatctaggtttttttaaaccacaaaaagtcttctaaagtcaaatatagttatagaagatatattaaatcttaaaaaaaaattaaaatcgtcaaatattatcatattttgactaaaacaaaaataatgatgtcaggataataaatttcggtaaaagatgaaatacctttaaaaaaaagttgatcaattgatatagctgaattcactttttgaaaattaataatttgaagccttttttcaagttaaaattaaaagtgattaaatatatatataatcatagtataaaataagaaaaaatatatatatccgaagcccactgtgtacgaattcaaaaaaaggactattgtgcatatacatgcatcatagcagcggctgctgcttacaaataaaaa

SEQ ID NO: 203278 - DNA, 757 bp, Cannabis indica
ctgaccgtctaagattgacaacttccaagcactggcagccttcaacaaggctggttggccaagtgcacagaatcactccaatacttgtgtttttctctcaagccttccgactcgccttcaacattcccatgactttagaacagtaaaaactgcccacaaagataaggactcttcgtcgacaaataacaaccctattccttagatattaattattatttactttgtattttaaatatacattgtaacttccctactttctagggatatctctatgtacagcttgtaagccctactactatataaagggtatgatacacactaagaacttaagttttcaatcatgctcagaagcactgtagcaataagtcctctctcttttctcatacttcttacctaccaaacacattgtaatactaaagagagcctagcaagaaattacaaggtttctgcttgtaatctgcttggtattatctcaagagtgaatacaattaaaaggagagtaggtcattacctaaaaaaaatgggtcgaacctctataactctatgtgtctcttacatttacatggcagtcataagaaagatctgatcctagtcagacttcttgtcggttggctaaatccccaatcaatattttggtgctttcattgagagcccataattctcattgaagaagctcttgtcttttgaattgttgtcacaagatggggaactttgactgaatcataagaccctatggctgcgaactctaatgtccaag

SEQ ID NO: 203279 - DNA, 1049 bp, Cannabis indica
  modified_base (1005)..(1005): a, c, t, g, unknown or other
ggtgggagatggaagtcatattaacatttacaaggatgcttgggttctttcggcgtctaggtccctaattttatcaccctaagttcttggcaatgatagtgttgcagctcttcttcggtcatttgatggaagttggaatacgaatttggtttgtgtcttctttcttcacagataaagctgcaactattcttgctattccttggcctttacatccagtgtgtgataagttgatatagggccatgaagatttaggcctttacaatgtgaagagtggttactggtttgcgcttcacaaggaaggtttagacaaatcttcttcatctattggtttttcgggttgatggaataaactttggaggcttaaaattcctccaaaggttaaaacttttgcttgtcaaatttcttctaactagattcctacaaaaaaatattcatcagtcatagcctcttaaatgatggtctatgcccaatttgcaataatcaattagattctactcttcatgctttgtggggttgctcctctcttgcgcagtgtcgtaagttgtgtggttttcagcttggtgatctgcttgctacttgtaagaatttctttggttttattcaccaatttattgactccctacccaagcatcagattgagttaattttagttgtcttatgagaagtttagttttgaaagaataaatgggttcataatcacaagatcatttctctcgaactagtggtgtcatgggcttatgattttttgccagcctatcaaaagaaagatgctctcgatctagtggagaggagccaagtggtgttgttcaggttcctttgtcttcgacacaatatgtggtggatcctcgttggtctcctcctctattgggtttcattaaagctaacatcgatgccacattggatttgtctaaagggttgttgtggcttgggtaggatggtaaaggaaacgactcgaaaggagaaggttttggcatcaactcttaattctttgttggaggtttctcncttagaatttttgaagctctagctcttcgaacgtgcacggtact

SEQ ID NO: 203280 - DNA, 1067 bp, Cannabis indica
ttttttttttttgagaaattatactttacttttaacttcgcttatttaggaaaaccgaaaatataactcaaattttattagatgccaaactaaaagtgatgatactggacttaaaataattttaacttcgtatttttaatttattaaactaaaaaaacgaagttaaaagatatgtttgtagtagtgatagtttataaatgttgttgagaaatgtcatgaaaaatattaatgacatttaaataataaatgtcatactaattatcgttgatgacttaataaaaatattattaaaaattaattaataatgatagttttattatgttattacaatatttattaacacttgttctaaatgttcctgatcagtatgtatgttttgaattatttaattataaatttgaataaagtcatttagttaagtacgtatgggatacattttaaaatgaactcgatttttgtaaaataaaatatttcttttaattgtgatgcgatttttttattgataaatttcaatcatatttatagtatttattcagttctcaaaattttattattggattaattgaaacttaatttataaatcccataattaaatttatacatattaataattgattattcaaaatttaattacaacatataaaattattaatattttctaatattcaagaaaataaaaaaaattagcaaataaaaacgaaggtatataatataataattaaaaaaaaaaaaataattatgataatatttgatcattaaaacaaaatgattatacttattaccattttggaatttcacattttttttttgttattgattgtataaagaaaaataggcgccaaattttttctacttagtcccattatctgtcaattagcctccccattttccctacctacctccttcccctttactcttttctatcaatccttaacttctctatctctcagttcttaaacgaaatgaaaaaaaaaaaacggttaacagaaattaagtgcatgttggtatataactaaaaaactagtttttgttttttaaaaactagtaaaatagttttttgtaaacaa

SEQ ID NO: 203281 - DNA, 877 bp, Cannabis indica
gtggggttgctcctctcttgcgcggtgtcgtaagttgtgtggtttttagcttggtgatccgcttgctacttgtaaggatttctttgattttattcaccaatttattgactccctacccaagcatcagattgagttaattttggttgtcttatgggtagtttggtttcgaaagaataaatgggttcataatcacaagatcatttctctcgaactagtggtgtcatgggcttatgattttttgccagcctattaaaagaaagatgttctcgattctagtggagaggagtcaagtggtgttgttcaggttcctttgtcttcgacacaacatgtggtggatccccgttggtctcctcctttattgggtttcgttaaagccaacatcgatgccacattgaatttgtctaagggttgttgtggcttgggtatgatagtaaggaacgctcaaggagaggttttggcatcaacttcttaattctttgttggaggtttctcacttgaaatttctaaagatctagctcttcgaagtacgggtactcaatgttgtttgtttgattttgataatgttatttttgaattcgattgtctaaatttagtccaaatttaacaatcatttgttgttggactcctctttagggcttgttttggacaattttggctggtattttattaagttcagtatggcgagtctagtgcactgtccgaaaactcttaatatggtggctcatactttagttgagtatactttgataactattgttagctaggtttggtggcccgactctcctccttgtatttaatcttttgttttgcatgagacaattaatgactgaatgcaaatttctgtgttctcttcctttttttagaggttctctctaag

SEQ ID NO: 203282 - DNA, 1064 bp, Cannabis indica
acatttattctaggaatattactaataaatagaataaaatttcataaacgaataattcgaacgaaaatttgaatgaattgtaatcaatatcccaggtacaagatactattattaccgccaggacaattagacacccaacccgaaattgcaacgaccggagctctaccaactgtactatatccccccaagccaagtggagcatgcatgaagaaaaaaaatgattccatttcaaaatggaatagtctttctaccaaaatggtggtgggaaagtaattctatcagaatgacattaaattactttaaaatgcaaccaaacaaaagattggaatgaaaattgattcatttccattcaatttcattacttccaaccaaacgcaacctaagtataggatactacaatgcaccgcattcttgtgacaccttcaaattaaggggcgaaccccaaacataactaggattttcgttctaatctcaaccatgaaacaagttttaaaacaaaagctcgtgtaacagtatacgaaaacaacgatgatgattaagaatagaaccttgccaaatgtcttttcaccgacaagaacagctctgcaattgtcgtgcaacgcagaagcaacctgcaaaaagaccacgacagcttgaaaatactacacatagaagccaagccacagaatgtagtcaattaatcaagctgcttacaatttcactagcactggcagtgttgttgttcactaatacctgcattagaattaaagtacaaatacttgttatgaaactatttaaagggtccgagttgataaattcttagttgttcagatcaaatgtttctaagtgagcctgtcctaaggttttagcttaaatcagtaggaatgaattagtataaatacaggaattgatttgtattgttaaaagtaaaatttactcgagtgtcgcgaaaagcttggaaaaattgtaatcctttctttgatatctataagatttatatttcctaattctttcaacattggaataaaaccatagtgtatcattaagatacatattcaggtcgcaaagaaattaaacaacaagag

SEQ ID NO: 203283 - DNA, 842 bp, Cannabis indica
tggccactaaaaatagacaacaaaaccaaactgatgtcaggcagcctgctcaatctacttttggcatgttcaaagttaatactgatgctgctttggacagtattttgaagaaacatagtttggggattgtggcatgagatggatatggtaaatcgataacaggtgtaattactcctatagctggtaacgtgtcacctgaagttgctgaggctaaggcccttttatcggccttgcagtggattcaagcaattaagcttcctgttggtatcattgagattgattataaaagtttagtggataagatttatagtgagtattgtaataattctgttctaagtgatcttgtttctagtattcggatcttgttgttgttcagtcttaatctctcgatcatatttgtccctagagaacaaaataaaattgggcataattgtgctaggatgggattagaattagacaatgagtatatttggaatggctctttgcctttttggttatcctgattctcattcttgtatattttatttcatattaagatttttataaatatataaaaaaaaaaaaagctacgtttagtaagaaatcttataaataatatttttcaattaattttatttaattaaattagctaaagtaattttcataatctgcaaattttgtgagcagttttcaatccaaactgaaatacaagccaaattgggttgagtatgttaaaaaaaatttggatttgttttgaacgagattgaaaatgttaaatgatagaaaattactttaaatgcttggaacatgtattgtcaaaggatagcataaataattttaagaagtactaataaatataaact

SEQ ID NO: 203284 - DNA, 2042 bp, Cannabis indica
atatatactaaattacaagaataatagctatgtactgtttgacatttactctgatacaattcaaattgtgtgtgaaatacaaattaaagtccaacaaaatatgattaactagctaggcatcgcataaacaatacagaatcaatataatgatcagaaaagcgagaccacaactcaaaagatatcaatcttttgataattaaaagttggttttgctaatgaataagtattttattaattaaaaattataagacaataccagaagaagatatctaatgtataacttctccaacaattgagctcaaatatgaaaaatacgtgcttattataaatttataaattaataagatatattccctaaactttttaagtcattataagtgcaaatatcttcttttttttactaatgtactctcatttatgttggtcatgagtcgcgacgactttcttaatttgaaactgtttaccgagattttcagaaactaattataaataataagaactggagaaacaaataattaaaagagaaaaaataaaaagacacaaacaattttttacgtggttgagacgtaaactagccttagtccacgagtaagtgttattcagtaattctttaacttgaaaagcctttaggagtacaatgaatatatgttctcaaatttgtctaagtaagttttataagagaattcaacccttaatccatggaatttgataggtatttatagtagtttgagaattacatttagtttctcttttccttctattggggagcttacagtgaataacacacttgagatgttttgtgaagtcaagccaacgaaggagagaatttgctgattagtcagatcaaatttggttagatttggtcaaccacgtgtactttgtttgtgggcaattaactgtgaattaattgtttgaaatctattttaggaagttttttcatttagcatgataagatcctctgtcgagatttgaaagttattatttccttatttgtgctcaggaataaaaagggaaatcagatgagtcttctaggaacacgttgtctcacccttccggcctcatggtaccggacttgcttcaggcatgtgttgtcaatggcagaaggctctatggtaatagagctagagaacgttcctagaaggacctgttcaaatgggcttggcccactttatcttctttgtggggcctactaatgggcatttaatatcaacctggattccacgtgtccactgctggaaacgcatataacgtagatgatcctacggaagtggtcgtaactagaactactctctcggagggtgagaacttagataacacgactcttccagcttctggtgttccttctgtggccaattctgccattccggaggtctcgcttgatgttcaacttgatggtactcagccgccaaaggactcagtccagccatagccatatctatccaaccttgtcttactttaatactttcatattttttgtgttatttgggggatcacagttccccttttttacgtgtgtggagacaatattttatagccttgtctcgagagttttaagaatgtaaaaatacttgattaaatctttagatatttgcatcttaatctgtcgagtttgctaagttttaatgtttccagtcttgtgaggttctagtttcaaaggcccaaaccattagatttttaattaaatgcttaaacttaaatatttctctctttaacatgtcatatgtagtccttagaatatagttccaatggcctgaaccttggtgccttaataacttgttttgaagaaaaatatttgtaagtgttatttactttttaaagattttgaaacttaaataaccaattaacttaagttaattaattattttagaattaaatttctcttggtaaatatcacttattttcaggactttttctaacttaaatatttaattaacccaaattaattactctatttataggatacctaaatacattggattaagttaacttgagctaaccaagaagcctgaacttctgtctttagttaacttgagtttaactac

SEQ ID NO: 203285 - DNA, 1719 bp, Cannabis indica
tacagtttgcaaattaaaaaaaacatacacgggctcaaacaagcttcgaggtaatggtatgccaaattaagctcaacactgttggaagatggattcactcaatccttgttcgataattctttgtttattaaaaggacaccagccactttcatggatattctcatctatgttgatgacatgattatagctagcaataatgagttagccacctccaacttcacacaaaatcttgatgctaagtttaaactaaaagatttaggcaaacttcgattctttctcggccttgaaattggcagaactccacaaggcatattcatttcccaaaggtcatttactttgcaattgctcaaagacacatgctacctaggtgccaaacctacctccacacctatagaaatcaatctcaaactcagtaaagataaaggaaaccccctcccaaatcctactgtctatcgaagtttgattggtaaactcatttacctcactatcactagacccaatataacatatgttgtaaatcatctcagccaattcttatcatgccctcgggttccacacatgcaagccaccaacagaatacttcaatatctcaaacaaacccctgtccaaggtctttttttctcatctgatgcagcccccaacctgtatgcttttgcagaaaccaacttgtctagggacaatgtttaggtttctttctttactgatgcagactggggcagctgtcaagacactcgtcgctcgatctcaggctactgcatattccttagcaagtcacttgtctcctagaaatccaagaaatagcaagtggtttctcgatcctcaattgaagctgagatcgtgcaatggctaatgctacctttgaattaacttggcttcttgctcttctcaacgattttggtgtctcccacaatagaccagctaacctctactgtgataacaccggtgctattcacatcagtgaaaatcctgtatatcatgaacggacaaagcatgtggcaatcgactgccactttattcgagagaaaattcagcaatgttccattcaactcctacatgtctcttcacagcagaacttagcagacatcttcaccaaacccctactaccaactcctttttccaacattgtatccaagatgactgtaataaatatttacactccatcttgaggggggctattaggattagtctgttactccaactgtttaggagttagttatttcggctataccgttatgcctctttggttaagttgttagtggtaaattagtcattataacttgcctatataaggcctattgtattagcttcaatttaataagagagtttcatttttgatttttttcataaaaagtgctcttaatttttttcaagagagggaaagagtgttaaaaaacgaaatataaaaatatataaaaaaaataaagaaagaaagagaatagaaaaaaaaaataaagaaagaaagagaattggaaaaaaaaaaaaaaaagtagagagagaatagaaagaaaaaaaaaggtcaacaattaattttaaaaaaaaaattagttaaaactgactaaaatatataaaaaagagaaagaaaaaaacttttaagttggaaaagtataatgttaaaattttgtaaaattttagaaaaaattaatatctagtgtaaattttttaaatttatttgcagtgggtatcacctttaatattgtagggattattttacaaaaacat

SEQ ID NO: 203286 - DNA, 1385 bp, Cannabis indica
atttttatgatatattttaaagataaaataaagaaactgttgggatgctctaaatattagtttacattgttctctaatttttttaaaaaaaaaaatagaaagaaaagaaaaataccattttggcctgcattaaaggaaaccattattgtttgtgaaaggcaggaagtctcaatctaggaagatgatgatttatgaagctttgattacttgagtaaatggccaaattttgttggatctccccccaaaaaaggggtcatgtatagaatctagatgtgctttacctaacttggtgttgacttttggtgtgtagacaatgatccaatatttagctttaaaaacattcaactgacctttttgttttttttcttaatatatatattatatgtataccaaaaatatggtttgacttttcaagaatactcaaagcctcttatgagccctaaacaagtttataacaaaaaatagttgccacaagttgttgcttataaaaacaaaaaagtgagaattttcaatataaaaaggagaataattagagcactcttaatataatagatatatagctacaagctaaatagctcaaaacttttaaaatgacacttaaatgaactataatacattaatattttagttcataaatagtgtatctttacatttaactaaaattgacctcttagctaaaattttattattattattatttgttatttttttttaattatttcacattctttatattaataaatacataaaataaattaaatattaaaaaataaatatttaaattatgtagaggaaaaatagagtaactcatgtatggtgtagtattgtagtataaatgtgtaaagtaaaataataaaaaataaaaatttagcaaagtattttaaaaaataaaatagagacactgataaagtgctctctatgtaaaatacttgattggtcccaagacattttaatatcaattataataccaatttgagaaaactacattgaatatagtttttttccccttaatttttataagtatgagattttttttttttttgagaaaagggtaaagttttattaacttaagataagatcatcccttacaattgaaatcaaatttgatggagcagagaactcatcaaacatacaatctgacataaaacaggattgccttgcaagacaatgagcagccctatttgcagatcgtttaacaaaagaaataaacacattttgtaattcagataataacagacgacagtcctgaacaatcaacccaaactgagatggcatttgaactaatccatttatagcctgaacagtgaccaatgaatcagtttcaacttccacatcagctatattcattctcttgatccaactcaagacttctttcatacccaccg

SEQ ID NO: 203287 - DNA, 860 bp, Cannabis indica
tatcctcctttgttaatggtatcgtttttgtgaggtttctaagtttcctttttacgcgtatatttctaaattttcttccctctgccttagagatgtcaaaccctccaggttctcctctccctcagtctttgagtggagacgaattccattctaatgttggggatcgatctccccctagccttgcgactttctctcgctactaccgacctactggcgaagctattgttgggagaatgatgcgggcttatagggctaggcgtgatgatgcgtcttcgtcttctgatgagaagttgctttagaatttcttcaagaatgagggacgtaacgttttatctaccacaagggtccctgctgaattccatgcccttcgtttgcacgctgagcgtcgtcgcgactaccgtcgcatgcaagcctggaaccggcaagcctgggacacggacctggagagggagcgtttagctaatgagaggcgggtggaggaatgtttgagagagggggctcctttctacccctggtttccgtacaggctgccgtcggtgctcgaggagagtggtacggtggtccatcgtgattcctggttctttatgcatactctgttggcaccaccctaaccgcgagcacttctgatccttaaaatttaagtttttgtttgttatttgttgttgttgttggtatttttgttgtttttttttgcatggctctttttgtacgtaatactattttttgttattatatccttgtcttgtaacctttgcttgggttttaacctttcaatgagtacgcatttattacttttggtgtccctttctatgtttcgtattattccatataaggtcggggaaaattgcggctccgttaag

SEQ ID NO: 203288 - DNA, 1550 bp, Cannabis indica
aatgcagaagaattcctcagaaggctcttttttcttatcgtaatactttatactttaacctttgtgtcccaagaggtggtctagtggtaaggaggagtcttggaaagtggtggtaggcatttgttcctaaggttcgaatccccacagggtcacaggctcacaggctcaaaacaaccttgaggccactgtgaggcctcccggggcgaaaataaaaaaagtaaaaataaataatacactttaaactttgtgtgtttaacattagcttggatttgtttttttgggtatatagcattttgcgacactagtatatattgaaacctgatgggtaatgaaagattcgatttcagaacctgaggcaggattgggaaaatgaaacattcatcattgccgaaacttagttttattgattgtaaatatggagttgggagttactttattcataatggtgaaatgaagtaaacaataccctggctcaactttttgcatactttcataattgtgcttaatacttgtgagacttagaaaacttgtatgctgtttgtgttttgctataatttctataacatggaatcaatgtagaaatctttgttgttttgatgcatcatgtagctaagtattgtcatgttattataggctgtcaaagaaacagggaacaagttcagagaaaccgtccttgctcttggaggtggaaaagcaccactagaggtcagacctttctctccagagaatgttaatgtgaatccaacctttcttctttgctggagaactgttgtgtttcttcataatcattttgatattcttgctattttactcaaatccacacataattgtggtttgccatagggacttgtttaccatctgattcttgatgactgttcttattaagcaaattttctgaacaccaccaggtatttgtggcattccgaggtcgcgaaccttcacctgaggcactgcttaggcacaatggccttttagacgttgcagcctttgcttgatttgcaatgttgatgatcagctgttgcatggagctgtgaaatggagttgcagggttgtttgtgtggttttctaattgtcgagcaggggcgattgtaaaagcagcagacgtctgaacaggttgctaaaactttctgaggatgtctagaacttgtcttgattaaactgtcctaacgaacttctccccagttgtcctttgtggtcaccaacatgttccttgcaaaatcttatttctatacaactaccggtcctatgcaacaatatataatttaatattcaattagcttttattttatttatttattacatgtaaaagctagcctttaactttaaagccagattcactgtttttccgcacttggaaaataatttactagttttcaacaaataaaattggaaaaaatgaagtgatcgtagatttaagaatttgagttttaaaaagttgaatatgtggaatactatttattttactttggggtattatttgtttttattggtagagacaaatttattattggtatatggagaagttgtaatctaattatttttagtagaag

SEQ ID NO: 203289 - DNA, 696 bp, Cannabis indica
tttttttgtctaaattttttttttatattcatgtacgttatagctatttaagttaacctacaaaattttgagaaatttaaaataatttacaatatagaagacaatgttcaaacagtctattttacacacgtatataaaataaaatagtcacgcgtgcaacacactatttgaacgcatttttcagcgtgttaaacttttttaaatttttaaaattttataggttgccttaaataactataacgtacatgacaattaaaaaaaatttgactaaaaaattatttcgggtgctaaaatgataaaagtgtatcaatgtatccattttaaagaagttcatcctagaattttcaataaatatccagtacttgtatcattagataagaaactaattaaaggtaatgacaatttggcttaaatcagaagttacaaggatatttaatatacaaagccaatactaatcccaataagttgtattttcagcgcgagtaaccggtcatttatttcaattttcaaaaaaaaaaaatactattattctatatataagcaacttttggaattactttctgaatgatctatcataattaatatagaaattaattaaactgatataattaagtttttctagcaatattattaattcatcagataaacgaaataagcaaaagaaaattaagatataaaaaaatatataaatatgga

SEQ ID NO: 203290 - DNA, 671 bp, Cannabis indica
gtgtatttatttgtatcaaaccactatatacttaaaaattatctgttagaaaagaaaacaaaacataaactggcttggttatacatggctattattctatagttactttcactaactttctctagctttagttttcttgttatcacactaaaataaaaatggtactttatgtatatgaggtaataagatccaaaccatgatgtctgatatattaattccctttagaattatatatataataaataggtcatgatccaatctatcataaaaatgaccagaaaaaattaggtcatttgttggagagataagctatatatgagttagctagctagctctataatattattagtgactagtgattaatggagcctacattcactacttgctccaactaagagaaatgctatgaattaaggtacattttaaggtttctctaactctacacataagtgtcttatatccatatataatttttaatatttattagaggtagtcccacattattaatgtgtagaaataaattgtgctataacaatttagacaataccaaaataaatgatatattaaaaatataaacagaaaatgtgtgaattactcaacctagaacggcgagtattcgggctaatatggatacacaaacgtattgaaaatataaagaacacaagaaaata

SEQ ID NO: 203291 - DNA, 502 bp, Cannabis indica
atgactgaaattaattgaatcgtattgaattgtaaaatttaatatctaataatatatattaaatttatctaaatatatctaaaaatatttaatgtgggccaataaaaattcttaaattaatagaatgtaaagttgacttagtctttaagaaaaaaaaaaattgaccgagtcatagctaagctaagtttaatcccaataaattaatcattcgatgaatatatatacagaagttaattgcctataaattatccgctatgcaagttaattaattcggtggaggcataaagtcttagttatcacgtgatcataggagattgaattggtcaggtcacatatatagaaagccaatcaaataatttggccaaagacattaattagtagatgagtaagtgtggtcatttctctttaatatatatgggaatggatccatcaattagaattgagatcatattttttatatatatataaaaaagaatagtcgaaacaaaaaactaatccaaaa

SEQ ID NO: 203292 - DNA, 947 bp, Cannabis indica
ttaacgtgaatcgttaaccatccctttacttctacattttatacgagaaaaactctatgataattctaaagattgctctccaattgctccaagtgtttttctaagtttttgggaatgaaaaactgatgaaaatcgcacttaaagatatttagataataactctagcgattttaggtgaaaagacatctttgtcgcctttaaaactgagtttttgtaacctgtgcagacgttagttccgcgactctaattcaaacaatgtacaatttttttcattctgaaaaacctaatgcaaacggccgatggtaatttgactataactctctcaatctttctcggaattacacgattcaatatattttgaaaagctgaaagaatgatctagaacttttattcacaacgttttttcttaaagtgaacggatcatagtcaaaaattatcttaaatctttagacttgatttttaatcacagatggagtgtgttgagcattcaaaacttaaaaaaattcacccattatatcttagaatgccaaattctatgataatttcataatttttatcttatttaatatgtttcttctcattttcaattcgtattttgaattttaccatttaaacctgaaacaagtaaaaaaacaatcataattctgcagaaaatgcatataatcaactaaaatccacctctaaaacacttcaaaaaatacacctaaaactagcctataaaatttcaaatggcgatatcctaaaatctatataaagaaatctaatgtactcatatcgagatgatgaagtttctatcaaaaaagtattttgctacactactacaaaaaggcttattcctgtcaattttcaaatcaatttttttcgagggtcgtcactaataaaattacgtgactgtttaaaacgttagctataattgggtattgttaacgtagatttccgttaactaa

SEQ ID NO: 203293 - DNA, 1276 bp, Cannabis indica
caaattataagttgcagcaaaataaacaacatagaaattaagtaaatttaagtgcaacaaaataactatacaagaacttttatcactaaaaaatttacatgaaaatataaatacaacaaaaataaactacataaatatttatgtaacaaatatttttaattataatatatactatcattaaaaaaaaatatagtgttataattagagtaatttatggtataaatatctaaatttaactcttaattataaataaatacatgtttaatttttagtggtaataatattctggaactccataggtacatcaccgttaaatgttaaattattatcaacgtgtcattttcttattagtatatttaaaataatttttttaaaaaaataacattttaatgatgtggatcaatcagagattgtcaagtggtaattgacttaatacttaaacagtcatgtaactataaaaatttcagaaatataacttaagtattattatcgtcaaaaattaaatttaaatatttatttgcaattgtgaattaaatttaaatatttatgccacaaactaattttaaattaaattttttttttgtcacccctacaaaaatgtcatattatattttgacttttggattagacaagtaaaccaaaaaagttattaaaaattgacatataacctctttatagctttattatttataataatatgtcccatgcatagcccatatataacacaaatgttccataaggtcaaaacttgttggtttggcttgagagaaaaatgacaaaaaaaaaataataacaaaaaaaagaatcatataatttaaaatatctatttaacacacacacttgacccacttagactttataatattattgataattatattttaattgtgtcacatggtaactatattttatttttaattaatttttaccaataattatggttatggatcatttcatactctatgaaaagtagacactatgtaacttgttataagagtaatgagagaagttaatcattttttaatgtcaaattagattcaaactcctcaaaatattcaaaagtgacctaagtagtcacaaaaaataacctcattatacttacctaaaaaaattataaatattttttaaaaaaaaaaaaataaatattaaaataacaaagtaacatggttgacaaaaaaaatggaagaaatttcttcatctataaaatttaatgatctatcctaataaaactttgatatcagaagaaaaaaaaatacaaaacttgaaaagttatagg

SEQ ID NO: 203294 - DNA, 795 bp, Cannabis indica
acgtgacaagcattaagagtcagaattcataaagggaaccaacttaacagcactggcaaaatcataaacaaatattaaaagtgaactgaagagaagtgttgagaaagaaagatagaggacaaataagacaaaaagaagtaacaaaagtaattttctagatagatgtagaggaacaattgttactattctttgctttgtttggtagctaaagatgttttcatagggattgacatgatttgatgttacctgttaagctttgaagagattgttcaagctcccaacaagccatcacagcttccatagcatgaactcgaacatgttgttgcaattgctctttaagagaacagagcaatataacataatttgtctacatgagaaagaaaacacaaaacatgagcaagaaaagtaaattgaaatgaaacatcatattaatctcccactatgatacaaacagaaaagcatacataaggtaatatctgtaaactctttgttctacatgcacttccatgcaaaacttttttttttcagcatgacttgaagttaaaagataaggatgaaccccaagatttgaaaaaaaaacaacttttaagatcaaaacttctgtaaatacttggtgttgttatttcatgctagaacaaattccaccaactaacaagatgggaacaaaggtatctatgaatgactacaagtgggaaagtatggaagcattaacaaaataaaagaattcttaaaagcataagcaaagaatcaggatgtcacatttgacaaaacttagaccacaaaaaaagttaaagt

SEQ ID NO: 203295 - DNA, 1036 bp, Cannabis indica
atctgtcaactatccactctcagtctgaaatggaacgaataatttgtactctttggacaatttggacggaacaaaatcgagtaatccatggacaaaaggccaaacctgctaaggagctgtcattttttacagctaactatctgctgaatttccaatctgcttaattgaaataccagcctattcatgctcctggtgtgtcagatgtattactgggggataaaactcaacctcctctcccattatgtgaaccggttaaatagaaaccaccaccagcaaagactttcaagctaaacatagacgcgacagtggatcaatcgaaaaatcttactggtttaggggctgtaatatgtgactcaactagtatggttttagctgccttctccaagcaattaattggaagctttgatcctcatgaaatggaggctttagctatgtttcatggtgtacattatgctctacagcttcagcttcctcaacttcaaatagagactgatgctctacaggtcaagattgctttgtgcaaactatctgcaactttttctacttttcaagatattattatggatatttctagtcttttatcctttttccctaatgtaaatgtatctcatgtcaaacgtacaactaatatagttgcccatagtttggtcaagtttgcactaggggtggatggagattatttttgatcagattgtattcctccacctataaactctattgttgtaaatgacttcttttgttaaatttataataacagatttttttccttaaaaaaaaacaaaattacaattattcaacgaatttgttttaatatcattatatataatttacaatttttttaactattttttcttttaatttaaaccataaatagggtataaaagtcaatcacatcaagccaattttcttccaccaaaccgcactgtttaaagtagtgtataaccagagttttatttttagtttagttaaactaacccaatagccacttgcgcaaataaaataacaggctggaaaggtacaaacaaatttggtttgt

SEQ ID NO: 203296 - DNA, 1686 bp, Cannabis indica
aactcaaattcattatgagcttgggcaaataaatgggtaagatcctcagcagacaactacaactaattaagtgcagcctattatgatacctcaaaactctgaaacggagatgagaaatcaacaagcaaaagtattaaaaggaaataaaaccattaacaaagtaaaacgaataaataaagtaaataaaaatcataattttgtgccaaaattagtaggcattccaaaaatactttaatcgagaaggtagaattcaacaaataaggatagagtgtaatatagctccatcaataatacaacaaagagtgtcgataataaatactcaaatgcagcctttgcactttgataaacttagagaagatctgtcaatagtgaaagaacaaacggaaaaattagaaattgtggcaagaaagtgaggtggatggatcaaataattggatgaccctaacagagcagccatgaggaatgtagctaaatctcgttttgctaaatgaatcatcgatgagccaaagccaaaatgatttactatgccgacttttgcattattcaatggcgaacaagattcatttgaacatgtgctccaatttgaacaaaagatggtgttggagacaagcaatccaacaatccggtgcaaggcattctctaaaaccataatagaatcagctctgttatggttcaaacaattaaaataaggatccatttggcctgcttgtttaggcgcgttacagtaatttcttaattatttttccaacctttgttaatcaaagagttagtgaaaacgtgaataattaaaacttttatatataaaataaaatttacttaaataaaaatatctcttacaatttttgggatcgtgtatttaaaattttaaacatttcaagatacattataagcaaaaagtgtcgcccagtgactacaaaatttgagcctaccatcttgaagcaccaaatagttgggctttgctagaaattagggatttttttcatttcaatttttttaatggactttctaatttctctctcttttttttaattgaaaatagttggttgacgtaagaaaattccaatcacgcctgctgcagcaataattttgcaaagtttttgcaaaatcatatgtgactgtccactaagcctcttaaattgtaagttcactttttgctgcagcaaaattgtaatgaaattccagcaaaaccactagacttcaaaacttgcccaagccactaaattttgtttcttggagcacctaaaatacaacccaaagtgtaaaatccaattaaaaataaaaataaaaactagaaattgacaacagaaattaaacataattattttttttttcaaagaaaatcaactagagttataagattaaaaacaaagttgagaaacttaggttgcctcccaagaagtgcttgatttaaagtcactagctagcttgacttttggagaagtgattatcaaagaacggcttccgcccatagagagtgacatattccctcacatatggggtaattattttggacgccctcaagcttggcgagatgtgaaatttgcgagctccaatgttcaacttgactcttcttaaatgattaatggaagccaaggaatgacgctgatagaggtggattgtgtggtagaaaatacgaatcttgatatgtgtacttatccatgactattttctcactatattgatacc

SEQ ID NO: 203297 - DNA, 904 bp, Cannabis indica
aaatttaataatttagaccaatccgagactttcatgtcgtcattgatttgatacttatacaaaaatttcagatatataaattatgtattattacaatcaaaacataaacttaagtatttatttgtaatcaaaattttagtttaaatatatatacaaactacctaaaaattaatataattaaatatgcaacaactggagctctccaaaaacagacagaatctaaaaatatatttacactacaaaaaactgttacttaattttagtgataattttgtagtcacaacataattttttttgtgactaaatgtgattttatatcacaacaaaatattgcttgtcactaaaacataatatttagttacaagttaacattaatttaattttagtcacaacaagtattgtgactaaaaatatatttagtcacaacaaattgtaatttttgacgtgactagtcacagaccttttaatcacaacataagaattataatttataattagttaatcaaaatttgtgactaaaagtaaaaaaatttatagtgttaataacactttagcttagttcgtgttgaaaaaaaaaataaaaacagagattatcatatttcatattaatatatatagtcggctagagatatggtattaatttcatcgacaaaaagacaatgttgtgatttgcttacacacgtatacaacacagcattttcaatgaataaagactaaaacccactcatattttaactttgacctgcaaatataataaactcatccaaatatagaaaatgttaagtttaatcaactacgtacatctttaatttgtctagttgatgtgagaaaaaaatagagtattgataagataatagagtatttgtcattagatattaatagtgcctaatattactggtgcttt

SEQ ID NO: 203298 - DNA, 1547 bp, Cannabis indica
tatatatatatatacacacatcaggatgattttaatcagttcaatgagtataatttcaatgaaggagctagttttgaattcacaacctaatagttagctaaattcagaaattaagaacacaagaataaaagcagacaaggttcaaattgaaacttacccagtaataacagtttgatgatgaattaatacagatcaatttagtcctccaaaacccttaagagaaataaagcaaaatacagaaagagattgataccagagaaactaaaagaaaagaagagagaggaagtatactataccttgctttttttatttaaaataaaaataaaatattgttgttttacatatttttttatttatttctcaattagtaagagctcttggttggaatattatgtggaaattgagcactctccctgccatgagtgaataaataataattttttaaaacataaatcttacacttcaattattaatgccatatgtacatttcatgtgttgtaattaatatattaataattaagctataactgcaacaagactatggtcggacaatttttgcacttgaaaatatacgacttgtgttaatagtattattagtaaaaaaaaatatcaatatgactagtctctttggactgttaaaaatcatgtgacttctcgagcctttcttttttccgattgttcctgatcatcaatttagacaggttgtctttgtcatataaatatatatatatatatattatataatatatataaataaaatacctgtatgcccacttatccgtattataatctttattggatgaccactgcttcatatatgtagggtttgggattgggtttgttgtagatttttattttatacagcaatattccatcaaataaattcctaaattactttttagtaaataaaaacaaaatatcaagaggttgtctgatctacaataatgcagtggaatgaatatatataaatatatattaattgagtttagtattgaaaatggaagtataggaattcaaatatcaatacatgataaggagagaatttcaaattatctatatatccagattttggtgttatcagtctgattatgtaaacttaagaggacaactattgctagtaaaaaaaaaaaagttaaatatatccctttcaaaaataaaagactctcattataatgttcaaaatctaattatgtgaggtggagtcatccataatatataactactaaatatctgcacatatatttgatttaagtgttattaatttgaaagaccaatagattaatttttttttttttaagaataaacaatagattattgttcttttagagaaagtggtcttcttccgcctccgagaccaggtccgacttcattgttgagaaagcacatttcgcggttgtcgtcttttgcaacagttagaggaaatagtcttataacagctctcgagacgacaattcctaactttaatcctattggtagatctacaaagaaaatcatcagagttcagcatagttaagttctggttttggtaagtttttaaaagttattga

SEQ ID NO: 203299 - DNA, 500 bp, Cannabis indica
gtgtttgactgcaagagtatatcaacttagatgtcatttgaacagtagtttttgccgagatatggacataaagaggcacgtgtgtttttataaaatcaaataaacggaaattattagctaataaacgaaattgctggtcaattccatccagttttagatcagaagctgtacttaattgtactttgttgtggttcccttgtaatttagtgtgctctatgagatctttaatattgaaattgaccatctttagcgccttatcattcattatgatattatccacggttttcggccaattctatgttcacagtttgagttgtcttccattatgaagcaattctaatatttggtctgattgactagcatcttcccaataagcacttcacaattaatttgtatccaattttgacaaggttctgagagtttattactactgtttataatgcaaacattattaacatgatcaagtacaaactactcaaataaagagatcttgccaaggc

SEQ ID NO: 203300 - DNA, 1616 bp, Cannabis indica
aaaaaataaaagaacattgtataaacaccattttgaaaagcaaaagaaacccctttactcagaaaaagtgttagtaccgaaatgagagtaggaatcaaaataataatcagcgctagtcttttcatcagagtcgggtatggatacgttgggctggcattgaggatcttcagcaggcttatcgcagacggaaacggaggtatcaacgtcgcacatggattcgtcgtggttagaggtctcggcggcggcgtcaagagctacgtcgtcctcgtcagggaagcgaatcttggtgggctgatgaagttccatgtcgttagagaaaggcgagtcctggttgttactggagctggtattgttactctttcggcgacccattggaaaaataatttggggtttttgaagacgaaaagaagaggttttgtttttagggttttagaatgggttttgtttctctgtggaatttgcaacttgcgaatcaaatattgaattttaaattttaacaataacgaggtcttaaattattgaagagtaaagccgaggtgagtagggacgggataactgtggattaatcaagacgacgtcgttcacaagtgtgtattggaaaaaagtaaccaataatactaatagtgggcaattatttcttttctgaaatagtaaagtcggaagctgtccctcaccaaaagtgcacataatacgtactttaagaagtttttatttatccattaaaaatatagaaaagaaatgttttggttgggattgtgtttattattacaatttaattttcactactgtaattagtattgtcactgtgatataattttgattgttttatcttttctttatgacataattataggtattttagttttatttgtgtgagatagttttttctttattttgtttcgttgttggttcttctatgttttttaatagtttgccatcaaatcgatgctagtagttagcaattacaagttctttatgactgaaataattattagtaatgtaattacttaccttatacaataattgagtgcttaaactatcaatttgaattgagctattacaacagtttctactattgtttcttttgagtggtagatgaaactgaatataagtgttctttaagttaactgtaatgttacaatcttttttatttttaatttttttgtcaaacgatgtagaaattagtcatttaattattttcctcgttattctaattctaatcttgtcgtatttttaataggaagatatctcgattaaattgcatgctgttattttaactaattgctattaataaaattatataatttatttaaaaaatattattgttttcgtcactaatttatttaaaaataaataaataaatataagtagtatacatgatttaaaataatttttgatttgaaaaattaattaaatgattataatttaaatttagtgtggaatattacatataagggataactatcgtatgagctacataattacatagaaggatgactattgtatgagctacataaaataccttactagtagctagtagcagtaggacccaaagaaggacaaagtaaggttcttatctatgcttattttttttttttcttaatgtgtacaaaaaa

SEQ ID NO: 203301 - DNA, 703 bp, Cannabis indica
gagacattgaattagatgaagaaacgtaaaataaatacattttaattttaacttaaaaatagaaaagataaatataaaataaaacacaaagtaaaaatgtaagcaatagaaaaaataatctaaaaaattgtagcattggtgattattgtgtacactaacacagctgattatataatatattaaaatataaacacaagtatcatcatatattaattacataatattcttatcattattcaaaatttaaattaaattatgagaaatttagatttacatgcttaatgtaaaacatggacccaaaataattgaaccataatacacataaaacaatatgctaatcttttaaataggttcataaattgcccatgccatttcaacttctccccattctctctaactcccttctctctcatctttctctcattcttcgtgttctctctcctgtccaaaattaccactgctctttgacgaccctaagacctccgtgaacccaagccccgtgttaactcaagcccccttaaaagtcacctcaaatactttttttcaagtcgcctagacttttaggggcgacaaagatcacccttaaaacagtgagtgggaaaaatcttgcctatattaatgtcacctctaatattgtaaagtcgtctcagaagtttttaggggcgatttttgtctctcctaaagctgcaaataataataataa

SEQ ID NO: 203302 - DNA, 865 bp, Cannabis indica
ctgctagcaaaagacaccccaaaacacttgtgctctttttcttcatcaatagccttcactttccactctccaattgctttccacatcctattaaatatggttctgaatagcctcgtatttacaatttattttgagacatttctcccaatcaaagacttctttctgaactcaactgtttgtgcctcattaacttcccattccttttcttgctccattcctagtttatcagtcaattgcacaatcttatctaccgtactttcagtcatcaccgtagccattaaaccgaagatcaccaacagatcaatcataatgcagagtcacaaagaccatgaagagtcactcagggtcacaaagaccataaacatcccttatctataatctataaatatataaaagtgtcaataatttttgagctttacaacttagattatttttttaaccttcatttatttttcaattaaaattttttgtagttcaatataaatcatattattttgatgtgatatttttggtttttaatcaatccccattgataattatatattagttaataattatacaataaattaatataaagataatcatataatacaatatgtatatgttataattaatatataaatattactgttaattacaaaaattaataaaatattgtatttttttttttgtataattaactaataattacataataaaatataaataattatatttatatggatagataaaaataatatggatatatatatattataatttatgtataaatatcaccaataattacaaaaaattagtaaaataattaatctgattttgtataatattataataatatagtttttttagagcaataatatagtta

SEQ ID NO: 203303 - DNA, 1146 bp, Cannabis indica
ctaacaatcttaatagtttttttaaaaaaaattctaacaacttgaactattgcacaaaacttttattttctagggcttttttttttttcttaaaaaatagactcaattgtaaacttttgcacaaaaatctcaaaatgtttagtccgactcggttgtaagtgatttttagctcatgcatttttattttattttatatatatatatatatgttatatgttataaataattacacaggtttctgtacttgaaaccatgttgaaccaagaagaaagaatgcgtgaggttcttgaccaagtccataataatcaacatcacaaaggatctcccattactatcccaaattttcttcctcctaaggtatttataagtacatatatttatctttattcaatttcaatttaacattgataattaatactccattaattaataatttcgattagaaatagtgtaaattaatactcaattaattattaaactgtacgtttatttggtccattagttttatggtgaaaaaatagtgattactttcacttcatagtataggaattaaagtaaaaacacaaaaaaataaatttctatttttaacataagatctaattcgaaaaaaattcatgcgtttataattttattattattattattattattattattattaatttatatttttaatttgtagagatttttcttgtccaaaatcatcatgagtaattgatacgtgaacataaatatgcaccaaaaaattaatgtcgtactaaaacattattgtcgtagtagtgttttttgggaaagaatatatttttatggtttttaaggtgcaactttgtaaaaatataattttttaaaaaaaacgtattttttttaattttaaaaaataaaaatataaaaaatacaatataaggtaactagttatttttcttatatttttttaacttgattttttttttcaataaatgattctttgaaaaaacaccaaaaccataaaattcataatttcctctatttttcaactaattacatatatgttagaaatacaagcccgactctgaacatagatggacgtgtgcctaaggcccaaattttagaaaattattatttttaggtaaaatttacattatatactaactttagccatttttttac

SEQ ID NO: 203304 - DNA, 2348 bp, Cannabis indica
atgtgggacaatattgttgaatactctcagatcacttaagttgtttttcattcttgaatattccaaaaatgggtactactaagtcggttgaattctataataaatacttgttggcattctaatttctcttcttcttttaagtaaagttatttttgatggtaaatatccttcctaaatatttttactttggaaaaaatatttttttagcgtggaaagaaaattagaaatatttaagtatttaaattaattaatgatgtaataattagaccaaaaaaaaacatggaagagtaatatttaatatagagatgagtagttgaaatgtacttaattcctctactttcaacatcatcatctcttatactcgatcagaaaatgtactttcaaaataaacctaacataaagaactgaaaaataattaacattcatataaatatagcaattaatatatagtcagaaaaaagtaaacacaatccaaaataaatacatgtgaataaaatatttattgttttgggtaactcgagctacaataattacggaaactgagaaatatataattaattattagatgcaaaaagaaaagaaaaaaaaataataatcttttgaaaagttctttaaattattacttaagtatgaaattataaagatatcagaaaaaacgtataaaattgttgaattatttttctaaaaagtcattaaattaataattaatttaaaggtaagagtgcattaactttttcttagagattttctttttaccaaaaaaagctaaattataattacgaagatcccgaaagtcaataccaccatcatatttgtgtcgacaaagcctctttcaactcatccaacttacactcttactagaagagtttgcttgagatttctaccaaaatttagacattaaaccctcaaggttagaacaaatctcttttgtcaacaagaacacactcatagcataggaaggcaatgcttgagcaactgacttaatcaaaacttccttgcccgcctttgacaaaaaacgactttcccaagagaagattttcttttgcattttgtccttaacgaaacccaagatagcatttttattccttcccataatgcacggcaaacccagtaaaagctattatccaaagcctccaccgtccccaacatctcacacattctttgtctagtatcacactagtattattactgaaaaagatggatgacttagcataattcacctgctgaccagaagttcgttgatacacttgaaggagttgtaacactcttgcagcttcatcctcattagtcttacagtacacatagctattgtcagcaaatagcatatgaaaaacacgaagggctcctttagcaacttggcagccagtcaaccaacgattgcattcatattgttgcaatagagaagaaagtccctcagcacaccaaaaataggtagggggatagtggatctccctgcctaatacctctcccaagataaataggccccataatcttccttccataagtaacattaaaagtaaccgtggacacacaacacataatgtgggagactattttgcagcaaaaacccattctaagcatcatagcttccaagaaaggccaaccaacaagatcataacccttgctcatgtcgagtttgagtgccataaaaccatccttacccaccctttttcttttcaagtaatgcataatccaaaagataccattatattatcagagatcaaacgccctggaagaaaaacactttgagtggttgatataacatcaggcaaagcaagtttcaatctattagcaagcacctttgagataactttataaaccacataacacaaggaaatcggccggagatcactcattagctcgggaacctttttctttgggatcaagacaatatttgtattattcagatcacgagggagagtcccattatttaaaaaagatcttaccaaattaacaatatcatctcccacaatatgccaaaatttttggtaaaaaatcggagtcataccatcggggcatggggacttatcaggatgcatttggaatagagcttttttaatctcttcagtagtaacactttctagcaataaaacattctgctcctcagtaacactcgattgtatgcagttgagcgcatcaccaaaaacaacatcttcataaccaaaaagttgctgaaaataatcagttaccacagttggtaaatcatcttcccaaccaacccactctccatcattatttttcaacttctctataagattatttcgacatctcgaggttactttggcgtggaaaaatttggagttttgatccccttctcttacccccagttgcttgcttctttgcttcca

SEQ ID NO: 203305 - DNA, 698 bp, Cannabis indica
atatgtatatttgtaaagtgtacatatggtcttgtcatctgacatgagttagttgtgagagtcttgttgtgaagttgtttgtgtctgttgctcttttgaaaatccagtttttgttttggtctgtcttttgttattggtgattatggccttaagtagccacaatatgtcaaacatcaacgatcagtatgatcaaatccaattggaagaagaagaagatgggggactactgtgtgatatagttgctgatgttggtcagcccattgatgacagatggtgtttggtgggaaaattcttaactaaaagattgatcgatttcgatgctatgcaaaatacattggcgtccttatggcaaccgggaaaaggaatgtttgtgaaagagttggatcttaatctctatattttccaattctatcatgaaattgatatacaaagggttatggatggcagcccatggacttttaacaggttccaactagtctttgagagattgaaaagaggtgaggatccaaggagtgtttctctacatcgtcttgacatatgggttcaacttcataacctcaaaacgggtttcatgactgaagcaaatgcaagaaatgttggtaactatataggcttctttcattcaaatctgatcctaaaaacttcttaggtaattttggagggattaccttcgctatacgagtgacaatcaacataga

SEQ ID NO: 203306 - DNA, 638 bp, Cannabis indica
attatattaatatttttttattagtatctgttataataattatgtaaattaagtatcatttgaattaatatttaaattcaaattttattagatatttaatttattattttttattctactttttaatatatataatttatgattatcaaatttgtaaattttaaaaataaagaatttaattaaataattgaccataaattaaagggattaaaaagctcattaattcaaaaactttccaccaaccccaagagagtggaagttataatattaagaagacaactcttaaagaagatatgtttatcaacaagataactatttaaaaattattcgactgattggagtgatacggtgatgacaatggatgagatacgatattttaatgatacagtgaggataataagcgagatacggtaaagatatagtgataggtgagatacgatgagagacaacggaggagcagatacggtattaatacggtgatgacaacggagattcagtattgaatgatcagatatacaaataatgcattatatttataaaaaaacactattttttttttctaaaccaccctatttacttatttttataataataatttttttaacaaaataattcaaaattatatatgtaatatatat

SEQ ID NO: 203307 - DNA, 1162 bp, Cannabis indica
attttcgaaatgtgtttaggtgtaaggcatttttcttcaacaaactaaatttatttcttcatcttattttttctttttttttacagaaaaaaaaagatgttactaaagaacaagggtacaaaaaggcaagaaaaaagaggacaaccaacaggcaggtcccttaaagagaaagaagaagaattaggatatgattactttaatgataataacttgtattcaatatttcatgtgaatttttaaacttttataatagatattttaatacttaaattcaaatgtgtcaaatatatattataaatttttatatattacacttttaaaaagctaacagtatgacaatgttaatttggtatatgaattgtgatattagttaaaatcaaaacaagtgttttaattgttataggtacctaaacaaattggaaagagattgataaaacaaggtcttgttgaacaatctccttacactactaaatttgggtcagctaaggagagaagcctatacgaccaaaaagggtgaagttagtgagtcctataacacaagaggagttagaaccaacatttgatttgggaatatcacccttggaatctgaccctaaacaaatgaagccccagcaaccattcacagcagagtctccagacgacaaaacatacaaagaatttgaaaattggcttcaagaagattttcataatcaaagaaggtataccatgaaattatataaaattttgttatacgttaaaagtcatagaaaaatattaataaaactacagtgatcgtctctatttgtcttttgcatgtcaaatgtaggaaacaaccagatcaatccaccatttaactatgtcgaagatgaagttaggtctaaaacttgattttatgatctatcaacacctgctaaaaaaatcaatgattctgtatatatgtgttttttcatgttttatgtgatatgaaaccaattaaaattagttaaaacactcaataagtggtatatcaatatatataagattgataccttgttttactaggatttatactttttatgtgctactgtatatcatgaacaaattagaatgctattgttttttttttctttttttttattgtatatattaaattaaatttactagtataccaattgtatgtaacaatgcatgtgaaattgttttc

SEQ ID NO: 203308 - DNA, 676 bp, Cannabis indica
atttgttgtgactatatgtatttttagtcacaatacttgctgtgactaaattaaattaatgacaacttggaacgaaatattatattttagtcataagtaacattttgttgtgactaaaagtcacatttagtcataaaaaatttatattgtgactaaaagttatcactaaaattaactagttttttgtagtgtgtatttctttgcttatcaattatcatggcaattgggttatatgtttgaaagtaaatatgtatttcttagttgaaagtaaaatatgtatttcttttgtttatatgatttcattttttatgatatgtgtaaatttatatttggaaaatatactaaaaattaattatatgtggtagttttaaaataaagttgagattttattgtgaaattttttttaaaattagaatattttatttacattcaaaaaaaatcagaatattctatttatactaataaatattgatatttctatataaatgtataatatgtatttataaaataatctgttaaataaaatcaggataactaagtgcatcgtattgttttatgttttttgttttaaaaaaattgttttaagaaatgagaataaaaaataatttttaaagtttttaaaacacaagtcacatttggttagtattttttagaaataatattgaccaaaagtgaa

SEQ ID NO: 203309 - DNA, 1675 bp, Cannabis indica
aagttatcctctcttccagctctggagtcagaggcggctaggaaaggcagtttagtagatgtgaaaaacaagagatcaatatacatcaagcatgaggaaaaggaaaatcccaaagtctgaacaagggaatgacacttatttgtagcattgaaatccaaactgattgtaggaaccctctttaggggaagccagaggtgtaaaagtagtagcccatgccttctctttgtggcccctcatgggctgagatttgatcttgtagaagaacaagacctcctccagtgttggcacagatttgctatgttgtacacaaaagtcatactaccctgatagtaggcagtatgcttgaagaataagctggaaagatgctaatctagtcacagcacaaaaattagcaaaatagcactgtgagggcaagcatgccctaatctcagtatgagcccaggtccagacaccgaagcctccttccacgcacttactgggcctctccccaagaatggagatcctattccagaataaccctggaacactttgaagccctcgtagggtctcgtacttcttcagattgttataattcttgaacatgttgacatgttggtccaacttccatggactgtcattcaggatcaattttagagcatcttattgctccattatttcctcctctgagtcaccttccgcttgacgtgtttgcttaggcatagtttctgtacaaaaagaagaaaaccaagcagttagccaccgtaactacatagcatagaaagggagctatgggtcctcacccataaatttctttgagaggtcccaactagactaactatctagaaatgagaacttctaggagttactcattgcatataggaagtcaagaatgatatatagaaaaacatgacagaaattaaagacaaagtcataaccagaaggattttgggccaaaggagatttttccagcacttctgcgcaaattgaccaactccaggaatttataaataaaaaatttaatgacaatatggtttctgatgcttaaatctacctaagatggcaatcgcacaaacaaaaaaccctattcgcatcccaaaatagagcagcaaatacaatttaaaacaaaaaattcagaaaatgcaatcctataatgaaaaaacagcatacctgatattaataatggagacgttaagctaatcattgttgaatttggctctagaagttaatcacacctttcacaaagacgagatgctaaggtgatcaacgaatcgaattttgcgttgaaatcaaggctcacaatttttctcctactataaatgttctgatcacttggggtcaatgatgagggaactctcgtgccctaatcctcaataatagacgaaggtaaaaattcatgatgttttccagattggagaaggagactttgctttgatttcggttcgtagttctagaaagtgcagaaaagccaataagctttgaagggttgaaaaaatggaaaaagaggaaaagtggtaattgaagttacaaggggtacttataccaaaaaagcgatccacatgaaggggatataaacaaccacgatcctacttctagaaacataagtcttcattaattggtcagggagcctaacaagctatgtgtatcctggcaattaatgtttcccaaaaccaatgtgtagatcaatgatgaaaatgct

SEQ ID NO: 203310 - DNA, 833 bp, Cannabis indica
aattaggtactatatgaggggtaacagctaagagagaattatatgggtatttttttttttttttcatttctgggattgaggagaggattatggagaggggtttgtttgtgggggtggtgctccagctgtactgtacgggttaggcagaaagggcttttataacgtggtagagtttttttgtccttggtttaggaaatgcatcccaagctaatgatgctgtctttctctactgtttgagttatatatatatatatatatatatatactttgtggaagataatcatttgtccatttgggtcgcgatatcgctctattattttctgatctgatggttagtattagatcgtatgtaataagatgggaaataatgttgatgaattgaatagatcattgaagagtcttgtataggcttcatcttttttataggagactttgtcggttctacttctttattattagaagtttatatcatttgaatgggagtaatattatgacgtatgtatataatttatttatcttctgtacatgaaatattgaatgatcaacataccccagacaactaaaactcgttatcgtatgattttttttgcgttatttttcacttcattttgctcctagtgaaaatttaatgtcatacgttatacatgtgtgtgttcttattatttattaagattaagatgctaagcttaaattgttttaattagttacgtaaagtagttatatatattgacaaatatcttattacgcgttgttagagccatcatttggattttactagtatatattcaagaataatattgtttgtacgtatatagcacaaaaaattaaaaaaa

SEQ ID NO: 203311 - DNA, 1460 bp, Cannabis indica
aaaaaaaaattattaagtttttattaagtagaattaagtgtattgcaaactacaaatattcatagtttaattgattaaagtgtatgacattacacaatatcatgcgtatgataccatttaccctttcttctaaaatgtgcatgttatatggttatcagtactgaaatacatacatttgacagataaaaaagagaaaagaaaaacaaccacatcaaccttatgtaaagcaacaatacaaaaaaagaaaatccatatagattgagaaaagtcttaaatatataaatatgtggtgtgatcaaaactcaaaagaaggaaaatccaaaattgacacataaaaaatcagacgaaggttccccacaacactgagacattaatgtggtgtagtgccatctttgaatagttctagccaacttttgaagatctcaaccaatttatttttccaaataaataataattatgaaagcaatattttgtttggaaaaaaaatggctcttatggtggggaccaaatttaaaactattcaaatcctacaaagcatagctagaatattattattatatacgtgcgagaactaatattatttgctttcttaactaatattatcttttctagttgatcaaaagaaaaaacttctctttttctacatgtgctgacaggtagactaatgtgttagagaaccttcatggtagagaccatactgtccatctgcatcaaggacaaaaataaataaaataaaataaaaatattggatttaacaattgtagattgtagtagtccttgttagagtttaggattttggtttttgtatataataaaaatattatttgtgaattattgttaaattgtttgttgatcaaagtttatagttgatttggttctgaacattaattgtaatattcccgcactatacattggcgaatttttttttttcctaacctcatctcttcattgtttttttttgttttttttttttttttgtagtgtatcttttcattgtttttcttttttaatataaacaaaagtatatgtaaatatttgttggttgtcaaactaaaagtaatgagaaaggctactttaatgctatctttttttttttttccattgcttaaaaaattctaacagaaacacccaaattttagtagggttattttttaacatacatgtatacttgaattaaacatataatatattattctaacaaccacacacatgttcattcgagaataaaaactagaaatatgtgactataattggttaagtggacccacataacagatagccatgccagccatttggtaggactcacacaactgtggaacgcaccatttattgaggaccaaacatatatcctttcccttttacaccaagttgtaagtttactttacattattacgaaagaacctctcaaagtgattccctaaatctctttcaaataatatacaatgacataaatattggtc

SEQ ID NO: 203312 - DNA, 839 bp, Cannabis indica
ctctctctctctctctctctctctctctctctctctctctcagcatctcttcatcgcccacccaaatcgccgccaaacctcaacccacatcacccacagaccgaccgacagatcgatcgccccaactgtccacacaagcccgaccgaccgaagactcaactggcatggaatcatcggcgacaatgtctaaggtattttttttttcaattttttcatgcaatttttggtgcttaaattcatgaaatcgattaatatgttgcaatgttctgtgaaatatgttagttagggttagatttaggatgagatttgttagttaattgagttgaagatggtgattttttggttgggcccgatatcgtccgatgacagtctgattgttgtccgatggcatgagttttctattgaaaatggatttatttaggtcgggctcgattccattcgatggcagtccaattgctatccgatggcatgagttttatgtcaaaaatggattttttaggtcgggcccgatgtggcccaatttcgtccgatggtgcgcccaatggtacacgaattttgtttttttagggttttcaaggtcgggcccgatgtgggctcgatgctgtccgatgggtacccaattttaggttttatttgggttttttggtcgggcccgatttggtcctaatgccgtccgatgggtgcctgatttacatgtgtttgtgctcaatataagttttttaggtcgggtccgatataaacctgatgcccatccaatgtgggtgctcgattgtatgtgatttggtaaaatatgggtattttgagtcgggcccgatgtgggcttgatgtctgtccgatgg

SEQ ID NO: 203313 - DNA, 1277 bp, Cannabis indica
caagttcttgtctgggtttgggtcagttccagtcctaggttcaggttctgggttcgggtccgggtctaggttcaagtactggtccgagtctaggtcagggtttatgtctagatctaggtccgggttcgggtcccgtgtcctagtctgggtcctagtctgggttcgggccccgagtccgagtttgtttcttggttctgttctaggtcagagttcgggtcccggttctgagtttgggtctcaggtccaagtctttgtttgggtccaggtttaacttccagtctaggtcctagttcaatgtcaagtctcgggtctgggtctgggtcttggtccaggtcttgtattttgatcccgatttgggtctcggtctgggttggggtctgggtctttgttcggttctaggtctaggtcttgatcctggtcgtggtctaggcctgggtttatgtttgggatcacgtcccgggtttaggtcgggtttgggtctcaatcccagtctgggtttggcaatgggtctgggcccgggttccaatcttggtttgggtcctaggctatgttcgagtttgggtcctagtcatgatctcggtcctattccaatgtcctagtctggttctggttcaagtttcaatatcgagtgtcgggtctgggtctgggtccaggtcctagttcgagttcaggtcttagtctaaattccagatccagacaccgactacaggtctaatccaagcccctattctcggatcgcaggtcaagatttggatcccaataacaaatcctggtctagttacgattcaagtctcgagtctcgatttgggtcccaggttcgggtttggcatggttgagagactggggtctagttctgggtcttggtttgagttcaggttcccgggtcatatttcatgtttgggtctaagtttgggttcgagttcaggtctcgagtcccactcaaagtttggtttcgggtttgggtctatgtctgagtctaggtcctggtcccagtcttgctccatggtcctggtacgcttcaggttccgttccacttttgggtcacgtggtatgggttcatgtttaggtttagctttgggtctgggtatggatcctaggacccgaaaccaattctatggcccaggtcactttctcaatttgggtttgggtttgtgtcctagtctaggttctggtccgtgtttgggtttgagtctgggtcctagtcctgatctgattacttttccagttgcaattctgggttcaggtcttagtacgggtcaggcttcgagtcctgatct

SEQ ID NO: 203314 - DNA, 2000 bp, Cannabis indica
agaaatcaagtattttacaagctaaaagccatatatagatacggtcacaattttttttcctttctctgatttaggctccccaccttgtagggactcagaaactacagcaatcgttatgcaggaacattagtaaaattgttcttaacacgtaccttacaaattatacaatatgcaataatcttttctttcttttttcttctataaaaaatgaaaaagttacaaacgatagtaaagatgaaaataattaacaaattctcaaaaggaaaacggtgaaaaaacaaacttaccatcctagagtttgacttggacctgttgctgctgccatgatttcctgatggcttttcctttaaatgtttctttgcagcacctgtcacaacttcatatattgttggaagatcatttatcatattatgaagtttcttcctgcattaaaaatacacattcctttcacccaggtgagtttgtcaagtccaataatttgaaacaaagaagaaacaaaaaactgtaaaataagtgttctaacacctgtcagctttatcaaatccaaatcttgcgccaaaataaaaggcgacagaaagtagccatgcatcactgtggacagcaactaaagataaccaatccttttcttgcatgccatctcttgcaaagttgataccaagtgcaggctctggtagctccggtggcacctcttcagcaggtaagttaacttcccactgctcactcggaaatccatagagacacaaattctccttctctgcaaacacaaacttacccataattaccagctggaagagattgctaaagaaaatctgtgatcaatcagtgagaagtaaatgcacaaacaaaaaacaaaacaactgcaaataactcgtatgcttagtcaatttcgtcccagaaacataaaaatgtgaattaatgcccttgctaaggctcatgtgaactatcccaagaaaaaattaaaaaaacaaatatcagctaataaggacagaaaactctctactctagcagactacctccaaacaaattgacaaatttgcaccgcaataaaagctaccaaccaatattaataaatgtacagaaccaagagaacgtaaaataatgaaatataatatcttactaatgcacatgtctaaaactatagtaaactttgtaatacgtattacgtaatataagtacagtaatatcatttcaataagaagaagaagaaaaaaatgttacccgggtcgcattgctgatagaattcttcaacatctgcattaacagaaccaggaagatgtaaagcacaacataaataattttcaaaataaaatatttaagttcaaatcaaaaacatttttagaattataataaacaccaaatcaaattcaggaatcttttactgcattcctgccattaattttctttcaccgtaaacaagggtaaccaattgaccgaggcgaaccaaacgtctaaaacaaaattcctatacttgagaggaaacatgtaatactggtatcgaatcataacaaaaaacagaaaactcataatttcacgaactttatacccatttcgcttcacggtttccttcaagtaaaccatatctgaacgcttaaaaatcggtgagaaagcgataattgaaacgagagaaagaaagaaagaaaattacagcatccagttcaaacccgtggtatggtgagaaccaggcaaggcaacgacataaagcaacaccagcatagaagaacttgaccatattttcgagacccataacgagtcaaaccgaaaaacttcaaaatcttcaaagaatttccttgctgggttttctcagaaaccaaattatgaaacaaaacaacacagcaaaaaaagagagggagaaaaaaaaaacagagcgaaagtaaaaaacctgtggtgagggctttgatcattccagctctacggcctttgaaatccctgaaaacctcttcgactgtgcgaggattgtagtgcgctcctcctccaactccctccattctctctctctctct

SEQ ID NO: 203315 - DNA, 906 bp, Cannabis indica
ttcgttattatccccaaatggttgacctgtggcatagaattatccgagcataacccatattttattaacctctctttttaatgtgaacactttagttctacacggcaagcaatgagtatcttctggtcaaattttatctttattgaacgaagacgcagaccaattcaaacacaaataaggggccaaacgggtaaccccacgtatgtgaatgacttcaaactttgactaagcgatattttcaaatataaattaatagaaggaagaatagtaagactcacgagtcacattctcatactatttcttcatttttttttagtaagggcttcgtttttttttcttaattcattttctcttttcttttggtaatgtcatacaatacaaccgccaaaatgtcatatgccatatctcagaagtgctacagaaaattaaaaagtcattatgttagtttgagattattagaggaatttttttatttgatacaaattttttttttgtttgattcaaaagaaatttgaacaaaagcttaaaaggtttatgaacaaaagttcaaaaatttacctgcaaaagcttatatacaatcaaaaaagcttacatatagtcaaaagaactaagcttagcacaaaagcttaaaaggttacgtacaaaagtttaaaagcttatttacaaaagcttatatacaatcaaaagaggttatatacagtcaaaataactaagcttatgttgaacaaagttaaacaacataagttatataaactgactaataccatatcgatgtaacatttagtaatttattagcgattttttatattatttattaaattaattttttagtaatgtgatattaaaatatacaaataatattcccttagcatttctctactaattcgtgcatgaaatgaatattcc

SEQ ID NO: 203316 - DNA, 1295 bp, Cannabis indica
agttgtttgtcatgataatgtctttccatttttgctttagtttttttaatttggtttttttttttttaaaactgtagttttttttttacaatttattatgatttttcagtctcaaattcaccttcaaattaaaatagaagataaagcctttgattgtaattactgccatgcataagattattcaatgtatacgatagtataagtatcgatcttatgggctgtttataaataaataattcggaatagttattcttttatatttatttaaagtattcaaggggaattttattaaataagggatcgaagaaagtgaataataaattttatttatttttatttttaatattaataataattttgtcggtttaaaatatatttttacaaaaatatattatatattatagtttaatttaaaaggataatatggttaatttaaatattttctttacgtttttttggtaaaataaattattattattttatttaaaaataattttaataaataatatattataaatattaattttgactattttttatttattatattacattttttttattaatttattttgatttttatatactgtgtagtaaatgtgatgttattggcgtagtaaaatcgtaaatttttccaaatcaaatttttttttgctgaaaatagaaattacaatccaattaaggattaaaaagtttcgtgcaaaattggtgcataagtaaagatcattttcatgtaaacccttcactaattatataggacttctttgtatttgaactcatgatcaaaattatacttcccgtataactttttattttttgattgtaattcatcgaattcaatctgcactagtttacttacagtacataatacgatttgttaagtgcaaaatttatattttggattcaatccaatctgcacaataaattaaattaataaaggctcgttgtggaagattggtaatgaaaatattgttcacactataccgctggtttcctcacactagatttttgaattataaatacagatcaatacctccttgtgagtttgtcttttttcaccagttcttccgggcattgagacttaaaaaatcttcttactttgatgatgatcatgttttggcttatttttttgaaaatgaaatattaacttcattaaaatttagcatttatcatacaagagagcatgaagctcattaggaatgtcattcctatgaatgctacgatcagagaaaaatcgagaacgcctagcaacaaagtaagcgacgcggtttgctaataaaacgaacacttacatt

SEQ ID NO: 203317 - DNA, 1007 bp, Cannabis indica
gattgatttgtgaaagaataaagaatggatctgccactacaaatcagtcattgatgaactctcatgcttcatctcatcacccactccaaccattctttctgcttattgcttttggtctattattattgttcatgtaatattataatttattgtattactatttttttcttctatcctttatgagatgtagagatataagaatccaacaaagaaaattagttggaaaataggtgtatgatcattcctggttagttgaaatctttaggttacaattttagtgacaatagtgtgatcgctttgtcttttgactgcttattattatatatgtgaatcatatgttttctatgatcaacttgtaccattacgcaaaagttttaactaattttgaaggagattgcatgcctacaaggaattgaggtcttactggaagttgtagttttcattcatactactgataatggagaacttaaacgaattgatgattccattgttatcaagagtttcttattatgatcaaataaggagaaacaacaatgaaaaagaagagcaaaagttcgattaattggatgactcagagtgatagagagaaggtgctaaagtggacagctagtgcatggtttaaaatttcaaccttgaagctctgctccactaatctgagaaagcaaatttcaattgaacaagaagaagaggaagaaggattctgcttctgacttttttgtgttcccaggttcaatatagagtaacaagggtcgagtattcttacaagtagatgtcattagctccacataataattggcatgttttacttcatgcctgctcattgggaccttacgacatggattgtcttgggttatccttagttcggccagatttcattatcacttcattttacaggattttcaaatttgacccaacttgattattttgtattgttattttttggattttcattatcacataagtcttgttaaacgaatttttttttaggaattttatgtatagtcctg

SEQ ID NO: 203318 - DNA, 607 bp, Cannabis indica
tgaaagagctgatctgtctataaattttatatgtaatcaggattcaggagtataatcacaaacactggaggagagagagagagatgaggtatccattatttgttacacatagaagaaaaaaaaggtatttgatgctttttgggaactaattattattggcattagatatgagatattaaaataattacacaagtacactgctgcctggttctgcgtgtaacacttacaatggttccgttaccttcaagtaattttataagataattagtaatttgaaacattttgtctaattttaagtaaaaaaattttaatatgaatgaaagtttaaagaacatgatttaatacatgtattaaaatttgggggcatgatttgatagatatcaaaatctatgaagtatagtttagtacataaacaatcattgaaacagtaaaattgaatgaaattagataaaaatccttaaatttaacaatctcaatagttcgagagaatttttaacggtaaaaaaaattcaacgggcacgatttggcacatgtagaaattcaagggaataattactgattagccaattttatattatatgggctttgaggtgttaagttaatgaac

SEQ ID NO: 203319 - DNA, 1292 bp, Cannabis indica
gatttagatctaggtctgtgttttagggtctaggtcccacatccaagtccggtttctagctccttgtttgggtccaggttcgggttcgggtcccgagtcttggttttattcctggtcccggtctgggttcgagtccaagtctcgatcccagtcttggtctgggttcaggatcgggtccttatcagggtttggatcctggtctaggtcgcgggtctcaggttcaaaagagggtttaggacaaggtcaggtcaaggtcccagtccaagttcgagtcccaggtcttaggtcccaatcctagtcaagttccccgtctaggttttggtctgagtttgggttatggtttgggttcggtactagtgtcagttccgagtcctagtcacagttcgagttctgattctgggtccgggtttggttccgggtccaggtctgggtgaaggttggggttgaggtccgagtcttagttcgagtttgggtacgggtttttgagatcccggtctgggtctaggtctgagtcggggtccaggttcgagtcttaggtctgggtcccaggttcggattttcatctacatctttgtcagggtcaaagtcgtgtgtttcgatcccggtctgggtctgggtcgctatttgggtctgtgtctgcgttcgtgtcgtgagttcgggttcatgtttaagtttgagtctcaggtctagttagtgtctgggatcgggtccgaactgggtccgagcccaagtttcagggctagattctggtctagttctggatcccggtcaaggtccaggtcctggtcactgtcccgatcctgttccagggtcctggtcgcgttcaagttcaagtttcggttcttggtcccatgtctgggtctgggttcaggtcctggtaaatcttagggtccttgtccaagtcccagatcaagacatcgactatgggtgttgtccaagccctggttctcggatctcgagacaagatcaggatcccaatcacgggtcgcaatttggtttcgattagtgtcccaggtctgggtcttggtctgggcctaagtcctgaaccgagataggggtttagttttgggtctcgatcccagttctcggtcccgagtcctattccattttcgggtctaagttcaggtctgggttcgagtctagagtccttgttcgggtttcgattcaggtttgggaccaatcccaaggtttgtttgtgttcaagttcgggtcctggtccggttagagttttgggtctgtgtctaggtcttggtttgggtctgtgtccaggacttggacccagaccgggactt

SEQ ID NO: 203320 - DNA, 766 bp, Cannabis indica
agccttgcgctctaccaactgagctagacgggctttttgtttttcttagccactttttacactaagattactattaacaatccttttaagttgaaaagacttagctaaataaatatcttagaaatttttaaaaccattatgaaaaaaaattactaatgaaataactctagcaacgatgaaaattatattgtgcgacttcaaaatggtcatttttacgatagtgtttcttatgataatgcttcaatgaaaaaggagaagaaggctatagaacactttttttgagtgtgtaaatagacactcaaaaacttcttataattagtataaattgagaatatatatatattctaaaagtaaacgtttatattattagaaagatctaatggtccaaacaaaatatatatatcacctgccatagaaaggacttttaattattagctagtagtgtttagtacaactaatattcttttagtaatattatgagctacaaattatcaagtgtatgagttttagtgaaatgacaacttaataacaaattgaaagcattcaaatacgcagtaacataattttgcacctagtttctttaattacattgagatcacaaatttatgcctctaatccacttctaaattcaaaaccaaaatacaagccctagcttctcctaccggcgagttgttgtggctaaatccatatagcttcctccaagcgatatctaaccacaacaaccaccatgatcatctcgtcactcctcacaacatatagaaattaa

SEQ ID NO: 203321 - DNA, 658 bp, Cannabis indica
atattaccaaatactcccaatttcataaagattttggccatgatacaaatgagtgtaacaatctaaaggttgaaattgaattcctcattaaaaagaataatctacacatacatcagtacgttaagaccaaccagaaccaacaagttagccaaacttataacaatcagaaccatctaatgcctccactaatggtcgggcatttataagtgatcattggggggtcccatattgttgttgattcgaacaaattcagagaaatgtatgctcaaacactttaacatgaacaaaagaatgaagaagtattggttgtggatgagagaaaaccagagcagtcgcgcagagaggaaattatcatctcatttagtgaagaagatgttagccatgtcatttacccacataacgaccctctagtcgtcgaagtgaaaattccaaagatgatattttctcgatcaatgattgataatggggcttccttaaatattcttttcaaaacaacatacaaaaatatgggacttcatcttaaagatttggtttcctacgcatagctagtgtacggtttctctgaaaaaagcatagctccacttggacacatccgtctcccactcactataggaaaagctccaacaacaaatacagtgatggcctaatttgtagaaat

SEQ ID NO: 203322 - DNA, 3660 bp, Cannabis indica
atgcgcatgcatctcctgagcttcgggaagctttaggggttgtatgcatgcgccccaagatctcctagcagtctctttcctctaatttagtggagagcatctaattggcttctgaagtgaaagctcgaactcccaataagataagtagtggaccagtagggaattcttgaatggtttataatgtctcgagttactttctctggtgtaactctggggttgtagtcacatcaagcgactgaaacctcctgagcaaagtgtgcctaaaatggcccgcttccacgaacaataccataaccaggcctcactggtggcccagcagacgtcgatggtactaatggtctcctctcagccactgccattacaggatcaattttttgtaacaacttttgccacctaggacaaaggtaagggaggtagttctcggtcaacagatctggcccttgcgttagcaccagcatcagagtcttgagctggatagagtccttacacctgacaacccctcttgagttagttgtcgtaactgcgttgggtcgcaacttctttgtctggccccaacacctctttcacctcatcgtctctgtgtggttatgccttagtgactggcaagaaacacgagtctgaagatagcgatggctggtgacccttacatggagttggctggccagatctgagctttgaaggacgaatatcggtacaataggtgttttaggatcacatgcatttgtctttgctatttttctcatgtggatgaagacatcgggtatttttctgggcaactcctccgatctacacatactggccctcggctggactcaataaaagattaggaggtcttccttcttttctcgcacgagttctcttttcaacgggctcgcatctataaccgtcctacatatctttttcatcagctctcaatgaaagtaccaaaatgtttaccaagtttttcagcaactaaatatttttgagcttaagaaggtaataatggagtaaatagcaagataacaaagaagatattttttacgtggttcaagcgttaactatccttagtccacgagtccattttattaggctcattggccggtaactatttacacaagcagagatacaatggactaaaactcctttccaccgtgtttcatagtagggttacagtaatgtgtttgatcaagaaggagtcttctctctcccaaaaaaaagggtccttttgccttgtacttttgctggggtatttatgggtcagcttctttgcatgggctgtcttagatggatcaccgttgggctgaaatcccaccgttggattggtaggtattatttttcccatatggcatttaagggtgtcgaatcgtactggctgtacaggctgggcctcgaacgcgtgtcacctcaaggctgctcctatttgaatttctgttatccctagctgttggatcatttaacccgatacacaacgacacgcatgctctatacgaaagtatgtcgtggaagacaacccctgacatcgtacatgaaaagcctagtcactaggtctgtagcctgacacgcgtgggaatttggaattagtagataattagggcttaattatgaaactagattattaattataatttatgattttatggagatttatttgagttcagggtgtattatttatgtcatatatgaaattttacatttttgcctgttttgtgcctagcaacattggaacgcagtatttggccaatagaatcacattttagtattttagtagtagcgggcaatatagttagacattaggaatgtcgagaataatcgagattttagaaatgaccaaaatacctctaagtgataagtgtgcttgttggtgtgtgcaagggcaatatggtctttttgccctaagtttcttttgacttctagtgaaattttatgtgagttataacctgattattcttttagtaatttagttagataatacctagaatatcccattttattcaaattagaaaagtcatgaaaaaaaaatcacaaaccttcttttctctctctttctttctcgagcacttgggaaaccagctagggttggatgatttttcagctcaattatgggatttttctaggaagtttttagtgttccaattgaaggtataacccctagactcttctctttcattattttatgtttttagttgagttcttgcatgtttttctagaattagtgttctgtggtaagattgatgtttgagttcgtttttgaagttaatttaaggttatctaagttagattgaggtgaattggtggctgtttgtgaggtttgttcaaggtttgagcttaagagctcaaactttgctctcacatggtggattttgattctggttgtgttggattattttgttgcttggattatgtttattatggtataattaggtgatccggaggttattgtgaggtttgggtttgaattgaagtgtgtaggtgggtttttgtgttttctgtactaaactggaattctggtgcagagggacctgtaggaaccaaaattctggttgatccctaagaaaccccatagaaccaaaattctggctggggaaccggtctaccggttggggtattttaggaaccctagttttcccgttttttgcaatatttagggtattgtcatgttatccatcgataagaaaacttttagtttcaagtttaagtccccaaaaagtgatttagcgtgtcacttatcagttttacgaatgattaggggtctgtaaatcgtcgagcagctgttccactcaagttggccgacacacctgaattcagaaacgagataagattagtataatgttatgcatatgtgattacatatttagcgtgcatgtttatgaatgcctgatagataacatatttttatagcgatattagtgtacatagagatgcactggatatcaatagtgtatgttgggctaagtagtgattgatactatcacatcggtatgactagagtaccaagtataggctaatattatggtcaatagtactgttgtacgaacattctggactcagtactgtgtgagatacggggatagggttatggttgggtgtatgggcacctgattataatctgggttgtagttatgttattgattatgtttttcttactgagtctattgattcagcaaggctaaggttgagcagctgtgagagcgagcagatgaatattgtacatgtcgggacagttaggcttagagcgcacggtctttgagatagcttgctgtatattgtctagtctctgggcgacaacttttgtactatgcgctaaacttttataaatattttgtaaaagggatctcgaatttatatatgtatattattttagtatttataagtaatgaaataaagttttaattaatcacgtttttcaataaactcgttgattagcagcgagctgcacaattaaattaaaatcattaacactcctaaactagtagggtgttgcagtactagatgtcttttgttcttggaacgaatggagaccgtggttcgtggataccttctgcgttgctggcaatcagggaactccttatcacggaacctcttcccgcgaggttgaggtccttatcttcccgtagcatcaatttgaggaagttaggcagctggcaacacatcagccttccttgattaaaatccatgtgtcat

SEQ ID NO: 203323 - DNA, 938 bp, Cannabis indica
tgtatatagtgtatacatacctgctaaagcgtccaagagagtggattttccagagccagaaggacccataatggccaaaacctcacctggctgggcagagccagtgatatgttgaagaatgctttttggtccatttttgccatctgaaactctaacacccaactcctcccatgtcaaactatattgtcatcatctaatatttttatttctttttccagcccatgaggcttttcaccaacaaatccagtgctgaatgggaattccacgacaggctcatgatgatgagaagtagtattgctcataccaataccaatacctttattattagtttccatgatatccatctccaaattcaccttactagtcagaagagatcttgttgggcttgcacttggtgtccatctaggcaccaccactgttggaggcatgtcatcgttcatatttgagtttatttatttatcgattgaataattatgctatataaccaatgatatttgtaaatgtatttatgatgatgatgatgatttagaacttgttggctcaaatttatacttcaactattatatcaacttgcatatttatactcatagagtcgagatatgtaatatctcaatcattttattaaattatatattattgtaatcgataattcacgttttaatttgctaattactttattttatttttattatctatttttcattttcaaaataggtgggaggaaaacaaaaaaacaagtcatatgtattgtaccaaaagcagaccagagaatgaattaacgttttttgcgtgcattgacccgcctatatgcaccatttgtttatgccaccttactaaataaatattttatatagagaaatgataaatttgtttatgccattactaaatatatattttatattgagaaatgtcaaaagttgtaatgtcttttaaggtgt

SEQ ID NO: 203324 - DNA, 980 bp, Cannabis indica
taaccatcataacattaataataaagctggaagagtaattaagggtaaaactatcttaagctagttttttttaataaatttgaaggcataaatgtaaagagttttagcctaaagaaaaaataaaaaaagaattaaatataataaaatctaaaacataaaaactgaaccttgacttttggtaattgctaatagtgttcttacacgtaccctcaaatttgacaaattctagtgttggggtccaccattttaacactaacttttctgtcttcattctcattatcagaattggatatagtctatagaattaatttgataaggaccctataacacaattaaacaaaaaaaaaaaagtattaattaaacaaataatcaaagaaattctaattaaattaaattaaattaatgatgatgatgatgagattgcctgtggttgatgttgatatccttgagcaatgggtttaaaaagtgctgaccctttaacttcaacaacgatcattgaccgttgaccaccacatcttctagccatttcactaatcttaagtgtaatctcctaaacatcattaataataaattcaattattaatatatataagaaaacaaaataatattccaaattatcaatcctcaaatattaaaattagtataattcaactatttcttttttgctaataaaaaaactaattacataaataaaattatttttatggtattctataaaaacacaagaaaaaactacataaaacaacaagaaaataaaatcaaaacaacataaaaatattaaaaaaaaaaaagaaaaatatttttataatttttattattgttttttgaaattattcataaaaaatttcaaaaagactatcaaaagattattacctcatggggttttatattaataacatcacgagccaaattttttatagcattgccaccttaaaagaaagagaaaacattaaaaaatatataataaagaaaacaaaatt

SEQ ID NO: 203325 - DNA, 1245 bp, Cannabis indica
aatgtagtgattagtgagtgtgtaaagggttttgatttttttgaaactgttacaatctactaactatttttgccaaatggcgaccatgcaaggtagacaagtgggaagaggaagaagaagaagaaaatgagaaatggttttggttttggtggtgagaagaaagaaaagaagagaagaagagaatcaaaatcacatgggatagctgcctcttcttctgtggttgggataaggttaatttttgggggttatgggttgaaggggaggattttggatgtatttgcctcatcaaaattgaattttgacagaggcacagacccatataaacctaacagcactaaactctctctctaaaattaaaaaaaaaagtcaaataaaaataataatggttttggcatgacccattttgattgctagacaaattattcgtgacaaagtgacatttccttttttttttcttcttttctttcacttgagagttaactcaacaagtacattttaatattttaccttcattccttttaattttattcatattattaactaactcataaagaaatgttctacttaccaattatatataggttacaacaatttagatgggagataggtaagcatttattacttttaaccataccaagtaggtacattgtgccatgtgtgtgagtgtgaatatagtaataacaatacacttttattagataataaactagtacatcacacattgacatccaattttatatattgaattttcatgtcacgttcagcatcactagctgtgtgcggttatatatacataatattattatatatatatataaatgtggaaaaaagagaataaacaaattcatgcaggcagacagagcacgtagtcggtggtgcactcccataataacacaaattttcttacttacaattatacttcaaaacctttttagcctattcaatatttattatataaaatgtgaaaaatatactggtttatgaattttaaatatactatatacatagctttttctgcataactttagccctattttaggggagaaattcagagtttttttgacacaaaagtgtttgttcaacatatactgtgggtgggtgatagagaaaaaaataaaagaaaagagaagagtgaagttaatcttgaagaaaaagacagaagctatttatatacatcacctttatttttattcgatttatttataaatatttattttgtctaaaacattttttttgttttttttt

SEQ ID NO: 203326 - DNA, 858 bp, Cannabis indica
ttactaaacatattattataagacaaataaagaggaatatatggtacaaaacataatcccataattaagatactcatgtcatttaattagtttttgttattttgaagttaaagaaagttaggcaatatatttatatgattattctatctttgaggaacaaagttgtaaacatgtttgtaaatatatacaattatattagccagatcttcttgtgagaagttgttgaaaaattaataaatgaacatgtttgattggataggatatattatactattatagcatatatgctcaattattgttgttatatatctatgtattatattctttcatattatttcactaacgaaaaagtatagtaagttttatagtaggggtgttttggtaaattcagtgagggactcagaatttaaagtgtaattttttttgtaaaacagggcaagcaaaagtaaacttaaaaagaaaaaaatatatatattattagctagtgggaatatttaactttttgacctctaacatatatatgtctataaatattatcttttattataaatatatattgtaactaattaaaatacatatattttttttttttcgattttttctttgagaggggcgactgtctctctcgctacaacgtgggttcgcccctagtagactccctatttatttcggcatacgaaagagttttttagtcatttttatttcatagtcgtgtatattatagttattcggactacttataaatttttaatttacaaagccgacaataagatttacatattttgttgcacaagcaactatttttttatacgcttaattaggaatagcaatagtatggatcgaggactattcttgaaa

SEQ ID NO: 203327 - DNA, 1654 bp, Cannabis indica
  modified_base (1442)..(1442): a, c, t, g, unknown or other
  modified_base (1548)..(1548): a, c, t, g, unknown or other
cctaggcatagacaacttaggtccgtctctaggatccacattttttgggacccaaattaaaaaatgaaagacctcattaggtttaggcttttatttaagtataattaagtattgaaaataaaaaaaaaatattcataatttagttagttagggtgtatgatacattacacaatagtgtgggtacttttttcaatattttttttaggctcatatattatgagggtcggctctgttaaaaaaactagacaaaaaattataattttactaacatttagtatttataccacttaaaaatttaaaactttggcacttatctcacaaacatctctaataattattaaaaaagaaacactaaacatggacaaaacaaaacattagagaaattttagttaagttaataactaatcaaacagtggctgtagtttagtggtaagaattccacgttgtggccgtggagacctgggctcgaatcccagcagccacacaaatttttatttttaacctgtatttttttctaaataaatgaaaactattataagtaaacatcaaattatacattaatttttttccactttctttacattcaaattcagtgtattaggttttgttgaatttgttctaaaagattagttgcactaattatttaaataaaatagattatatttatctatttatatacataataatagaaagtgttagctcagattttgttaatgataaatgggatgtttatatagataaaaagtgttacgtcaatttttttttcgctaaagatgaattgggatgttttatagaagaattatggtgataatatctctaaatattttactaaaaaccctctaattattatttgcaccctcaaatttaaggcaaaaaggaaacactgaacaattaaaaattaatgaccaaaaagaaaagatcgaattgaagatttataataaaccaaaatgtgactgtttcctaattagggagcaatagtcaatgtgtccaataatacaagttaaaaaatccaagcaaataatgacaatttgatgagacataatggcaatttatcatgaaaaaaatcaattcagatatggaatctatcaccaaaattaacgtctggatttcccacgacaaagaacatagttttaaccaaaacaatatctttcatattagaaagtttctctttgaattcggtagcatcttctgttaacttttaccattgaaatcctgatttttcccatagccaaaatgagagaaattaggcctttaagactgataaagtctccatatgttcttctagtggcatttttttatcatcctcatcacttgttgcattgtcttgatcaattcatcaaagccatcatcctcatacgggacttgtggaacaacaaacactgcttctcaaaaccccagtttgtaaaatagcatatgctttcattttgatgtcaggagttaanatacaaactttttcttgaagttaatatatttgtgcattttgtgtcagagagcttggaaagaatgaactggtacagcactaaggagagtatccatggaagcagaacngttaatctaacaggtattgttgatgtaagcctggacgagtcctggctctgtcctagacctctttcctggaaagcttttcgactaggacaaggtctgaaatgctctg

SEQ ID NO: 203328 - DNA, 835 bp, Cannabis indica
acgtactaagcaactgcctccgattgattgcttataatatatataaatatatatataaatatacggacgacggtacaagatcataaagatcatgcctcatactaacaaattaacagaaaaaagaaaaaaaaaactagatcaagactttatatttataagctaggtcaactcctataatcaaatcttattataccctaggactgtatacttatgatccaaacccaaaggccaaaactaattattttttgtaacttgttttataatctttatatatagtggtgctgtgctgctgattacatgaaccatataattaaatggtatatagagataacaccatttgtatgtatatacatagaataatttggcatacatatatatcattgttttcaaacggcatatttgctgaattcgtttgattaccctactctccagcatagtaaaacattttaaatattgatcttaacgacataaggtacactaactgcaatgatatatatcatacctgcgatcttcacaatgaatcaaattcacaaatcattgaaatcaagaatccatatggctaaaaatgaaagagcgaaaatgtctatatgcaatatgaaaaatatttagaaagttctaatatacaattaaaaaaggtctaattaaacaaacctttcccaaaaaaaggactatacatgacactatcatatagaaaccaagtaataaaacaaactaattaattaattgtagccaaatgcgagtgtatataaagaaatatttaagtttttgaaacttcatcaacgaattttactatatgtaactaattcgaaaataattaagggttgtttaaaaactt

SEQ ID NO: 203329 - DNA, 1849 bp, Cannabis indica
aaaataatcaactagactcaaaagatttattaggtagcccaatgcaagagaccaatccggtgcaaccactaaagctacataagtttagcttctactaatctgtgaacctccctacaaaaccaaagaaaaaataataataattagaacatattatactaatgaaaataataataataataataataataataataataataatgtaatagataaaataagaaaaagatagaaacttatctccaactcgaatacttgaagagagatcttagtcaaactcgttaaatttttgtcaactccaaataataaaattttacataataaactaatgaacattaacataacaccgtacaaaataatacaacaatatttaaaaaatacttgtaatgttaagacgaataaaataacttattaaaagaaaaattagataaaacttatcgacataaatgaaaaattgtaaaagtgtaataagaaaacgaaaactaaaataatctaataactaaaaataaataaataacaatattttaaaataataaatcaataagaaataagaaaggctacctaaaataatatatttaccttaataactaccaatacttatctcataaaaatctaccaacatgctggtcaatgcaattcatgcctcttcatcgagtgatttgtcttttcgtgacttgattctcgatgttaaaaatcaattatccaacttccctaatgtttgtgtatctcacgttcgtagagatgcaaagcaagttgtacacggtttggctaaacaagctttagcgatggattttgattttttttttggttaggagagatccctcctactatattttctgttattttaaatgacactttgaatttataatagcagatcttattctcaaaaaataaaaaataaaaatctaccaacatataaaattattccaaaaattgcaaacataaacaccaatcatatatagtgggatatcttatataacgttacattaaaatcttaggcaagtaaataaattttatcctctatccaaccaccaaattaaaactatatttgaaaatattaaatatgaatcaccaattgaaaaataaataataattataaataattgataaataaaataattgatgcaaaattacaccaatttacaataattaattcataaaaaaaatgaaatcataatactattataaaataactgttaaaaaaaataaataaaataagaataattgatatttataacttccttgaaaaattatagagaatagttaaaaataactgcaaaaaataatgcaacaaaaatatgaaatttaaaataaataaataaataataattaaaaataaaataattgcaaaggtcaatgttaccatacgataaccgcaaccaccacatcaccatagcctccgtcaaccaccatcaccacaccaactacactcagatttgaaaccaacacactatcacaatacccgaatagtggtaactgaaggcatagaaacaaatgtttcttttcttttattttggtttcttcactacgtactccacaaaatttgctatatgattcacttgaaatcacaaacaattgcggtaaaaataactccttggccaatgacaatatattcaaagaaaaagggaaaatctcccaagaacacatagagggaatcgtggatgaaggagaatgaggcgtagaaagagagaagagaacgaattaaaactcataatgaaaaatagttcttgccataacttgtttctctagaaaataacagacgaacaacatccattgattaatgaacagatcaaaagacataaatcgaccactgaaaattttgaatccatcgacatcgatattatcgatcatt

SEQ ID NO: 203330 - DNA, 800 bp, Cannabis indica
gttctacttttatatccatcatgcatatgcatgcaatgcatacacttcccttcaaaatcaaaattaagctctttcctacctcaaatggtcaccatattataggattaggccagagaagaacatggcaagaatgtggtaagcaacagttacatgatgttaacagcaaaacactatggtaaaaagaaagcaattaaataataaaagctgattgaaacacattgggagaatttccattctttttctttccccttgagtaattatcccaagtgggccacacccattaagtgttgtttccctttgaaattatttagttgataatatgcgactgtgtattattattattattattattattattattattctattgctcttgggattttgtgggttctatgttctgtaactccttgaaaggttcttttctttttgtgtttggtaattggtagggtagtcatggcactatttattcttttcacatattgataatgatgatcaaaactttgtctttgaagaaacaatagaaacctaaccaacatatatgataaataatttccaagattgtaaaggaaatcaatctattgtcttgtactatataaaatatagttataaagaaatcaaattggtgaattgtttggcaaaaaaatgttaggagagactttgggagttaatataggaaagctgacttctgaatagtaaacatactaagtaatatacatgttggttggtgacattgacactgacttagttgacaaatttaagaagattgcaagtgtagttggctactaaacaattagattttt

SEQ ID NO: 203331 - DNA, 2507 bp, Cannabis indica
tataagtcaactacccgctccaatgcgtattgctaaagtcttgaacattcgtaactatagtacaaattaaccaaaatacgaaactcgcacccagtaatctggttgtactagtattggtagtagtaatttatactttttgatattgcgtaacatatatttgtcagtatcctagtagtgtcctagtgcaactctatgtacaacataccactatttcagacatgtcaatctaaatggaaaaaatataatataggtatatatgttaatcatgtgattatgtgcctctgaatactagtcttgccttaattttgaaatcaagtgtgtcagtcaagctaagtagaaaaactactcaacgatcagaggccctaagtcacattaatagtaaattgataagtatctcactaaaatactttgtaggacttaaattcataatttgaaattatactattaataaatagggtggcaatagcctaaatatcaacaaatacaaaaattgaggtatccttagaaatccctaccaaggcaatcgaaatcccatccgggtgtccaaaagtctgaacaataaccagtaatctaggtcccaactagtagcccaatttgctgctgagtgttaaggactcagatttcttgatttcaaatctacccaaacctgaaccaaaccacaccaatctctaaaaaatagtcctaaacatattctaaacatactacaccagttaagatcaataattacaccaaaaataaaaaatcaccattgaagatcaaaccttgagtttcaaaaactcaaacttgacttcaactagggcagctactctaaaattcccaactcaaactaaaatcataacttaaaacatgcaacaattctacttctaactcaactattctataatagaacataatttcctaaaatcacataaaattcaccattgttcatcaaaactcaaagagaaaagagggcgatcaacatacctaaagctttggagaatctacctgctcttccttgtttttcttagggccaaagtaagaaagagaaacttgtgaaattaagtttatctaattttgttcttattttaatatacactaatgaattctattttccttagagtaaaaagagtaactccttcaataaataaaatagctaactcatcataatctagcaatttcatgaaaaattatcactttgctcttatcaacatattcaactgaaacatctaacaaaaggtaaaatggtcattctctaagtacccaacttaatctcataattaccaactatccataattatttctcgtacctctaaaacactaattcatacaaatgtgacatctttaactaacccgtcgagtttctactattgtcaaagataaaaacataaaaatattaatttcatttattacatatctagcatacctagaatttaataaaatctccgtaattaaaaaattatgacataaatgcctattctctaataataagacttatttatatataataatgcaaatatattcataattaactagttaattactaataaattactattcaactactaatttcatgtctaatcatgcagccattataattatccctctgttaaagaattttgtcctcaaaatctaacctgaataatttgggatatagtgtcctcatgccggactctaactcccacgtggattcttggaccttgttctttctccagagttccttgaccaatgatatggccttacacctaagaattttaaccttcctgttgaggatttaaactggttgttcctcacaagtataatctagatgcagctctagggcttcgtagctcaagacatgggttggatttgatacatacgtcctcagcattgatacatggaacacataataaaaaatagataatgatggaggtagggataaagatatgctacctggctaacccttttgagcatcttgaatggttctataaacctaggggtcaattttcccttcttaccaaagcactttacacctttcataggtgaaacccgtagaaagacatgatctccgacccaaacttctatatttctgcacttttgatatgcataactctttttcctgctctgagaatcaagcattcgtgccctaattttctcaatagcatcactggtcttctatactgcctctagaccaagatacttcctttaaccgaatttatcccaatgaattagagaacgacacttcctaccttacaatatctcataaggagccatccctatagtagcttgataactgttattgtacgagaattctatcaacaacaaatactcactccatgaaccctcaaagtccattacataggcttgtaacatattctctgatatataaattgttctctcgaattagccatcaaacttagtgtgaaaagttgtactaaactacaactttatacccatggctttctgaaggctctcccaaaacttagaagtaaacttaggatctctatctgatacaatagactttggagttccgtggagatgaactatctcct

SEQ ID NO: 203332 - DNA, 611 bp, Cannabis indica
atgcaagctttaaatcaaggttcaaattctgtttagactataacctgtttgtagttgtggtgctataaaggttattcaggaatatcaagatgaggattgagttcttgaattcgtaattgggttaaatgagtcctatagcaatgctagatcacaaatcttgatgcaagatcttttttcctaatatcaataaagcctttgcttctgttgttcaagaagaaaggcaacgagggatcacttctgttaacaatgaaatcgacaagcctacaacaccatctacatcttccaactcagggcaatttgcatggagtgtttagccacacaaaccaaaaccatttgccaccattgtggagttgcatgacacattatggcaaagtgttacaggctgcatggctacccaccaggacacaagttgtatgaaaaattccctaacagaaatgctttaggacctgcaaaaacaccttctgccaatttttctggtgcccaaggagatgaaatagtaactggaaatagcctaaatgtggagcaaaatcttgtggaaacctttgctcaatgccaaaagcttatgagtatgttgactcagaaagtttctgaacaatccaatccatctcaac

SEQ ID NO: 203333 - DNA, 1330 bp, Cannabis indica
catatatcgccaaattcttagataattactctcgatatttactttatacaagaaatgtgaaatgtgagaaatttcaatgaatttctaaaaatggtgaaaactagttaggtaagtcgttaacatcttgcaaactgataggtgagaatatttgattatgcaattcaaatattattaagttaaacttcaaattgtatccaaacttacctcctcagaactttagaatcacatagtgataaaaatggtaaggtctatgattagttactagcagttgtcagagtccttcaataaatataccttagagatagaaacgacattctaaatgtcctcccatctaagtctgatcataagacaaccttggatcctacaatcatgaacttaagaaaagctataattgctaattaagttttgcatgtttattggctattctgaagtgattagggtgagctatttatggttgttaaaataaggaagtgtttgtttctataaatactacttttctaagaacatgactatatccggaaataaagtaacaaagtagatgagatactatttgatttgaacccataagtgttccatcatcttctgtaatttctgaagataatcccacggcctctgctatatcgtcgcgagtcgtgataactgaagaggataataccactaatgttcctagacagaaagtcacagtacctcttcgtagtgggaggatttttaggaacctgccttgttttgacttggatgacactagtgatgataatctattgttagtttaaaaaagcaatggatagtcctagtaaggaactaagactcgaagccaagaaaaatatggatcaactataagtctttcgaatacaaggataagaaatgaaactttgctaagtgcattcaatggacttaagctaacttcctactcttagtatcatggttttgatgagaacatttaaacctatggcttgttgtatacctgataattttcttactctcttacaagtagtttacgtaaataagatgctaaaacattttttattgattaaatctaaaggaggtaatttgaaagaaatcactattagtgttcatcaaattacctacaccacgctaaccgcttgcacacaccattagaagtgtggttcgaatttttcccaaattgcatgatatggtgcagtttacaatttgagatttcataaatataatttaaatcacacttttacaaaaatactaacattataatataattcatatttttatttaacttttagttttgtttaatcttattagaactataagtttgtttaagcataacatttatcaagtaagttttataaattaatcaata

SEQ ID NO: 203334 - DNA, 935 bp, Cannabis indica
gagaaaaagatctaaacacagacttaaaacttttgggacatgtccctggagttgaagttggcgatgcattcaaatgtaggatggaacttagtattcttggtctccataggcatactcaaagtggaataagttgttcaaagcatggtggtaagaatgttgcagcgagtatagttgcatctgaagaccacaccgataatttagatgactcgagtgtcatggtttatactggtcaaggagatagtacgacaaactcagataaaaagcttgaagatcagaagcttgaaggtggaaaccttgcattgacgaatagtatggttctaaagactcctattaaggtgatacgatacgtggttgtgatccatataagaggagattcaggaaatttgtatacattgggctttatttggtgaaaagttataagcaggttacgggaccacatggtaatcttgtttataagttttggctcgagagaattcctggtcagccagaggttgtgtgtaaagaaattgagaggactagacgattgaaaactaaaaaaggtgtcggtcttggtgatgtttcttaagggaaggttattccaatatctgatgtgaatactacagatgaaagaccagaagctgagagatttcctaatcaacctgaagctgcccaagaagaagtgaagctaaccaacaaatctaatgttcataaaggtgtctctctagatgatatgtctctagggaaagaggtggtaatgccatctggtatggatactaaagatggtgagagacctccaccttcaaacgatgaaaccgtcaagagtattggtgaaatagaggttgcgcagaaaggtgtaaagagtaaaagatttagatcacgaaaaggtgtttgtctagatgaggaagtgattaatgcgtggtgtgaatctaaagttgatgagagacctccatcttcaa

SEQ ID NO: 203335 - DNA, 1101 bp, Cannabis indica
ttaatagggttaacaggagatccagacgagatccggagtgttgctcgtgcatatcgagtctactatatgaagacagcagaggaagattctgattatcttgttgatcattccatagtcatgtatgcctcctccttcattccattttttttaacgaaaaaactttgttgaactccttaccaacttgcttattttccctaatcaactattttcaccaaatgatatttcctaccataatcctggtgggttcataagattaattaggggagtagacttataacttctagatcatataaataaggctgcagaattttacatacacagtattgttctcattatattgtaaatatcgacattgcctatttctattgccgcttcaatcctctttctttctttcctttccatcttttcgatttttcttgtgtcctctaatatgtgtatgcatggacattttttgcaggtacttgatgagtcctgacatgcagtttgtgaaattttttggaaagaataatgatgttgattcacttactgatggtataatcgaggagataaagaactacaagaagtagaattcagttttgttcttgttgacagacacaaagtgcctttgggaattattcatttttggactatgatcgatatgccaatttcttggaccatttcagaatagtatgatgaaatggtgttagaaacattgaggcttataaggaatttaaaatattgctgagaaatattatgaaataattgtttgattacacacataaaggagagcatccaatttgaactttcatttcttaataatttgttttattaagatatttcttttttgctttagaaaataagaataaatcccactactcttgaaatatttaacaaataatttgtgaaaaatattattgtttcaaaggaaactaatagaaacaatcatgtctctctagggaaataataataaatatatgtaatatacaataattttacattaagagtttgtttagtacgtcgtattgtatagtattatattaaattaaattatattttatgtaatatttttatgtaaaattatgtggtattaaattttatgaatacttaaatatataatatttt

SEQ ID NO: 203336 - DNA, 1521 bp, Cannabis indica
aattttcctatcttatataattgttaacttgaagaaaaatttattattttaaagataatcccacaagttttgctttgttccaattatagattttaactacgtactttcctatcccatatttactttttctaatttaataattgtcgactcaaccctactaatgaccttcatcagtcatctttcattgtttttactgtcattactataattttattgttccattcaaacaatgaaagagaaatttaactataaatatatggattattttttaatgggtattatccatgaatggttactaaacaaatttaactataaatattaattttaaaaatattaaattatcaaattttgatctaataaccaataataaaagagaaatttaaaattttatgcttaatttaactacttgtttaaaaaaaatataaaaaaaaaaatctctttttatactatattaaaaatatgttcatataaaaatatttagctgaactcaacttttatttatgtttttcttttgctaaaaacatttttttttaatttttttttcaaccgatagaacaatctcagcccatatgatgtaaaagtgaaagatttttttaattatatagaaaaattaagtataaaaactcaattttttctaattttacccatccatgggtaatacctattaaaagtacacgcatatatatatatggtaaacaaagagttgtggtgttggttgtttccgtggaaagttatttttttctactgtggtaactacgagaattgatctattgtcgattgttttgatgtgttaatatagatatatggcaacaactaattttcatacacaatttatatatttataataacaattttgctattagttttttaaaaaaaaatttctaacgttacagtataacctttggtctttagcgaatgatcttcaccattcctcaccactgattaaattaattttatatactagtattgaaaaaacaatatagttaaagcttggtaaattaaaatatataagccttaagtcaaggagaaaactttcatctgcgcatttacgagggatatggagtttgttcatctttttgtttttggttctgggataatgtggggttgatgccggtgagttacgaaatggttggattggagacagatggttttatggtggttgttctcagtgtaagaaacttcgcattttgaatgatagttaatatgtaaggatatatgtatggttctacattacattattttaatgttgatgcattgttgctctctcccaccttcgttttctctctcaaaagagagtaccgaacatgattataagttttgtttggagatgttttttgacgacataaaagtttatcagaaaaattgtaattaccggttattagagttgtaaagttattgagttattcaagttattaaattatttgaagtagcttgttctaaggtttactattgacatcaattgcatttgataaggtaaattttctcattttctatttacaacgagttactatttatcaatat

SEQ ID NO: 203337 - DNA, 576 bp, Cannabis indica
gtatataatttgcggctaaactcttttgactttgaagtttgctacggtctaacctttggccatacttgaaaaattatggctaaactctccaacctctacaatcgttttggtcggctgttaatttttggctgttaagtgtcaaatagacttgccactatatacacaagtatacaagtggtaaaattttattgggccacttaatattaataatattaaaaaaataaattaaaatatttaaaaattagaaaaaaattaatacaataaaaaaaattaaaaaaaaattaatttatttctttttcttttttcaaaattagaaaaaaaaatacttctttttttgctaaatcaacagtaaggttgaatttcaccaaaacaaacacgagtacaacctatcagcaatgatcaatggcctgaaaatgacaaaaactatacaaaatataatctttttacaaaaatttccaccaaactatatcatttcttttatttttttaggtcaaaatcatacataatctattttaacatcctgttatattctgtatatggtagaatttaagatggaaactttagattcccaaaaaa

SEQ ID NO: 203338 - DNA, 757 bp, Cannabis indica
ttttttaagaaaataaaaatataatactagattaaatattaaatattagtaggttatgtatatagaatttttgcaaacagacccttttcaaatcatatatgttgttgtggttatttaaaaataattatttaaatatttattctaattttaaactattcctattaattttttaataatattctttactacttcaattcttcttattaatttcatagtcctctcttattagagttttgtaaaatgtaggagtctctcaacactaagaattttctattaatgagaaggttgtatgaaaattgttgattcttttaattttttgtcagttattttacacttaatgagtcatataataagttttttatataattattgtggctaattataggcttacttagatactaagacctccaacacaattttaagttaattttgttaaaagaaaattacttatccaagttaggttgttgttgatggaggtggaagaaatttttttacagttttggttgttcatagtcttgatacttcacagatatataagttataaattactctttatacaatggcgagaatgtttcttctaatatgaaatttcatatatcttaaagatgccatactaatccatcattttcaatattttgcaggtattattttggtgggagagatcaaacaattgagcactttactctttagtgctttctttagagttttattgtctagttttcctaatgcatctttgcatgcttttaagatagacaat

SEQ ID NO: 203339 - DNA, 926 bp, Cannabis indica
gaaaacctcagtcaacaggcagaatatggtgtagacgatgaagaagatgaagaagatgaaaagagaaaaatatattcttaagcatctgataccatattagtaaaagacgtaaaagtgattttattaatgaaagtaatagtatatatacaagagggaatgagttgttgtaacataacacatcataacagaaaatttttatggaatgaaactaactgacaagattaaactaacaacaaccaaataaccgactatttaagacttctcgctcattcttcttcttttcatctttatcattttggctacccttttcttcagatactgcataaaaaaatcacatcaactaggcaaaataaaaaaattaagtattgagagtattgaaaaattataattttacacaactgagggaaggatcagactgtttgctcaataattaattacaagccacaagattgatataattaaaaggaatacctgaagatatcaatgtacctggattctcttccttctgttgaagattctaactctaccaacctcttctcaggttccaaatcaaacgacatcttcttttacctcgacgccacccaatcgatttgtgatactttcctcggtgctagagtttgttagaccaatcagaaatctaacactaatggaatttcgttctcaaaatcaagaaaaacgacaagaaaagagtatttcatcagtatttcaagcacattctataagtttcagatgaaattggacataggaagaagaagataaagcttcacctgaatctgtcgcgagaaaacaaactgtggagatcaattcctttcacgtacccgccggctaattttgaaaccatcgttgtagatgcagaattgaagacaaaaatcaaacaatattaccacaaattaggtcacgtttggaaacgaagctacttactctac

SEQ ID NO: 203340 - DNA, 918 bp, Cannabis indica
agcttgaggttcagaaacacctcaaccggttgaacaagcccgccgtgaaaagcattgaggtcccccactttcactctctctctctctatctcttctttttctcacctttacttttactcatttaactttctcgtgatgctccataatactaccttttcccaccacctcctcttgtgtttggtttctgggaaagtggtgggaaaatgaggttggaataatgatgataggaattaaccccatttggtaaattttttgtttagatttgaatgttacaagttgggttttttcagtacccaaatggggttatttgctcaaatgagtcttctttagctttcatcctatgtttccaccattttttcttcttggtcaatttcattgttcttcttctctctctctctctcttcaataatttcttttgagtacagaaagctttaatgagagagttcctcaataaattttcttacttcctaagctataaaatttaatgctactagtttttgagtcaagcatttctccttatgaaaataaaaatctgttttttcaatgtacttgataataacccattttctcaaatgtaaactaatgactgtttttgtactaaaaatcttaactttatttaactttaatggtaagtgcagagcccagatggagacataatagactgtgttcatatctctcaccagcctgcttttgatcatccttttctcaaagaccacaagattcaggttcacaaactctcctattctttttttttttattatttttttccataattttttcatttttattcgaaagggggtttgttgaattttcagactaggccaagttaccatccagaaggactattccaagacaataaggtctctgaaaaggctaaggaaaagacaaacccaatgactcagttatggcatgtgaaat

SEQ ID NO: 203341 - DNA, 761 bp, Cannabis indica
taggctgattttagtctaagtttcgggttgtgttttcggatagttttttatctttgtttttagttttagggattttaaacacttgattcttttgtttcaggtccccgaatgttcaaaggaagtatttacaaaaataaaggacacgagatgaaaaagttgaggtaaaaaaatatacaaagttcttttctgcctaagcccgtcgcaacgggcagtatccttagccgcgacgagacttggccgagatttatcaaagtcgagaatgctccagccgtcgtgactagggaaatctgtggtcgtggcgaagccatcctgacaactgcatggacagtttcgtaatttcacaaattttaaagagaaaacttggcacatttaaacgggaagctcgtgatttttgatcataattcataattggagccctaaaaacaaaggagatgacttcaagagctgcgtgtggtgacccgaatcgattccttcaaccagttctttcttctctcttaatttttctatgttattttttttttcaactttaattatggatttgattatggagattatgaactaaactcctatttggggagatgatgaatgttgattaacattatgtttttaggttaatgataattgttatttctcctttcttgattgtgaatttatccatatatgtgtttaattacatgtttaagattgatcaccttttgcatgctctatatcccaatttaaatttgaaaagtgagtttggggaatgccaaaattggataaac

SEQ ID NO: 203342 - DNA, 657 bp, Cannabis indica
ctcaaaaatattattagtaattaactcctaaaaataccactaatttacatacctattaattcataattaattttaccctaattatttattttttgaaagtagtaaaagcctaggacttcacatattaatgtccaaaaaagtaacttttttttttttatttttaatttttctcataacaaatagtttaaaatatgtgagaaatcaaagaatattatatgtagtttatcaaaacatttggcattctctctttttttttttctgtagagaatatttggcatttggcattttacactttataaaaggctaacaagaattcattacatataattatttataccaaataaactattctttaaataaagaaaaaaaaaactctaaccatgatgcctcatcatctctgtcaaaagaccatttcattatttgttgtaattttcttttctttactatctcacaaatcatcgttatgcaagggtgataatcaaccagttaaaaatcaagttacggccaagattactaacgttttaatagaaacagacttaattcttcactgcaaatcaaaagacgatgatctcggagttcaacttcttcactacaacgactcctttcaattcacttttacacccaacatatggggaactacgctcttctattgtagct

SEQ ID NO: 203343 - DNA, 509 bp, Cannabis indica
aggcaatcatatcaaaagaatacctgatgactgtcaaaggagggattaaatgagcaccctggatgatcaacctctacagcaggtataagagaaggcattactacctgcaaaatagttcactaataagcacaacgagtacagtaaacgaaaattaacaaaaccctgcttggcatgcaagataaacaaccctgaaggaatgtcaaaatcctcttttgatatcaaagtcagagcaatggccaacaggacatacaagatcatctttatgaacttaaccaggtccatatatgaactacatgaaattacctttttgaccttgccatggttatcacctgcaagtacattaaaagacaaactatcagatctgtgaaaaggaatacaaaactactgatgtactcattgtagtaagtaagtaacattgcaaaacaatttatgtggagaaaacctttcttgtcccatatgtcaataatgtcggaagctgtggcagactcttcctgagatgccaaaaaaaa

SEQ ID NO: 203344 - DNA, 1673 bp, Cannabis indica
atgtacaaaagaaattgaataggctcagggtatttctgtcattctgttcctctgccagcgtccaagattcttggactcagaatattcccttcaccagcacacgtcacatttaccatttttcatttgggatcctaaaaatatctccttttgtaacaaactgtaaatgtggcagctgtccatttgttagtgttgattctgtaatgattgtaaatttgtttatataaggaaatacaatttcctcagctacaattaagctgagctttcaccattgcctttattaccaaatttgacttggtatcagagcattaaaaggcttttgccatggctgatcctaatgcctcaactccagctcaacagtccgataatggaggaaaaatacccacatcagaggcgtctcagcagagtccagtcgcaccagctatttcaacagctgctgcatcgcagacagctttaccaaattcatttgcttccccttttagcagcacactaggtcagcccttctctttgaggctcgacaaaaacaattttccattatggaaaaccatggtgttcaccatcatcagaggacataggctggaaggattcatcaatggacagagacaatgtccagaacagttcataactacaggtatacccaactccactgaaactcagttctctgttaacccagattatgaaaactggcttgttcatgaccagttgttgatggggttgctttatggctccatgactgagggaatagcctcagaagtcatggggtgccaatctgcatcaagtctctgggctgctcttgaagagctttatggagccaattcgagagctcacatggatgagcttcgaactaaactacagactgtgaggaaagggtctgcaactatggcagactacttaaaacagaagagaatgtgggcagattctcttgcccttgcaggggaaccttaccctgaaaaacttttggtgtctaatgtgcttagtggtttggatgtagagtttcttttctatagttgtgcagattgaagccaaacctcagatttcgtggcaagagttacaaaataccctcatcgattttgatagcagacttgagagactcacgggtctctccaactccaacaagatgaatggctctcttggaggaccctctgctaactatgcccagaaacctccacacaacactcctcggttctcaaactctcagcagcaaggtggcagaggaaactcttctcattcaggaacaagaggaagagggagttacagaggacgaggaagaggaggtcagtttggaggaggccctaaaccgacatgccaggtgtgtggaaagtacggccattcagcagccatctgctacaatcggtacgatgaaaatttcatgggacagcagcctcctgcaccagctgaccagggtcatgacaaacagtttaatgctctcatagccataccacagaccttgaatgatgagagttggtacgctgacagtggtgccagcaaccatctcacaccagatgaagggcaaatgagttccaaaacagcctatggtggtaaggaaaagatcactgtaggtgatggtaatcaacttgacatctctcatgttggtacttattaaatactgatgtgtccaaacctcttgttctaaaagacatgctgcttgttccatcaatttctaaaaatcttatcag

SEQ ID NO: 203345 - DNA, 1133 bp, Cannabis indica
tgtgtgtgcacctcacgccccaagcccgcaagtgggctctctccctcagtgcccattcagcccacgtcaacttgcccccctttttccttagccaatccacgagtgccacgtcgcacagcctcacccaaactatccaatctgagaaggacatgtggcactccaattttaactatagggtaattgcatttttacttaatgcaatttgtaataagttttaattgtgcattagtccttttatctttctataaatagagaagcttaagtttttagaattcaatatagtttcagacagaaaaatctagagaaaacgctcattgttagtttgtcactttttttagctgattttcttatggattttcaaattctcttattattaaggtggacgatgaaacttaatgtatttagttaagtatttatttttattttaattcttagtacaatatatgcttatagttttcgcttaatttcacatattattgatagttacaaattattaagggtatgtttgattctacatttattaaaaataatatttttgattttatgtatttatattaaattatttcacatttaatgcttagaagttataattttaaagcaaggaaaatctatttttattagaaaataattggtttaattattaattaaattatgagaatcattataaacataaatatttttatatacgcttaagtggattctaaaacgttaataattttcccaaatatcattaaaaatatctgttactgttattttatcgttaaatactttattttattttgttaccaaaaatctcatctgtgggaaaattacggctgatagtaccgaatcaaattaactaaactttaaacaatcaaataattagcgaagatatgattaacatatcaagaacaataatcgaataaaaacaaagacaaatggagtagataaaaaccaaaaaacaataaatacagagaataaagaaatcaacattaagatatatactaattaaagtccgatacatcgatgtcatctatggctctaccccagttctagaataccactaaaattctctctattgattgagcaagaacaagtacattacagttgagatagattctctatttctctcaaagtattttaactctcacact

SEQ ID NO: 203346 - DNA, 1494 bp, Cannabis indica
aaaagcaatcagtcaatgatctgtttttctctaccatgatctaacttttccacgattatattaccgttttcttatcgtttaatattggatcgacttctctatataagtttgtatcaaaatagcggaaaaatacatcgtttcaacaacaaaaacaattctcttcttccttatgatttttctcagagtaataatttaggctgtaattgaacgatatcgttcggtgcagaacatagcgtatatagagggttggggctccaaagggtacctaattttgtgcgcatggttgaaaactcacacactcgaccactacacactcgtgtcatcgccatctgggttaggctggcgggcgggtgaggtgtcaattattttttaaaagaaaaattatttaattaattaaataaatatttttaatttatttgttaattaattatttttaacgttaaatgaaataataaaaaataatcagtcaatgatctgcttttttttaccatgatccaacttctttatataagtcgtatcagaacaacggaagaatacatcgtttcaacaacaaaaacaattctcttcttctttacgatttttcccaaaataataatttagggtgtaatcgagcgatatcattcagtgcagaacatatcgtatacagaggttgttttatcctgagaatgccgtggttgctagactgtcgtgcacattttgggcagaaccgcaaaatatcttaaagaaagcgacataatccgcaattctgctagaatcttctttcggtaattcgttccaatttttttgttttaaatttagtataacacatatctccacttgctcccaaacccacaaaaatgatattttgacaggagtgtaagtgttacgatttaggcccaacaagcttaaagatgcattatgttaaactcgtgaaagccgcgatgccgatttcatatctactttttcaggattggcatggtaaaaaaaattaagagctgatgacaaatcaaacaatcttctttatttttcccaaaaggtactaagttttgcgaatttgaaaaacttatatagtttttatgatgctcaacaccactgatatgttgtgttaagagtggttattaaatttttatattatttattaaattaaaatatatgagaatcgagattaatacttggcaccacacgatagagtaccccttaatatttttctttcaccaattgatttcaaaacacagtgaataataataaaatataatataatataattataagaatgtgtacacattcttttgttattattattctttattctttactttgtcattgttatattattatagttccttccatccaaggatttttacaaacaaagctctcctctctcacctagcatttttcatatatatatggttacaaatgaaagaattaaaatatttagctttgttttgttttttcttcctaacacctttcctttcttttctccctccttgtattttcctctctctctctctcact

SEQ ID NO: 203347 - DNA, 610 bp, Cannabis indica
taagatttttttgtagtgttaaagttgtagagttgttggaatggaacttttaaagtactcacgacttcaaattatatggttgctttgcgctagagaagacacttttactagataagcattttcttggttagtactttttaatcttattataatgaaacactttatttagagagagtaaaacaagtatcaactgttatattaggagtgagagatggagcttttcagtaattcaagtagaatattaatgattttaactccttagcagttgtgtgcttttactaggagacattcatttttttttttttttgagataagagacattctttttttagtgatctagaatcattgttagaggatgtatcaattatgttatctaaatttttaagagtgttcttgatccatgtacattggatggtcaagtggttgtacatggattagatgtgcatgctctttagatgaataaacaacttactcgactagatagctttctatttcattctttctttgaaatgtatagtctttcaatatatatatatgttaggatctcaataacttaaatctcaagctacaacctgtacacacttgagaaatacaatttaaatgcacaagt

SEQ ID NO: 203348 - DNA, 2468 bp, Cannabis indica
gattatcatcttcctcttacaatccatactagctgagtacatggacaagaaacccattcccagtataatatcaaaatttactaaactcatttctattaagtcagcactcaactccctatcctcgattctgatcggcagagacctaattcaccttttggagataactaactctccaccaggtaatagggttccaaaccctgattcataactatcatgcggtctatcaaatttactaaaaattctggctgccacataggaattagtggccccagaattaaccagcacagagaaataagaattgttgaccgagagttgacctgttaccactgaagggatggcttctgcatcagcctgagttatcgcgaacacccttgctggagtgggttttgctgcggtcttcggtgctttagtcttgaattggggaaaatccctttataatgccctggcataccacactgaaaatatccttgccctctacactcccccaaatgatgcttcttacaactggggcactctaggtaagtgtatcgggtttcagagctaccctgtcgattgcctcgaccctagttcccttggaacttcttattctgacttgagccactggatgtagtaggcacgtttctagtctgatcaatggccgagccactacctcccctaccaaagcttgatgtaggaagggtaggagccccaccaacaaccggagtctctcgagattctaaggtgcacttcactacaccctctgcccgcaatgccttatccaccatatcagcataggtggtgttgccatcaatagtaatcattaggccgtgtctaatttttgcatttaatctatccaggtacttctctttcttactgaaatcagttggcacaattcccaaagccaaccttgccatgcgatcgaattgcgtcatgtattcagtaacactcatgttctctttctgagtcagttgggtgaattcttttcttttggaacttctgactgcctcgttatcatacatggcattgaacagctcctagaatttctcctaggtcattgtggttacatcgtgaatcatggacaccatgtcccaccatacccgagcatcttcttgaaattggaaagtggcacatgccaccctatcattaccagtgacgaccataaagttcaagatcctggtgatcacagttagccactgctcggctttcattacatcgagacctacctggaaaactggaggtgcctgcttacggaacctttcatacaagggttccatctgattcactgaaacaacaggttcggcctgcgcagtaggggtaggagctactggtaattctggagcagagactgtaggagcaccctactgtcttaaccgccgaatctcttcatcttgttcattaattctcgcttgcatttttggaaacctttttccctttctttggcagcttgggcatcctgtggcagattaacatcaccccgaccacgtgccctacccgtgggacctctaccttggccacgaatattacgggaaatcttagctccctaacaaccacttgatccaatcgaattgtcgtggctcctggtgcttcgcctggcgtccatactaatttgaacagcctgtgtaaccaagagctagtctggtcagatcgtgatcaaagaaaaacttactaatgccacttattcggaaattaaaaacatgcgcatagtctactatcaggctactaacatgcatcctaacaagcttttcttaaatcatactattaaaaaataaactcctaaagcaataaaagcttacagaaccgtgaaacgagctggctgctgatgataattgcacatgtcgtgacgatctttggaagacaacctagtggctctgataccaaattgtaacaccctaactatctcaggcatgttagcgtgatttcaaacgtactgtgcagctcgttgctaatcaacgaggttattggaaaacgtgattaattaaagttttcttatttaattaaaaacttaaagtaatacaaatatataaccccaggatcccgttacgaaatacatttacaaaagtttactactcatatacaaaagatttgtcgcctagcgaccaaacagaaaaagtcatgatgtcccaaagatcgtacgctccaggcttaaccgccccgacatgtacaatcttcatctgctcgctatcacggttcctcaactttagccttccctttacctacacatggaaataacactctgagtcaaaaaaactcagtaagaaaagcataaacaataacataataataacctggattatgattggacgcccatacccccaatcataaccctaatccccatgtcccacacggtactgagtctagaacgttcgtacgactgtacttttgacatagtaacagcctatacttagtacacttgtcatagtttagctgtaccgatgtgatactgtcaaaaagtatagtactatcgaccatatcagcctatactcggtacg

SEQ ID NO: 203349 - DNA, 1241 bp, Cannabis indica
atagagaacactatgtttatgtgtttcgcacaattataggtgcataccaatatgaagaaaagaaaacataacaaaattgtttatgcatgtatttgttgtttaatgtttgggaaccttttgttttttcattgtcaaatccaagcttcaaaatctggagttaggtttgttgtgttttacactagagctcagatagtaaaacttaagtacagtatatacaagggaagactggaaaaagaaacagaaagaacatgtggtaaaagaacaaaacaaacaccatgtacattataaatatcataccctggtttacacttgctcaatctgtaatctttcttaatgtcaagtgacttgaggggaagaataaaagattacacaatatagttattgttctactcaacaaacccatactacgtgactcaaagaaccaaaaaccagaccttattttctttccctcaaactctcaaataatgtacaatattaagatttacgtacaaagttttttgtgaaacaataaaagaaaattcaattgttttctcatcagtcactaacttcaagtgacaaagaataactaggctgtggaacatgaaaactgataattattaaagaaacatcaaaaacagtgataaagcatgaatcttattctcaaagtaaaagaggtaaaaataaaagaaaaaagaatgttacctttgtagacgaggaagaggatgaagaagatgatgtgaaaagagaatgagcagagaagaacagtggcacgtgatattggcacggctcaatcaaaaagcagaactcaatcagtttctgaactcaactttcttattgaaccggaccaatatcccgttaaactgatccattcaccttctttatatgatatatacatatctaatatatacacagcaagaaagattaagaaaacaaagcaaaaaacaaagttaacgttacaaaaaaaaaaaatacaaagttgttatatgggaagagaatactgctgctactgctatatagtaaccttgaaaacttgcatatatatatatatattatatatgtatatatacagttattatctgttttgtttatctctagaggtgtggtatggtatgtatatatgagtaaagatatatatacatattttgaatgaactgacagagataacaagagtgaagaaggctagctataagtgggagaggccattgggtgaagagtagtacatataataacagagagcagagagaaagagggagagagagaga

SEQ ID NO: 203350 - DNA, 1181 bp, Cannabis indica
aaacattgttatgtatcattgttgtgctatgtgtccttagttagttttttttttccttttttttattttttttttttgttttgacaagctttaagttttttatttggaatgtttttcaccaaatttctgtacttgttataatttgatacatagaattactaaatattaattatttcttagtgttgctagtgcggctctagggtatagtcatcaatattatatatgagtatgtcccctttttttttttggcctataaataagttaccttggtgcacatagcgggcataattcaaagggagagtctttggcttttatcaagtaacctaacatttattttaatgtgcagaaagggattttgaatctttattccatttggcatttcagcaattatacttacatagatactcatattcatgttttttttttaatttattttacatagtacgaataattaataattcattcatgctactagtctagtactatgtataattatattctccattcaatgaattatgaatataggatggtccacaaaatttcattgctttttgtctattttcagtgggtggactgcattggatgattcctccctatatttatatatttcatgatatgaatggattaacgaataaaacaaattcaattagtgttttgaagtttttattgtgtgcgatctccccaagattactaatataccatacacatacacccttttcgagggtaatgtgaagatggataaaatatataaaatagggtgattttacaatatacccctataaaagggatgtactgatacacccttaacttgtttcggcatccagaaatttttttagtctaattttttttcatattcatgtaagttatatctatttaagatatcctacaaaattttgagaaattcagaataatttacaatatagaaaataatgttcaaacagtttattttacacgcgtataaaataaaatagtcacgagtgcaacacactctttgaacgcagttttcggcatgttaaacttttccgaatttcttaaaattttgcaggatatcttaaataactataacgtacatgactatcaagaaaaaatttgaaccaaaaaattatttcggatgctaaaacagataggggtgtatcaatatacccattttaaggggggtgcattatagaattttcctataa

SEQ ID NO: 203351 - DNA, 688 bp, Cannabis indica
ttaaaatagaatttacattttatattgaccaatgctctctctcgagaagagccttcctgaagcaatgctggaaaagcccgaaatgatggtaaagcctgaagcacaagctcaaactgatatctccatggaagaaattcttactagaaataccaatctcacagtcctggatgatgaaggatgggagattaatgacaatggagccaaggcagcggcctctctctgtgcaaagggacgactgtgctctaaccgcccaatgagtcgatctctcctcaaaacgattctggggcgcgtttggggaattaatgataaggattggggtgttgaaattaaatgtgtcgtcaaagaatcaagcttcttggttttctccttcaaatcatctcaagatatgaacagaattttaatcaagaacccttggttcctcaacaatggaattctaattatggagagattggatgaaatcccccaagattggagttcggtcctcacaagtttccctctcacagggagaatcctccgattacccactcgatcgatcacacagatgaatatggagcgattggcgatgtttgcaggtgctataattaaagtccagaaagctgacatagccaagattgcatcaaaggtttttttcaccttcaaagtctggtgtgatatcacaaagccattatgtccaggctttctatttcct

SEQ ID NO: 203352 - DNA, 534 bp, Cannabis indica
aaatttatgaggagaggaacaaaacacagcaatcaagtttgcatttttaggtttgaaatgagcactacatcttctaaatcaaatgtacaaaaagcccaattgtgttctgttttcgtacacaataattaaagaaatcgaaaaaggggcaatacaattcagaacacaataattgagtttaagatttggatttgaaccaaaagcagcaatcaagttttcgtatttatgtttgaaaaaagttggcttttaataccaaaccagctgagaatcactatgaaccaaggctattcaaaattaaaaaataagtaccttcgtccacaaagaagaagatgaagaaattgatctcttttactgtgagagagagaagtctttgttgtgaaaatggtgggagatcaatttaccaaaaagcgaaaagaaagaagatttagaagggcaaggcaaaagctgaatagcattaagctcgagctaatgaagattttgcatatcggtacaattagatttagagtgttcaatcttcgacgcagtaacattttttgt

SEQ ID NO: 203353 - DNA, 1070 bp, Cannabis indica
taggacatactgtccaacaagcatctgaatctaattaaataaactactaaactgtaatactgctgttgttcataaaataccacttgttacgtatgtcctttagccaagcaaaggaattaccgtttccaacaatataatttgcttgtaaatttttacttgattcattgtgacatttggggaccttaccatgttcacatactcactcgtaggtttataaattatttcccttactctttttgatgaccattcgagattcacttggatctaccttttagaaacaaaaatctgatgctttatttgtcatacctcagttcatatcttatgttcaaactcaattcaattgcatgctaattgtttcaggtccgataatgctcctgaacttgccttcaaagaccttttcaataaatatggcatattacatgatttcacatgtgttgaccccccctgagcaaaacgttgtggctgaaagaaagcaccagcatcttcttaacattgcccgtgctctgtattttcaggctcatatacctattagattttggacagtaagcattatgactgcagcttatctcattaatcgcacgcctactccaaatctgaaaaataagactccctatgagcttctatacaatagggagccttactacacacacttaagattttttggatgccttgtttttgcatctacccttcctgttaatagaaccaaatttgatccaagagctagaacttgtgttttcttgggatatcctcaaggtgttaagggatatcgtttatatgacatcaacaataaacaagtgttcatctctcgaaatgtcatttttcatgaaagcatttttccttttcataaactaaatgaccaatctagtaatgttgatccttttattaaactggtgctaccatctaataatgtcactaacacacctataagtgattaccctgccactgtttcagatactccagaaatcactacaaatgccaacaatattcccactgatgcagaagatagcaattttgccccttccatttcacttactgcagacacaactacaagaaccaagcagtgataactc

SEQ ID NO: 203354 - DNA, 1427 bp, Cannabis indica
aatagcataaaagtaccctaaatatcaaggaaacatcaaaaaaataaggtcgtaaaaaactgcccaaatcggtaaaccaaatttcccaaacaggtactcattcctagtgcctgcccagatttcccaaacagataaccagttcatagcagaaaaccctaaaaacttcaaatctaatcaaatcaaacccaaactccaccaaactttctagaacacccgtaataacatctaagaataatttccaagcaacaacagcaagaaaacctcaaagggccattgtttgagccaagtttaagttttaaaagtcaaacttgctcaaccactcctctaatcaacaaaactgcagaaactaaacaaattcttctcaaatattacccagaaaagtaaactaaaacatagcccatctctagcaacacctgaaaccgaaaattgcatgaaattactcaactaaaagcttaaaaaataaaggattagaggtttctagggcttaccttggcttgtgctacctcaaatccttactgaaatctcgaaaactaatgagattggactggtttctcttgttcttgctagggccgaaagagagagggagagtttcaagagataggtttttttaattttcgtcttttcttcctgtttcaaaactaacaaaaaaaatcataagtttatttaccaaaaaccagttgaaatgaaaattccaataaaatccactaaaagacaaatctctccaaaatggaaaaattacaattttgcccttgcttcacacttaagcaaccaaaggctttcgagtaaaattgtcaaatactacaatcctgcctaaacacgatattcaaaatatctcttatattttttcgactaagtattagattataaatttaaccatgtcaccctaatggccatccatcacattttccatcgtcgacagacaaaaatcttaaaaattacatatttcatatttaacatatataatactcttagagtttaataaaatctccaaaattgagaattataattctaatgcctatttttaaaaaaagggtccacgataaatataaaatcatgtataattataagatatcaataattaatcctaatcatgcggtcattacaggtagccacctgagcaacgatgataatggtggccacaaggaagggccgacgtgttgggttttatgccctaaataaaactcatctcaatataatcagatttatctattaataaagatcaaaaataacatttaatgttgcatggttcacatgatttatttcatgattatttacataatgtatgaattctatttaagtccagacatatcaattgttaatgattatagtgttgtctaacacagtggaatataaatctttaaattattatgtttcgaaaagttttattcccttgattttttcagtttcatttggattttagactgtac

SEQ ID NO: 203355 - DNA, 1200 bp, Cannabis indica
ccgtgccaaatgttacattcattgccactattataggtagataagtagaagctaatatagttaccctaacaaaaaaaaaaaaaaaaagtaaagaagctatatagacacaaccaaaacatatatgatagagagaaaaaaaaaatgcaaaaatatgaatataaagggtcaaaaattaaattgaatataaagggtcaaaaattaaattgataatatgaaaatgttaaataaatggtattaatataatacggtgttatattttatgcatttatatcaatttatatcaatgtatagagacatgtatgtggttattacattatttattttatttaaataaaaatttagaaaaaatcacaaattagaaaagttagaacattagaaggagagcttgccatgtcatctatcctaacaacacaattatataaatatatagatgtatatataaatatgcctttaacacacgatcttggaacgtcctttatggaattccttagaatgtgaacaaggaacctaactttatagcttgcttttgaatctcttttcctctatatgaccgtatatacagtttcccatatacaaattttaaaaaaggcccttctcttgacttaattaggaccccattatatgatattttttttttaatatatttctacaagtatagagaaattaaattaaatggggtgcaaactcacatggtgcattgtgagggagaatgtcatgtgccactgccaacgatggccaagtgatatggaataatgcatcttggaacttagtttaggaatgatagagatagttggcctaaatggggctctctccccacataatgaagctaaagcatctctcatgtgacgctttattagctttttccatgtgcccttcattcatcttatcttcctctcttaataataatttcttcaacatattcatatacatgtatatatatagtagctaatactaataccccactttttttctgtcaaaatgtttggtatattatacatattgagattaatatttaagttaggttttacaatgtttataattatatgtgtcatgtatacaagttcataattgacatgcatatatggtgtatatgtatatatttgtactacctattggtgattaagtatatagctagctagataggggtaaatatgcttaaatatatggtacggtaaattatatttatgtacaataagtgat

SEQ ID NO: 203356 - DNA, 1409 bp, Cannabis indica
attcaaaatcaactccaaaagtttcctatttatttttttggatgttggtactatcaatgtatcactttaattagaacttgttcaaaaaagaaaaagaatgcgtacaatgaaaactcaaatttcagtactcttccactatgtgaaaatgtaattttgtttacatcaacatacagaaatacatacactatatatacatatattaaaccaaaatcttattaagagtagttttacaaatatataattaacaagcacttgtgactgtgaagaagatttttgagttttcgatagcacaagacacaagttcaaagagagggcctcatgagagagtccttttatgattgcggtcattaatggctgaacaaattaaccttaattaattaattagtataattattattattgttttctagctgcacttgttttcattcttttattggatcgttgcattatattactcataattaatactgagattcaagattcaaattaactgttaataagttaatttgagtgcatatatattcaaaattataggcaaattaaaggaattataaattaattaattaattaataacaaagaaggtaataactacagtacttaatctacatcttgaattcgtacgaaaacgtaacctcaattaatatcgtgtctagacaaaaaaaaaaaaaaaacaataatgaacagaatgaaagaggattggaattatgatattcatgaaattaaataccaataaagggtgacaataataatgatgttaattaattacaacataatctgaaaaaatatgatgaaactataaactatatacaaatgtaatattaagatagatgatgaaggacattaatatacataggaaggaggttttgaattaatattaagtactggtagaagattattaattaattgatgatgatgatcatgatcccatacatcgtcccaacaaggcacataaagcacatgatctttgttccctctgatcaatattattctgaggagatgtattattattattaataatatttgatctgtgttctacattattattattattatttggaccttctgttttcttgggattcaaggtagaacaagacaccttattattaatattatgatgatgatgattgtgattagccccttgatcatgaatttgaagatgattatcccatatacgacccgatgacccttgtcttctgaaagacaccacagatctttgtaacgaagtcattataattaattaattattattatcattcaataacaatatcaatctcatatatatataaaacttttttttcttctatattttcaacaaattaacaagaacgtactaacgtacggtttttattgttttgattattttctctcttttcacagtttgtgagagtttgtttgttgatgatgatga

SEQ ID NO: 203357 - DNA, 1309 bp, Cannabis indica
ataactaacaacagtttttttcaagttcatctctcgaataaatagatggacctattgacttgactctttaagtaagtttaatcccaacacttatgtacacttattgagagtgttattatagaatagtttacaataatacttattttgtattactatctctttcataaccttacatgcataattatctttttagtttttataatatttttctcacttatattacatgcattattaaatattttacaataatagtaattctgtgtatatattattttcatcatagtttttaagcataattgtactttttcttttttttcttcatctacaatataacactttttcatcattatattattatttaaacaaataatatcatattttcataataatacaattagagttatttaattacagtgataatactcaaatcttatcaattaattgttgcactactttattaatgtcgaaatcttttttttttgggcaataataatacaaaatttaatattttattgcaattaagtagaaccggttaatttgttgttgttaaataataatgtggcaacatttatgcaatacaaacaaaatatttgaaatataaatttaattaagaaagtaataaatatatgtagccatgctattattttaacaacaaagaattgactgtttgtacttaatttgaacaaaatattaacattatgcattattagttaaaaaaaaaagttaaatactttttttgtaaggaagaaaagttgaatattaaagtacaataattaaacaaatttgaatataattattaccacaaatagatgtctcacacaattattcagaaacaattaatagttattttttattataagccatagagctttgagaatacaagtacactgttcttccatttatttatttattttgtaataacttctatttatttattaaaacacaaaaggagtaattgaccttggccaaaaactactagtattatacgtataaatatatataatatttatatgtatatatgtgtatatatagttatatacaccatgattaactttcattaaaaaaggtcttcgaggatacgaggtacactgttcttccatttattggttgaatcggtcttgcgttttcttcataaccctaaaattcataacaattatttattattttatatactataaaattttatttaataatatatttggaaccgaattataaattatattcaaattgagagttataactaaacaaaatacactaaaaaaggtataaaatgtaaataataacaagaaaaaatacttaatactatata

SEQ ID NO: 203358 - DNA, 1812 bp, Cannabis indica
cacttaaaccaattctatcaacatcaaaaaaatagtcaaacccaagtttcctcaccacatcttcagtctttctgcgagtcaatttactttcagagataaaaataacatctggtttcaacccctcatagtgggaattaagattagagaatgtacaagaatttcccaaaccttgtacattccaacaaaggatttttattgttctcagtggccttgatcgtcaacgcttgccatttcagaattaataggaaaagaagaacaatcacaagaattagaaagtacctactctgaattattttgagcatcgtccacctcaaaatgaattgccacacctttagagctacacaaatcatcaccatggccacacaactccgccaccaactcacctcctgacttatctcccatttttctagcttgctgtttaagagacaacttctttttattaccatcgtccaacccaacaacaccttccttcgtagtactacccaccactaattccccatgctcttctcctaattccaaggaaaaaccattattttccatttctccatctctcactaacttcttatttcctctatgaatactaatgaaacccgtcaaacaaacctcccctaagctccttttatatcgctcgactaggaccccaaaagaagtactatcagtcaccgtcgcacaagaactagtcctcttccaagttgaacgatctgcaatttgaccatcaaagttaaaagagccctgattcttctttatcttttgattaactaaattagaattgggctttgaagcattaaaaatgaacccaggcccattaacatttttagtacccataaacttattcaccacattcactttggccacatcacccaaaaaaacctcattagccacctcattagtttgaccattgaccgaagccaccttagcaaacccattttccatgtcaccttgtgccatgtcatcactcaccaatcttccttgttgcgcaagttcagtaatcccgttcaacttctttgctgcgatcacctctctctgagctcttagaaaaactgtaagcgtcgatgaaccatcgccgccatggtgattccgactgtcattatcaagatccaatccacaacccaaaccactcccttgcaccttacgaatcccaaaatctggcattgttccaaccgagaagcaatctttcctatcgtcattagatttcaaccaatcaccataaagcaacaccaaatacccctgtgtatcctttttcataatccaatcaaccttacaaattccataatcatgaccctaatgaccacaacaaaaatagagcaatggaagataatcaaatttgaattgaacccaaatcttcttccaatcaaccagcaaaaaccttctaacaaaggcaattgaatgaagatcgaattcaatcaaaattctaacttcttgttccatcatcattaagagaacattatcccatctaagatcaagaactttccctaccaatttccccaatttcatagcgttattttttgtgcactttggggtggaaattggtcatgcgaacccaacaagcaaaactgttcaaccgtgcatcatgccaattccttgattgaggccacaactcgcaaaccaacaaacccccattaaacgttcacggagctctatcaagaattcttttatgtaactattcatcatcgaatgtaaagccaacataggtactaccatcctcataagcaaacacctgaacatcccacccctcggacacttcccaaatttatgcaaaaatcgttttaataaaattctttttgcatttacacttgtaaaaaattcgtccta

SEQ ID NO: 203359 - DNA, 1444 bp, Cannabis indica
gacataataattgttaggaaaattctacacacccatttaaaagtaatgcgagtaacaatttttttttatttcataataactacaatatatataaaaatagataaatatatattttaaataataatataagttatgtacaatgaacacttaaaaaaaactacttaaaattttgggtttttaaggtcgggtccgatgggcccatcagacagcatcggataggaatcaagcccatcggacccgaccttaaaaaccaaaaatttaagtgttttgtgccatcggactagcatcgggccccatcggacccaaccctttaaaacccaaaaaaaattgacatttgacagaaaactcataccattttcaaccctattaactaacaaatctcttcctaaatctaatcctgactaacaaatttcacacaaaattgcaacatattaatgtatttaatgaatttaagcatcaaaaattgaaaaaaaaaattgagggttggggcgatcgggtgtgggcggcctggtggacggtgggggcggtcgggtgtgggcgactggcatgggtcggagtggtggtgtttctctgatggggtttcgggttgcagcgatggggtgtggcgaattggcagagagagtttgagggaaggagagagaaatggtttaaagttttgagaagggtattttgggatttattcaaaagggttctattttaacaattacccatactatttgtactcctaaccaattatgcctttaaaaatgcataaaaaaaatcaaatttcccaataaaaaatttagtaaaatcctaataaaaaaattatgttaaaatataaaaaaaattaaatttagtataatttatgacttaattatttcaaaataaatacaactacatgggaagtgaagtttgtttcctagttctacaatgcacccctttaaaagtaatgcactgatgtatcttatctgtttcagcatccaacagaaatttttaatttattttttttttttcatgattgtgtacgttgcagttatttaagatttcttgcaaaattttgaaacaatttaaaaaatttaatacgccgaaaacaaactcttttatttatacacatataaaataaattatttaaacattactttgtatattataaattattctaattttttaaaattttgtaaaatattttaaatatatataactataatatacatgatatgaagaagaattcgactaattttttttcctaaatactcaaacaaacataaatgtatcagtacacttacattgtaaaatcactaattgttatattaacaatttttacaacttatatatatttatttgtaattatatatgttgatcgattctcgttaatatcttctaacaataaatatattgtaaataataattgtgttggattaatatattttttcatatgatttatttatatgatccatataatgtt

SEQ ID NO: 203360 - DNA, 672 bp, Cannabis indica
tttttggaatgagaattcttcatattattatgtttcatataattaattattatttttcagttgtatataccaaattggcttttgtttagtttttttttcttcaacattttgacaataatttgattataattaattatatattatcttagacaattaagtcccattttttttttttttttttttggttccataaaaaaattgacaaactatatcaaatgattaattttgtagtcagttttcaaaatgaaaacaattttgattggatgatatatatatatatatatacacacatatatatatagtctaattttatggaggcaggcaacatcattatatctgtaatgtaaataaattatttttctctatttttataattatgaatttaactaaaagagtttaattaagtgatattaataatcaattcttcttttttcttttcaactttttgctttataattatatataccaccatacaaaaacacatattgatcaagtataatcagaccaagaaacacctatagccaaaaagaaaaaaaaaaaccttactttaatttgcttaccaaaaattatactttagagatatttgacctaaccccagtttttctggtcagaaaagagcaaaaaaaaaaaaagaccatcaactatgagtagtgttgtatacatgtgtatata

SEQ ID NO: 203361 - DNA, 626 bp, Cannabis indica
aaaagaaaagaaaaaaagaaacaaaccaaataagaacgtgttaaataaaaccaaactagaacaaaaaataattaattttaatattcgttaatttagtcccatgcaacgacatcaaaaacttgatagggaaaatttattacgtaaatatacatatcgtttcaagtaataaagtgtctaagcatgagtatcgtcccacaaggactattaccaaatatcaataattatttttctattttttatttggtaaacaaatattgaggtagtattattaaaactaagaaaataatttgactataaaaataaataagcaaacaatgattataaaaattaatggatgggacttagggtactaatttcatcaactttttaatttatttattttactaatgtcttctacaatttcattttcttattttttatagtgggttaactaaaatgaaccatattctttttcaagatataggacctcaatttatcaatgataaattcaacatataaaaggcattaagaatgaaaaccctatttgctacacaagtcatactggtactcttgttcaatatgtaggggtgagcataaaattaaaaaaaactgaaaaaaaaaaaaaaaaaaaaaacgttcaaactaga

SEQ ID NO: 203362 - DNA, 1270 bp, Cannabis indica
aattcttggatcgcacatttttaaggcttcgcgtcaaggaggacacacacctcaacactaggcctgtagtgtcagggcgcgcctagcaaaaattcaaaaagtggattttttttttccatttttttaagctattacttgttaacgatacgtatacttgcgtgttgaaaataccacaacaacgaaccctaatttcgaattttgaatcacaatcctaaataggctctgataccatgtagaaaatggtgaatgaattgtatattgtatttcataaaatagtgtatatatatatatacaaagctataatactagataagaaaccactacatacaatttactttaattttcacaactaatattctaacataaaacaacctcaatttataaacagtgaaattttccattaaaattataatttacaataaataggaatttccataaatctcaaaaaattgaatatagcagaaacaaacagcaggcagaccacaaaaaaacaatagcacaattaggttcaacttgcataaatcacttaaaaagtacatgcaagcagagagatgggtcttttcattaccatataagtatcaaatcatacattttcttttcttttttgttcttcatctcgtttttcagcatcacaaattacatccaacaaacccacaatgaacaattaataaacagtcaactgtacctaaataagtatcaaactattgccatatcgtttgcaataacttaacattacacaaaaagaataatattgaccatactaatttctgaggcacggaaccataactaattgcttcatatatccttattttctctaaacttttagtccatcaggacctataaaatgtcacaaatttcagttcttcgagttctcaaataagctattggtaaagtaagtagtactaccacaacatgtcaacaacaactaaataagccatcccattaagagcaacagcaaagaagtagttcacaatacagctctcccaaagtatttgagcagtcccagtaagagcaacacaattttttttataagccataaataaaagcaacttaatgattcatattcatgttcattcaactataagtatagtacctggtgagaaggcccaaaagctgctcacttttcacttctaaaattacttagtataactgagtgttgtatgtgatagcttaatctttgtctgcaaaaacaaacaaatgaaatgtaagaaataaagaaataatacaaaggatcaaaccagatttgcgctcttaaattaatattagaaca

SEQ ID NO: 203363 - DNA, 1711 bp, Cannabis indica
tactgaaatggctgtagggagtgagagatttagggaaatcactgctaaggctggcgttggaacattgtgtgttgggaagattcggttggatagaggagggaatggtagtggctgatgaaggagtttgtgagatgggactgttggtgtcaatatgtgtaggaaatggtggatgaatggtactggtgtgttgttgaggcctggatagttggtgattggaagattctccatcaagtagaacacgacggtgaggttgtccacgggaaattaaggatggaagtgtggatgtgattgtagtgcgggccaatcttgtaagtaaaggccaagcatttcctttggcaaaatccgttctgtagcgatcataattattggttggtaattttgcccctttcatccatgggccatattggaaatcatcatcattaccgttgtccattctttccatgaaagcaacacacttctcaaaagggtggcctagacgaccacattcaaagcaaaattccggtaatctttcgtaacgaaagtcaatccaaaattcatctcttattttgggcagccggatcatgagacctctcaacaatggcttattagtacaaagtttaactcgaacccgcaagaaaggaccccaaccttcattggtagaatcatcaaaaacttcaatgaattcaccaattatatttccaattgcttcagccaacattttagatttactcaaaaaaggtaggcgatatatttgaacccaaaaaggagtgaaaatcagatcttccttagagacattttgcagagcatctggtgtacgaagcacaattaagtggttttgaaagtgccaaggttctttgttcaagaccctttgtttatctccatcgcatccgaacttaatatgaaataaaccatctgtttccttatattcagtaatcagaacgtggaatcgacctcgccaatgacccgacatttggtcaataaagattttgctgtaaatattttgatgagtaaggactttggccagtagagtgtggtgatgagtaacaggctgcgtagagcagtattcaggaactgtgaagatggatctttcctcatcagtgagtgaaagattagtgtgcatatcattggttattgaatccatggtggtgatcggagaaagtcagtgaaggggaatcttggtgccggcaaggagaagtagcatggagggaacggttatgtggtagaaattttaaaaaagattggtgagaatagcagtttgagggaaagagattagcagttgaagaggaaaagtttgttaaaaagaaaacataactaaaacaactgatacagacccaatacgggcactttttttattatattagattagtattaatactagtaaaagaaaacaatagttaattaatgcagtaagttatatatgaaaaataaaaaagaaataattgaagttttgaattttttgtttttacgtggtgcaagtttcaaatgtgatcattcaaaaagagaaaaccgtaaacagtgtctaggttaaaacgaaaaagaataaataaaataagtttttttgtttttttttttttttatatatatatatatgtactctacaacaagaacattgatttaaaagaataataataataataataataataataataataataataataataatatttaacaaactttcacagaaatagaaggttccgttagtataaattatttacttttaattaat

SEQ ID NO: 203364 - DNA, 756 bp, Cannabis indica
ttctagcaagtgcttgttaatagtaaacttcaccatccccatataaacacattagccacctatatataatatttagtttcacacccattcaaattcaacaccctacacctcatgactgttaccatctcttaattgagtgtaaataaaattaaatgagtgatttggaagttgtgaaaactgttaaatcatcctcattgtcaaaaaatatttaagtaataaagttgaaaaaacagtaactagttactagctagttaccaaatttttcaatttttgtaaatgactctccaaagccttccaaaatattcttacttgatcttatatcacttacacacatgataaatataaaaatagaccccaacagctatattttcattataactttgaatttcaaagaattaagttgtgtaacctttttttacacacttaattggtgataatgtaaaagttacacaatataagtaactacacttcttatattacaaatatttacacttaatttctttattacattttatatttaatttatatattatatcatttaataaataaataatgtaacattgtaagggctctttctattttttattttttattttattttttggcaagtgacgtttaagtagtttattaactcttacattttacaatattctgtagttgtattccaatattatttgtttggaaactatttgatatcaatttctaatattatcattattattttaactcctaaaagaaattatataggctaccaaa

SEQ ID NO: 203365 - DNA, 1357 bp, Cannabis indica
agatcgagaaaaggcacaagatttttcttggccttccttatggtttgcaagtggttgattttctgctacatgataataacttgaaggcatgcgcccttcttggcaaggatcaatgtgttaggctatttttagcttaagttttgggtcgatttcagagttatttttttttgttaatattatcttttggaataattttacgattgatttcccttatttcatgttcctgaggaattaaagttcaaattctactaattggtaaaaagacgaggcaaattgaaaaaaaaatctcatgaagctggaatttgctctagtagtcgcgaccaccacgttctatagtcgcgatgaattatgtggtcacgactatggtcgtgactatggaagtttggcagagagcatgctttttgagattagcctatggtcgcgactatggtcaaaatggcgtaggagaccttgtttgcaatctcaaatgccatagaagtatcaaaaggaacctgggaagcacctagcgcccaagttgacacctgaactggtgcgttagtttctacttattagaattcgattttgttttgagcatttaactataatttatagtaaacaagagctacaaattgtgacaggccaaattcacaccttgagatgtcacccttttagcaaggtgggatatcgataaaattagggagtttcgaatcttctcaatttcacaaaatagcgacattttcgaaagctgatgaacaactttaactaaacattgaatttgagtaagcgatgtcaacacatcacttaagcatcaaaaaatacaagtctaggacgttttggcactcactcggcgtccaggttgacgttaaaatgtaactgggcgctaagtgtcaacctgagcgcatagttgttaacctggccgtaatgtgttgaacaaccttcagtaaaacagccataactcactcaatattgatttgattgaagcaattcaacttatattttgaagatatttttaagatctatcaagtcatgtctcacactcacatcataattgtgaagatttagggtctaaaatatatcctcaataaagttgcaatttttccaacaaataacttgaaaataattcaatggatgagattcgaagtccaaaaattgacaattttcaccaagagtcaattttcaccagtggatcatcatgaatcatcgtcaatggccaagatcatatcaaaattattatttttttttgatttttttgttattttaattattatttaataagatctctttccctataaaatgagagctcctcttctagtttatttttctacattctgaaaagttctcataaggtctaaacatctctctactttctccctacgaa

SEQ ID NO: 203366 - DNA, 686 bp, Cannabis indica
ttgggtctaccaggagaaaatatcgtaatctttgcttttgccgcttaggtcagcgtgtattgataacttgtaatattttgcaaagtttttacgggatctcgaaataaaaatgttatttttttttggatgtttgttataaagtttaaaaattacaagttataattttattctgtatatgtgttacagtttaatttccgatcttagctcttgtaatcccaatttagttggattagcgttgtttagtcgttgtttgtgacatgcccattgttagggtgttacatctttagacttgcatcttaggtttcttatctttttttccacaaaaaaatgaaaataaatgtgttaattgtagtagtgctcccataagagcatcttcaactatactctctaaacatactcattagctaaaataaggagtgagatctaagaaaataagcttctactatacaaaaaatgagagctctctaaatgtaactattttttgctaatattttttaatattattttaatcaaaaaaattattatttatattagggtgtttaggtttttcaaatattcttcttgctacagccgcacctctcttctacgattacggttctaatgggtttttaacttcttctcttcttctttttcagatcacaggtagggttatgttctaatgtgttcaagcttttaatctttctact

SEQ ID NO: 203367 - DNA, 668 bp, Cannabis indica
gagtgctctaataccatattagatcttctcgacatggtgaagcaaacaaagacaaactagaaaaacaaatcaaagagagagaaaaaaaaaagagagaaagaagctgaagttattcattgattatcaaagtcataaggcatgacctatatacatcattatacaactaaagactaacaaaaatcacttgcaagttagttagaaactgacagttgcacaaactaaccaactaactactaactaactttaactaacattagctctcagctaactcaatctaacacaatttaattcgtacttaattatatatatttctaaaaaatataatatattatatatattaatttaccagtaatattaaaaaaaatacacaaacttctaattttttaatcttttctagtaatatattaagttaatgtattttatttattttatataaaagacagagaaaaaatcattcttattcacataagtacacaaataaatttaaatatatatatatatatataaattagcttatttattttagtaatgatatatatagatataaatattagtgtaaatccaaatatatattgtaacgatagttatgtttttttatctatatatgtattttggtttgatttgtatgtaaacgggaatggaaaaaaattattattagagattaagaa

SEQ ID NO: 203368 - DNA, 1894 bp, Cannabis indica
gctgctcaggacggggatctccttggtacttaggagaccaaggcaagagagcaagttagtaaaaaaaaggatgcccacaatagaacccatacgtggaaccttgaataaggaggacacgctatcaggcatcccatcagtaataaaaaagtccacgagtttgaatgagatttttaaagacatactggccacacccaaaactttgggagaggggatctttgagaaatagtaagtgtcgggggatcttggcagatgattgatgttgaaaacataatgcaagttggtggccatgggaaacggtcgttcaccgccttgaaggcaatagcaaaacacgagataatagtgtaggccaccgtggaaagttagagaggtgccagaccaaaataagccagaactttgacaaagaatgggtgaaggggaaaggttgcacccactgccatgatgtgcccgtaaaggcgaccccccgtaccgtgggggcagtggcagattcatcttgccccgccctacggaaaacaagaccgcttatggctcgccccttagaaggtgtcaaatattttgtggaggctgtctgccgataaagtgcttcgaatacccgagtatataaagtcgacttctgtgggtagcgagtggtatatgtcgcttgagcaagtgagaggaagcatgcttgtggggcacaccaaataccactgactgtttggcaagagacatacccacagaaatgtagaaataaagatgagaacaagccacctattttctattcctcacaaatctcttgcatgttggggtcctgaccctaggtactccttgatgtgggggatgatagaggaaaatggctgttcctcccatacagggggttcaccagcccgagagcatggcaagctataatgcagggaggaagggttctgtaacaccctaactatgttaacgtgatttttaacttattgttcagctcattgctaatcaacgagattatcgaaaatcatgacgaattaaaattttgcttatttaattaaaaacataaaatagcatacatattttattcttggatcccgtttacaaaagcatttacaaaagtttcactgtacatatacaaaagtctatcgcctagcgactatacaaaataagccttgatgtcccaaagatcgtacgcaccaagcctaaccgccccgagatgtacaatcttcatcttctcgctctcacggtggcttagccttagccttgcccttacctacacatggaaatagcaatgtgagtcgacagactcagtaagaaaagcataatataaaacataatagtatcgcgggttataactaggggcccatagcataaccctatccccgtgtccgacacagtactaattgtagaacgttcatacgacaatacaatcgaccataatgtcagcctatactcaatatgtcagtcatactctagccatattgatgtgacaacattggtcaatatttcagccaacatacatttatatataatcaatacaactgtacgtatattattactgcgatcaatgtattttaactgacataaatatcatgtatgctaaacatgtaattacatattcataacattatactgatcgtaccttgtttctgaattcaggtgtgccagccaaacctgagtggaacaactactcgtcaaattacaggcccttaaatcacatcgttcataacacggataagtgccatgctatatcacaaccggggacataggttttaaacaaaaagtttttctactaaaagttaacatggaaataccctaaacgaacagggaattaaccaactaaagctctgaaactaacacaaatcgaatataaagacaattcaggaaactgatttttgatccggttaaccggctttacaggttttacaccaggtaacctaaa

SEQ ID NO: 203369 - DNA, 975 bp, Cannabis indica
ggacttgttaccaaaaagattataaaacaaacacactttgttttaataatgcttctaatgtcgttattaataattagaaagaatatacatcttggtaaggaatcattccattcttaagggatcacatattttttgttttattgtttttgtttgttttttctctaacaatataattttaaattttaaccatgtcatgggaaataacatttaatggttaaaagatgttttcaaatcttgttatttaatttattaatgtgtatgcatgccatagttattgcctttgataaatttggaaaaggggggaaaataataaactttataagattatgtgtaaagaagacaaaattatttaaggaatcaaaatgtaggaaagatagaaatatagagatattgagaatgagaaatgtatttggattttgtgatttgtgtttttatggaaataataaataaaattgcaaaaaatgatgtaatgtgtaagttacaaatgctaaaaatagtattttattttataacatataaatataaataaattaattggtgaatgaacgaattattttatttattttttagaaaaataatctcttcagtaaatctaatggaaaaaactttaagagaaaaaataatataaagaaatatgattaattaagaaaaatttacttgcaaagcgacacttagatacacagggtcggccttaggcatagacgagttagacccgcgcttaaaactcacttattttaaaggctcaaataaaaaaaatcttttaaaaaatatgtaagggcccaaatttttaattttttttttacctataacctattttaagtcagagtcggccttgtagatacaattggggtatgtaatgcccctctttcaagtttttttggactcttacacccacaaaattatgactcgctcttatacaggagtacgtttctttatctattttcttgaatgatgaacctaatttgtaatgacctt

SEQ ID NO: 203370 - DNA, 1470 bp, Cannabis indica
aagtgctaagtaccttaaaggtatacccttcttgaagtgttcggccaaaaatttagactcgtggttctggaagaatgttgtgaagtctaaaaaaatccttttgaaaggagcttgtaaactcatattggatgggaaggatatagacatttgggatgaattgtggataactcaaggttagaacttctatccccatcctttaaacgggtggcctgaaggattgaagaaaattgttgacttactaacagataatggaaattgggatgtctccatactcaattacttattggaccggagacaaccattaacatcatcaaaggtggcacgcctgggggtcaaggtagggacaagtggatttggacgaaaaatccaaatggtcagttctctattaaatctgcttatcttactcaggccttatcgcgtggtcctcataccaatgttgctcttgctctttggaataaactttggaatgcaaaaattttggagcgtcgcaaagtcctttggtagagtattctctctagtattttacctatcaggactcctcttcctaaaaggatgaatattgaggatgtgtcttgccatatttgtagtgacggagaggaaataatggagcatctttttctctattgtaactttgcctatcacctctagagatcctccccttggggtgatgctagtgatggactttagggctcgtgtttgggactgggttaaatttttataggggctcaaggaataaggagtggcaatctaggaagtatttctgtatgcctcgattgttgtgcacacgatatggaaagcctgaaatggtaaagtcataataattctttatgtaacattaaacagggtattgactctatttctatatgttacgtaaattttggttcttgtttgctttcttcgacgatgatgattatgcctcctatctggtccccctccaaacgattgggtcaagatcaactgtgacgttagagttggtagtgactcaatgtgtgtggtgactttagctagagatcatagggagtcaattttgtgggtgcctagcaacatactcaacttctctaatccgctcatgggagaagttgtgacatgtttgttagccctcgaatcatctatcagttggagacattcttttgtgatagttgagaataattctgtgacggtgatcaacacgctgaaggggacttgttccatttggggtattggtaactatgcgctttattgtaaaaatctctcaggacttttgattagttgtaattttttgtttattttcagactttgcaatttcgcggcccataatgtggccaagtgggcttttgcccgtaatgtaacgggtatggtcgatccatcctccatactagataacttattatgtaataaccatgagatctaactcttttagctctaatataattacgcttttagtacaaaaaaaaaaagaagataatatgggactaatataactttatcttg

SEQ ID NO: 203371 - DNA, 965 bp, Cannabis indica
gaaatggcataaaactatacaatattttctgatccataagcaaaattaccaatcaaaaagaacatatatcaattactcaaaacaataaatgatttagacatggttaatcgtagcgatgatacctttgataatggatttgcagaaaccgtaaaagggaacgatggaagaaaaaaaattgggattatggagagagaaaggaaagagtgtttggtgaaaaatcaaggaagaagaagatgaagaataaaaaaatggaaaatagttgtatgaggagcaaaacggtgaccgtgctgaacacacgctttagtttagtttaattgttttatcgtttttcagttctctagtcacccctcacgtcacaattttgaagggttcaacgtttttagttaacgtacttttttttttttttccatcttgaacttgtatataaataattgaattttattttaagtatttaaatattgattttgttgtataacttggaaaataaactaattatcttttatttgtgataattaaattataaaattatattaaattttaaatttagatatatttttttttataataatataagtaattatttaattatattttcatttttgtattccttgaaaaaataaattagaaaaaaatattcataaaatttcttattttaaaaaaataattgataaatttagagaaattagacattaaaaaaatcttcacacaaaatagacttcttaaaaaaacaattgatacatttctaaaaaaaatcaatcacatgatttcaaaatgggatattagtggtaaaatcattggaactttacatattttaacacttacctacaaaaatggatttttttggggcaaaactacttagatctcacttttgtcatgctatttactcctccacccaaaaatcccagttaagtgtcacagtagacagttaaagtgtatactaatgtacatgtgacacgttttagtgg

SEQ ID NO: 203372 - DNA, 942 bp, Cannabis indica
caaacaagttaaagaccttttgtttgagagagagagagaagagaacaaaagggagtttctcagttttgtgacatttctttccgaaaaccctaaaaaccaatttttatttcgtctcttcttctctcctcatctccacacctctccactataccagatccatccagatctgcttctactccgccattacaccaaggtatcgctaaaatatactcctaatattatacccattatttgaaaattttgctctgataagtgttaaatatttggtttttgtgagtgcgtttgatctgctttattgtataatttactcatttgaatatcgaatttgcattctaatatttcaattgattagttttttttttttgggccaatgctgattccgattgttcccatttatttttctagctttgtttatttattttttttttgggggaagaatttctattcgttttatatgaaattttattttaatatttcgattggtttggcgtttttacatatgtgtattaaaaaaagcttacttgtattggtttggttgaaaatttgtatgtattaatctgatttttttaatatctattacctgtttgattaaatgcctcaatgtagtgttgattttttttttatcaatgagcattggtcttttgtcaaaaaatataaaataaaaaggcttagtgtagtgacgaagtacattttgatgaaatgccgctgtcattttcattcaatagtttgatgtaattgactaatgggttctgatttagcaaaccattttgtgagtctaaggatttgtttgttttgacttttattctctattgagcttttggatttaaggtggtgtttgttttgatgtaaagtaaggtaatgtaaatgggaatggttaagttttttgatggatttttttgtgcttttcgagagcaggccaagaggaaaagcttctctttttaa

SEQ ID NO: 203373 - DNA, 609 bp, Cannabis indica
taagagttggaataaactagacactaaaagattttagaggaaattataccgacatccattttattttctagagtgtaaagacttccatagcaagttgttgatctcaggtcgatctctctctaagaagggaatgaaagtattggtgattcaaaaaccatgtattcttttgaaaagaacatccgttcaaggtaaattaaacaactgagaaaatgggatgcacaggaggtaatccctcccctttacagttaaggagatcgctctcagaacaacgatcactatttgctataaccatcgacaaaagacaaataagtgtgattaaaaaagtacaaacaaacattactaaaacactcttgagtttcatagtagtagtggtagcaaaaaccctattgatgcatgatgattggttgaaggtaaattctcatgagcattttgcttttgatgctctctcaccaaaaggatttattgaatggattgcaacaagaaggtttaccaaaatgcactagaaaagagatggattaggacgccagttctagtctagtgattacatgttgcataactatgaaataaaacatgccctataaatatcagtgaggcaatgatacttcaaga

SEQ ID NO: 203374 - DNA, 777 bp, Cannabis indica
ccatctcattaagcaggtatattcatttctagtaactccctatcagccgtttaactaaaaaaggtttcaactttgtgtaatttgtgctggttcagaacattaaggaagactatggacaattcgtgtggccttgtagtgtagtcctagccgagtacgtttggcaacaaagattccgcttttctggagcttctgtagttgaggtggtggtgatttcattcctcctttggtcaaaattgaagatataggtagattgtgtatgtgttaaacttgttagatttgcagctaggagctgggacttcattgccgggcttggtggcagccaaagtgggtgcaaatgttactctcactgatcatgccaatggattagaggtacttctgcctgcatttgttacttttcttattatgaatcgtttcatttctcttgattatagatattctagagtctctgtctgtttggttggactgagaagttgtggcaaagagaggggatgggtaatgagattgttggaaggaaagatttttggagggaaaagtttaggcaatggattttatttccacatttctaatatggagagaattatccattccacaactaaaatttctcattctttcatttatttcataccaattaccaaatgcaataacacaagggtaatttcctcttactcccattctttctataatctgttggcaatatgcatttattttcttcttcttcttatctacatttctaatatggagaggatattagtcttctctcccttcaacctacttgat

SEQ ID NO: 203375 - DNA, 1064 bp, Cannabis indica
gaaaaaagaaaaagaaaaaatagcataaaaaatagaatattttggtaacattaatgtgtcgtttggtaacacttttgtttttaaattttataatcacaaaaataaaagtaaaattttttttttaaaaaaataaaaatgtgttctatagcaacttttgtttttcaattttaaaaataaaaaataaaagtgtgttatgtaaattttatttttattttcatttgttgattttatttaagtcaggtccagggccaaggccggagtttgggtccggatctgtgttagggtttgggtccgggtttgtgttagggtctaggtcggggtctaggtccaagttacaaggtctaagttggggtgggcatccaaaatattgataaaaaaattatttaaaaaattttgattctcaattaaaaaattgaaaagtaaaaacagttttatatattatgcttttggaatttttttttatatatttttaattttaaaaacaaaaaaactgttaccaaacgcaccttaaatatattaaaaccaaaaagtatagaagtgcaatattttaaaaacataattacattgaaactatagaaaattaaattaataatttgaaactagcaactaggaacaaaacttgtaaccttcattagagaaagacaataattccaaaccaatggataatcttgccctaatggttgtttatgaaaattaaagataccactttatcattaagtataataataaagcatggccttcagcaattaattcttcctaattaacttcccaatcacaaacaacacaaactccataatcagctaaattaattaattgatcttcttttgatcaacaatattaatatttaactttaattcttcattagaaacatgttacaaatacatgtaatacataaatattgttgtgtgataccttttatattcacttagctcactctcagtcttaatccataatgtatctggttttgttgaaagaagttcgttcacaaattaaattatatagaggttttattttctaatattttattttatatatgaacgcttttattaaaatgaaaaaaaaaa

SEQ ID NO: 203376 - DNA, 743 bp, Cannabis indica
gcattggtgcttatattctgtattagcattacttaaaatgttataattagaaaaggtattcatcggtgatgatgccaattaagtaattaacagagttggtttatatatattctgacagcttataaaagcaaaactacgtccaatttcaaaatagaaccacagaattataatttaggcactaattcagtcgagtcaggaggaagtttctactctctatgatccaaagccaaaaaagtactcaaaaaaagaaagaaacataaaaaactggctgctcttaattcaacatttttatatttaataatatatatttatattatttatcatttagatgagaaaacaatgattttctttatcaaatttcttgacaaggattgttcaaaacatatacagctgttcattattcattctttcttaaactttgaaaagtcacgtggatttcatatgctgactgatcattgggctttccatgtccaaaactattgtgtagaatagattcttgtttaggtttggtagagcaaacaggcgtaggcatgaatccaatgctccaaacaaagcctatatatgaagtaagaaagctagcatatgtatctgtttggctcttagtcttttgtagttatcgagttacaaccccaaatggaatatccttaacccaagcccaaagatcaatccatcccatgcatgggatcctacctttgcgtgcgcttaagtctctttaggtattaggaagcaaacaagggctcaat

SEQ ID NO: 203377 - DNA, 810 bp, Cannabis indica
tccgcacataagatgaaaatatagggcgaaagtggatcaccttgcctaattcccctttgaggagcaatcggacccatcttcttgtcaccatgaacaatgaaatatgaagcagatctaacacattccatcattagagtaatccaccccggatcaaagcccaatctcactaacatggcttccaagtaactccattcaattctatcgtaggccttgctcatgtctagtttaagtgccatgaatccttcttttcctcgtctcttccgtttcaagtagtgcaacacttcaaaagacaccatgatattatccgaaatgagtcttcccggtataaaagcactttgatagtgcgagacaatactatccataaccggttttaaacggtttgccattactttagtaatagttttgtataaaacattacacaaagcaatagggcgtaagtccgtcattcgctccggatttctaatcttcgggatgagaacaacattggccttgttagtctcattttcgaactttccggttgtgaaaaaacgttgaacaagcttaacaacatccggaccaactgttgaccaattcttttggtagaatgccggagttaagccatccgggcctgggctcttgtcaggatgcattccaaagattgcttggcgcacctcatcctccataacagggagcaagaaagcttcattcatctcgggtgtaactctcctttccacacactcaacaactggttggatcaaagtacgagaagagctaaataaggatgaaaaataatcagtaattacattctccaaacctgaattccaagagaca

SEQ ID NO: 203378 - DNA, 543 bp, Cannabis indica
atccgttggaatgagccacaccacacctgcttcaagctctctctctctctaaaacagagacaatcatagagagagcataagctcaacaatggtggcttcctcagtctctcctattcattctgccaatgtggtcccttcaactccctcactctctcctctttcctcactatcttctcactcttgctcctcctcctcttcttcttcaattctctcctttcagccatcttacaggccttgctctctccttctctacaccaatacccatttcagaactagctccaaatccaaggttagttttcttttacacggtttctcatcattttgaacgcttcaaaatcgtaactttaactgtttaaatttttgggtttacgttgggcagtccttaaaagtgagctgttcggtcaatgagccattgaaagtgatgatatcgggtgcaccagcatcaggcaaaggaacccaatgcgagttaattgtaaatcaggttggctaatcatctaaaatcttaaagtgttcagttcaagcttgtttttttttttttggttt

SEQ ID NO: 203379 - DNA, 1156 bp, Cannabis indica
cattttttttttttgagaaaaaggtgtgtttataaattaaaagcaaagttggaatttatggtcattacgaaataagttaggcggtattttcgcaacgtccaaacaactgaacttattgtgggcgtgaaagttcatttagtcatattatgtgccataaaattacacaattaattcatattaggtaaaatacatctcacataagtagaaaaattgctttgagagtgacttacgtagttatcaatatcccatcttgatgttgtcatccaacacaccgaaccttgatgatacctagccacaatagtaatacacatatgcttcagcaccactttgtcatcataattaagtttgatccaatcaatcggaggggagcgcgaaacatatccacaggtcgcaggttgagaaacaaataaagtatggtaaattttaaatatggtattatatattttcgcacattaacattgatatgcattaattttgattatgatattgttaaattttacacttcaactgagcttgttgtgaattaattaaaaatttgaagttttatttataattttattcttttataaccctaataaaaaataaaaaaagtaacaagttttaaagtactagtcatgctttgttatttaaaattagtgatatatttgtcataagttcttggattttgatgagccatttttttttgtaatgtttgtttcaaattgaatccaaatattaaagcattactaaattgtaactgaataccatccccacaaaattttgattagggttgtcacaaaatcaaaaatataaaaagttttactcaaatattgttttaagagattaacaaattaaaaaaatataaggtgtttcactcaaaatatcgtttcaatcattagcacaaaatagtacttaacacaaccaatagtaatttgccacaaatacttataagttataaaatttggtcaacaaaaataataaattttagttcatctcaaacaatatctaattatgatttattcatataactataagcaccactaaccaaaattaactacaaaaaattcatatactaaagttgatgtgcaaatcttcataaactaataaaaaaagttgatgtgaaaatcttcataaacaaactaaacaattccctcaacaccaactaataaaaaatcaa

SEQ ID NO: 203380 - DNA, 1210 bp, Cannabis indica
ttttaaaaaaaaaaagttaatatataagaattaaaaatcatttgttaaataaaagatatttgttatcgtaactacgtacttgtttgttttagaaaaacaatgattgatcaacttctcaaaacaatagtgaactattcaatagtcttaattcactaatatctatattaaaaatatatacccataattaaaaggggaattactctatatactatttttttaacgtttttttttttcaaatttacgatttgagtttctaaagtggtgcagcgctagttgtaataagaatttctatacgattttttttacaatttaagttgccgctttagttgcaataggaatttctatgtagaattcttaaaataaaaaaaaaaaaaaaaaaattaaaagtgtaaaaatgaaaaaacccttaattaaaattaataagttgtttaaaattattggatctaccatgtttttttcttcctcttaaataattgattataagaacaaaaaattaaaagaaaggctgtcccattttttgttaagaaaaaggctgtccgattttgaagctatgccatgttaaattaataatatgatcaatatataatatagttcttatagtttttatgtaatgctcaattaaattagaccactactattcttattaaaaaaagtgtaaacaaaataaatttgatgactctattgacctacatatataacgtctaaatagataaattaacaactatatataagtatacaaaccatgcaatataaacagtaaaagaaaaaggaagagtttattaaaaacttgatatgaaatctaattaagtgagatgtgagcagaccaactcacaaaatggttaataattttccataaaagtcagtccttattaggtatgtctgtcacgctttgctggcctttttagcctcaatatgttgcacatgctccctattccatcatatatctactcctaattataaatttatttatttatttattaatacatttatgctattattggttttatatttgcattttattcaatttcgtagttactacttaccacccttcgtgatcgtatttattgttattttaacaccctgtaaatgtgacagttataaagtatgtagtatgatgacagtatatagttaggtaatactggttttggttaaagtataattaattttattcagtctaaactattgaccacttttttttcttcttcttttt

SEQ ID NO: 203381 - DNA, 2353 bp, Cannabis indica
tatatatatatatatatgataactttattcttacaatgatgatcaagaatattaattatagtagtatatatataaatattgaagaaaagaaagaaagaaaagaaaaaatggtaactttaattggtaaatattaattttttatgttaactacatgcactttttttgatgtgaaatcctagctaacttattaattggtttttatataattaaaaatttgcaattataaactaaactatacttaatcataatcactcattctaataaagtcaggccgattttcaaagtagggtccatctgcaaaattgactaggcctcacatagtcacacactctataaaatatataaaaatgaaaatttggtaataaagcattgtggattagtggtgtctatacagagctttgcgaattattactaattttttataatagttattaaattaaaatatataagattcgatatttaattacttaataaaagtatgatactttataggcatcaataatattagtgtcacttatgagatgtttggtattactacaaaagaaattacgtcacaacataaattttttgtgactaattgttgtttttagtaaacaaaaaattatttgtaattaaaacatagtatttaaatacaaattgtcacatatttaatttttagtcatcaaaatatagtgactagaaatatatttagtcataataaattgtaattaattttgtgactaatacactttaattatgcaccttttaaatatataattatttataattagtcataatttttttaattttagtgttatgactaaaagcaagagttgagattaattgaatatatatttcaaacttaattaagtatttaaaatatttgagattaatcgaaaaataaatttaaaagtaagaccagcttaatcatgaaccttctacaaaaatcatatcaaacaatcaaacataggtttgtattgtgggtgagactacaagaaatattatttttactagcacgtacagttcgctactgcactggtaaaagtaatttttaccatcgcacatttgcagtggctaaaatttaacttttatcagcgcatttactcgctgggaaaagtcatttttgccagcgtttttcattttgtgcttgcaaaagttctaattccaacgttaatttaccaaccccttttaccaacacattagaagtaaattccattttaccagcataatatcaaacttttaccaacacaaaataaaaatatgctagtaaaagtgacatttcttgtagttaatatatatggatatgattttgtcctgtgatgtactttcacggaatgtattccatggtacattagatgagtctcagggtacattaaatgagtgtcaggatacgtttttactttttaaccataattacgcctagatcaatctcagccgtcagatcaaataactccctcatctgacgactgtcgtacacggattacaatttgtggaagtacaataacaagataaaatcatatcccaatatatatatatatatatatatatgtggagaacattgaaatgtcccttaattgtaagaagttgaagaagttggttgttaattgattatattttgtgttttatagtgataacaataacgtgtggagtgtgacgatgttcttaggtaccccacttcatgttttgttttcattgattttgtctctcttttcgagtttatcacctcataaatatgtctactacaaaacctacctacttgcttccacctcttacgtggcctagcctagtctttatatcattagcattactactaggtaactctacggttaattaacgataatctctaaaaattattattttaagttatatgagattcgatacttaattacattaatagtaatatatatgacaccaaaaaatattagacacggctaacagtgatagacccagaattttttctttgtgggggattttggggatttttattattaaaaaatatttatataaatattataatcactcttattagatttatttaattttgttagaatttttctactattttagtctataattatcaaattaaaaaaaaataaatttaattttaaaagacaatatttttgttagtggaaactatagcccccacattaacataggtcgtgtccctgactgctggtcaacaagttatagcaccctataaataattagcagtattctataatctttattaaaataaaataatgaaaaaaatgttaaagagaaaggggaattgatttaagatgagagagattctaaaggggtgcctagtgtatatatatgtctcttattaataattagtactttatataattatgatatatcaaatttgacttac

SEQ ID NO: 203382 - DNA, 569 bp, Cannabis indica
ctgtcagtgtcttgaaaactttcatatccatcaaatctctctctccctatatatgtatatatatgaagataaatatatttatatatatgtaagaattatgtcattaactatttatcctttcaaaaagaaagtcattaactatttgctattttatggcaaaagaattatatatttacatcaaattgttctgcactacatttatatgttatataagatcctcacaaactttatttctaacacattcttctaaaagcatattttgaggaaataaatattaagtaaaaatgtcacaagcgctggaagaaccttttttgaaatctcatgatccgcctatccccttcatgcctatctgaatcatgtgacaggtcctccttaagtgtgtcataggttgttaagacaatatcagcactgacaagttcattgatgtcaaatatagatttatttgacagcgatgtgtcccttactccttcgtagatataagtttttaaggaacctgggcaggtatggctatggtgacaaataacagcaaactaatcagtttcatagcaaatacattacaagaaatatta

SEQ ID NO: 203383 - DNA, 770 bp, Cannabis indica
atttaaaaatattggtcgatttaattcagcggtttaattttatttttaaccgatccaatatataaatttgacgagttatatttttatgaagtttttcaactgtttagttagaacagcttattcgagttaacagtttacgaaaatttatatactaaatcaaaccaaacaaatcctaaatattcttcacataaaaataaacttgagaaataataagtacaaaagcaacccaaaaataaaccacacgttattccccatattaaccctgcattccctactttctttctctttgtctttacaaaaagtcaaagggatggcaaagtgggacccaatgcttccatttaggttcttacaaatgtcatcgtcacacaacacactcagaaagagttgaggattttacatcattattgtacattctacatttttatttggtacattttttaaatgaaaaatgcaataaatatattttgttgagcaaataacaagtctcaatctttctttcaaaaaaaaaaaataaataacaagtctcaatctgagtctttgctttcatatttcattttttttcttctttctgtggattgtagtaaaatttgtgttacagagaaaagccggcaaatgcttatgccattggaggtggttttggatggtttttggtggcttttttcagtacctaaatagaaagattatagctccatccatgtctttggctgcctccgatgatattttcctttccacttcactcgcaagctatcttgatagtactctctctctct

SEQ ID NO: 203384 - DNA, 1340 bp, Cannabis indica
aaaggttttattttttaaggaaaaaaatatatataagggttaataacattttagattatgtgttttacaaaaactactaattatattctattctgttaaatgaaaaaatatttgattatctattttttaaaataatacaaataggaccatgagctcaattttcgataattttttttatataattaacttgaaaataactcctaaaacgaataaacttattacaaatttaagttgacaaaactctataattaagaagagaacaacaaatcttatttattttttttttttttagtaacaagagaacaaatcttatttgttcttaatattattacatttccaactattaattcaaaattacatatgagacataacaagaaaaacaaaattaaaacatctaattatattgcatcacatcttcacgtcttctacctcccattcgctttcaaacttttcttttttttttttatctgcagaaaaaagaaaatggtactataaaaaatgataatggtggcagccatcataccacatacggtaccaatatatacaaatatatacattaatgactataaataataaagatatagctatcaaaatctgtttgttaggaattaaaaaccaatcacacatttgaaaaacaaaacaaaatgattaaataatataagcacaaatgtaaaagcttgaagattgacatgtaagcatatatggttatataatacaaatagattccacaattgatattataataaatattacagtaatcatgcacaatatattatagtatatatcattgagtgtgaacaataataataaaataaaaaagtactacatctttaaacaaagcatcacattataaggattttagaatgatttttttttctttcttttttattttttttcctattactctattagacaagaaagcaaccaattcattataatttagcaaaaaaaataataatatagcttttgcaagttgtggtcttgcaattaacaacttatgaactaatttgtgtagccattaccattgaagagacaaaacacatgagcaagttaagaattaaaaaaaactaaagagattagagagtttgtttggctgtgttttcagttttctgtttttataactgtgtttttaaaagtgagaatagaaaacagttttttgtaattttaaaaatttaatggtgtttggcacaaatttttaaaaactgtttttagatttttttttcgtagtagaaaaaaatcaatattttagcaccataccatgatattaacccattcgagttaaagttcggatatggcttcgggtctaggatccaagtatgtgagcaaaatataaaatatat

SEQ ID NO: 203385 - DNA, 1130 bp, Cannabis indica
atatttaaatatttagtttgatttcgtttttttttttaaatttagaagtaattaacaaattaaaattggaaacatatatgtttatttataaatatttataaaattatgtaattatattgttttacctatttgtttttatataatattatacatttacttgtatataaatgaaaattgccctttctttattaacataacaagcaatagaaagaggaggagaattaggggtgttcatcaaaccgctcaaactgcccgcaccgtaccaagcacaccgcaaaaaaaaaaatgcaatttgaatttttttgcggtactgtcgcagtttgaatttttcctaaactgcgcggtgcagtgcggtttgcgattttgaatttttaatatgcggttcgaaccgcaccgcatattataaaaatactaatttttatatttatttaggtccaatatgtgaaggcccaacctaagcctactaattattgtattgttgaaacttgaatttttttttcatatttattttcaagtcttatggtatttttgacaagtgttgctcaaactttgttgtatttgtgatagtttaattatttaatgatagtctaaaccgcataaaccgcactgcgccgtaccattttctgcggtgcggtttttgcggtcttttaatttcgcggtgcgggttgcagtttgagaaattgaaaaaactgcatgtgcgagttgatttgaaaaaatagtcaaaaatcgcaccacccgcaccgtgaatactcataaggagaactgatacaagcaaagctagtggagcttcaattattgccatttgccttgatttgatcaccaattccaaagccacttttctttcaaccactataataaataaatatttttattgtgtctcttcttatgagattacgttggtttaatgtatttgtgtaaataactttattatatatacaacatttatcataatgcatatatcaccaaatatatttaatgtgaaatacttatttttaaattaaagtttgttgcaaaaaatcactgagctaatataataaaatatacatgatgataaaatctacagatttgggatttttcttaataggtatcaagaaagaattgaaataaaataatatcaatttatacagata

SEQ ID NO: 203386 - DNA, 2478 bp, Cannabis indica
aaatggttcaatcacaggatcagtccaccattgttgacgatcatcacaccactgctcctcaagccaatcgtcctgtcaatgacaatctttctagtcccttctttcttagcattggtgatcaccctggactcatgcttgtgtccaccgtcctcaatgacaacaactatcaatcctgcaaaagaggaatcacaatggttctggttgccaagaacaagattgccttcatcgacgactctcttcctctgccagaaattagtaatccctatctcaattcttggcttagatgcaataaccaggttatgtcatggttagtcaactctgtttcacaagaaattgctcaaagcattatgtattttgatttggccattgacatgtggaatgaccttgctgagagatttaacaaaggcaatggccctcagattttttagttacaaactcaactcactcgattacaacaaggtgaccaatctgtatcttcctatttcactaaaatgaaatccctctgggatgagttgaaggaatttcaaccaatcactacctgcacctgtggtggaatgaaaatctttttagattactataaccagaatcaagtgcttcaattcttgactggtcttaaagaatcttttgcttctgttcgagcttaaatcttgctcaatgaaccaatccccaatctatctcgtgtctttccatgattatacaagaagaacgtcaacgatctcttggttctgctgacacaatccctttggttgttgctactagctcactacctactaaccctccacgagccaagaaacctcatccctcatgctccaattatggaaaatcaggtcatttggttgaaaaatgctacttcctacatggttttcctcctagctatggggacaaaaagagacaagacaaagggaaagcgaaggcaaatcatgccagcacatccaagaatgatgcagatggacactcaatttcatatgatctatcaacacaatgtcaacacttgatctctctcctcagccagcaactcagcaacagttctcctcatgctgatattgctgccatggcccctgctgcttctaatcttgcaggtaaaaatcattctcatctccatttacatggattttagatagtggtgccactcaccatatgtgttcaacataacatgtttaacatctttctcacatcatgatatccctcagtatgttaccttgccaaatggccacaaaactcttgttcataactctggtatagtccacattaaccttacataatccttcataatgtgttatatgtaccaagttttaagatcaaccttatatcctatccgaatatgttcacaatagttctaattccattatttttcatcaaaacacttgtgtaatgcaggatctttctcagaatgtagtgatcgggattgttgaaaaatgtggaaggctatacttgctgcaacaagattcaatagcagccaatgctatttcttttcaatttgataataaacatgttgaccattggcacaatttccttggtcacccctctatgcacatttctaattttttaataaaaagagtgataactctcttcatttcaccagtcagcattgtcacatttgtcaattggctaaacaaaggagattacccttcatttctaaccataattttgccaaaacacttttgatttagtgcatatggacatttgggctcctttccacatcattagtgtagaaggttacaagtactttttcactatagtagacgacaaaactcgttttacttagatatatatgcttaaaaataagtttgatgttcaaactttaatacctaatttttttaacatggtttgtactcaattctcaactaatattaagacaattcgctcaaacaatgctaaagaattgaatctacaagttttttatgcctccaaaggcatcatacattactattcatgtgtgaaaagaccacaacaaaattcaattgttgaaagaaaatactaacacattttaaatgtggctcgagcactaggatttcaatccaatttgctcttggtatattggccactcctagtatagaatgctacttatcttaccaatagaactccctccaagttattcaaaggcctcccctcttatgaactattatataatattgcttctcattcatttataaatataaagtttgaagaaaaattagtattttaagtaaaattttctttttaaaaattttaagttttttaatatgtatatgtactatattttaactaatatataaaaaaatgataaccgttttaatgttgagactaaatattatgtgtgttgttcttacaaggtttatggaagtattactttctaatttttttataatatatatttaaaataataaataataaattaaaatttaatctttaatttagtctttgtatgtgcatcaaacatggtatagtgctaatataatttagtatcgtctaatttaatctaattcaattttaaaaaat

SEQ ID NO: 203387 - DNA, 1109 bp, Cannabis indica
agggagatcgagagagagaaggacagacgacgacggcgagagggttttgtgggttggtggaggcgagagaaaagagagagaaagatagggtagctaaaatgaggaagaaaaggaagcgtgatctatataccctaggattttatttagtcagggttatacctgacagttcaaaaccactgggtataaccctgattaaaaaattgcattttaactcaaaaccatcacctaattccttcatgagtgttctaaaccgttgggaatacccaatttttctcgacagtttagaacagtcatttaaatttattagcgatggtccccgaaaaaagtattttgaggactgtcccgaatgcccctttttgtactagtgttgatatattcaatataagtagttcgtcttccaattattagttcataattagagttggtcaaaattactattttacccttttctttatctcttgattctttatgtactattaattcaatgtgaatagttaatctataatttaattaaagatttggattccaactattagcacttttagaattaacactacaagaaaactaatatttgatcctcttggaaagcttggattctattattgtgtaacatgttcccaaccactcatattattaagctctcaaaatagaagttgtaaggatcattttctctgaaaaaatttaactagtgaatcaaaaaaaatcaatgaaaaaaaaataggagttcatgtatacttaggatttagactgatctactaatgatcatcattgtgatatgaatagttcttttatgataaacgacatgttaatgaaagatgttattgacatatcggtacagtcatgtataatcaaattatacatagcacctttactgtatgtctatccacatatgtgatccaaataaaaatcacacacactagagtatagtgtatagtgaactgcacttagtagttttatattaaagatcccttactttaatacacaaccgacttatcttaattctcttgtacgatcttataagattataccatctccatatgaataagagtttttttagtatatttattaattatatttctataattaatagtattcatttatatatctta

SEQ ID NO: 203388 - DNA, 1478 bp, Cannabis indica
gttttcaccctcaacatccactaattggctattaggttcaacagttacagctggttcatccgattgcaaaatcaactcgccgagatcaaccggcaacacaaaatttgacgagttcaaatcatgtacaacaccaacatctatcttgtcttcattgtcatcaatatcccagatttttcaatggttaacatcttcaacaacattctaagtacaacctctaagtggatcttgaaaatagaaaacttgattagcttagttagcaagtatgtattgctcatcttgatactaaaatcccagatttgtcaatggttaacatcttcaacaacattctaagtacaacctctaagtggatcttgaaaatagaaactcgcttagcttagttagtaagtatgtattgctcatcttgatactaaaatccctgtatatttatactggttatattattttcagtgattatttcctttcttattggatttgtgttataccacttgcattcaaacaatgttactgtatatgcatcagtataagatatggttatcacatcttcaagtgtgtcgtaataattaaatccttcagttccagcaacactaattcctctatttttgtgtgttttgcttttcatttctttcgatcgtaataaatcgaacaccattcactatacaacatttgtagagagttgttaaataatctgagttggatgctaaagcaaaaaaattcatcaccattttgtaaagagccaagcttgtgcaaccgatatatctaaatacataaaatgcattaatacgaaaaattatatattgtcaaaataagagtttaaactactctcattgtaccttataaaatcacgggcaaaaagtttttctatgcaaaatattgtggttactattaggatattcttcttctcaatgttcactgttaaatgtgatagatgtcaaggtatgatagagaaagagagaaaagaaaaacttaatatttaagatagtttatcattgagaggtaacaaacttactttaaataagcttgtctttttggagaattctgaagtatgtactactcgggtttttcacgattgttatgatcaaaaggctttataattcctttggtcaagggatgacattgagaattaaaaaatgtaagagtgcgagagacagcatgtacatcttcgtttcgatttagacaattaaatcttgtttcacaccctttaaagtacattgaacaaaaggttaccgtctcatctgcgacataaacttcggcgatggacacttcaggatgtgccttgtttcccacataattttttaacctttttcatgtacctctcaaaaggatacatccacctcataaataccgagccacccagtataacttcttcaagcaaatgtaaaaccaaatatatcattatgcctaataaggcaagaaaaaaatcaattccatcttgcacaatattagaattagatcattttgagcaccctccatatctgtta

SEQ ID NO: 203389 - DNA, 1708 bp, Cannabis indica
gtgtttttgctctcaatgagagcgccgaaatattgacctcacttctagccaattacagtgagtcaataataaagtgattaaataagataaataaaagaaagcaaaaatagtaaagtaaagagaacaccagattttaaagaggtttgaccgtgtaagtattgtaatagcctactccccttgtatttgtattgacttgagagaagaaacaaagtgttcttccactcaaaggctattacaatttgatctctggttaactttctctcttaactcacacttttctctctcgaatgtatttttgaagcaattctctgatccccttcatagtgaggttaggccactatttatagggacttaatacatgagagatgggttcccttttgcctacaatgaataaaataggaaactagattaattctaaaattacaatttgagaaataggaaactaggatttgttgtcgttattctctgactcaatcccgtaattaaagtgattgtcttctcgtctggacacaacgagattattctttggaatcatcatctctcatgctttgcccgacataaacatgactacaccttggccagacatcttctcaatcatcctgctcggatgtctgaatgttacagatgctgagtagtcctttatgggctgctagggatattttcctctatccaggtatctaaaatatgggacttgtgtcatccattcttattgccacatcatggtgtaaagaataggattacatttagctttccaaccacaagggatctctgacccatccattcccttgagctacaatatttcatttccaattcatgcaatatttcctagcgtctttcccaattaggtcctatgacccccacttctagttcatgcaaagctaggaaaaaactcctcaggatgagatctccaacatcaaaggtacaactcttgactttagaattaaagtgccaggcaatctagccttggtagtttcaggttttgtcataagtgtcttgtttgtgacagggaaccatcgtttctacagggattattgcttcacaaccataagtcatcaaataaagtgtgtgccctattgaagttctcttcgttaatctgtatgcccagaggactcgtggaagctcctctcgccaatgagctttacaagtttggagtttattcttcaatgttgtcttcaagatcttgttcacagctttgacttgtccatttgcttatggtttggcctcagccaagaagctcttcataattccatgttcgttacagcaataagtgaagtgatcactatcaaattgcttcttgttgtctaagacaatcttgtgtggaagcctgaagcgacacactatgttcttgatcacaaagtccaaggccttcttggaggtggttgtattcataggctctgccgctacccatttggtgaactagtcaacaacgaatatgtcatacttaactctaacctttctagtaggaagggatcctactaaatcaatctcccaaacggcaaaggaacatggagtgctcatgagagttaattctgttggtggcactcgtagaaccttagcatatctctgacattgtttgctcctctagtcatactctatacaatccttcttcattgtaggccaaaagtaacactaacgatggatcttttggataggtttggtccaaaagtgtgatctccacagaaaccaccatgaatttcctatatgatag

SEQ ID NO: 203390 - DNA, 773 bp, Cannabis indica
aaaaaaaatagaaaaaaaagactccttataatatcacaattaatataattacgtaataatttttttgttatgataaacagtattagttaaggtttctctaaatatttcctatgtttactattttttgttcctaaattcttaactgtcggagtttgtctcttttccttgacaaggtccgtcaacccttcctaagcttaggcatgacttagccagggtttgtaattttgctattgtgattaaatttttgctactacgattagtcttgtctttatgacatagttttgatttgtttttttttttttaaattactacgattaatcttgtctcagtgacataattttattttgttttattgttagttcatcttttttgttgttcaatggctcgccatcaaattattgttagtagttaggaataacaagttttttgtggttgaagagattgttagtaatacagttacatacattgcacaataattaagtgctcatactaaggagttgaataaatctactacaataatttctattgtttgttatcttctaagcgatgaaactaaatgtaaatatttttaaaattaactgcaatctttttcatttaattttatttaattttttttttatttaacgatttaagaactaagagaccaattaattagcccttttttaaattttaatcctagtttcgattaaattgctaacttttatattaaaggattactattaataaaattatatgattttttttggtatgtatatattaattttttatatata

SEQ ID NO: 203391 - DNA, 710 bp, Cannabis indica
tggggatgtctttcaccattatctttgtgatattcatgaactttagttattatatgcatacacaaaaattaatcaccattgtgagattcagagtacactacaaaattaaataatgatataatataaatattatatggtgtaaaatattatataactaacttggaaattgtcaaatgcctgagatgtaataaagtcatcgaacttttgcatcaagacccaaggtccatcatctacgccaaccagaattattgatagtaggtattccctgaagggtaatactgtaattaattataatcatatttgaacattcagaattaattacattaataaaaagtaataaggagaaattttgtagaaataatattatactgataatgatcataaacttgctttcacaattgcatccactgtattctgttcatgaggactgaatttgtccgtccctctgcttaagcttcttgtcacctatttaatttgcaagttgcattttttgaaattgaaagaagcaattaatatgaggatcatatataataccttgaaacaaaatgaagaagaaaggactctgaagatcccaatccctcaattcctttttggggtcctcgcgatacgagttcggaaacaccacaaacttcaaattgctcacaatccttgacagatccctcttcatcgtatcccaaataggctctgttagcatgttaagagtcaaaact

SEQ ID NO: 203392 - DNA, 781 bp, Cannabis indica
tattttaatcatgttattatttacctattaattaggctggtggaagatcttgtttcaacacacattgtcctggttttgttattgttaataccgatataccactcgaccatgtttatcaactactttctcaacgtggtggcccaatatatcttacacaattttatttatcgagtaagtaatatatatatatatatatatatataaacatcatattaatacattttatcattagttttgaaaaaaaattacaaaatatctcataaatatgatatttattttttgagatcaagtttaaaataaaaaaatttagttctctcactatatgttgttatatatgtataggtcaaatatttatgctattgttatcctttatttttctaataggatgctgtgaatggaaattggtggcttgaatatggaagagacgggactcaaatcggtttctggcccggacgcatatttagtagtcttaacacagggagtaaccatgtagaatggggcggagaggcttacactccaccgggacaaaaagctactcaaatgggcaacagtttccgtccaaaaggagattcaagattcgaagcatatatgaaacaaattacaaccattgacgaatctcataaacaagtcattgctacaaatactgaaacctttgttgatgataaacatttatatggtattttggattggggaatggaagggatacatggtcatgttatgtcttatggaggcccttttttctctgctatttaatttttattactaataatatataataata

SEQ ID NO: 203393 - DNA, 1768 bp, Cannabis indica
gaaagattctatgtcttaatgaacaaacttttattaagtgcaaacaaataggccataagaaagattgatgtatgatacctttataatttattagatttgataaatatttaatattaaaatattctttttttgctagagtaaaatatttttattatattaataaaatattataataataaaaaaaatatttttttagtgtaatttttagtattgtggttaaaattaaaaaaaaaagaaagttaatgtcgaaatagtatttttttagcgtaaatttaacatgaattttaccattctcataagaatggtgatgggacaaaagtagggtttcttatgtcgacaattgacaaacaaatactcttaaaaaggaaagaaaaaagaaattggttcctcttgccatgatgggatcctgccacgtgccacgcgttacttctcctttaataaagttgggtttgtacctacccaaaggtcgaagctttaccttgtaaaaaacatggggttctaaattcatcttcttcacttcactacccactctcaattcattttctctctccttcttttccatctcaacaacccactaagaaagaagaagcacaatgggaaaaatcatttttctgtttcccaacttcataaacttgctgggtatacttcaaaattccatctttttcttcttaaaatttatattttttaattttgtttttgagtcttaaacctgtttgttaatatatttgcaggccttgtttgacattactttatcccttgtaagttttttgctctttctcttagttaatgtgactgaataatctctttaactttcttaagttgtttgaatattgatgagttttgatttatggggttttttcttttatttattattattaattcaatatattaatatagatatgcatcagttctagccatggagagcacaaaaaaaaagatgatgaacagtggctttcttattggattctatactcatttattactcttgttgaaatggttatgcaacctgctctagaattgtaagactaagctttaatttcttcatagaaaaatgctatacattattaattgcataattgagtttgaagtttttttttgaatagatttcctgtttggtatgatgtgaagttggtacttatggcttggttggttcttcccaaattcaaaggagcaaaattcttgtataagagatttgtgagagaacatatcaagaagtacacagggaaacatagtcatttcaagggaaagcattaaaaaagtgagtactgatatttcaatagaaagattttgatacatttgtacacttgaatttacttgttctgatttgtgttaatttttgttctttgaagagggagagcttcattaaatatataatgggaagaagtggttattggtaaggctttttgtaaagtgatcacccttaatctgaggctggcttcatgtatgaatcatgtagttaaaagggcacaaatattgccttgttttgtttaagtgtcttttttagattgtggtgatttattagttaggagtaggactgtgataatggtacattaccatatatgtatttgccatctaattcttactaatgtttactttgttcctacgaaaatgggtaaatctaaatattaataaatatcaaagagagctttctagtttctatgttgagccaagagagagaaagagattaataattgttttaataattatttgaaggaggccagaaatgtaattttcatataaaatagggattacttgggaaaaatgaagg

SEQ ID NO: 203394 - DNA, 544 bp, Cannabis indica
tataaatatttaaaatttaacaaaaatcaagaaaacgctaaatttttgtacattgatatattagtgtatattaatatatcaaactataaacgaagaatgttaatattgtttcacaaagtaaaaaagatgtatggaagtttttcgtgtcatcctcatgtgcaccatataacaacctcaagaactaaagctccttaggtaattttttttcttgttttgattaacaaaaaaagaatcacatcagtaattacttcaagggttttcattacacaaatggcaccaaagttagctttcggaagggccaaccttttaatccctttcaagtggggctacagttattaacccaaacaagaaaggatgtcagtaaagacaatccctaccactatactagacaacacgtggtttccctaagtaaattaaaatgagataaagagaggaaaccctagctaggtaaggttttatttattcattatttatagctttttgatttctttgattattggcatctaaaaataccactaacatataactataagtcgtgtcaaaa

SEQ ID NO: 203395 - DNA, 1951 bp, Cannabis indica
ttatatttatatattttttatttcaaagaaataaatcaagctagtatgatgttataggtaatttattaattattgctagtaaatttttaaattaattacaactgtctaataatgatccaacgattaaaagtaaatgtaaccatcatggttacatatttaatatgtaaatattgaaacttcttcattaatatatatgtatattgaaaggtgtttaattaatatatatgaataataatttaataatcaattttggtggtataaaagtaagacttgtggcttctcttatcctccacattactacatactttctttctctcttacacaaacacatatagttataataatctctttcttttctatatatctttcatatatattatatataatataatgaagtcaataattgtagtgatgatgatgaccactatggttgttgggtgccttggtagaatggatgtagccatttttatgaatccaactccaaataggtgttacacacctggtgaatattgtgctcacattgaaatcaaagactgttgtgaaggactccattgtgaaggaagtctgttcagtggtacctgtgttccttatgctcattgtctcccaatcggggaggtttgccttgccggaatcagccagtgttgttaccctaaccattgcaagtctaagtttatgagtatcaacggacattgtactgcccccgatactttgcccgattctgaataattaattacgaggacttcctaaaaggtcacctattctagtactaatttatctaataatatattagtactagtgtataatatatatgtttgtcttgtgtgtcaaaataaaataagaggaaattaattaagctaggtttgaattaattaatttcttgttattacatttacacactactaccacaaccttgttagttttgtgtgtgtatgtgtttatgtatgtagttctttattattaataagtttgtatttcctttgcttatataattcctacaccttgttaagttttgtgtctttgtattatatatataaatctatatatatttatatgtttttatttgttataacggcgtaagtacttaaagttttgagtttgtaaaaagtataaattcaataattttttagcaacatatatttaatatttataaaactataatttttctgtaattttgatcaatacaaattctgttttaaatttattaaaaaaaaattagaaataactaatactgcgcgttttcttccagacctaatgatctagaatatgtgctttatttttgacaataacaaagtttatactagcaaaattggaggaaaattacacttttacatcattggatatttatgtcactaaaaaaaatcattaaatttatatcgctgcaaactcaaaattttaagtaattatattactatttacccatatatattattatccattgatacttaactacacaaatacaagttgtagatatgcttttttaaataataaattttatattaattacaataatatttttttttaaaatttgaatgcaatattaatattgtttacctaaattttgacgacgatggtgtgtcaagagtagtaacacgtggcatgaaactattgagactaaattaatgaagaacatgtaaagtcatgatcgttaacaatgaaaggtggtcataacgttagaataaaagtcagatggtcacccttacccctagcttgagtaataaggtgggggtctccaagaagaaaaagagatggactaacacattcataagcaggatgaacaatcactacacacctacatgcaaagttagtctaaggggtagatgacactattctcagcatagacataatgacattctcaaaggtacgtatttggagacatccacataacactatgactactaacaacgtacaaattgtacttgggggtcacccgagatgacaattgtcacactac

SEQ ID NO: 203396 - DNA, 2507 bp, Cannabis indica
ctctctctctctctctgtctctctctctctctcctctctctgtctctctcagtcctgatctagggtttcaaaacccggcagccaccccagcagttctctaaccacccttaggctctctctctctgaatctcaatctcgtctctctctctctctctctctccctttagcctcgatttagggttttcaaaacccttctagaccataatctgaatgtgaaactgtgtgattttgggtttgcaaagatggggttttcatccactgtagtactcaacagcagtgcagtggtcatagtctccgtcgaacccattattacttcgatcaaaccgtccgtacagtaagacagcgtgcagtggtcgatccaaattttgcgtgcgctgtagatggaaataccatcaccgttagatacacttcgccatccgacgtgggtgggactcgaggcaatgtctgcgtgtcccgagggtttgcagtggtggatatggatgttgtggatgatgacattggagaccgactggagggttatgcaaccgttttcgacgatttagggtttaggggccacggccgttgatggtacagagagagacagagagagaggagatcgagagagagagagagaaatagagcgagagggatagagagagagagagaggggatatcgagaagatgaatagataagaaaggaaaaaggaaaagaaagaaaaagaaaaattattttttatttattaaattttttattcaaattaattttattttaatttttaaattaatttttacgtggaccaatagaattgtgtcatgtgtacactgtatccacatagatgcacacgtggacagtccaacatagcacttaacacttaaatggacggaaatgttaaattgctaacagaacgcgagtattgagggttttaccgcccaaaggttgggttttggggttaagtgaaaccaaatgaaagttttggggttttgccaccatttacccgtaacttcacataccccttgggccataactctaaactctgcttttgcactgcttcttgcaacaacagtttgctttttacttctccaagtaactagatttgcccataataaggtacaataacctgatgtggattttcctatcatcaattgatcttgtccaatcagcatctgtataaactacaacttttctttcatttgtcttcttcaagattagcccttatcctggagtttgttttagatatctcaatattctaacactgtgttgagatgtccttgacagggattatgcatttactaacttactagacttacagcaaatactatgtctggtctgatatcttattagatgttgtagcatgaccagtggcatcttcttctcttcaggtagcaactgtccatcgtgtaggtgctgttttggctcagaataaatgtgtctttcttgcaataaacaagtgctttttcttaaaaaattccaccttaaaaccgactcctttttcgaaagtgcctttgaggtctcttctctattgttctgttgttgtccatccttgcaaactgctccaaccagctgagttttcatcatcgacagcaccatctactcaggtagaacaatgttcttttcgtcacagacggtattatccacgccatcaaaattttcctcgtcaaatgttggcatttttagttctcttaattgcttctcgtgtttggaacgagttcctgattctcctctttcaaaagatctttcgttgaaaatctaatttccatgaaattcccatgtaggtggcactttagcagctccatggttgtgttctgaatgaatgttactggttcttgccataatagatgctcccgggctcctctccctctccatatcttttgagttggatgtgtttaccacttcttctcccggttcttgaacgattcttgactattctagggcaatttccatcgctccatccacttttcttggacgttatacccttaattcagccattagtgatggtactaacccaataaaaaatgtgcctaaatgaacttctggtgctatgctgtcaaatggagctaccggatagaatttttattattttcagccatgaaactctcttgcttgactgccaaaaattggtcataaaaggaccccatttgtgtgttttgaaatgcttcaacaccagttttttcatctcttcccagcttaatatgtctcgcgttttaatttcatattcataccatagtagagcatcccctgaaaatgaaatgacggcagcctccatcttctcgtcgttgtcatatccatgaaacgagaaaactctttctacttgtaatatccatttgtttggattctctccatcaaaactcgccatctccaacttcttgagccaattttcttgtcagaattgcgagtcttgctggttcctgtcaaaaaattccctctccgagctccgattcatacagaattctgccataggagtgatgcttgtggtcgttgatcgttgttctagcaatgcagcactatgttggtgtgccatggggctcgt

SEQ ID NO: 203397 - DNA, 563 bp, Cannabis indica
tgaatataaaaagctgtatctacgttattgcagctttttaaaggaatttgttcaagttgtcttgttctacaaatgcatgtgggaatgagctacccatccaatctcatctcaactcacaactcacaagtcaaatttatgttttgtcttataacacagtgcagtacaaaatgaccaacaaaaccacattaatgtattttggagcatagcatatgcatgcaaatgactccatacaagtacaacacaattaaaaaccaatggtgccctcaatcttatcttctttcccaaaatataccattcttaacacttacctctaccatttctttctttcttttcttgtctatagaagtaagaactttttgctatgtatatatatttactagctatagcagctagagtgcaatatagttaaatttgaagagagtgattcacatgattgctgaattattactaatcggacaaaattgatgtttgtactttctagtgtcacttgtaaatcataccatctaactgtttaaaagacatatagcaagccaataagaatataaataaatttataaactctg

SEQ ID NO: 203398 - DNA, 850 bp, Cannabis indica
taatcataaaccctttgtgtaaagggatggaatagtaattaattcctcgaaaacatgtagaaaaaaaaaaattaatcggtaatatcgatagactctcccgtagccacagaattacataaaaaatatttacaagctttagaagaaattttaggaggcatataaaaatatagaaatcgagacgttgatagagaaagaaagtcaaaataaaatgataagttgcgaaatttccataaaaatagaataatttgtggtgtgtatatttaaatttaatttttgggctttcgataaatacttaaattatatttttagaatttccgtaagtacctggttgttaagtgtcaaattattattcacgtgtcattttcttattagtatatttaaattaattttaattaaaaatttaatgacctagatcaatcagaaactgtcacgtggatgatgacttgacacctaacgacaaagtacatacaaaaattctaaaaatataatttagatattattatcgtcaaaaattaaacttaaatatttatctataaccgaaaactaaatttaaatatttatgttgcaaattactctaaataaattttaatttttagtagtattctcacacccaataaaaattttaccaaatctcaatttatacctacttctaagttctaacgttatagtatttaacataccttctcaaatataacatttgaaacatataggaggttaaaaatataacgtttttgagtattttcattattaaaaggttgaggtaatttttatagtaaacccccttaagggtagttttggcagatcttttttatttactcgatatttaggaaaaaatttagtctattttttt

SEQ ID NO: 203399 - DNA, 1039 bp, Cannabis indica
ataagaaaagttttacatagataaaagctacaagagctatgatttgatatattaaaattcaggaaaataatttaatacatagataaagaattgctcattagtaaaataaaatagaattaaacaaaaaatttcaaatttaataatctcaatatataattcagagaaaaaaaaaattaacaacctaacaaccatatttatatatgaaaatagttttcttaatatatttactaactaattccaagttaggattatatatataagtcaggagatatttttgtgtgtatgtataagttaaaaaaaatgacaacgtaagctgtatattctgaatatataacgacactaatcagttatatatatctacgtaacgcgtatatatataactctaatatatttttgtgtttgtattgtaggaaacactcttttatgggtttgtatatattgtttaattatttaatagtaaatttaatcaagaaattaatattattataagaaataggtgtgccatgatatcgtatattatttataataataaattcatgcatggtttgggtatgtatggattctagtgttttgtctcttccttatttatttatttattaaattaattattaatgctaataatggaaatgaaaagtacaacatgatggatatagtcttactataaatacatccctatatataataatatgttttcttagatcctaattacttgttaataattaattaacactattttcttccattaccacatttaattaataaataatattaaagctggtattctttattattttatttatttatttaattttttttaactttctccagattctcttctttgtctttttgtttttgtcattttctttttcttttagatccttaaaattaatgcccctggattgttttagaagagaaaaaataaataaagtctcacatacttttgtaaaataagaaaagtaatagttttgtaaaataatgactacaaacgacactcatttgctcaaaacgacattaacaatgattttttttttgttttttt

SEQ ID NO: 203400 - DNA, 2103 bp, Cannabis indica
ttctttcacttggtattttagtttcaggtcagtattttcttggttgcattccagcactcctttcagcttatgtattagttcttcatatttacaatcaattgagatgaaatgaccactagcttcgtagttttcatgattcattccatcatcaaactgtccattgcaaaagatgaggaatggaattttgtctttttcttaagagtataaaagtttaattattgtaagtcaacttgtgaaatactgcaataaaactgtaatgcaactattatatatgttgcgagtcaattatcataaaaactcaaaaaaaaaataattcctatgcaatagagaagaaacttactactatcgactttgctctgttcaagtcatgtattgctaattttgagacttgtatttattatataatatcattgtagctcaactattattcaattaaaatgcaactaaggttttataaatgagaatctttaagaaaccttttgtctattttttttttaccatttaacaacaatcaattgtacattaatagaaatatgtggagaaacaactcttagacatctgtcaaccaacttaaatatcaatcaattgaatatattcatatagttaaccatgttataaaagtttctttaaagagatttgtcttgcactgattatatgaaacacctgtaaattaaaccccattattacattatcagtttgtaattactgatatgtcaagtttcagagtgttagtaaaaccttaatgcaacttttcaaaaacataaaaaatcatattaataattcgatgtatgtggctctagatgcatgcaaatttactatactattagtgatttgatatgaataaatttaccattaaaaatatgaaaaataacgtcaatgcaactagataaacattagctacaatattgatgtactttttcggattatacttgatttagattgatcgggaactccagatctttttattagagatctacattttatgaatctgaaaattaaaattaagaggattagttttttacaaattaaattgtaattcacggctgaatttatgttttaaaccagtttttctacacaaatttgcatccatcgaaaattgtagatgcttggattgattagggtcttcttctcaagtgaagtcaccaaaatttatgatggatctctgtcaacagggttgttttatagttgggtttctgagttgatcgatagaagcttgtgtaattttgcttcgtgcggctgaagatttaaaaaaaatattattataatatttagttcttgatctgtgtaaatatttctaggatcggtttactgtattttagtaatatagttattttttttttatttttttttgtatatacttgaaaaacctcctaagctttttctttttctattctttccattttagaggagaaaaaatttggtagaagaggccccttaaaaatttcactcaaatttttttcactcatttttctcttctttcgtaccaaatatttcactttttgtattctctacttttttcttctataacattttttcctcccacttttctttcataccaaacataattattaagaattaaatattaattgccaatagctatggctaggtagatccccaaagtcaaaataaccaagtaaagaagaatgtccaatcaatagagcaaaacaatccattaggtaacactacaatttaatggttgtcattgtctttaatctactgtcgcatcacaacatcacatctatccacatatgttttatgttttgattaattaataattcaatgtttaattgtatactttagctaaccagaaactatttagtaactcatctcataaactatttagtaactaaaattataaagtattgtagttataaaaattaaacaaatgtgtaactagttacaaagctttacactagctattaataaatcatggaaaaactatatcaattaccatacccaattgcatatacaacataattactatatttaggaacaatattttttaaaaaatatatatataaaaaaatatatacatatataagcattagttttccaatccatatacaaatattaaatacactacacttggatttaattattttt

SEQ ID NO: 203401 - DNA, 576 bp, Cannabis indica
ttacaattttgtatcaactttaaataattgattcatcaaactaaaaaaaaagaataaaaaaatagtttctccccatgtagagataaaattcaaaaataaaatgaaaatcaacatttcattcatattataacaaatcaatagtgcagattaatttttccaatgaacgtacttcaatgtgtgcacagtgtacgtcacctcttcactggatatttggatataaggagatttgattttaaattaagacattattttttgacttatttctctttacgggtttgtgtgataattttaaaatttgtattttttatgttatgaaactagatagtacatccttctcatatagattgatgggaaaatagtgttccaacaaaactcaataaatacaaatgtctgagaagttcaactaatttcttacacctatccattcttaattgacattgttcttgtaataattggagttataaaataaaaattattaaataagttaatttacaataaagtatgtcagggtttttacagtcttttgtcaaataaatctcaattaatgatgacttgcagatattatgggattttatt

SEQ ID NO: 203402 - DNA, 1022 bp, Cannabis indica
gatattatgggattttatttttattgtacacattatttgatatgttattatatgaaaaactatatactagtgacatgacctgattcttataaaatttggaattattaaatagattctattatgaaaaaggattaaacaaactatgttgaaaaatttatttcacaacctatgtgaaggtttatttaagaagttgtaaatggtaaaaaatacattttttatgtaccacaagaaggttcatcttctcaccacaatgaatattttcaaattttttaattaattcggtgacttattaaataagctggtgtcctatcattaattctattttcccattttacccctttacttgacattataattactagatgggttgaattgacattaagtttgtcaaagaaggtgatgtcctatcataaagttttcattaaatgtctggattttaaaacaaggcatttattgaaaccccgtattagtattacctactaaacatggacccttacccaaaattcaaccatttcgaatcaagacctgaaaagtccccacctcctcctttttcttcaacacgagtcgtaggcacaccttcaaggagtcctagactccgttcagcttcaatttctggatgtgtaaactgtgctagggtggagggtgttttgcagaaaaacaaaaactaatcaggaaggcacatgttaaagccacagagactgagcatgagtcattcaaactggtagagcacctctaccattccgcccatgccctgcaacatgcgaacacttcaagagaaaaattggaaaatattatggatgaaattttcgactacaccgaggtctccataccccattacccaatccatccaaaagaagaaccatcaaacaatactcaaagaggaagtccttcgcgacccaagtccccattccgagaccgtagccctccatctcaatggaagttccctcatgttataaaacttgattgaacatccgttgagttttaattagtggtattatatatattttacttattttaaaact

SEQ ID NO: 203403 - DNA, 2292 bp, Cannabis indica
agtgtccatgtatgtattcgttggttaacttggggatgaccataaaaaccggtgaagtgaaaagaatgaccactatggagttcaacaaaacaatcaatatgattggaagagtagttattaactgcaatgtcaacatccgatttccatagaagcataagaccaccacttaaaccaattcgaggaacttcgataccattaggaaagtgcaaactgtttcgaaatttagaaatactaccagattgtaattttgtttccatgagaaacaacacacagggagcttgctcagaaacaagcaagcgtaaatggcggaatgcagtcgggttccctaacccccgagcattccagcttaggatattcatggcgaaccgcagcgatcatcatcgatcactgcagagttatcaaaaagatgctgaacagaatccaaagccgttgcagaaacttgtaaagcattgggagaggctgctgacgaggtggatgcaattggagaagtgttgttcgaacgacaacgtttaagaaagctgcgaagggagtcagattccccctgccttttaatgaccttattaggattaatgttttctttggagtgtaaggttgtcgactgaacataattgccgaattgaccactttgactattagaatgcctcgacaaatgaggaaggattgtagtgacagtaggagaagaatataagggtgaggggtgagttatagtattgatattgtggggagtgaaaggagaggatacagtgtgcgaagatggaggataagtggcaaaggatggtgtaaaggtaactagagtgttggagggtaaagacagtggtaagtatgatggaaatgggatttcagaaatgtcattttcattgttgtgggaagtaaggtgttgttggttagggagatgatgattaatggattgaaatccaaagttgctgtttgttatagtatgagcagaagactcaatgtcggttaatgggaaagaatgaggtggtggtcttgatgtaattttaggaacagcagcagcaaaggatttcttagcaagtattgtcattaaaggccaagcattaccctttccaaaatcagtcctatagcgatcatagccagagtatggtaggggaaatcctaagagatcagggccataagaaagggatggttcaattccattgtagagttgatcaaggaaaacagaacaactttcaaaaggatgtccaagaaccccacattcaaaacaaaatacagggagatgttcataccgaaattcaacccagaattcatctcttgagtcacgaatcttaaccatcttgccacgaagaagaggttttgagacatcaatcaaagcctgaaaatgaagaaaaggtccccatccttcattcaaagaatcctcatcaacttctaagaaggatcctacaatattaccagcccagacagcaatggctttagatttactaagaaatggcagacggtgtagttgaatccaaaatggagagtaatgcagagattcttctgtgatattttgcaaagcagatggggaggccaatacaatatggtgattctgaaagtgccacggttccgtaataaggatcatttttttatctcttgggcatccgaaagtgaccataaagagtccagtgtgatgatcagagatggtaactgggtgccgtcctttccaaagcccgcacattttgatgcgaaaagttttacgattgatttctttagaggatagaacacgggcaaaaagggtgatatcatcatttctagtgtctcgtaaattgactgaagtaggaagttcaaggacttctctctcaagatcagtaagagagataaaaggcctagttgaggaggttccgtgatgcatgaattcggtcataagaggtacaaacagaggaaagtgaaggaagatagggagaaagaaacaaggaaaaaaacctgataaaaaacggaagaaaccaggaaaaataactgcaatggaacagttgaaaagaagaaaaaacagttaaaaagaataaactgccacagagctttttaagggcatacactcaactgaaaaatgtataattatatgaaaataaataaattaaattatttatacattgtatgataaagttatatggctaattatgtaatacttcactttattttgtggtgtgtgattcctctatgtattttcaaccattaattatttttgaaaaagcaaaaagttagatctaatggttgagaatgtttcaagggtaagacttttgtataagataggcaacctattgaaaattttggagaatatgtacttttttttattaaaatatt

SEQ ID NO: 203404 - DNA, 973 bp, Cannabis indica
taaataattaatagataataataaatattacatatatatattaataaattatttattttgtatttacattattattatttattttatttattttattattattatttagtggtaaaataaactgttcaactcaagtgattaacgaggttttatttgggatattataagcaactaaaaattataatatctatgaaataaatctaaaattacagcaaagtatacttagtaaatcaaaacacaatattatcaacttaaaaaaacatatacagaaacaaactaactaaaattttaaattaaaaaaaaaaaaattacatatccaaatataccaaaaatatatacaaattaattacacaaaacccctaaaataataataatataatataattacaaaaattatatcgcctcccttctgctaatttatttgctttcaagatttcttcgatcaatgatttgaggaattcagccaatcctccaatgtctagtttctgcaaatagcaaacaaaacacatttgagacaacaaactaggactgataattatttgatcaataaagctcatacctaaaattatagcaaaacaacaaactggagccgataattgtttgatcaataaattcattaacatacaagtttttaaagaaaaatagacccatatatatcagatattttctgatccaagcacaaaccctcaccatagaccactatcccgcaccatagatcttgaacaaatcagagagaaagggagagatagaggaaagtcgtgataacaaaaaataaaaggagagagaactgacttccaaggtctgcgagcaccacggtggtgcaagattcctcgtttctcatgcatcatcaccgtcatcgtcgtggccatctcgctagtcggagctagaacgagaaaaggttagagaggcggtgcagatctacgcagctccgctgagaccccagatctgggccacgggcttcctttcccgtcac

SEQ ID NO: 203405 - DNA, 688 bp, Cannabis indica
taatatgcttcttttaatcataattcagttgctttagcaagaattacatatacacaagtatattttttgtgtgtctattattacaaatattatgttttacatggaataatagtgaagaatatttgcaacaataatattaaatctttactcttactaattaattttccttacgatgaaaacattttcatttatgtttagttctttacatggcagttttatttgtattattattgtaagttggacttggttttattttattttttggcattttatctttgccaaggcatgttttgatattgtcacatgaggtattttttttttttcctaagtacattttcttttaggttgtttttagggaatgtttaaattaaataaaatttaaaatgtataaaaaaaataataataaaaattattaaaattttcttatcttgcaatggaatggatttttcttctattttaaaataaaatagccattctagttaaattaaaatgcaatcaaactaaaaaatagaatgaaaattaattctttttcattttgttccatttcattatctctaactaaatgttaatttaatgtaataattattggtagttttatatttgatataactattgaaacattttttacatatagaaaaattctaaagtaatataacttttgtcacatcttatttttttttaattaaaa

SEQ ID NO: 203406 - DNA, 1319 bp, Cannabis indica
ggagaagcatgtccactgaaccctaggatccgatggttgtggatcccaatgtctgagttccatccactgttgacaacccaaccaatcttgcccgaccacctcgggcaaacccatctacagagttctgactagaaggcccagttaataggcaagattaaacaagtatcagcaacttccgatcaatcctggttaacctgtctaaagtaccacaaagattcctttaacaagagctaccccccaggtatatgctggagaaactgggcctagaggttgctaacctagtgtcatcgagccccatttagacttgggggatgattctaagctagccaagctaagagggattttagggcaagtccaggatcattcaaacatcctccatcttgagcaagaagaaacatgtgctactataaccgatgctttcgcccaacagaaaagtgagttctaagaatagatagatcgacatgccgcgatcctacaagcccacaaagcgaagttgaacaactagaatagggaggcaaatagattgattagatggttcaataaaagggctagatcccgggttgaagagccatcactcataaaggacccctttcgggaaaagtgttggttattcatatttaaattttggtggttgtgtagatgatttaaattcaaattctcgctatattttcactttggctagtgcaactatattttaaaaaagttttcaatagactttaatcacatcatctactatgtatgttgagtttgtcgcatgttatagggtagctttgcaagctttttggttaaagaatttgattttagaggtatgatttgattctattttctctcctatcaattattataataatactgctgtcattttcaaagaataaagtgcttccaaacatatgaaaataaagtatcacacttttagaggcttggtcaagaaaagagatattgtgataaagtattacaagaccaagtcgatgttagtagatcatctaagcaaaggattaagtgccatgttgtttaataaacatgttgttgatatggacattttataatcttttgttcatttggattagtgagagtttctttctcaattatttgagattacatttatatgtaattttcttgtttattttatgaactacttggtttgttttgtgggccaataatttttattattgaatctttatgctttcaattatgttttattatattcttgagaatgattgaattgaaaacatgtagttcatattttattgtgattattgtcttttaaatttatttgcttataaatgacaataatatttttgttggcttaattttttaag

SEQ ID NO: 203407 - DNA, 1368 bp, Cannabis indica
gtaaaaaagtcttttagaaacattaagtataatataataatgcataatttcatcaaaatttataatgcataacataaataattatttaaaaataacaataaaaaataagagagaaacattattagaaattcaaaattcaattcaattcaaaagtgttattcaaataaaaatattcataataaaaaaatcattattattgttggagtacatgggcaccacttgatattttgttgatttctctgtttaaattcaaatttgaagacacctcacaatacaaacatttgatttagctatgtatttccactaaaaaaaatatataattacatcactaacatataattcttaatttcatacctagccaaaatcaaagtatgaggtgattgatgtcttctcaattgatgcatcattactatttctatgatgtgaataatttttaggggacacctgcataaaaaaacatataagactaatatttatatatatattatagtaaattatatatatttatattcttaccgcttttgcttcggaatgtttttgagaattttttgtctttctcttaatcttttcaagagcactttttggtctccgagatgttccactaaatttttctttattttttataccttttaatttgatatcaattgagttactcgcatcattcttgtaaatttcaatagagtcttcaccttgtaagcatgcatcaattccttccaaagctcttttaaaattttgtattgcaatcccataaactttttcagttagcgacctcttgttgcaatttgagtactaattctactcaattcttggtaacgccttgtcatggatgtttttggatcatcaagatgtgtacttttgtatgtcgaagttattgttcccattttagcatgctttgtccatcttttcaaaatatactgagaaggaatttttccaatattacgagaagaaaaaactgtaagaacatgtgagcacaatattcctgcaaactcaaacttcttgcaactgcatgaaactgtcttatttgatgaatcatagttgacagtatgatgaaaacgtttaccattaggagtcaacttgtgtgttgtttttgtctcatgctcaagacaaatttccataacacaattgtatgcttttgaaaattcaaattcaaacattttcaaaattgctggggtgtatacagcaacagcatgatttagaatttcaattggaagagatggtggtaacttacgttaagttgctctgaaatctgctttcacttcttcgtatcgacgatcatcaaccaacctttcaaaattttgtaaaaatcgcaacatattatgctagtagctaacataatgcttcaattcattattcatactttcactccgt

SEQ ID NO: 203408 - DNA, 724 bp, Cannabis indica
aaagggtcaatcaggtcgacctacaagccactttttgaccgtattatcgagtttttgaacagcaatagagctccattgcttgtgaatttggatccttactttagttatagtggtcaacccagtactatccatttggactatgctcttttcacagcttcatctgaggtggtccatgatgatggttctggacttgggtatcaaaatctttttgatgcgatgttagacacagcctatttcgctttggaaaaggctggtggaggatcattggacattgtggtatcagagagcggttggccgacaagtggtgggacagagacaacagtggataatgcaaagacttataacaacaatttggttcaacatgttaagaatgggactccaaagaagcaaggaaaggctattgagacttatatatttgcaatgtttgatgagggtaataagaatggagatgaagttgaaaggcattggggtcttttctctcccaacaaggtcccaaagtatggcatgaattttaattaatgagaattaaaaagttattaataaattatacataattatttcttgtaataatttgtgaggatacatcatatccttaaatataaaaatatttataattttagttttatgatgataaaagtgaaccaaatagagattcttatttggtcacatataggcttctttattcttactataatcgaatttataagagttattttaataataa

SEQ ID NO: 203409 - DNA, 622 bp, Cannabis indica
aaaaagaggaacctaagcacattaaatagtaatacgacttgagatatgttattattgtgaacttataactgtattgatgtaatgttttcaaattttagtttacttattaataaaatattatttaaattatgcaaaattgaaaactttggtataacttttaggcatctatcaaatgtaagtacatttttctttttaataaatataattattgggctagtatgtagttgtcacaccaaaatatcttactggttggtatgcaaattgaggcactaaacagcactttatatatttcttccaaaaaaaaattgcaatactttttatacataatttttataatggtatttattataattataattgatttctttttttaaattggaaaacattttgttgtacgaaaaaatatatatttttttaacatgtattataaattaggagaattactttatatattatttttcttaaaaaaatttacagtttgagttgtttcggtggtttctccggtttttatatgtgttgctatacggatttcgattgcgatttaagttgctcggtttattgctatgtgaaattttgtgtgaaattctgtaaaattctatattaatacaaaaaaaaaaaaact

SEQ ID NO: 203410 - DNA, 1128 bp, Cannabis indica
tgtttggtaggaaagagagagaaagatggatggagagtaaaattgatggagatgataattgttcttctttgtattgtttggtgttagttgtaacgtcttgtctcacaggggcaccacgtgtgtgcttttacaaacttattttaatttaatttgttagcttaaaaaagtgaggtttaatttaaaattttaattaaaataaacataattgttattaaacataaaatcatcgttaagtatgggaatcccttatataaacctttacattatgttctaaaatttattttacaaaataagattacatttcaaaatactgccaaaagggtggatcctgtccactggtagccgtggcactgcggttgatatgtacactgctggaaaacctctaactcatggttgctttgctttaccctcctttacctgcaccacgaaccgcccgtgagttacagagactcggcaagaaaagctattaaatcacacacaatgtaaaatacaagtaataacatcttgatacaacatacatactcaccattcaacatatattcaacaatacataacaattaaacgtctacaagacgagacaatcccagtgcttcataaagcactcttaccactcgtcatccatgagctacgtatgtcactgtcgttgcctggtaaagcgaacgataagtaaaaccaatctacggtttcaaacgagtaattagggtattgaagactaatgttttatattatttcataataactaaagatataggcttccacattttatctaatatggagctagggtatgaaaaacttttattttttattatttcttaataatcaaaaacataagagcttatgtataactaaagagtattagacaatattgtctcacatggattaaatataaaaatattgagccatatataagaatatgggctactccactcataccagttagtcttaagatagaatcccataatatagaactcctaatcgcgaacaaaaataagcgagcaaatagaacttctaaccacgaacaaaaaccaccattttgagggagaatattaaataatattgtcacactaatattgagccacatataaaaatatgcgatactccacttataaccaattagttttgagatag

SEQ ID NO: 203411 - DNA, 752 bp, Cannabis indica
aaaataaaaaagtgggtgaacattttccgttcccgtttctgtttttctcagagaatgaattattctcgggaatcaaaaggaaagagagagtagggaaaaacctttgagacaagaggaacgagattctttgaggagccccctgctaagaccaccacctgaaaatccatggtagagactgttgagagagagagagagggttttggtggggttctttgaaaatgttggattgaaggagcaaagcaaccaaacaaagccggtctggtctttggtctgtgacactgtaagtgtcttatgtttatgtttgtgccatttacctggggaaggagccagaggaaagggcctctcatcaaatttgggttcgtcaggcaggcccaataattatatgaatttttttcacaaatacacaaaaataatataattatttttttgagaaatttaaagtaaaagcaattttttatatatatatttttacggataattttatatttttatttacatttttctaatttacatttctgtggaatgttttttacaggtattatttgttttatgagaaaaagtatattgctttcacgtttttactgtagcatcaaaatgatgaaaaagaaacactgtgttattgtaaaacaaatcatgttgctttcactagcaccaacatcaaaatgatatttttcaaaaacaactctttatttttgtaaaaaaatacaaataatccatacaaatgtaaagaaaaaattaaagaaatttttttt

SEQ ID NO: 203412 - DNA, 749 bp, Cannabis indica
gcccttgacacaagcctgatcagtgttactgcaaacctgatcacgctaaatatatacatataagtaagataatggtatatattacaaacaaatttaacacgcaaaatttttgaacatgtgagactgatcttaaataaagatgattttgttgaattagaagttcaaatcataaataacaaaaccattttgtttgatgcagcttagtagtattgcaagcatatggctcttggctcttttgctctccaccattgccactagcattctcgagcttcgatggagtggcgttagcatcgacgactggtggcgcaacgagcaattttgggtcattagtggtgtctctgcacatctttttgcagtcttccgaggccttctcaaagttatggctggaattaacaccaattttacaatgacaacaaaagcaacaaacaatgctgaatttggggagctctacctcttcaaatggactactctactaatcccaccaacaacccttataataataaacatggtgggaattgtagctggagtttctgatgctgttaacaatggctatgcttcatggggtcctatgttatgtaaactatttttcgccttttgggtcattctccatctctaccccttccttaaaggtttaatgggaagacaaacaggactcctactattgtgtgctttggtcaattctttggcttcatctctcaatgattggttcgaattgatcctttttgtcctaacaaactggaccagtactc

SEQ ID NO: 203413 - DNA, 507 bp, Cannabis indica
atacctggacgacaagaatgtcatggttattatctggcaccaatttgcctaccacaaaattctcgtcaaggttgtgtatgttgagattttctagttcaatatcagcataagcttcaataaattcaacaccgctgttgttgcagcaaatctcaggctcaccaagcgagtttcgaaccacttcaccggctagtggatagaaaggcaccaacacttcagccaaccctctcttcaagctactaataaaagactcagcagcattagtagaagcttgtggccccgaatctgatgccggattcttgtagcattggatagccacaaacttgagttgtgacggaattagaaggtcgagattagacactggcaaccaatgtttttggattagtgacgaaacaccaaggggtaccaccacctcttttttcattatcttcacttgaaataatgatttagctttatctcccaaacccatcttgcttacttttagattatttgttttaagttttgctcgtt

SEQ ID NO: 203414 - DNA, 532 bp, Cannabis indica
tgaattacaattataatgcataacatattaggtcaaaaccttcatattttactaatttcatccccaaattgatcgagcattgcttatcaacacgtatacttcatgtcttgcataattgattttgtttcgatattcaatcgaagaaagtaatatcgattttttattagctaagttaatctactaaattattataatattattttttatttatatattaatttttcttaatttttttcataatttataagttggccccttctaatttgtttctttatttctttttagctccatttataattaaagatatatattatcatcaaaattcacaagagaaaaacctaatacactagttaaataaaatattaaaatttatagaaatatatatatatttatatataatatttgagtggggttagtgagttccaaagttaaaaaaactctataacaaaaattcatcaataatatatatcttaccaagagtataagacatatttatcaccacaaaaaataaaatatttacagagacagtgac

SEQ ID NO: 203415 - DNA, 1565 bp, Cannabis indica
gtcagtgtcagtcagttgtcacttgggtttgggtttgaattaaaataaattccactaccaaaaaagggttatcacaagaactatgctccaaaaaaatcagagccgttcgtttcctcatttggaaaattcaatggtgattggctacaaatataagacaaaaacacaagaatcttttgtacccacccattatggaacctttccccttatggaaactcttttcttcaactacctaataaattcaaacaactcctcacttaatatgtttctttcttttttaatttttttttcttttgttaaaatatattaactacttttattcggacatgtctcatagaactcctctcattatcagtttcaactctattttaaaattttattgtatgaaatttaatttgctttttgatatgttcggtaagggatatgtgaataagggtgctcactatctaatttgaatcccccttattctttctttctaactctaaagatgtatttattgcgagtttaatatttcgtttggttagctttgattacgagtcagaagtattttttcaaaaaataagacattcattgatactagaaaattagacctcacggtcattataaaaaatagtgttaacctgttaagtatagaggaaggctctcgttacaaaagacagtgttaggtcattatagaggtctctcataaagtttttctacttttgtaagagaaaaatcacaaaagtttatcttttttatttttacttcaatataataaattattttattttaattttttttatggtattttaatatattttatttttacacaattattttaaaaagttattaataaaatatttgtaccacaatgattgattatttctatacatatttagtaaaatactattaattgagttaaatatatatatatatatatatatgtataatgactaaactttatctagaatgctcatttattggaggtgctgtaaatatattaacatatgtacatataagctccaaaattttatattgttttcatctacctatacccttctaaagaataataaggtttggtaacacctacgccagaaaagtttcaatttttttaacatacttttcatatgaaacaagtctgaattaacataataataataataataataataataataataataataataataaagttaatttaaatttttatttgtgaattttgacatatactaaattatgaactttttagatcgttaaaaatttttcttgaattatagagattattggatttaagaacttttgtccaattttactaaaaaaagtctgatgtggataaaaatttcaagagtataatttggtacatgctaaacttcaggagacgatttggtagatattaaaatttaggagcacaatttagtatatgaattatcgttacattagcataattaatgaaattagataaaaatctttaaatttaacaaattttaatattttataaaaaaatttaatgatcaattcagaagcataatttaatatatgtgaaggagcaaaaattttaggtggcgtttgctaacacttttattttt

SEQ ID NO: 203416 - DNA, 546 bp, Cannabis indica
ttttaattattatttgttagattagacttttgtttaaataaataatataaatatatttttctatcattttatttttaataataaattttgaatattttaaatttaataaatattagattagagttttgtttaaattaaataatataaatattttttttataattttattttcatttagttatattcgtggggctgaattaataatactactaagctctaaacaatgccacataggcagtttttcggccacatgggcaaaactcgggaaaatagttcaaaaggagagttttgcaaagaaaaagtttaggggtttaagatttgaagtggtaatagttaaagggggaaaagcatatatagtttttatagtttggatattatctaaattagtccgcatcataaatattttttatttcaaaaaatattatgtggccatatttcgtttgagtgatagaatagaattgcagatttagtaacatcagatatagaattacgaacaaaaatgttgatttgttaaaaaatgatgaaatgaaaaggtgtttatatata

SEQ ID NO: 203417 - DNA, 506 bp, Cannabis indica
taatgttgcctataaatgcatctcaagaatcctagcactccggctaagaagtcttctcccagccattatctccccagcccaaacaacgtttgttaaaggtcgcctaatagctgagaacacgactgttgcgaaggaaatagttcactcgatgaggaaaaaacgagggaagaaaggcttcatgatgattaaacttgatatggagaaggcatatgataagatgagctagaatttcatcttggaagtgctggaaataatgaaattcgacataaccttcatcaagtgggtaaaattgtgcattgaggttcaacgaatggggcttctgcttaatggcactgttcagggagtcatctcgccatcctgcggtctgcgacaaggcgacccgttatctcctgatcatctcttcatcatagcagcggatgttctgtctaggttactaatggcaaagaatgaggcgggtaagattgcaggcttcaaattcacaagtggggggggggggggcagctatt

SEQ ID NO: 203418 - DNA, 564 bp, Cannabis indica
gggatttgaattgattttgtggtataattaatttatattctacactgttatggcaatgttttaaaattgagttttgattttgtactgataaattatgttttttttttgaatgagataaattagttttttgttttgctgaaatttagttaaaaaggaagaataattgaggttttaatttgattttaaataatttaggtttttaaagtctttcatttatttaaatttttattttgttattttttttaaattttaaaattacacttattttcttttatggtagtattactctcttatacatcaatcttcttttaaacctacaatctatccttgaaaaattgatgttactaaacaattaaatatttttttttagagttagttgggacaatcaatcttcctttaaacttacaatctatcattgaaaaattacacctattttcttttatggtagtctcatatatatatatatatatatatatatatattattttcctcaaagacaaatgatagaaaaattagaaagttgggacaataaattcttatctcgtgctggtaaagaaattctgc

SEQ ID NO: 203419 - DNA, 775 bp, Cannabis indica
ttttcaatgaagtttgcagttaaaaaagtaaaaagtctagtgatgttattattaaaggtccacacagtggttaattaatacggtagagtaacaaaaatagtataaatttatcatcacgaagtatgcggtaccagtgtagaaaagaagcctatcctcgagatcaatatagaaaagcaccccatagtatactccagagatgaaaaaaaattaaatcaacttaatttataaagactaccgttactcatacaagcataagataaatatttccttaatttatttaatattattttataactgaaatcatcaaccaaaaactaaaaaaaaaaaaggtgacatagtgtttagtgctactttgcagagtatgtcaacataataagatatgatcacgtaaagtgattcgtaggcattttatttaagaacaaagatgaaattgattgaagtagggactatgtgatcagtattgacaaatcgatgtataccatgtatatagtatttaattttttttttaaaaaaaaaacatatagagagtattagggcacgctaatgatcattgcataccttacattatgagtttgattttggactttaaaaactgccgacaagccactgcctgcattattctccagaggagatcattaaccaaaaattattacttcctcgttttttctttcttctgcttttaaaatgataatacattaaaaaattaaatttgaaaacaaaaaaccaaaattaatttttgttttagttttcgattttacttattactttatcttat

SEQ ID NO: 203420 - DNA, 1538 bp, Cannabis indica
aggaacgtgatttctggagtggctcgtcattttggtctgggcgccgcacgaagaagaagggtttttgggttggtggtttaatcgccagtgagggagagatctggggttcggattgaacttcgattggggtttcagccgcacgagagggtgagggatcgagagatgtagctgggtttcactttcagccgcatgaagacggtgagggtttctagcttttagggttttcaaaataaggggggagaaagtttctatttataccctttttttcatttttttttttaaaaaaaaagtgtctataggtgtcggttccgagaccaaatgatcttatttagtgtcggttatgaactgacgcttttactcaatctatctttatatttttttaaaaataaatttttggtctcggctatacttttagtgtcggtttactaacagacattgaaaatcattataggtgtcagttataaaccgagaacaaagagttagagtgatctttagtgtcggtttttttaaaaaatatcccacgaactgacactaaaagtctatcttgtagtagtgagttaaagtaaaagcagttgcatgctacttccaacctattagataaaatatataaaatgtggtgaatatccatatttcataacaattgtaaggatttaagatccaccataattgctatcctactcctataacatagcagttaatcacattgtaaaagggacgacctattttctactttagaggatattctatcaaattgtatttgtaattatagaacatcaaaaataaaatagatttgtagactatccagattttaattacaaaatcacttaaaaaaatccatttctctttttataaagatagtatttattaagcattaaataccaaatatatacatatattagtatttattaactctcattttaatgaaattttaagttaataaaaacgaatgccacccctaaataatgacaacataattttggaaaaattacttccaatttttcattgcatacactttgcactttccaacaaccactagaaaatatttatgtgatattcttttaataataataaaaaaaaaaaaaggaagaaaaacaacaaaagaaaagaaactactttagaatcaaaggcaaaacaactacaatgaaagaaacaatttggagtagtagacgcaccacgagaatataacggctcaaccccacccccaccaacttaagtagcactgtatatataattaatatggatctaattttatataaatatatatatatgcatatttatatgctgaatgacaattgtaggtcaaaaacagcttagaagatatattaatattagatagctaaataattatttaattacacatcatgtattttaatggatcattaagaaggtgaactagttaactagctaatcaatattgaacaattagatcactcaactcattcctcaacctaagattatgctttcattaattattaattaatatcactcatactaatcatggtatacttgtataaatgttccattaatttgagctcttg

SEQ ID NO: 203421 - DNA, 1910 bp, Cannabis indica
tgagtgaggttcctctgcatgaatctccatttgagtttaattagtggttatttccccaacaggggcagctatggtgttatcttcggtttcctcagcatcaagatggatctcctagttcaaatccatcacaagaaagatgaaaagaaaagaaattccaagcaattaaacacccacgatccaaatgacaaaatgggtatcggggaagacctcccttaaaatttcttggagaggtccctgctggatttgttgctttcagaaatctatttttcacgagcaactcaacgcgacaggtagggagcctaggggaaagctaccataacaaagtttaaagcagaagtccagaaaataaaattccctcagagtcctagtaactcctaatgggtatgaagaaaacaaactggcctaatattcgtttaaaattttatcttatttgatttaaccctaattccaaagtcgtacaagcatggaaatatttatagaaatgtaaatagccctactcaaaccatccaaacagaatcagcacttccagggcacacaaaaattttcacataaccctactctagaaacaaaattctatgagcaatactttgccactcatacatgcaaatgtcctagacctagcttgaactaagaatttctatcttagatactaaatagcaaatactcaacaaagcgtcagggtacttacttattgtacgagttgggagagtgaggttgttgtggtaatttatccaagaatgcttgaaccagtcaattattcaatcgtagccagcctgagcgttgaagtcttcgtcaatttgggggtggaacaactcgaggtccaatcactctacttctggaaaacaggctgaatggaggtttaaaaagatttggatcaagtagtcgaagacttctttcattcactcttaagacgacgacgaaggaaatttttttataggatacgagaagttctagtctggagttcaaaaataggagactttgaaaatctaaagtgatgaaaaagaagaaatgaagtaggcaaatcaatttataccccaacccgattccttataatttgaaatagacagtttggatttcttcttctaaaagtacacttcgatttgacagatagaaagttgcaaagatggcgttttaatttcaccattggagtttattattcatcattgtattcctcgagtattgcatgcattaaaggagggctattttaaattgccctgccttcatcatatctcctcctaagaaatgcgctcccaatgcacgcatgttgtcaacgaacaaattaaaagcgtcttatgcgtgccacgcaagcaatgccttcaacttatggtatgttatttgatgacaagtcatgggatgcatccgcaactccagcagttatcacatgtcaagaattcatccccaaggaacgaatgagcactacaagcacccagatctcagagagtctgaaagcttgggagtaaatgttatccatgtttctgagcatgtaatacgtggcttattatggaagggattagcctaataataccatagttaaattcctacactgcgatcctatcacagagaagcctcctgaaaccaagaaaaggttgagattgaagagtacacggaagtctacctggctttgccttggcttctcggacgcagatggcgcattgcctctacaaggcccagaggtgtctaaaacatggaagcttgcccaactaatacccaaacgggtactcaaagggcctaatgtgaatgtcaaccaccttggagtgtcgcggatgtctaccttttatgcacgccaaatcaccaagtgacagttatattttttctgaggaagatcaaattttgtctcctacatccaagctagatagtgtgcacacctcagcccccttcttaacagacagatattacagacctctattttt

SEQ ID NO: 203422 - DNA, 1032 bp, Cannabis indica
ttggtttaactcattcaaataatttttctgtacattttgagtgcttctggaaatgtgaggtccaccagaaatagttgctacataaccatctaagattagcaaagcagctctttgagggtacggatttatgggactgggggctacagctaatgctgatgttggagtgttctatgccccctgaagggcttgtgcgtttggagcttgtattccaagagcttgtggaggatttactccctgaggaggatttatggatccatgctgtcctaaaatgaaaagctgtctgtgtgcaactgcctgtccagaatatataactggaatacttacccaattggataagtgtccattccgttgtagttcctcaatttcatcctttagatagtcacatttatttatggtgtgcccaatatcaccatgatatttgcacttcttgttttgatctcttctttgttttctgcccttgtacattggcgaaggcttcttgtaataaaccatgttacaagttgccttgtacacattctctcgagtatctataagacttgtgtactcaatgtatctttattcttgagcttttccttcttcacagaatcatttcgatttggacactttgaactcctttcactctgtgactaggttatattggactctggaacttctgcttttaggttcgtgtctaggagcggcactgtatctagtttgtataactccaaatatggaaaaactagcctgtgcagctcgctgcacggaagtacttggttcatataccgtaggagtggtaaaagtagttggtggggggaaaattgatagagttgtcatctacgaagttgttgcatttggtatattggtagaaggtgttgggagtactccatatgcttgagcataagcttcttctaaattttgtaatcatttgaaagtggcctatactcacttgaggttgccacacttcaaattttgaagatgaaccttcattcaataggttctcatgcattagattttcctacagaataaatgatagacacattgagtatttaataa

SEQ ID NO: 203423 - DNA, 694 bp, Cannabis indica
tttttgttgaacattctaagccgatgcttcaaccttaagcacttaatcagcagccccctcagccccttgctacgaatcggtttagtccaacgctccataaccacatgcttgtaatctttatgatgaacccagaagttaaaaaacttaaagggcttaatcccaatgttgccagccttagcagaagagacaacacaagtgcagtgatccgacaccgtttcccaactcatgttagcactagaatcggtaaacatgtccaaccattcttcattttttagcacatgatctgttctggaataaatcctatcattaacctcatggttattagaccaggtaaaaaaagaacctgatctttgaagtgtatcagcaagccccaaagctaaccagttggttgcctcttcaacttcatttttggtaaccgggttacctccctttctatccccaaactcaaaaacagcattaaagtctcccattatgagccaaggttttaccgggaattgaagaccagccaaaccattccaaagacacttcctttcttctgtaaaattagagccatacacaaaagttacacaaaactctttattaagactgagcatcttcactagacagtgaacatattggttagattcctccaaaatgtccactttaacaaacttattcctccaaatgacaagaatcctgccttcaatcacattac

SEQ ID NO: 203424 - DNA, 1140 bp, Cannabis indica
ttcaatatatgtatttttgttacgctttaatattagtataactgattagaattttagaggctgaattgtcaaattcttattggctttaggtgaggtatcctacagtccttaaggtgtcaaaacagctacgagagacttagtattaactataaatagagggctgataacgggggaatgattttgtaacaaagtgagtaagagattactcagggagataccaactatctcgaaagtttggaaatttgtaatttctttttgatatcaataaaatgctattgcctatgttctaattcttacaagaactgaactagaacattagtgtatcaaatggtatcagagcagactatgggaggacagaaaagaaaccaaagaaagcaggaaaaccgaccaagaaaggtcgaaggatttgccgaaaaaatagaagactcttgatgccatgattggcacaatttaggatgaagtgagggaattctggtatgaagtgtgctggtttcggaaaaaattgatggcttacttggatatattcttgagaaacagggaaagagagtggatcagccaagacaaagaacttagttaagaccaattttcgagtttctgagaaatcgggaataatggcaaacagtccaaaaactggaaattcatcagcttgtaacgatatggaagatgagtttaagaatgtgggaggtcgagtagcttacaatcttgttactcaaatctacaaatgttggctctcaaccgctgaatccaagcaagggaggtaaagtgactccaaatattcaaccgaaaattctggcgaagagcaacaacaacgtaaaggtacttcgacaatagtgactttggaggctctcgtttcttagagaagggaactaatcatgcgagagaccttgttcgcaagagcaaacagagggcctttgcaagaaaccaaagccaaactcttgcgcaacaatcgcaactcagagatgactatgagcaaccgcctgaagagaagaaggtgccatcggacgacgacgacgatccaccatggtcatttccttgggctgttgatcacagtgagagagatgtcgcatgatgaaggtgatcgaacagaaggaaatcttctgggtattttgttttcaaaatcggtggactaagaaagaggtt

SEQ ID NO: 203425 - DNA, 1486 bp, Cannabis indica
aagaaaaaaaaaaagaaaacaaccctgcgacgttcataatagagccaataaaaaaggactatggattagctctatatatatgtatacacatatattatgaatatgaaggaagagcaaatagatgggttagtatcacattgagaattccaacatggatgcaccatactggaaatcatgataattgaaattagattcaatctgagaattataatgagttttcactttctgagcactgtagtaaaaacaagtggggttttatgctatttacattgaaagtgtaataagaacaagtgtgagggtcaacatcttggggttggagattctccctcacctatattcaattcaaggtacttacaaaaagtggggcatgcatgagttgcttaaccaatgtcacccactaactctacagttccatgcattgtacacaacaacactcactaaccagtcacaactacaggacaccctcttatcatctcatctcatgctcatcatcatacttgttacaacttcatcaatatataaacatttatcaacttaagtactcctaatgtattgtaattcactctgagaaattaaataatataaatagataaattttatataactaaattgtaaattcttgatgaaaaaaattgatgtaaaatgtaacaaaataatattgttactttttccacgattgaagtccttagttttagaaatagcagcaactaagtaattgttttctaaaatcaaaatttaaactttaatggaaaaagttgatattatacatttgttttttaaaaaaaacattttagacatatgtgtgtagaattcaaacattttcaccccagaaaaaatatatagtaataaatatcaatgtgaaaatgaaatgtgagaagagagtggattttatattgattgctccatttgaaaattatgatattctttctgcaatttagttcttggaagcattcatttatatatatatcaaatgaaaatttaaaattaataataatttataattagtaaataaatatataaatctgacactttatttttatatttatattcaaacatggcagcatcttcactttaaaaaattgctctgccctctttccctcacttagctcttctccccataaccatctaatatctccattacacaacaacacacaaagccatatcatcatatgagataatggccattgcaacaactactaatcttatagatgaggactacatagacatggaaataacctcttcatcttcatcttcttctaacttgtttaaaaatgcaattaacaactctccaccgctaccaccatgtccatcacctcaacaaagcaacaaagagtttgagtttcaaatgtcctcatcacattcttatttcccagctgatgagcttttctacaaaggaaaactcctccctcttcatctccctcctcgtttaaaaatggttcaaaagattatccaaagctcaaatacacaacaacaagaagaagaacaa

SEQ ID NO: 203426 - DNA, 685 bp, Cannabis indica
gatcatggtaaaacaaattccaatagggtgtagactccaggtaccccatgatcgagaaatttaccttttgcttgctgccacgtcacgaaagctgagaccatacttccaagcccacgccataagattactcacaaatcagcccttgggccaggtgcttcaaaagctagagtcctcaggtagattattaaagtgggccatggaacttatccaatttgatatccagtacttattgcgggtatctataaaaggataggctcttgctgactttatagtggagtgtccaagcttaaatgacctcccagaagaaccagtccctgaactgcctacttggaaggtctacgtggatggagcatcaaacaagaagggggttggagctggggtagtcttaatctctccacaagggcatcaattctaaagtgctttgcattttgggtttctaaccttaaacaacaaagcagaacacgaggccatgttagcaagtttataattggctaaggaagtaagagcccaacaggttaatgtgtacagtgattcccagctggtggtgtatcaaatctctggtgaatacaagacgaagggtgaacggatggctgcatacgtcttgatgtgctgggaactattgcaaggttttaaaagttacaacgtccgccaggttccaagagaacaaaattcgtacatggacatg

SEQ ID NO: 203427 - DNA, 827 bp, Cannabis indica
aatgaaaactaagacgtccatctctggtaatgacgacaactcgaatgattttctcggcgacttattctgatgatgataataactccagtgactttttttttcacttttagataatgatggaagattttgtgattttttctgcgacaatgctaactaggggcattcatccaattcaatccgcactattgtgctcttagcgcatctaatctacactaaatacagatttcatattttgaatccaatccaatctacatattaactcaaatctaatccacaaaagtacaaattggatgagatattttgaattggttactttttaatattgaattatttaatatttattaatttttttttcacataactaacaacaaaataaaataaattattgttattttatgtctccaacaataaattaaacaaataaaacaaaaaaaaataataacaaatacaaaggaagaataaaaaatattgtatgtatgaagaaatatttatggatatatccaattgatatactgtgttttgaaatatatttatatcatatgtattagatttttaattgctactgtatacattaaaatattaattatatatatttaaaatatatatataaataatatggattggattggatcgactaattttatatgttaatcaacattaaatctataagtatagaatttagattttttaatctaatttaatccaatccaatcagtacaagtgcatatattcactctttgtgaattgaattgaattaaatcgtacggatttgattggattgaacattttattgacacccctaatgccaactccaacaaatttctgat

SEQ ID NO: 203428 - DNA, 1349 bp, Cannabis indica
aatggctatggaatttttaattttgtagatgagagaaattacattgagaaagcacaagagggaaccagccaatgaacctgcaactgcaaaaagtgccaaaaaccgaaagtcgaaaatcacctgttcaaacaacaaaatagtaaagaataatctagggtttgtttggtacgccatattagactgtattgtattttatagtattacattgaattacatttgatataatattttttatgtaaaattataggccgttttgacttttatgtgtgtataaatatgtaatattttaatattatgatatttacaacccatttgctatttcctagttttaatttccaaagattaaagctttaactaacataacaatcaactagattaaaacaacttcaaaaatcaccaaacccatagagtattatgaaattttttattagcaaaacaacttcctaacaaaatttattaacaaaataatcatgtttggttgcactaatacaaccataaaatgaccattacgatcgttttgcaaccataaatttacactttcagtgaaattcaatgcagttattttgctaatttaacattttcatcacaaatttcctgaaatctgataatttcatacaatttctaccacaattaagattaacccttcactacaaaaccccaaaagaactcaactttacacaagtgattaaaaaattaatcaaactaaccctttcaatgctggattcagttgctctaacaaaccgaaaaagagggttagccgcggagttggggaacgcgtaattgaagccggaattaggctgttttgttgaggaggagtgtgaagaagtagaggagacatgaatggggtcaacatgagttggacttgagtttgtgtttgaggttgttgattttgattcaggggaagaagaagggctaagagaagaagctgtaatgggtgaaaaggtggcaatgggggagaagttttttctggggttcttgaaaagaccaccatggatgatggtgagtggtcttggagttgtggagatggaagtgaacagagccattggaaaaaaaaaagtaaaagatgggatttttttcagaagagagtgtagatatttttatgtattcaatactcattttggtgttgttttgctactcaattgaccggtaataccggtaatttgtaaaaaagacaaaaggtttacacgtgcgtatggaatcactattcatttcacacgtgctaccaatgtttttcctacctaaatttgatcagtcaagttctatatcaatttgaacttttgttcttaaaaaaaaaaagaagagttctatatgaaaaaagagaaagtgccaaactcaaatttggaattttc

SEQ ID NO: 203429 - DNA, 672 bp, Cannabis indica
gccaaattttcattataatatgtatataattacttatgcaatggaattaagtacccctctctcccatattgtttgaaaaaatcattactcaataaatgaacatttacttagttttaataacaataacatttgctaatgaaacttctttgttctgatttgcaaagatggtacagactgaaatagaaagagaaaattgcaggccctcatttcagggtaatttgtctttgtcttaattttaatttaatttgtagttgaattaagctatatattatatgtaaggtttgtttttttataagatgtatagcataatgtactccaaaaatttgttgcataaaattataagtttggtgtcgttattatgatttttgatgacaattggccagacatgcgtacaattcaagcctcctctgcatactgtaactattcattaataaccttctttacaccaaaatataattgataataattaataacaaagtaaagaaagggtcccttctattattaaaattgtttattgtttttattttatttttcaactttgattgattttaaacttgtcttttaggtaacggacagtccaagtttgaactattcaactaaattaataagagactaaaaatggtgataacattattgcaatatatgaatgatataggtcttctataatcaaaa

SEQ ID NO: 203430 - DNA, 1056 bp, Cannabis indica
acataacctttaggaatggacatatagacatgtccttttaaatcactatgtaaaaaagtgttttttatgtccatttggtgtagattccagttgtttatggtagtaagtgcaaggaagagttttagggtattaaattttgcaactgatgttaaggtttcaacatagtcaatgccatgctgctggttataacctttcgtaactaaaggagccttatatctttcaacttcacctttggagttctatttaattttgtattcccatttgtttccaatgacatggcagctaggtggaaaggaaactattttccatatgttgttttgtttgagggcaaggaactcattgtccatagcttttagccattgagaaattattttggcttgagtataggaggtaggttcgagtactgtgtatgcttgaagaataacatttctaaagtttttgtgtaatctgtcatagggaccctagttccaagcataggttggccagcctagggacatagtccccatggccggccagaccccatgaaagccacccatggtcggccaggcttcaaacaaagcctccttggccggctagcatgtgcatggatcaaaacatgtgatttttcaagaactcaaacatgttcttcgtattcttcgtgttctttgtgactcaaagagccaagaatcacaaagaaagtcagattcagttctttttcatctataaatcacacattgtttatcctaaggatatcatgcagatcaaaataccgaatggactacaatataccgtaagaatcgaagcatgtttaaaacaagaaataatgttcatgcattcatggaaaaatcaattaaatcaagtgaaagagggggaatagaaagcttacccgcaacaagattccaatgaagatgaagatgggaagattagattgttaaaataaagcacaaatcccaaggagaatggagcctataggttaggccacctagagagaaggaggagctttttcaagagccaaattctagtgcgataaagtaaacgtaaaaaataaaagtgaaaaaaggggtttccccccaaaac

SEQ ID NO: 203431 - DNA, 960 bp, Cannabis indica
agaggaggccacacaacctcgtggggatgtggatccaaaagttgattaggcagagatgcttgaggttgaccagggggtcgagggttctaattccaaatttgaagtggaggaggttgcgcctattaggagaaggacttacagaacttgttctatccttcccaactatcctctgggtggatatgatgctgactaagagccattgaacaagctaggtcagccttcggtgatggatctaggtcttgtgttgatctagtcttctgagccttagattctggatgctagatcaaaaggagcggttcctagggtgattggcagcttaatcattaatttcaatgcaatcgtatccctagtgaacgcatagatactcgagactacaggttgcaaattcttttcctgtaaccctatttgctaaaaggcttggaagttgagtaggttagctgaactcccattgtccactaaaatttggtggacattgtctcctccaatattagcaacgatgatgagtgcgtctgcgtgtgggtgatgaacccacctggcgtcactctccatgaaggttatgtggtcgcattctttcttgaaaagcttttcaggtcactcacttaaattgttcacgttggtgagcggtttctcttttgctttcttagcatacagttcttgtcatttgttagagtctcccgcaatatggggtcctccgatgattgtccagatattgggaggagttctcaaaccactcgcgttgtttgtatcgtcattatcatctgcttggggatgattttcaccatgtttcttctatttgccgaattttcctcgtctcattagttcttcgatctcatcatgcaagaactagcattccagagtggtatggtggatgtccttttgatatttgcagaactttttgggatcccttttgtcgcggttgcctctaatcgggggaggttttctaaagactccattcttctc

SEQ ID NO: 203432 - DNA, 1411 bp, Cannabis indica
cttattcctcaaattctaacacatagacttaaaattttcattaacggtattggtatttttatagcttaaaataatttattttggttctaaagtaacataaaaagtaacacataaaactttaataaaaaaaaaaaaaagtaacacataaatgttaatactgctacaaagaatatttatatatttgattattctcattcattgtaaagtttttaatttaatttattattttaatctaaattgtaatattacaataactattatttttattgttttttttcttttaccttttaatttattttgatttttgagaattatgttttaaatttgttatttttatacggtgttaatacgaatttcaaattttataaaagtttttgttactgttaaactaattaattatatagtatatgttgattaatttttttaatttactaattattggtaatttaagtttatttggattattttttttatgtttgtatatgttatgttatagtatagtactttttgttttgttttatttgttttacttgatgactatttatggatgttttcaaggtcacttttggagttacttacatgagataagtttttatctttctttgctttctttatgattgtttcctatagttagtttacttgatgttacaagatattttgtaagaactcattttttgtttggttatttttgtaggaaaaatttcaatcattcaagcagagaacagttattttgatggaaaggatagattggtctctcttgtttgttggagatctatttatttcaagagtctgattgtttagttttgatctcagcttattctaagtgtttcgcttgatataatgatttagacgctttcttagttgattaatttggctagtttactttctaattttcttgaggcatctttagttcatgtctccgttcataaattagttgtgcatacacttaggatggattgtgaacgagcttggattgatagtttcttatcatttttctattgatgtatcaaaatctgattattattaataagagtttaatttaaaaaaaaatagtaatactgcttattctgattttgatttttgcaagtaaataacttattatagttttgattcattaattcgattgagagtaaattcgattcgaagtcaatcaattcttaatcattacgattatatataaataatattatgatatttttagttagaaatatactcaaagtggcattctgaagtttaggtgtttggaactaatatggcccatttgaaagtatgttagtggtatttttggggtaagttgaaaaataccttaccaatgatgtatattaacggtttctatatattgttaactaagaacaactaaattaaagtatatatatctataatctataatctataactatataaaaaggag

SEQ ID NO: 203433 - DNA, 1328 bp, Cannabis indica
aaaataatataaaaaatatacaatgtaaaagatgatacatttttgtatttttgttcctctcccacttgttttactagtttaatagttaatcactactggttacacacctaattattcctttaattatcttttctattttcattttatttttgaaaaataaagtaataagaatagttggaaatgactcggcttccttctccatttaatttgtgtttcttatatcaaaagaaagaaatttattagtgctttactttttaggagtacaaatcatgagttgaccataccatatcaatatgaatgttatagccatgccaatggatccaaatatttttttaagaaactaatttaatataatcttttcattattataactattaatgccatggtaactttaatcattgcaaccctaaaaacacaaaaataaatatagtcctaaaagataaggtaattctatagaatacttgaaaaagagttattttagtacaatatttttctatttcgatatttaagagagatttttagtttaagagagatttttgtttatgataatgtatattgtatttttataatcttagaaaattctaaatcatttttattttttaaggagaaaaataaagttcaaatattttattgtaaaagtaactgttttttcttattctcgtaataattgtttgaatcttatttttaatattttaaattatttaaaattttattaaatttataaataatcttaaataattacaacgtacacgattataaaaaaaaaataacaaaactctattagatgccaaaacatataatctaatgacacactaaaaatttatatatagtgtaattttttttacaaaatgctccaatcgatccctaaaatctattctatttttatgagagtctacagaatctcactaataacagtagatcgacgataatttttttactttttaaaaattaaatattttatatataaagtaaatatttttattatattaataaaataacattataataaagtatataaattttagtataatcttaagtattttagttagaattacaaaaaaaaaaaaaattagtactaaaatagtagtcttttgttggcctaagaatacaccccaagccactttttttaaggttaatatagatattttcaagtgctgtatatttgtataatgaatataatataaccctaaattcctactacaaataataaaaaattaatttatatatattaaaaaaaagaagtacatttatttatacttcttctgtcagattactcccataactaacccattcttcccacctgcgttactcagaagagccttttagct

SEQ ID NO: 203434 - DNA, 801 bp, Cannabis indica
gtataatgtattgttagcagagttttcctgtatacgaaaaatgggtgaatgtcaatggcagaatactgatatgtttgtagatttatttataagtacgaacttgtgttgtgtaatgtgtatctctagctcactagtcactgtggcttactagttctatatttcctccagtgtcatctctcccagttaattagaatttttaccttctaaaaattttggtatgtgctaaattatgttccggttattaatttttttttttttcgagattgttagatttaaagatttctgttaaagtttaaagataatttttaacgacttgaaaagtttaaaaaaaattgtttggtacatgttaaaatttagggaataaaagttttaattagtttaaatttatcgcccaattttttattggcatttggaaagtgaaaaacaaacagatttactcgtagacaaccactttttatttgttagaaattgttcaaatttcacgaaatggcaatattccatcccacaaaacaaatgtaaaagtggatatcttttttagatcaaacttttatattattctatacatttttatttgcatttcgagaatatattttacgtggtttctctatattttattttattttatttaagtattatattttaaaatgtttttattaagtgaaataatagaacataattgatagaaaggaagaaaataattaagaaatatatatttaatttggagagagaatgaaacaaaaataattaaaaaaagaatatttagagatgttatatgtagtgttaagcaaaaaatttacattt

SEQ ID NO: 203435 - DNA, 747 bp, Cannabis indica
cttgataatataaactataatacaaaccatttcatatgcaatgtacattttgtattgtaatatcgtaacatatacattaaatttttatggacaacataataaaggtgcaaattaatgacttatctctttatttattgtaccaaaatacaaactaagccaaccattatttatttttaaactataaaagaaaagagctagccacacacaaaactaattaaacacaattttatatgcattcttatatgattttaatatgcattaatctaacatagaagagtgattttaatatgcattaaacacaataagttttacttgagctttcccaaagtttgggtatattatttgtagaatgaacctaataagtatagcttaaattggtgtagcttgaaaccttaatgtgatggacccatttggtagattttccatattccaaactactccaaactctctatgcatgaccttccattgttttgtgttcttctagctaccacagctcaaccgctatgatgttatttttttggccagtgacatatatagaagggttaaagtacttgtattcaacttcaaccacaccataactcttaaattcttctttgacttcggaagagatagatttgagaaggcccgtgagctcataataaagactagttctatctctttccccataatactatgttcaacccataatagttgcaaacttgtgggtttttttcacgtaaccttatatatttttttattaaacttaca

SEQ ID NO: 203436 - DNA, 540 bp, Cannabis indica
tactctgaataaatgagcatttgttttttttttttgttccctttactttgtcctctctctagattccttttcttctatcttctgaattttcttattctaaagtaactatccgtacaaataatttattaatttattccttatattttctaattataactttttataataattttaataacaaagacttagttaagcgaaaaacgtaacaaagactcaattttcaaaattgatattttgcttattttaaaaaaaaatttgatcttttattttatttcttaaaaatattcttaaaaaaattatttcttatctgtacacaagcttcatgaaaaatccaacatttttttttttcaaaaggaaaaatccaagtttatgattgtaaatttacagtatttgttgttgtaaaattaattttgctgaatcttttttatatagtttaagactatttacagagcatatcaacattaaatttgacaaagtatttgaaaactgtttcttcaaaaaagagactaaatttatcttaaaaagagagagagagagaga

SEQ ID NO: 203437 - DNA, 1759 bp, Cannabis indica
ttgcatagaagttgaacatgctttgtagagtttctttgtccatggttatctatgcttcttcaatttcaggatgttaaggatctgtgattagaagttcttcataattagttatttatggcactttggtcttgttgttttgtagttgctctactattttctcagctaccaattttgcatagtcaatgaagttaaacattgtttcgccatcttccaacattgtctctttaaaggtttgttgcttactagttgattcttctgttggtagtgcattatcaatcattagtattgttataagtacttgtgtaactaatgagttgctcattgcaaagaatgaggggttattgttgttgtattgatgaccatgttcacacacaatggataccttgtgaagtcaaaatctttaaattttagttgtatgcagaagaataggcttggatcgtcttttatcctcaacgtttggtaaccttctttcacttggtattgagttgcagtcgagtattttcttagttgcctatcagcactcatttcaacttgtgtataagtttttcatatttgcaatcacttgagatgaattttccattagcttcataatttagataattcattctttgattaaactgcccattaaactgtatgagaagtagaattgcttttgtttcctaaaattttaaaaattcaattatggtaagccaactatgaaaaaactgtaaagaaattaaaacgcaacaagggcattgaaaataatacaagtattgttaggaatatattttacaaccttaaagtaactaataacatccacttggtaatataaacaaacttaccacaatacagttttctctatatgagtcgtgtattgtcaatcctaagtcgtgattttttatatgatattattttagtaacacaactattaggcaactcataatgtatgagtaactatgtatatgaaaattgtgcttggacatcataaagaaaaaatttaacaaagtattattgcactaatgaacaatgagttattttaagaatattttgtgaagaaacaattgtaagaacactgtcaattaatgtgaacttaaccaatgtgaaaatatgaacaaactggccatattagaattatattttatgagagcattgtgttggattgtctgtatgaaatacctacaaatatgactaaaatcggtgtagccttatcaatgtgttattatcgatacttcaattatcaaagcttcaataaaatcgacagctgattgtaatgcaactacaaagaaaaacaaaaaaaaaatatcaaaataactttgctagatcatgacatgagatgaatgtgaatttagtctatttgtcacgattggaattgaataaattcctattgaaattctaaaaaaataacgttaatgtaacaagtagaatattagctactccattaatacatggtttttggattacacttgatttagattgatttggaacttgatatctatttattaaatttctacatcttatgaatatgtatactgaatttaggagaatacgttttatggaatttgaaagatttttcggggttgagtttatatttcaaactaaattttttttgcagaatatttctttaatcgataatgattgattttgggtttgattcttctcatatgaatttgctggaattaatagtatttcttcacttgtcggcattgcttcattgttgtcgaagtccttccatcgcgggttggcttcgtttctctagtgcgagggaatatgcagctacaag

SEQ ID NO: 203438 - DNA, 966 bp, Cannabis indica
atgtgttagtttgaacacccaacactttagagtatattctattcttagtatatacaaaaattattataaactgttttttgatacgtataacgatgtatacagtatcgttatagcggacttaattaattttcttaagaaaaaaattgagtaatctatagtataagaaataagatttaaatagtatgagaattaaatcatttaactcgtttttctaattctaatcctagtcaggtggttgtgtatgagatttctattagattatttgtaggctattattttagctgattgctagtaataaaattgtatgatttactaaaaaaaaattattcaaattttaaaaaataattgaaagataatataccaattttctcacagcacaatcttcacgagcctctttatttaataggacatttcatatttgaaaaatcatgatgagattctcctttctcaattcaaaccaaatcgatggacagtacatggtttttttattcgagaataatcgatggacattatatgggtttttaattaattctcatattattttattttaagaatttctcatattattcacttggcgatttttttaagctcatttattatttattaataattatttcaatcctgcacgatcttgatatggggcggtacgtacgtatgtgaattaaatgggccgaatggtcaaaatgttgaatagtatttcatgaagaatacacaaaaaagggggaaattattatattttaataattaacactaatttcattgttgaaattgaaataattgattacttagttatattattattttatttgtcaattttcatatagaaaaattaatttacaatattgtaaataatctaaaaattatatataacagactaaaaagttcaaaagtttaacaatacatccatcatgatttggaggacaaaatttctaaatagccttaataaaatattaaaaataaacaaaa

SEQ ID NO: 203439 - DNA, 1834 bp, Cannabis indica
gttttgtaaagtatttgaggatagtgctacgaatataattaatataatccatcaataaacaagcagttagcacaaataactttctcagtcgttaaacattctaatgattttttttttttgaaaaaaacatttttatgaattgaaagcaagattaattaaaaaatatatgttaagtgttaactttttccagcaaataatttcatgttcttattaattaactatttatcattttgttcggtttattagttaattaataatcagggaaattcctgtttggacctttagaaagtggataaaatgtagacgtgcctaatctagatgactactaccacacatttctcaaagagtaggttggctttacccagcacgtacctcttccctcccattataagatttttttgttgtgagaaatattaaaaggtctttatggtatttagcacagttataaaattattatttatataatttaatttattttagtttaatagaaattataaaaaaattataaattaagtatagttagtcgtctgatttcaaaaaaaaaaaaaaagtatagttagtcgtcttgtaataatattaggcattttgtgtccataatatatattttgatttttttttgttaaattaagctttcaacttttatttaaaaaattaaaaaaatatcattctgttaaacaattaatcatcacttaacagtttttctgtttttgtgttaattgttgttaaggctggtttagcagttaagtttgttattactgtgtaacaacccttttgtctttttctgcttgtaatacattggtctataaataagatttggcaaccctattttggataagcctttgcaattcatttttcgtgcctctgcttttttttttctctgctcatagcattgcgtttctctgttctggttttaccttcttcatggtatcatcgagtctctgtcctccgtcgatggaatcttccacctccgatccaacagccacaatggctaccgctgcttctccggttcactggaacccatttgcaaactctctgtcctcttccctcaccatcaaactagaccgcctcaactatctttcatggaagtctcaaatcgtccccacggttatagggcatgatcttgatcagatcttgttctctgatatcaccccaccccaaactttgatcaatggagctcaaaatcccgagtacctgcaatggaaaaagaaagaccaactcctcctctcttggattcggtcttcaatgtctgaacccattctagcttctgtggcaacttttactacagctttctcggtttggagggcacttgaacaacgcttttcctgccagaccaaggcttgcctcttgcaattaaagggtaatttctctagacttcaaaagggcacattgccaatttctgaatatgttgagaaagctcaagccactgccgatgctttggcaatttctggctcacctgtcaacacacaagattcagttctccaactcttgaatggtcttggaccagaatttgattcagtggtatcggggtatcacttctcgcagtgatcagctttcttttgaggaggtccaggcattattactctctcatgaatcccgacttgaacaccacagcagtataaccgatctttccctcaagatgcaagccaacttgagtgtaaaccagtcaagaaatgggggaaatcatcactctggtgttccttcttctcgtgctccaaatgctgaacatggccgcactacagggtgtttctttgggcctggaaatggctcaaaattgatgtgtcaagtttgcctttgcattggtcacacagcggttgttgtcactaccgctttgaca

SEQ ID NO: 203440 - DNA, 629 bp, Cannabis indica
tgacttcttgaagtgaagggaataattttgaatagctcataatatataatttagaattaatcattataataggacttttgaattgtattaatttttcatatcttcaaaaacaaaataagatgataatcaaataatttaataaaaatatcattacaaatgttcttttttttttctccaatgatttgtatagaagtacccaatttataaatataataatagaatcaaacaaacaattaaaagcacacatcaaatataggacaaacttgttgtgtgcaaataaaataaataaagagtaataaaaaaagtccatttgttttatgttgtcatgtataatcattgttaggaataaaaaaaaaaagaaattgatttataaaattgaaacatgtgttgagtactattgagttggctaaaataattcaagtaaaatgtataaaaaattacatttttaatgataataattaatactgatgatgtaattaataattggacaggtaacatatccaaacatgatggaattttttgagaagcttggaattgagatggaaatctcagatatgtcattctcagtgagcttagagaaaggaaaagggtgtgagtggggtagtagaaatggcttctcaagtttattt

SEQ ID NO: 203441 - DNA, 1158 bp, Cannabis indica
ctctttaaaattatacattttttgtcagtaattttgaaaaataccatatttctttaaataagagctctaacttttttttaaaaaaaattttacaccacatattgaaatttgccccttttatttactgtgaggcggaagttttttcaaaaatattgtgtttttttttaaaaaaaaatactgtttttattattgttctactattgttttttagttgttttactgttgtttttaattgttctattttattgttttacggttattttataaaaagaataatatttttgtaaaaaatttccgtacgatagtaaaattgtaaacttttgcttaaaatctaatatttttataattttttttatattaccctctatatttcaagactgaccctaatccttttcatacatccagcaaataaatagatgactatatataggtaatggtttggtattctctagaagatagtgggatgtagtgcatgtttacatgtttaattagtggccctatttaagccactaaggctaacttagtggtgagggaaggatgggaaaagggagagatcatagattcgaacccaagacctttaagctacaagctattaattgattgtaaaaacaccattacgctacactaaaaaaaaaaaacaaattagcggccctattttttagtgtaagcttgggttgtaataaaagttgtttcaagtctatcaactatgttcctcatcactaatatatatgtatataaatataaaaaagctaacagttggatttaattatgaccaattagtacttgtaaatggattctaaattttggatcttaaacaaaaattaacatcgaaatgtctgtagaaatttatcaatgtaaaagctccaaatcttagctaatacttaactcatcacttgttggctagggtttcattaacagtctaaatttttcttattgtcctacattctctctcaacttttcttcttttttttttagttgacagaaaatccagccaacaaaatcattaacgatataattgtgatgatcaatttaattatgattttcttctttgtacacaaaataataaatattgaaagaataagaacaaagaaaaaactcaacacataatatcattttattcgatcgagtaacaacatataattacaataataataataa

SEQ ID NO: 203442 - DNA, 749 bp, Cannabis indica
tttttctttttctttttagaaaatatttttttttctgctttacaataaaaaattataaataatatagttttttatataattatgtttgtaaaattatttatattctcttttgatttgtttgtaaagtaacttattatttttgttttaatatttttggtaaaaattaacatacattttttattatattttataaagtatatttgattatattgttatttatttcatttgttctattagaggagattaattttaattatagtacatagaaacattattttttttaaaaaaaaataaataattatgttttaatttttttatatgcatgcaaagtaaggtattatactaattatttgttattttattttttgcactatatatgatgtggcatctagttggatgacacaagttttgctttccttaacctaggtggatggttttattcctagcaggccaagaggattcatatgaaggtccaagttgtacatccatagcacgatgtccggacagagtcatcaagggacatccgaccatctcgatcgtgtgatcaactcgcatgcaccggccaagaaatgtgagttggccatttcagtagcgatcgatgatatctccaagcttgcatgagacgaagtaatccctattttcatgggattgatttgtacctttagagaataagggcaatcagcctagactgacccaattcctctattgtaattatgaaaacgtacatattaattttttcttttatttct

SEQ ID NO: 203443 - DNA, 1198 bp, Cannabis indica
tagacttgagggtcacatcatcttggtgagtggtttaggcgaggtttatcctcgagcgatctccttctgatagctcagcaatcctcaaagaaagtgagtccatatgtcgtccttatgggagtttggtctcgagtttctataggtaaaaaattcacaccataacatatactcactacaagaaatgtcaattttgccagtacatttttgtgctggcaaaagtttggtattgcgctggtaaaatggaatttacttctgaaaagttagcgctggcaaaaatgacttttctcagcgcgtaaatgcgctagtaaaagttaaattttagccactgaaaatgtgcgctaactagtaaaactttgaccttttaccaacacagtttacgaaatgcgctagttataaaagtaacttttatagaattttaaaataaaaatttttttactaaaataatattgtttattttattgaattacatataatatttttattcttattttcaaaaattaaaatatttaaaaaatcctaaatatataactaaatatacgtgttggaggtaacattggactatatatatatttatatgtataggagggtcctacgtagaggaagagtagaagagatgatgggggattagaatagaagtattggactgctctatctctcactacaatttccaaagccattttcatgggacttcccattctagctctgacaattaatataacttactttgggtgatcaatgacatggtcaccatcatcatatatatataatatatatacaagatttggtgtacatgcatacataaatatatatatatatatatttttatatatatgtgtctcaactgtgctgtactagtctttagatcacacattcatcacccatatcatcaacacagtatatggcactttctcatatatatatatatatatatatacatatacatatatgtatatcactatattgatctacatgtgtactggtttggttttgttggactttcttcaaatacatgttaaaatgctgagtttaatgctgctacatacaacttcaaacatattttatgtatttaattacatccatatataatatagtttcattataagttcacttatgttagtaattatgaaaaatatgctctcatcatggaagattattttttggctgcaaaagtttgtaatatttaattactttttttttt

SEQ ID NO: 203444 - DNA, 1106 bp, Cannabis indica
ctcctcatagctattttcaatagtattatgcttttttaattttttttttgggtaagtattacttttagtcacaataaaaagttatttgttgataaatataataatattttatatttttaaaaatataaactatataatatgacttacttgttcatcaatagttctcaagaatctatctatcacactataataaatgtcactaaatatgatgtaacagattcatgtgcactattagttttttttacaacaatatttcataataattattaaattaaattatgtgagatttaatatttaattacaccaatagtaattacatttttataatgtaatgttaggcactactgatgcttatattcacttattttatttatacgtattgctatattaggtaccagtagtgctcaataatttaaaaaaattccttctaatttcttttctcacaatttcaattcgctacaaaagattaacaacgaaaatttagatcgttataatatttaatatattgttgaccaaatttgagttgagcctctgttggactcctatcttgtggggtctggagttatatactaattagtttagttcaaatttttgtttttttttcaaccaaactagtattacgatttttcagaaatttaaaacgaaactagactaattaaatactcaaaacaaaccaatcaacttaaaaataaattagtttagtatgaaactgtggtttatatttaataattgttctaatttttttctaagtaattgttccttttttcactacttttttatttttttaaaaatttataatatataaataacaataaaaatatataaagtcaatatcaatattttatctaaaattgattccaaatattaatattccataacaaaaatattgagtatatataaaataataaggtgatttggtttagtttaaaccgttggcaagaattttaaaatcatgatcaaaccaaaaattataaacagaattgaccaaaccatttatgccaaatttatttggtctggtatcaaatggtttggactggaatggtcggattcggaactacaaattttgtcagggccggccctgagttgaaataagcctaataaaaaat

SEQ ID NO: 203445 - DNA, 2158 bp, Cannabis indica
accacactgttgagtgtgacaatgagtgagaacagaatgcatctctgttttgggaacacaatgtctgataatttgatgaatactataaagaataggctcctcccaatagtattgtttcacatcagaaaataatttctttagctgttgctttgtcatctcaggaggcaaaatcttagcaaccaagaaattcactatgtcagaaaatcaaggaacaataaaattactcactcaccccaaacaattcatcatcagaaaattaatcattgatttgcactgctttctcatatctcagtttctcccaccttcagtctagacaagtgatcaactactagatttttagtacctttcttgtcacgaatctctatgttaaactcttgaagcaaaaaaacccatttgattaggtaagggttggcatccttctttaacatcaagtatttaataacatagtgatcaatatagacaatcactttgttaacaatcaagtatggtctaaacttatcagaagcaaatacaatggctagaaactctttttcattgtggcataactcagttgagcatcattaagagttttactagcatagtaaatagacatgaataccttatcagtcttctgccccacaattgtacccactacataatcactgacatcacacatcaacttaaaatgccagtcccaatttcgagctactacaataagagcaaaaataagcttttcctttagaacatcaaaagctttcaatcattattcctcattaaaattaaaggaaactcaattcattagcaagttcaagggaggtttggatactttttagaagttcttaatgaatcctctataaaacctagcatggctaagaaaacttctcatacctttgattgaaaaatggtggtggaagattttcaatggtagaaattttagctctatctacctcaattcccttgcttgaaactttgtggccaagaacaatgccttatgtcaccataaaatggaatttttgccaatccagaacaagattagtctcttcataacgttgtaataccgcttctaaatttttcaagcacacatcaaaagaagaccaaaaaacaaaaaaaccatccatgaaaatctcaatagtcttctccaccatatcaaaaaattgagtcttcatacaacgctgaaatgtagcaggagcattacaaaacccaaattaatgacattctttgaaaaggaaaagtaccatagggacaagtaaaaatggtcttctcttagtcttctagagcaatagaaatctgatggtacccacaatagccatctaaaaagcaataataactgtagcctgcaagtttgtcaagcatctgatcgagaaaaggcaaaggaaattgatccttcctagtagccttgttgatcttgtagtaatcaatacacactctccatcccaaaaaagttattgttaggatgagttcgttatcttcatttttcaccattgtcataccatccttcttaggaatgacctgcactgggctcacccatgtactatcagagatcaaatccaccacattattatcaagccacttcaaagtttcttttcttataccacctctttcatggttggattcaactttctttgagcataaatataaggtttgttgtatggttctaggaggattttatgcattacaatagagtgactgatttccttaatatcaactagagtccatctaatagcaatcttataggatcttagcaccctcgacaatttctctagttcaaccagacaagtgagacaaaaaaaaaaaaaaaaaatgtctcattatcacccaaataagcataccataaatgatctggcaaggtctttaattctaactcaggtggcttcttaatagaaggcaacgatctttcaagccattatcacaactcctcatatttcttcctatagtaaggaacttgaaagtcaaccttatttacatattccacgacttcaatgtcatcaagatcatcaacagaggataaaaaaactgaaggcttctaagatacaacattttcaaccacattagcaataaacaatcatcattcccttcaaataattgatggtcatgaaaatattaaagaccacttcttctccttgaacccgaagctccaactaacccttctaaagcatcaatgagagcccgacttgtagct

SEQ ID NO: 203446 - DNA, 985 bp, Cannabis indica
ttaaaaaggatgtcaaatatagagtgtatttactcaataataggattgactccaaagtggaattagatttactaaagaggttgattgtagttaagtgagggtgtgttttggagagccttgagggtgttttattggttgttggtattaatgaagtttttttcttgaaaaaaaaaattaatactttagtataattcatagaatatatattatgaaaagtggaagatttttaataacatagctttttttaatgtttcaaaaagtattatattaaaatatttataatacttttttagtattaatatcaagttttcttgtagtgcatgagttccaagataaatccataaggtggcttaaatttaatgtcatgtttttattgttgttatgttggttctcttgaattgattcttattagattgattaaatctaaatctaaatccctgtttgatcactgtgtttgttgattgatttagctctaaatctctatttatatatcacaaataatcttattaagattgatactcaatccctacatatatatgtttcgttacgaaacccgaaaattgtaaaacataaaccagaaaaagtaacaatcatcatgacggtacaagaacttaaaaataaatttatgcgtgatacctattcatttatcccctttttacctataaatattgctgatgatattagatagtcatatttatatgtatagtaataattaatacccatggctttattaatgcttcgctatttgttctcttgacaaagtccatttataaactccaactactaattgacaactatatataatatatttatataaaagatcgatatacatgtataattgcatatattcagttgttcctttgttaataattaatctccaaaaaaaagcaggtacgtagaagaagactgtttcaagttcttcagtcattttctcaaccaaacaatcagaatctaatatttgagcttttccctgtaagtctttatt

SEQ ID NO: 203447 - DNA, 892 bp, Cannabis indica
tagttaattagttaattctatcacttctagctagctcaagagaggttaattaatagattacatgttcttgaaattacaaattattgaataaattataagataattggtaaattgagattcatattttaggttagaaaaatcaatgctctaggttatatttatctgattgaatttgtgtgtttatttgtttacttttatgctattttattatttcgttcttaaatcattcttagttttaattaattggtctaattataaagttagcatgcataaatactgaaagtatagtacttagggaaatttaataatcaactattttaggttcgacaacctctatatatatagaatgttacccttgcagtacaatcgtacgtgtatcgtgtgcatgcatggctaatttagtttttaatacgaagaagaattgaacgagtgtctcaatggtccttcaatgggtacgtttttaacttattttgtgttaaaattttcaaaccaaaacaaatgaatcaatacaaatattcctcatgaattttatatataataatcactaaattggtaacaattaaatatattatatataatattatggcaactgagtgcatattttataattatctattaataaattggatttaatttatttaaagttaaaactaaaattgttaaataggaataaattcatgagcaatattagtgaaaacaaggccaacgagattaaagaggtgctttgaaattaaaagtctccaatagttcaataattattataagttgatactagtaggccgctaaagcagagctctacattacattatttattattatattatgcatgaattgatacatacataatttctagctcgatcgaaattattggactgaattgaatcaattagag

SEQ ID NO: 203448 - DNA, 1658 bp, Cannabis indica
aaaaatataaaagagttgtaagtatctcttttgaaggagaatctccttgtggatgttcggtttgattaatagaaattattttttttaatataaaagaaaattaataaagcaaattaatttaaaagacaaatatggtagaactatatatttaaacaattggtggaaaaaaaaaactccataaatttataatattttatacatgatgcatttttagaaaaattgagttgaattgtacatgggtatgtgtgtgtgggtaaagtatccaaactaaatttggtgtgttacttactaatagtaatagctatgaaattgtataatctatcatattttaaaaaaaaggtagaaaataggtataatgtaccttagttaatatttaattcaataatcagtaattgaaaattatttattatgaaaacactatacatgttttgtaaaaaaaaataattaatattttaattccttgaactttcaacactatctaattatacctccttatgttaggttttgtttcttttactattaaaaattaacattttaatctcttaaactttgaccaatacaaaattttaccccctttaaataaaagtcctaattagccaaataaaaattataatgttctattaattctaaaaaaaaaataataaaaattattaaagaccttggtaaaaatatattaaatttacttaaaaaaaactaaattattcctaagaaaatatttttaaactttatattatttataactacactttttaaaaaatcaaaccaaaattattgaaaattcaataaataacttaaacaaactaaaaaattttgaagaaaaaatcaagcttatttatatctataaactcatatcttaaaaaataattaaaaattcaataatataaaattattttgaaaaaaaaagtagaaattaaataaaaaaaaatatgttatgtttacttaaacaaatttagatttttagagaaaaaaaaataggctcaaacttgtttccgtaaaatttagtttttacaaaaatttaatttttaatatattttatatctaaacaaattttttaataaaaaataaataattttttaaaccgcttaattagttttaaatttttaattaatcattcaaaatgatttttttaaaaaaaaatattgaatctttctcttttttattttgaggaggtacgaattgatagttgtcaaaatttaggaagcaaagttgctaatttacaaagacacgtgagcatttaaatagaataatgagacaaaatctaatagaatgattaaatttatgtaaatataaaagtttagatcgaatttttaatgagctgtatattttaagggataaaatcaatattatcaaaaatttaaggaataatcattccttaaactatataagataaaattgataatactatataattattttcaaaggaaaaaaagatatagaattaaataataattttaattaagatacctattataaaaaattactattcaaatttcttatttagggaagaaagatttggtggaacttactatttattttcccttttctttctactttttttccaactaaagaaacattctcttttttcatttttgtagtttgtttttgtaaaataaaagagtttggaattaattttgagtaaaatatagtttttttttttt

SEQ ID NO: 203449 - DNA, 921 bp, Cannabis indica
cccgaacagcttgacccacattaatcttgtaccctttcatgatggcgtacacatatttcaaacagtccatttgtacatcagaaaagtacttgctaggcaccaaccaggcactcacaaaatacagccatattttttccacaagatttatttcacaccgatgcaacaaatttggcgatccatctttcccatcattatcatgaaacctcaaccccgggaacctaaccgtttcagctacatccactaagtcaagatgttcatccttttcaatcaccctcaatcgttgttcatctgtagtgagatcaggcaattcatagagtgcgttgatcgcatcagatgtggctgggacttccttattccgaactttaaccagtccatgtttcctttctggccagttggtcgagaattcataagccatggtgacattggctcggtctttgacatcaacaaaactaccccaattcatgcgttaaatttgactccagattgttgcaaaccttggttggtgtctcaacggggtattggtgtaatcaatcccgcggtcttccatgtagggcctatccttcaacttaaggaaccgttcttgagccgcttcacttacaagttgggtcctatcaaaagattgtcttggattggcccgagaaggattagatgatgaaccaccctcttcatttgccctagttctttttagtcccataattaccaacaaacacaatttcacacacaaaaaatttttgggaaattttgacagtacctcccctaatttcttcaattccccacaatttcaaacttaccaaaatcacacaacaatatttcaagaacaatcaccaaaatcaccacagtctccaaaatcactttacaatattccatgacaatcaatatccacaatattccaataataatcacaatccgaaaatcccaaat

SEQ ID NO: 203450 - DNA, 934 bp, Cannabis indica
tgccacttactaaaaagtcttctataactgttggatatattagattcgtacaacaatgtttccccatggcggtgagaagcttttatacattttctatgtataatttagcttttgagttctttttctaggtacttgatgattttgttattttcagtacattgtattcatgatgatgtttataaaaagtaggtttagctattatgaagttgaaccaactaaaagtgaggatttctagcctttaggaatatagtttctatttcatgacatctaaacttaaaggtctattagttaagctataatttacatttcattgtccaacactattcatttttagtgttaattaaataaaagttggtaagggaaaatagattctgacaagaactcacaatcgatacattttttgcacaaaattcaattgattatgctgcttggggagcacctccaaaattgatgccattcttctttcatatccatttcaggtcatcattttatactataggactcatttatatttgtatatctcttgtttgtaattgatcattgtttcttatgctgtcttgaactttttttccaggtcaagcgctctcgattacatattgccttacgatgtgttgatgcatttaataaaaaatgaggtgatattcactcaaaatttggttttcggaagaattcaagtttgccttccttgctaattttctttgggttactatttcaatattgagtaatctcagtttatgggtacaaatttttgttatgattttcttattttatttatgtttagaattttgagaacacatcatgagtatttgtccttatgaaaacaagtaattttgcatgaaaacgtgttggtataatttgcttctgatttagaggaagcataaataacatgtgctgaactttgagatcgattgagttttcattacctaacaagaaa

SEQ ID NO: 203451 - DNA, 752 bp, Cannabis indica
tgaaaaaaaattagactaaaatttttctggatactgaaatagatagagggtgtattaatgcttcttttttaaggaggtacattatagaagcacacaatattatatattagatgtctaaattatctaatttaactatatatatgagtaaaccctttatcggtattacacataaaaattctcaatatttcaaacaaataaaaatatatcagtacattttttttttttggaggatactataaaattttccaatatattagatgtgtaaattacctaaattaagttatatattatatatataaataatgtttcccatatttttagtgaatttttgaaataaataaactactcacctcttagtttcccattttctcctaacattcattggaatgtgtagtggtaagtcctaactcactcaccacctcatatttaatatttaatatttaaattgagttatataaaacgtgtacttaataaacaaatcagaattcacaacgtgctgctctctacacacatctcatcttctttctcactttgatatcattttgttcttttttgaatcaagttgagctacatgacaaggttggttgtcatacaatattatcaaaaaaaaaaaaaaattccaattttacataaacaaaagtgggacaacaaagtaaatttatttggtaaaacagtaaaacatgtttaccactttctacaaatccaactgattttgtagtttgtgttggggaaatttgattttctatgcttag

SEQ ID NO: 203452 - DNA, 1481 bp, Cannabis indica
ccaaaattaattgaatcatcagctatatagtatggactgtatatctaactacgcggtccaatgtgactaaatgggcgtttgccaataatgttatgggaaaaaaagactatatcttagtaaggtacattttacacataaataaatatatatgatatatataattatatgtatcatatctatctgtaaaagaaagaaagagacgaaacaatatatatgttattaatgaaaagccattttccattcagctgacaatttttatatatatataaagttacgaaaatgccaatagtgggtatctcatatctcttggctttttctctaacttattataaatatatttatcttttaatatctcttcatttgaataatatatatacataaccacctagtgagagaggcatctaattcatctttatatctctctctctcaaaaaaaaaaaaaacagtttctccttctctctttcttttagctttttgtttttcttcagctagccatggaagtagagtcatcatgtttttatgatagagagatggaagtgaaactatttgacgaaacaagagttggagtcaaaggccttgttgactctggagtcaccaaggtcccgagattcctcatccacccaccagagagttttctcttcaaaaaagaagaaaacactctaggtttcggctgatgaggaaaataataataatcattatcatgaccagcatcatgataatgattatgatgaccaggttccgatcattgacctcgagggttttgatgatgatgttgacacaactaaacgaggtttaattgttggaaaaattcgagaagcggcggagtcgtggggtttctttcaaatgattaaccatggaattcctgattttgtgatgaacaacatgttggatggtataagagattttcatgaacaacctaatgagactaagatagcttggtactcaagagatccaaagagaagagttagattctattgtaatggagatttgcttgtttcaagaacagcaaattggagagactcaattattttcgatttccaagacggtcctttagaaaaggacgcctttcccccgatttgcaggtattatatatatataggtttcggatatagttatgtaatataattcaaaataaatcttaagatgtagtcctgatgaacaggttgttgttcattaagactacatcttaataatatatattttttataaatttaattacaccaaacataatatttatgcagggagagagtggaggagtacatgaagcacgtgtcgagggttcgagaagtgttgtcggagttgttatcggaggctttggggctaaacaaagagtacttaggaaaaatagagtgtatgaagagtgagattttggtgggtcactattacccgctttgcccggaacccgagttgacccaaggaactaccaaacattcggacccctcggccttgacccttcttcttcaggaccaaatgggtggcct

SEQ ID NO: 203453 - DNA, 713 bp, Cannabis indica
attatgaaaattatattatatattattttttttaactttttttttttttgttaaatttacagtttagtttgtttcagtagtttcttcgataatttctataggaattttgattgcgatttaagttactccattaattgttaatttttgttatcggtatttttttttacgtttgcatgtataaaatctcactattcatcttttcgtttgatattatatttaggaaaaaatgaaggagtcttaaatgaacttttggtggcagttcatttttcaaactctctactccagaaaagacattcactactagttgttcgctgtgattttagtgacgcgacccatcataggtgaaaaagagtaaaagactacacaaattggatcttggcaaatattccaaagcggggttagagctctcttggtaatgcgcagagaggagtcacactagtagccccctcctttatatttatcacaaaaaaaaaaattactctactaatatagtgagagggtattttttattttcaaaaattgtaaaacttaactattttgaattcttttttcagtacttgtaaaattatctaatttaatttcctacctaagcaaaaaactaaggtggcgtttggtaacaattttgttttttaattttaaaaacagaaaaataaaagtaaatttttgtttttaaaattttgtttttaaaaaacaaaaatgtgttctataactac

SEQ ID NO: 203454 - DNA, 1072 bp, Cannabis indica
tttttttttttttgcttttttatatgaattccttttctatatatggatttccataaataggaactcataaaattcacaaacaattaatttacaattgtcacaatcgcccccctaaaccttttacacaataacaaacaataagatacaaattagagaaactatatataaacttttggttagggggagttgtaattaattaataattaatataatattcaagcaaaaaaacatattaattacatcatcagtgaccaagtcatcaaacttgggtaattacagacataacttgatgattatttatattgtccaacttattattattattagtttggtcacgactactaataagatcaatattattattattatttattattaccaccatgtcatgatgacgtgtactagtctcctcagcttgataagtcctgtggaccccataaagcatataaaacaaagtaattagaatagtccaaatcccaaacctctggaaagacaacttcttgagagtggtcattagaaatgcattgaggaaaatagacaaggctggtggccaaggcatgtaagggactgaccaaccaaaagatgccacgcaaggcaccttcacgtagcactggaataggaatactatggtgaggttggacccaccaaagaggagtagaccccaccagtggtagtatttccaagagaaggaaaatccaatggctgtgattgagaggaggaagagaaagaagaggattttatatgaagagttgttgcctatgataacgtaacgccggtagatgagagcattggctactaagtagaataccactagtgtgccgatcgagatcatttgcactactatttccaagtctgtgaacagagctattgatgctgtgcaaaatcctatattatatacatataaatcattaattaagaattgcaatatatatatatttatttggagagtgctgttatagttaattatatatgagttatatcttaaaaaaaatctatttgttttaagatttaaagagagaagttgcatgggcgggtttctatatgttttaagaattatatattgtggtttttt

SEQ ID NO: 203455 - DNA, 1582 bp, Cannabis indica
aaatacatatttaatgctcctctaaacaccgacttacattgattcaaatttctgaacaaacatcaatgttagtatgcatcttttgtatactttactcaataagtaaacacatactttctatcatgcatcactattaacacatagtcatagcatgatatagataaaattttactcatgcttttctaataccacatttttcaataatcataaaaacaaacaatcaatcaacagataagcaaatcaaagttactataccatgaatcgagcttgtcttcacaacaaatgtaaatatccatatctagtctttaagacctttaaaatcgtagctgctctgataccatgctgtaacgtcttaaccaagggacaccacgtgtttgtttttataaattaatttataataataaactaacgatttaaagaaaataatgatttaattgaaacttagcaaatatttaaaatataaaattaattttgttactataaaataattaaagttggggatcaccttttaaaattttacaaaaggtaccattacaattttacaataaaatacttatacttataattgaaacttagaaaatatttaaaatataaaattgattttggcactataaaataattaggttggggatcaccttttaacattttacaaaaggtaccattacaattttacaatagaatacttatacttataattgaaacttagcaaatatttgaaatataaaattaattttggcactataaaataattagggttggggtacttatacttataattgaaactttataaatatttaaaatataaaattgattttggcactatgaaatattagggttgggatcaccttttaaaatttacaaaaggtaccattacaattttacaataaaatacttatacttataattgaaacttaaaaaatatttgaaatataaaattaattttggcactataaaataattagggttggggataaccttttaaaattttacaaaatgtaccattacaattttacaataaaatacttatacttatcaaagtcgtcataaatcaaaaccctaactacttcgcatcgctggctggataagctgataagtacattttttggaaaaaacctccaactcatggttgacttagctcgttcctttccttaccttcaccacaaagcacctgtgagtcacaaagactcagcaagaaaagtaaaagcataaacagtagacatcaacatgcagaaataattaaatatgctaatataatcaaagccaagtaatcatatattcactccacaaccatgaaatcacaccctaacgagacaacccaatgtcactatcgttacctaatgagacaatcgataagacagaaacctgacaacagttttagattagtgtaatgactctttcttatattgttgcctaatgaggcaaccaatagagtaataagtctttcttatagacggtaattactgaatcatatattgacatgttatgtggtacaattttacttttcttacctaaagtctaaattcaagcgtgtcggtcaacttgagtggaaaacgatcgacgatcttgggccctatgtcacaat

SEQ ID NO: 203456 - DNA, 814 bp, Cannabis indica
gaattagggttcttaacctctctcactctctctcttggagtcacattaggattaggaattaatggaattttgttcttttttgatcaatttttaatccatttgaacttttggacatcctttactctaatctaaatagttaagactagtttagttgggaaatactatttatatatattcaattgagcattatgctatacatttagtttattacaattttttggcttctttataatcatggcaaacattttaggattaggaattaatgggattatgttgtcatgcattttttttccatttgattaagggtaattatatgttaacaacatttataaaaaaaaaaagtttgaaatcagcaaaatatactcaccagctattaggataacttgaactcttagagttgtttgtgtcattggtgtaaatttaggatttcttgaatgattgtgagaattgtttataaaggtatattagtgtgcttttagaatttaaattaaatggccacaaaatttttaacttgttatataagttacttttacaattgattcatttttcttgatatttacttttacattagttttcttgatatatttttctcagcattgtgtagtatacatttgttataatcatgagagttgttttttttttgttctatgctgtttaccaaagagagccaaaacttactagggagtgtgttttgtggttgtttaggttgaacatgtgatgagagaacagaatatattggctgcaaacgagttcattgagctcttttgtgagttgattgtgtcaagactttctataattgcaaagcaaaggtgat

SEQ ID NO: 203457 - DNA, 1178 bp, Cannabis indica
tggctatattcctccaggtaaattatattgtattatacaatacggtgtaccaaacagacccttagtagcttcactagctcttattagttattgcttttacatgagattgaatgaattttctctcattttcattgccttgtgatttcagaatatgcatacactatgcaagttacagccccaggaaatgtttacagctatggtgttgtcttgctcgagattctcaccactcaattaccagttgacgatgcatttggtgaaggagtagacttagtgaagtgggttcagaccgctcctgcaagaggcgaaactccagagcagatactcgacgccaaactcagcacggtgtcatttgggtggaggaaagaaatgcttgcagctctcaaagttgcattgctatgcactgatagcacatcagccaagcgaccgaaaatgaagcaggtagtcgaaatgcttcaagaaattaaacaaaactcataagtgaatttcgggctaaacttttccgagtagaatctgattagatgagagtgtttactttcttggatagctagtcagcttgtaactatatttgaaaactgggaaaagggttagttggtgagttaatattccaaggagaggtctgatgaacaatcaatcttttgtattttccaatgtggagatgtatgtttacatattattttaagcttaattttataaatgaaaggtaaaatcttatacaacataaccttatgaaccagatactatcgatttgatggtatataatcagatggtataaatataatgaactgtatgtatacatactcatagcttagcttgaaccgaaataaacatgttagtaatatagatgatcaataaatttatgtattgtaaatatagaggagtgttgctgtgaacttcttcattacaatttcttatttaatttttgtgcccgaaaattacatgtcggaatattttttttttcacaatggtattcgtttcgttatgcttatatactaaataccgctataaaaaaatttgagaaaaaaaattcgtcatgtgatttcaggcatgaaagttgtaaataggaaattatatttaacaatttttggtataaataatatttaagtacaatgtgattaattatctaattagctctaaatgagagaaaaattactactaaacaatctttgatttctttatta

SEQ ID NO: 203458 - DNA, 700 bp, Cannabis indica
aataaaaataataataaagaaatacaaatacaaccaaataaaatgtcacattcatgcatgatgcatgtcatgtctccatatgtaaaattgctcataaagtgttatcatttggtatgtgtttgcatagaattagatgataatgatgagtggaatagagaaggtggtgtgtgtgagtggtggttcaggctacatagcttcatggcttgtcaacctcttactccaacatggttacactgtcaaagccactgttagagatctcagtttgtattctatttttcaattcaaaacatgatattgcttcattttgggttgtgtttatgaatattaattaatttcaatacagatgattcaaagaaaatacaacacttgctttcatttgatggagctaaggagagacttcacttgttcaaagcaaatttattagaagaagggtcctttgattatgttgttgatggatgtgaaggtgttttccacactgcttcccctgttcttatttcagtgaataatccacaggttcatcttttgctttagtattgaaatttggggtaaatttagtttcatagtttgcttatttaaaagatataataaactaaattatcaaaatttagccgtgacaacaggggcagacccacataaaagtgaggcgggataaaaatatatatgtatttcagttagtgacgacatatatttataataaaag

SEQ ID NO: 203459 - DNA, 1039 bp, Cannabis indica
caggccaagctgaaggagtttacagcatagaaccaggtttgattagtgaactcatggtaagcttctctcttagttgtgggattatcttagttaaaagagtgattttgatgcatgaggggacaaaaccaaccactgtcaacacacaggttgcaccagccaatcgaggaagagtttacggccaggtccgacccagcatgggactggctggccaagagtagatgcccggagtagggctagccagccatggctagttcccctacccagggctcagccatagccagctgccaagcttagggctggccggccttgagcaaaccctctcccaaggtatggccagtcaggctctagcaaatccaaggctacatcctaactaagaaaggccaatcaactaggccccttcagcatcagatccttctgtgcaagcacagttggatcaaataagagacatgatcaagggcttggcttgcataaatccttcagaccttcaattggataggtgaaggggcttataattctcgacatacatcaattcccttcccttgtcaaaatccaagatgtcggtattgaggatgtatactggacgaggagaccctctagattgtatcaagtactttgagatgccatttaatctccaaaagattactagtgatgtgcattttttgatcttcccagcaccctgttggaaaaagctcaataatggtaccttatgttggctcaaggaagattcaattctttgaatgaatttactcgagaattctagactagattctcatcctcaagactgatgccatcatagctagaagaccttgttgaggtcaaacaacgacaaggtgaatctttaaaggattataactaaaggttcatggccgaggtcaccaatgtcaatggcctaacataagaaggctagtatattaccataatgggggggtcatcttctattgagtgacttatggaaagatatcttgaggatctcaactaacattatgaaggtgttccttgacagagctgcggctttatcaagctggaggaagccatctgc

SEQ ID NO: 203460 - DNA, 1099 bp, Cannabis indica
tcatagacattcatcctaaacgttaaatacacaatcatcatggagagctacaatccaaaaatttgttcttgtggataatgagtaaattatttcaaatttttttattatataatattaatatattactttattaaattttattatttacttggtaggtttaacatagctacacttacaatgtagaataattttgttgataacgaatgtgctgcaatctcaaacatcattcataaaaaatctattatggtcgaaacacgactcaaagtggtttactacgatggtaatcaaacaattattatttttttaaaaaaaaaaaaattcaaatcaagatattctaaaacaaacttaatcttttaggcatgtcaatatccataaaaaattcaagctactttttaattgagcctcagttggaaatcactagaaatctttgtgcctggtaattaagatacaaatctatcatatgctttcctaacagccctgcatactcaaacatgcttttatataatcactattatcttactaatgtatgtttttttacgtttcaaaaaaataggataaatcgaaacacctgcaccctcaatgagaggatcactcaaaaagcatatcttcttccaggaacaaatctttcacctccttcttctgataaaaattactgatataagcaagatacatgacatgttaaacatagtaaactctttttaacttctccttttttattatttttattttgttctattattattttctcaatgagataacattacaatgcaatcttctatttcaacaaacaagtttctgggtcaaagtaattgctaaagtctcaaattatgcccaaccatttttgtatatggcatgtcccctttgtaacaaaattactagatccgaatatggagaaacttttgattgtatatattacaaaaataatgaacccaaagcagttcctaggtaattaaatgacttactcattttcttaagtttcttttcttattaaattatatttttactaacacttatgtcttgcagatgcagaatagatgttgaacttactgattcatcatcctggcttacaacaactatatttggggaaattgcagaaaca

SEQ ID NO: 203461 - DNA, 596 bp, Cannabis indica
cgatcgttttggcaaagttctggaagctcaggtactttcttcttcttcttcttctcttatgaaatatataagttgttcttgatgatttgaaggaaaatgtgaagtggaacgattactgctttcctttacaaaagaaagaaccaatttttgtataatgtaagtcgttgttcatagtaaatgggagattttagtagtttacatagctattatggtgtattattgatcgtttctctgctaaaacttgtgtgcaatatcggtataaagtactggctttttattttttttttcttaaaatgaattttagttcactgcttaaggttatgaggtattgtgttccagtctgaaatctatgcataagttcatgcaattgtgctgtgttgggtgaaaataatgccccgtctgtcctctcatttcgaatacttgtgcttttgctttagttccccttgcagggttctattatcttggctgcactttttttgtctacactgctctgtcttcttcttcctattgttgtttctcttttgaaaacatcaggtcttaaaagtcagttcccttctcaaacctgttattgcagaaataagggtgtaattgatttt

SEQ ID NO: 203462 - DNA, 888 bp, Cannabis indica
gagagagcgagaggaaaagagagagaaatcactacaagaaatatcaacatcaccggcggagacgttcgccagtaaaaaagtcgaaatccgctggtataggtcattaccggtggggtcgtacccctactgatctgtgggtaatacctggtcggtattgcacagcaatagcaacaaattgacacaactgccgatattaattattaataccagcagaccaatgggaaagggtcccaccactattaagcccgttagaaaaaaaaatcttacacgttaataggggtgggatcccgtcagtattatgtttataaaattagtaaaataattaattataaaatttataaaatatataatttatattactgctaataatatatatataaaaacaataaaaattttaataacaataataatttaatttttaattagaaataaactgacattaaactaattattacacacataattaattaataattacgcaacatactacattaaataaaaaattattatccacacatataaaacttaacaaataattatttcacacatattaaaattaaactaataattattatgtacacataattacaattaaactaatatattgtccacacataattaaaaactaaaactaattattattgtcttcatcaagtacattatctaaaaattatgaaccggcggtgttcaagtttaaataagttgtttgtgcagtgtcctcagcttgcgatattggtggtcaaaggtaatatggctgctgcaaagataacatctcaacaaattgtcgagtttgtggttgttgttgtagagtcaaagattgttgttgttattgaaaattcagagattgttgctgaaacttaccaggaaaatatatggattttttggacg

SEQ ID NO: 203463 - DNA, 360 bp, Cannabis indica
ataatctctattgttatcttacttttgtatattatgtaatggtatagagttttaggagctatttagaattattattttaagattgagagcttgtgaaaacacaaattttcccttttatatagataaaaaaaaggtagataaaattttttcccctaacatgtcctaccatgtgggtcacaaggaatttctctaatgtagacaatacattggatttggacaaaaaattaactgaagtatcctcaatatttttttcctgtgttataagtaaaaaaggtatagtaaattcaaataattatataatgtaatgattgaagagataccaatttaagtgactgaagatagttcagtgttaaaggaagt

SEQ ID NO: 203464 - DNA, 1421 bp, Cannabis indica
cagaatcacactataataatcgtcgacgcagagaaactttcagttcacaagctaattgtgtagccaaaaatatacaaagtcagaatatgagtcactacagaacgacttatataagattaaattatcttgaaaatttagacaaacaatttaagactaccttcaagaggcatctaaaaacaacttttatttggtagaatcttaacattttctcaagactacaataaaaatataacattactattagacactatgagatgacactttataaataagcagtaattttctataatcgtaatcaaaataaaattagatttacttaattttaaattacaacaataataatatgacacctcatgaaagtactaatggagacgaatctataacaatggagggagccttagccccttccaaattttttattaataaaaagattatagtatatctgttataattttattaattttttctttagaaaatttatatttggatccccttaatttaattttttttttgttgttgcactttggccttccaatattcaaaagttgcgtcggtctttaagtgctaaggagcatgggtgtccttggcctcccattatttgtcttaaagatataaatcatattatgtgacccactttttttctctcataaattttgtaaaagttatccatctttaacatatgttagtaactagtaagtagtttattatttttaagaaacaagttatttacattgagccttatatcattgagattctctacatactaatctaattagattagataatttttttttaattttaattttaatttattattattattttgatataattagaaaataaatctaaaatttttgtaatactgttaggctatttttagtctaattttctgagtatttataatagctattttctttttaaatgattgtttttggaataaatttacactttgtttttttttttttttcaagtttcgacacttagaatgtataaattgatcaaatatcagaaatacgacgtaaaattaaaattgaaatgtcaaatcacgtgccaagcgctgcagtgcccaacactagcatcgcgaaaatagcgcctcaaagcaccatgacagaattttacagaaggctccgtgcactgtggtgtcctcattgtgcaaagtttggattttttttcatcattattctcattctctttatttcttgtattaatatctatgtttaatttgattatatgtattctgagattatgagttaatttttctatttaggaatttgatgaatattgactgagattatatgatggtcaaatgctaatttaatttgttttttcttccttgttattgtgaattgtgatttgtttatctttgtgtttaatacatgtttaaaactgatcaacttatgcatgattaatgatcctaatat

SEQ ID NO: 203465 - DNA, 1319 bp, Cannabis indica
gacaatattcatcaaactctaaagcatgattcgtaagaccatgagcagtcaaattgactgtccttcttgtatgtgaaatgctaattaaatatgtgtgataggaagctgcaaaagtggcctatttaaggctaataatgctttagcttctatttgttgtggcttgaaacaaaacagccatgaacaacagtgcctatcccaatcaaactcgaagcacgatttttggcagcatcaatgttgctcatcttgagaccatttgtatcagatggtttccatgaaactttctcagaatcaatgaaattgaaaatgctttttcaatatttttaaaaattgaaaaaataatatttttcagaaaagtatattttgtatgcaaaattacactataatataaattaaaataccaaaattttaattactataatcaactattaaactttaaatatctcttaagttacacacaaataatgttttgtttattgtactaattgtttttttaattaaaaagagtttttagattaatatcacaaaattatagtcattacataaaatgttatctggtatattggaaagatctaccataccaattacattttcggcgaaaatccacttagccaaattatgagccacatgattatactgtctagaaatgaaagagaaatcgcaacttaacaaaaatttcgagatatttttacattgaatcacacagttatcaatatcccaattggaataattttccttcagtgcattgataaccatctcagagtcactctcaaccaacacaaaagtatgcttcaaagataccgctgattttaaagctaacaaacaagccaccgcttctccaattggagggtcagagaagttgagtaatttggtagccacccacaggacaaactccgtgtgatccctagccaaagccaccacgcacatggagccacaactaactttaacatcacagttgattttgacccagtcttccgaaggaggggaccaagcaggggacacaattgtttttggagaagtcaatagacaagaaccataatcggcgtaacacatatcgatagactcaatataattttgatattacatatagaattattgtgtacctagtcgttacgggcttttcatatcgtatctaccacaattgaagcataaaggaacaacccttgtacatccacacctctagctttaagatcccaaaagaacttaacccagtttcaaacacaggcttcagattccagaatagaaaaaacaccctagggtgaagacctccaaaggtgaaatgtaaagttgcaatataggtgtagagaatggtgaatagaatt

SEQ ID NO: 203466 - DNA, 1885 bp, Cannabis indica
atgaagagcgaaaaaaactgcagtcctaatattgtaacatataacattcttatctcaattttcggtcggttgatgctacttgatcacatggaagcaacttttagggaaataaaggaattaaatatgtctcctaatgtaaaaacatacaattttttgatagctggatatctcacagcttggatgtgggatagtgtggaaataacatttgaacagatgaaagagagttctattgagcctaatactcgaacgtacatgctactgctacgagggtatgcgcattctggtaatttggaaaagatggaggagacgtatgaattaataaaacattatgtaaaggaaaaggaaatcccattgattagaactatgatatgtgcgtactgcaagagttctgacaaagaaagactgaaaaagattgaggaattattaaagcttattccagataaggattatcgaccttggttgaatgtcctgctgattagggtttatgctgaagaggattggttagaagcaatggaaagatcaatagatgaggcatttaagtataacacatctgtacatacattaagtgtgatgcggtccattattagtagttacttccgatgtaatgctgtggacaaactgaaattttattaagagtgcagaagctgcagaatggagaatatgtcggtccctgtatcactgtaagatggttatgtatgcttcagaaaagcgtttggacgagatggagagtgttattgcagagatgaagaacaataatctgtttattaccaagaaaacattatggattctttataaggcttatttgctttatggtcaaaggcacaaagccgaacaagttataggattaatgtgcaagcatgggtatgaaattcctttaaatgttcttccatcatgatgcagtcattgtattgtcacatatggaatgctatagagattgcatgaagtgttcagccaaatattttttataccataacatctgatagatgtaatgggattcagtaatcaaagaggtatttatctaatctcatgctttttaacagctgacaatataatctatgttgttgttgttgttgttgttgttgttgttattgctgttgctgttgttgctgttgctgttgttgttgtttttgactgactgctaccaaattgttattagaaccctgaccatcggcggaggaataccatggttacagaccttgggactcccaagagaggcaaaaggcgaaaatatctacattataactgaaacagtaccctcatagcctgttgaatataggaaaataacccgtctaaatagttttccccactctcttcctatacaatcagcttctgtgttcttagattttcaacccacgtgaaagatgttaatcacttttgcttgtattgaaaatatttataatatgcctagtatagaactgcaacttcaatttcacacagtttcatcatctagcagttgcactactagatgcaagtacagcatctctcacctagtgctgtgcgttttcagccgatgttttttaataacatgtactcacagtggtcttactttgggaacagaagaggataaagactattgaagatagtgggcttcacttatttggctgagagttgtgaccttatgaatagaactactgttggtaatggttttagattattggaacttgccctgctttcaattataaatgccaatcatttgatgtggcctatgtgctatattttctttcctctaccctctaaaaacaaaagaaattatctggagaagtctttttaggattgaaaattgttttcagtgaaggatgagtttttcgctgtttgaaatgatagttaggttttcaattaatataggtgggttggatgatggatggaaagaattataaggatggga

SEQ ID NO: 203467 - DNA, 1334 bp, Cannabis indica
gggaaggaattaaagcagacaataaaaaaatattcaaattaaagtggtctttcgcacttgcaagaaatgtttcttgctggaagtatgcaaattatgaaccagttatcccaacatgatttagtaacatttttgtatgaaatgtgatagtattgagattaaacaaaagtacaaatgttacaaaagaaagtagattatcatcttttagaataacaaccacgtagaccaatttttgattaatttcgaaaagataaaatctttaatatacatccatctagccacccaatagttgactccatcccctaaagactcttaattctcttcaaaatcttttcaagttttgatattattcctttccaggcacaggatcaccacaatattgccatgattacaacatttcacaacttcttaattccctttttaacatgaaaaatcaaaaaataatgaaggggtgttttgttatgggagtttgggttcttgggaatggaaatgtaaaaacaaacctaagtttgggataattttaatagaagacatatgtttgtaggagtcttatttttaagattattttgggttaatctcaaactctttaaacactcgagtttagattctcttaatgtcaaactctctcaactaaactccagcaactaaaacctttacaccaaacatcctgatagaactgacctcctcaattcaacttaataactgttacaatggagaaagaagaagatgaagatggatgaaaatggaagcagtgcctttgtattgaatactcaggattttgagagtttggttctctcccaaaaaggttacaaaataatcaaattcttcacacccgcaaataactaacctattggcttttcttctcacagacccgtgcaagactaaacccctcacacactagcaaaaccctccaaacaactaacttgctagctcaacattaatccccaacaacgttgcccattgcctctttcctaaaccttccgggataaacatatgtgagaggaggtttatcaatacccacctacaagtctcaccttgtccttaaggtgaaaatatggaaattggtcttggatgaccataaaatcttcccaagtagcttcaaatgcacaataagttgacccacttgatacgagcttgaggagccgacagatgcgtgcttggacggatgtccaacacttcttctggttcaagcagccattccaagtcagtagtatgacctggaggaaggattgttagttgttgatgacctggaggaaggattgttagttgttgatgagggcctaaggctgctcgaaggagagacacatggaacatcgaatgaatggttgctcaggagg

SEQ ID NO: 203468 - DNA, 757 bp, Cannabis indica
aaaaaaagttataacatttaaaagaaattaattttactggaaaatgaatagatatttttgaaaatatctattaaaaaatttagagaaatgtttttactttattttatttccctgttcttttcattaatattatttttttttaggtaaaatctaaatttcaaatgaatcccaaaaatgaagaaacatcttctgggtttgagacatttcttcattctaaagcaatgctaccttctaagcgaagtacattttttctgatacagaatcatactaagaacaactgaaaattagacttagtgtgaagattataaaaaccatgaaggttcagaaaggtgaaaactacttcttcaaacaatatcacgctagaaaatacaaaaaatgatatacccagatggttatgtcgtccaaaaatcttttctgaatatagaatcggagaaaagggtaagaaaaatgttactattaacgagatcgaattatatctaatccatttccagcaaaacttgcaattattaatgcaaatagcaggaacacccaaggaaaaaaaaaaaaaaaaacaattagaatttgagttatatatgcaagacgaaggtgtatcagtgcgatctgaacgtaaatagaatccacaaatagttatgcacgaatacggtgataaaacgataaaaatatatagataatcgaaccaattacctcataaaatacgacagcctcccgaagctcaaacgaaggccggagaaaacccgtgtctgtgtgggagagaaat

SEQ ID NO: 203469 - DNA, 555 bp, Cannabis indica
ttagaagcagaaagcagtcctttagacatactttgtttaggttggtgaagtctatgtacaaccatcactttctgttttgttcgggcaccaacacatggttagatacctaaagtggatagaattctttagtgataaagtcatgggctcttagcctttcgacttatatttgagcacttgagcactctctttgtccaacaacatcctttttttgttgtacaggtcaaacgtttggatcaatgttgatggcatgggtcatcatagaggggtctattccaaccatgtctcaatgtgactatacgaagaggtctaggtttgtccttagaaattttatgagtagtgattttattttcgatgctaaacctttcccaatcatcagtcttctagctggaaaagtaggatcaacctccacttcttctagttcttctgtaggtccaaagtagtctacatgatccctaaagtgaggatctatgtttgcctcccaactttaggctggacttcattgcctttttttgggctcttcatcagagctctgggcgagcatcttctctttcttgg

SEQ ID NO: 203470 - DNA, 1107 bp, Cannabis indica
ggtggtctgtttgtcccacagaaaaataaagaaaacattttattaaatgggatggaatagaggtggttggcaggcacaggcagttgcgtgggttggaaattttacttggtcgtaggacaacccactgaaccacaccatgcagttgggagctaaaaggagttatgtactactaaatctaacagcttggacttccaaactgaacaacgacagattctttcttccatatacataatctgcatgtggcaatgtaatttcatctttatttcatttttatattctagggctctaaatgaaacactactacatcttcccacttcattaatgcccgtggaaacaacatattggtgcacacttttattctttttttaataaataatgaaattttatctatgtgaatcaactaaaataatagtctacagtccaatcgaatgtttctattggagatacgattaggattagaatttaaaaaaatgagttaaataattagtcgcctaattcttagatcgtttgaaaaaaaaattaaaataaaattagatgaaaaagattgcagcatcacaattaactttaagaatacttatattttgtttcattcactgcttagaagacacaacagtagaaactgttgtagtatgttcattcagccttgtagcttgagtactcccttatttttaatacacatacatagttataatttttagttttggctaattagaattttcctccaaaaattttcataagtatcaaattgtgtctctaaaacttttcaagcagttaattaaaatcgcccatgaactattaaaattgttggattcaaacactttcgtctaattctactcaattttaccaacagaggcatagcgtagcaattttctatgtaccaaatcgtatccctgaattttgatatgtacaaaattgtgttcttgaaatttcatccacgtcaaacacaacttagtaaaattgcgcgaaataggatgaaactcctaaaatccaacatccttaacactagtttggcagggggattttaaaggcatgacaaattctatttactagttatatcattcgcaaatgtctgaatctcaaaacgttcttcgaaccaattatatattt

SEQ ID NO: 203471 - DNA, 747 bp, Cannabis indica
gacatctttttgtgagtcaatttgtaactgtgattgtgagctgatgatgatgacattgttgcatttcagtacctttaatttagttagtgattcacataaattgaagtatacacatgggaattgtgcatgagaagctcatgcaaaactgactagtgattgtagttaggtaccagaatttgtacaaattcctgaccagatttataaattcacctctcatgatattctccctttggcaatcataatttctgcactaaattcacataaaccttaagaaatttttagtctagatttcagagtttagcaaggttaacagcttaatcgcagacaagaatgaggtgaacaaaagagacaaacccaactggtatgttaatcagatcatcgtgccagttattgctttcaaatatggattcaaaggtaggaatacaaggaagagcggaaagcagagcactacattgttttagccatttgccagtgaagaagatgaaatattataggaccaaatatttagttttgtttagtgtacttatatttaaacgatgtgctgttagtttttgttaaaggatctgcaaacaaattaagtagttcactatttgtgatcctactattagagttagtgaaggccccctttgagtttcaagttgtgatgttgtctaatataatttcaaaaatatattgataaataactaagaaggataagataatctcgtatgttatatgtattatctgattaatttaagtgaatacaaa

SEQ ID NO: 203472 - DNA, 1195 bp, Cannabis indica
tcaatcaatttaagaaacaaaaaatcataaatgctataataagaattgatcatatatttataagttagagtaatttgtggcataaatacttaaatttaattccgagttgcaaataaatatataagtttaatttttggcagtaataatgcttaagttataattctagaacttttgtaagtacctacggttaagttttaagtaaattgtcactgagcaattcctgattggtccaagttattaaatttttatttttttaaaaaaatttaatttaaatataccaataagaaaattacacgtgaataatgacttaatatttaatggttaggtacttacagagttctaaaaatataacttgccaaaaattaaatttaagtatttatttgcaattgaaatttaaacttaaatatttataccgtaaattactcttataagttatcattttcaccttgtaaacatcgccaaaaccaccttcgccaagtttagtttgttcactgaaatttttggttgcatgtttcaaatcattgtacttaaaatttactggaccttgtaattccgtacttccaataatgttacctgaacgagagtgtaatatgcttaattcaatttctaaggaattaatcttgtttaaaaaaattgaaaataaatacatcaaattattatatataaatattaaaaatggtattattaatggtttagtatgtattattacctctggcaagtggctgtgactttttgaaatatcttttaaaccaaatgaaaattccaagtatgatgaagagtactagagcacctacaccacttactactccaattatgaccttcttttttgaactatttcctgttattaataatcaatacatataataataaattagagtattactatctaacctcgtgatcaggctagctcaagtgattataggtgggtgtgtatgtgttggaggtcctgggttcgagtcccaagtaaaatatgattgtaatatataaacgcttaaataaaaaaaaattagagtattactatttagtataaattgttagaaggatgctttatgattagttggcgatattcctaaaagttattactttaagttatatgagattcaatacttaattgtagcaacagtgatatataggactggccatgaaacgaagtggaccacaagaaagaaatttatttttgagcccttatgttaga

SEQ ID NO: 203473 - DNA, 583 bp, Cannabis indica
tgttgcaggacctagggacgaagctacatagttgcttaggggggcaagcccccagccaaattcaatcttaatgcttagccttgtttcttttgaaccaaaccatccgcatcacactaacgaatgtctcaatcttaacttctggtaattcaaaaatacatgtagcaatcacctcttcaaccatatttttgcttcaccttgccaccttaccaacccaagttgtacgtttccaataagaggttgagaaggacatgcaaagagagcacgtataacaaattcatcttcagagccattctagaaacatcttaggtttacacttatacctctattgttaagaatcttagcagcgtaaaagagatatgggatgcccttttccatgcggttcacaatgtggagttgccaactagctaagctaggtagtttgttgttagagcatcactaacgaggcttcatatttggtgatgccgtggaattgaccctccaacgtagctgcaaacattatactaaattgtcgtgagtgctacagtgcacgatatatatgctgtgcactgtacacacgacattacttttttattttttattttat

SEQ ID NO: 203474 - DNA, 725 bp, Cannabis indica
ttatttttaaattatttttataacatttaagtaattaaaatgatgtggacgaatgaaaatatgcaacatgtacgattgtacccacatagaaaatccaccttgtcacttaactgtataaatctaacagaagacgaaataacataacataagtgagatttggagagtttgccaccaaaaatcagttttttctagttaagtgtaacaaaatgaatagtttaagtagttttgccgcaaatatctttttttaattatttaaataatttttaaataaaatttttatgaagtggtcataagatttctgaagattttggtttgtcatgttgcgatgatttgttgatctctttgaaagcaaaatgggcttgtatggcaaagtaaaaattctgttgcaaatgtggtggtgactgttgcgttgtcttactttaatcagtggaagactggtcacgagaattgtgcaaacacaatgggttccagttcttgtgttcgtgtggagtattagtcggttcctattattgatataattaaagtcagtgtagatgtctcagtcacttttgggtttttttttatttcaggattggagggctggcttgtgatcatcatggaattatcctttatcattggtccaaataattgcctagtcgcgtctctcttcttttggtggagaaaatcgagttgaaggaagctttgagcggatcaaagaacggggtctagatcaagttgttgttgac

SEQ ID NO: 203475 - DNA, 531 bp, Cannabis indica
agagagagagagagaaggatatttgatttttttagaatttgaaaaataaataaatggtaagggtcttttgggtaaattggaaaattattaagatagtattgtataaatgatattttttgtaatatgtgtcttttttaagtatatacaatgaaatttcccttaatttgggtgtaaatttaaatgtgataccatagattattattattttgaattatgatttaagtaaaaaaataattacattctttaatttttttaagtaaaaaatattataaatttaaacccacattaaattaaaattaagcacacatcacattcttattaattaagagtatagatactttatattacactatacaacattataatataaaagcaaagtcaataattcataagaaaaatattataaacttaaatgtacatttaaaaattaaaattaagcaccccaaatatatcaaacataaaagcactaacataaaataaaatgtgatacaacaattcaataatatgaaagattttagtaaattaatataa

SEQ ID NO: 203476 - DNA, 1054 bp, Cannabis indica
acagcaactattctaactgaattagttcttcaaatttttggtgaagacttggggggggcgaatcctggatattcctaggatttccattaatcattcgaatcagattgtttggagggatactcagaatggaaggttttcagtcaagagtgcctatttgcaaaccagaaatacagatttaatccttcaagagacttatggaagatgatttggaaaccaggaatacatccgagaaattctattttcatgtggagagtgcttaatggagcaattcccactagagacaagttggtgttcatccatgaaaaggagtgcctctgtgtggtgatgaaacggagagctgtatccacttatttagagactgtaatgtgatcaaaactctctggttaatgggagagtttcctatctattgtactaatgttcctggtgagacaatgcaggagtatgtggagaatttaatagccatttttcccagttctgaccgaagttctgcaatcaattacatgggctgtctttttagtgcaatttgggctgaaaggaacaagttgttttataaaggaagctctgttttcctccctctaattcttcaacaagttgctgctcaatggaaagacttctgtagttcggcctctgttgcagatgttcctgtctcgactgttattaatccttgcaggaaagtcagcaatgcctcgatcgtcttgatgactgatgcctcttggaaggaaggagcagctggtcttgctgcggtggtagttaatggggaaacgggtagatgggctatgtgctctgaattctccactgccttctctgccctggaggcggaagctaaagcagttttttgggcacttcaatgggcgtcttctgaagggtggcaagagattcatgtgatatcagattctcttatagttacacaggctttaaatcaagggagatgcattccggattggcgttttttgaatttgtctctatcaattttagacttaattaatagttttgtttcatgtagtttttttcatgttagtcgtagtgaactttcttttgtcgatggtttggcgaa

SEQ ID NO: 203477 - DNA, 921 bp, Cannabis indica
taacttctttaacaaaagtttaacacataaaccaaactcaactccccctggaaaaagggccgagttgaacacacaaaccaaaaacttaaaacctactactctccctttttgtttatctcaaaggcaaaagaacgtaaagaagaaatcaaggtgtcgactaactttcaaagaaaccgttccttgtagaaaaaaaaaaatacttttttaaaattttttaatgaggccacatgagaataagagggaaaaaataatgaaaaaagaaacaaatgagcaattaaataagatttcccagcaacatttgtaataagtactgaaatagaaaaaaaaaaaaaacaaggccaataatctcataaaacacaattaataagggatcatttataaaaggaaactcatcaaaattttaccaaacaaaaataaatcaacacttaccgaaagaaagacaattgaaaaaaaaaaatacgcctataagtcatgtcacacgacttccccccttttttttattatttttttaatatcatttttttaaaaataaaaaagagataagaaactaaaatattttatacataaaatcaagttattctaatgcatgtatgtttccatgtttcatagaaaggataataatcatgttatgctttaaagataataaaaacttagtgtctcaaatacaaaccatacttaccatatgttgtgaaaaaaataaacaagttacatgacatattatatgaatcatgatttttttattatttgaaaagggaagacttacaaacttgtacacacttgtcagacagtagtgtgtgtagtgaaaaataggatcattgtccttcacatgatttttattttgcatctttttcattttgatttcgcaagtggatgttttcataccatactgaaggtagccattttctatgatagtacatcatc

SEQ ID NO: 203478 - DNA, 1046 bp, Cannabis indica
cctatattcaagtagtttagctagtatgcaacttcatatttctaacaaatggggtttacttacagttttgtcaagacctttgagaactagtgggtcacattgaatgataccacatcttctgccagattttctgtgaaaaaaaaaaaaggaaaattcagaagcagaattctagggaacctggggaatacatatctatcactaaaccagatgagtaatcttactttgcctcatttataaccgtcataaatgtgtgcacaaatgctggtcgtatatcaggtggttcatctcccaactgttcaccacgaggttgtatataagcagtttgaatcaacaattcaatcagacgagttccaacctgaaaatataaaagagcagtagcatgtgatttagaaagtagaatggggtgtatgataagaagcatgagttccatctcaaaatcaattgttgttgagaagaataatccatgctcttataaatggtattaagttcccacacacttttaatgtgggactctctaacatccccagtcaagattgtgactatttttgttcaccaatcttgaatgactcaatcgtaattggttaatttggctcactactaccgaatcacaagtaactcttttggctccacttttttaaccaatttgtgtttggctctttggctctttggctcgtgatatcatgttagaatgtgaaaatatggtttagaaagtgaaataggttgtatgttaaggaatatcgggaattctatttcataacaaattggtgatgagtggaataaataattatgttcttataaatgatataccgttcccacacactttcaacttggaactctctagcaaagagaaagatcaacatttgaaaaagcgtatatactgcttttaaaccaggaacaattaactttcaccaaaattgtaactgaacacataccttagccttgattgcatatccccagggttttgaagcatcttgtccattcaccacctgtctcagtgctcgcaatttctgctttttcatcaaattggtgtacttttttcttttagc

SEQ ID NO: 203479 - DNA, 1307 bp, Cannabis indica
gatatttacatcttgggaactatagttcctgggcataaaaaagggcctagcacccaagttgacacatagggctggccttacgcccaggttggcaatttgccaatctgggccacaaaaaatggagtttttctggaattattttgagcatcatctccgtctttagaaattattgagaattaactacttcttgaaccaaacagaacttctaaaggggcaaaagagggacccagcgcctaggtttacacccgggactaggccctgcgcctaggttgacattttgtcaacctgggctgtttccaatttagttcggcaaaaagtgctctggcatctttactatcatcaaaaataacaaagattcaagtaaactcggggagaagaccacaaacttgagtccctggaaacagggtccagctcctatgttgacaatcaacgtgggacgctgccttcaatttcttaaattcaaaattcgatgcaaccattgaatttgacattatcaaaaatgggggcagagatcccgtcctcaagttgagaaaccttggaagccttggaagtatcaaaaatagatatcgaatgctcggtttaaaggccataacgcccaggtcaacaaatggcctggtttgctaagttcttcatatccaaatctaatgtcatttcgaccgcccatcaagtttttcacaagtgcactgacccatgaagtcaggtcaatcaaattcccaactctaattttggccaattcagaagcgaggagttttgagtcgtctgtttccgcaaaacagcaacatctttgagaatgtgtgaacaccttcaccaaaacatataaaatgactaggggtgtcaaaccatcacttaggcatctcaaaggacttcccttggatgtttctacacttacacagcgtcttggttgatgccggatatcaacctgggccctggcacttgaactggcatcagtaaaacgaccataactcactcaatttttatttgattgacgtgattcaacttgtattttgaagctatttaagccctctatcaagtcatgtctcacacactagtcaaaaattcaaaactattgttagcaaaatttaccctatgagagttacaaaaataagttccaggtaactcctagtttgcaatcttgtagacaattcctggttttacaaggtagagagtatgggggctgttaatgccatggaagcagaaactttggctgttcggatggctttgagtattattgcagataattcttggagacaggtgaagatcttatcggattgcagaacagtgctcagagcttgctcttcgtcgaagta

SEQ ID NO: 203480 - DNA, 1861 bp, Cannabis indica
ttcattaaagagagtcccaaagcaacaagctataagaaaaggtagagaactattccaaactaattcattatctaatcctaaacttagcttagcaatcttatgagcaattacattacaatcccttggaatataagaaatggctaggttaggactgaatgataacaagtttttgacctgaattaggacattatccaaaatactattattccaattacaagagacaagtctctccactattgatttacaatctgttaaaagtatatctacaagcagatcaattagttgagcccagtggatagcatggcaaatagccttagcctcagcaaccggaggtggctctaaaccagcaaaaggagtcgtaaagcctgccacaactctgtcacatgcgtccatgactaccactcccacactatgcctgggattatacgtgtcaatagctgcatctctaaaaattttgaaccgatccaaacccatttgatgcgttaaagcccttggttgcaaagaaactactggagaatgaggtttggaacctgatgcttcagccttctgcacatccagaaacttaaaaaagaaattaagactctaatcatatacttcccttgggggaagcgatgattgtttatgaaaaatgttacttctttggttccacaaagcccataaaaaatagaacaatataccaatatcctccttatccagactttgaaaaaacctaagaaaaaactagagtggacccatcaccgaatgtcattgtcaaaaatcaattaaaaaccagatttatgtatattaaaaaaaattaggttgatgttaggtgcaatgcacgtataattaattttgtttttaattaggttcaattaggtgacgttaagtgtatgtttaattttttaattaggtaatacattttttttggatttaagattttgttctttaagtaattttttttagctattgttacattagtatgtcatttgaatgtaattatatacatatacatatttttaaaatatttttaattaggtaacttatctgataatacatatattgtaatttattatattcttaaatttaaataatttaagacaattatcatgtatatactttgaattaaaatattacattatttactaagtatattattatatgggtgtacttttaatgggtattacccatgaatgggtatttaaaagtatggaccattagatataatcaaatgaatgatatttaaagttactaataatttttttaaaattaatattttttgttttcacctgttacctgatgacatggcagtcatcttatttttcaaaccccattttttttccttctcattcttttttttttatgaatcagagaattatgctgcacaaaccaatttacaacctaagagcactccaataaaacgggagcctcaatattttgaatctatacaaatattgtatttatattattacaatccataaaaccaatccctatatttacaactcaacttcttaggcaaaaacatagtaattcgggttttaactctccattgcaaggcctcaatcaatctgccacaatcgggttgttcatcttgccattctagtttgttctgagcctcccaaatgccatacaccggtcctgcaatcacattacattctttctaaatctgcttattttagctttcctaatccacctcaaaatcaggtgaaggtcagtatcagccgagccccacaccagccagcttttggttgcttgtaaacactgtctagcaatgaacattggaaaaataagtgttgtatgttctccgattgagtgttgcataaccagcagcaacactcaatttgtattccaaatttggcaaaccttctcattctcaagtgaatat

SEQ ID NO: 203481 - DNA, 1480 bp, Cannabis indica
ataacattattgcctctcaaaaaaaagaaaaaaagaaaaaacgtctacacataattcaaacttcgaacaagtaccaattaacatcacaaatttttgagcgattacaattaacataaaatgaaatcagcgaaaataaaagaaaatcaagaatctttagaagaaagataagcagtttggggatcgaattggtaccgtatcggagcgcttaagaagtggaccctggagcagattccgaccagaacctgaagctagctgccgtttgatcttctccaagctactctcggcatccccgggctctgctaacatatcaagattaaaatttagagtaagaaattaatacatagaaagagagtgagggcgagagagagagaaaggaagctgaccggagaagcaccattggtggccatagcagatcagaaaagagaaattagaattgggaaaaggtttgtttgttgaggaagatgtctgttaggtttgttttggttggactagcaggtattatttttattatttgttatcgaatttaagagactatgttagtgcacgtgccttacacgggctttttttatttttttgaattataacaaaaaaaaaaaaaaataagcctaaaaatacgtaataatgataaataacaaagtagttagatctctcgttcattatctaatagatttacatagatagttaaaatcggaatacaaccaaatttcttgtgggagaacgtccacttagtcgggcgcgacaaaattacaagttctacttacaactaataaacgaagaagaagacttggtacaaaaagaggtatagttctcaagtgtccaatgaaactccttcccattaagagtgttgataactaccctcgagttattctcaacaataataaacttaaaggcgagattaagagcaaccgtcacagtcaaacagcaggttatcgcctctccacataaagcatcagaaaagtctaaccacgaagtctgaattcgaaccacctcgcagaggtgattacttgcaactactgcaatgcacatgttatctaagcccattttaacatcacaatttagtttaattcagtcttgaggaggaggagaccagacctctagcaagcacggagcagagcaagaaagcaaagatgcatgtatatctgcaaagaaagtgcaaatagactcaacacacttcttcacatctactggacaattattgtgtaccttatcattgcgagtccgccagatagtgtcaataactatggatgtgtaaaggaagacatccctaacacagatacccctatgattgaggtttcaaatgaatttgatccagtctcacaagcgaataccggtattaaagataggataaatgctccagggagaagatcaccataaatgaaaagccacatcacaagacagaacacaaatgttcaaaagattcctcctccaacccacaaagagggcaactcgtatctttgatatggaatcttttcctaatcac

SEQ ID NO: 203482 - DNA, 828 bp, Cannabis indica
cttctaggacggctttgcacatgcctacaaatacattaatcattattgtttattccttttgaagataaaaatagaatccattcttttctttttatctttttcgattgcgaacctaatttataaaagagaacaatattgtcacttcgtttaaagaaagtgagacctaacccaaccacctgtctcacttccttttcgtaaacaaggttgcgtacatctgactatagataagacgtcgcagatctctacctcttcattctcaaaagaatctaagtgataaatcataatgtgatcgatcacctcatctctcaaaaagtatataatactgaaagaattggcaagttcattccaaactaatttcggagaacatttaactttctgttctagctgtaccacgtattccataatttatcagcaaataaaaatcaatccccaagtttaagaatattaagataaaattctcaattaatcaagtggtaaaaggagagcttctacaacttttgtattttgttttatttttttgtttctttatattttctattgctatcccttgaaaagatgataaggaatgcaattacaacacaatggattgtgggttgcattcactcacatccatccgcagagacctccaagcttgcttgcacctttcccacttcatctgcatatgacccaaatacgcttttgcccatagttcattgctcccacccgtgcttagaccatacggcactgagaaactgtttgcattttcacaaaacatagtaaaaacaataacgtatcaaacacgaaggtgtcatcatcattatcaacaataagtaccattaatataaaata

SEQ ID NO: 203483 - DNA, 717 bp, Cannabis indica
ttttaagactaaattcatgaaccccacaactactactttttgtattctattaactatgatctgcattttttcatagcaaaacatataacaattatttacatttgattaaaaaaactcaccttaactcatccattagtattgtcaacttttaaaattaaatctcgtactaatagagtagatagaatatttatatttaaaacaactcttgtttattcttttgatatgagacttgaatcgatagtccaacattatatataaattttgtatacatacaaaaatttggcatataaatatgttaaataactagtctcttcaccagtaagttaaggattttgtgtcttataattgtccttgaaacttgtttgctcaactatcttctcatttatttattattacttttttctacttcattttttacaaatgtaattttttactaatttaagtaaaatttgatgatttttatcttttaattttttgataacaaaaataaagtaaaattttatttttaaaaaataaaaatgtattgtataattattttatttttaattataaatataaaaaataaactataaaatttattttacatttttatttattatttatttaatttaagttggattcgggtctaagtctacgggctgggtttaggtctaaggtggaggtctaatttgggtttaagtttgtattggagtctaaaatattaattaaaaaaaaaac

SEQ ID NO: 203484 - DNA, 890 bp, Cannabis indica
ggtgtcaatataagtgtccacgataacataactagaaaagaatataaaattaacggatttgaatttaacaattaacttaaataaatacaaatcaaataagttaaacatgtatactaaaaattttaagttaaagacggattaacttactaaatttaaaattgacataaaaatacgtattaataaacaaattataaatatactgacaaaaaattagccactttatttatttaaaaataaaactttttatacctacaatatatatttaatatgttttattagtcattttgctaaatttttgtatttatctaattaatctatatatttttggccattctccccttaattgtttttgacaatataaatttttcaaaatttttttaaaaaaaattacaagtggcctaacttacactattataaaaaaattaaacaaaaaacctctttgaaatgccaaaataaataaccagttttagagggtatacttcggatttttcctaaaatttactttgattataaaaagtcacaataaaattacatctccagaaaaagaaaagatttacaaaatatgcaatcctccaaatatatacaaaaaataccatccaatacttaattatcaaaaatacccaaaagaaatagagaaaaaattaattactagataaagctgaaaaccactagcattctgccacgtggcagatagaatcccatgccaatgcacacactctcatattacttctacactatatccacaagcccctcactcaaaaactccaaacaaaacacaaaaaagaaaaagctctattctatcaaccaaaaagatatggcctcaacaacaacagcagccaccgctctatcaagcacaaccatgatgagcacctcctttgtaaggagacagc

SEQ ID NO: 203485 - DNA, 1395 bp, Cannabis indica
gtcaagctgaacatcaagtcacccttttccttttgattcaacataagacctctttgatttcaacaacctccaaaaaagaagcctcaacccgcccatgaaactcattgaaaagccttccaaaaaagtgttggaactatcacgagctactgctctcacactgaacttcccttctaacttgaaaagtattttgtcgacattaaccattatcttattcacatacggtttagtccaatgctcaaatttactatctcacttcatcgcatgagacaacgatcccgtactatttgataaaatgcatatatatttttttaaatagaatataaatttaatttattatgttttaaaatatattagtattatttaaattatattttaaaattattatttttttacgttaaaatattaattatatatattttaaatgtgtagatttaattgaattaattatttttatatattaattaatatcaaattaaatttttaaatacaattcaatttataaaaatacaaacatctctattttgcaaattagattgaatttgcaaattgaattgaatcgtgtaaattaaattaaattgagtatttttatttggtgtaacaacattttcttcatacttggatttggatgtcataaaacgaaaaagcaaaaaacaaaagagagggaaaacaaaaacaacaaaaacaacttcctacgcttcctccatttgatcccgtatgtatctacctatgtatccctctcattctcaaaggttagattagttagttgagtgaccatcttcaatcttccttccccttaattcattttttttttcagcttcagatctacttctccttcactctccttaatgggttttcttttttctgtttaccctatctaatttttttttttgaatttttgaagtcgtagctttacaaattactcatttccaggtgaccccataacgggttgttccccaattatcaaaatctcctaacagttgctttgagtcgccattatctctataggtagtggtaatgatgtaatctagggtttgtagcactacccagatgacaatttagcctctaattgtttgtttgtatacagataagcctagatttttcttttttcatactatataatgcagagttcgtcaagctccgcggctcaacctgaagccatagtgcaatggcttcagaaggaaatgggttatagaccgttgggtccatacactgcttcttctagcaaatccgggttgccttccattgacgcactacgcaagatttgccgtggtaatatgatacccatttggaattttttgattacccgggtgaagtcggagaagactgtggagaatatccggagaaatataacagttcacggtggtggtggtagtggcagtagtgatgggggaggta

SEQ ID NO: 203486 - DNA, 687 bp, Cannabis indica
atatatatataaataaactataattcaatcaaacggtttatttgcaaaacccaaaatagctaaagcttaaaataaataaattaagtggcattcttgtcttgtttatcccagtgacaaaataaaaactaataattcatttttcaatcattaaaaaaccaaatattttaaataaaatataaaagttcttccttccagtttcccctttcacccgtttttgcagctgaaaatcaggaaaataaaaccaataagtagagaaattggggtttcttaccagaacaaagttgttatcacagccaggccttttgggagcaatattatcattgtgaactatgtccccagctgaaccaacctccatactcaacaccataaccagcagaacaacaagtataactttctgtaaatccatttttctcactttaaaaaaaaaataacactaaaaattaataaataaattaaaaaaaaaaggtactccagaagaaaattaaataatggaattataatcagagtttaaaggtaaaaggttagggtttcagaaaatgagatgcgaagaagaagaagatagaaaaatgtgagtgaaagaaataacggaaaaaggaagagaaaagatagtaagggggaagcaagtgggattgcgtttgcttttctggtttgtcgttttgtccaggtacgaggccagatgagatggaa

SEQ ID NO: 203487 - DNA, 1423 bp, Cannabis indica
catattctcattcacattccgattcttatattttcattcattctaatcaaacataacttaatagctaaagatataaataaaaaaataataacaatgtataaagaaataaactttaaaagtagcaatatttatgatataattatgtaccaaatatttttaagaaaatgttatatatcatgaaaatttatcataacaattatcataaatgacatggcatgctataaatttttattatatatacttatgtttactttttcggattatttttttataataaatatattgtcacatcatttaaaatgctaattcatgaaaattcatcaatgcatgtagtattgcttatatttttaatacaattaaaataatttttagtatgtatcaaatatttttaacactcttttggcttattgaagcaaatttattttaatttttattttaaagcgaagtgatatgttaggcctaaagtgagttataatttaacaatatatcattattttttttttgaagggacaatatatcattaatttagatgctcttattagccacttgttaaatcattataattgacactaacaatatggccactaatgaaagctattataagtatgtataaaaatagtaccatctcctcaaaaacttccaaattatgtgccaatccattcaaataaaaccccacactcccatattaaccctttatattgaaaaaataaatcaacaacaaacttttcatcaatatcaaaacaacacaagaaagaaaaactaacaaccccctcccaaaaaataaataaataaaaatggagaactacgtgaacacattctttatggtcttcttggtcacaattctaatctcaaatccgccacaacccaccagagcagccggcgagagccttatcccgacggcgtgccagaatgtagagaaaaaaggtttctgcaatgcaatgcttgaatccgatcccaactccaacaacgccgacttacccggcttagggcttatagctctcaagcaagccgcgtcaaacgcctctgatatcgccgagtacgctaagacattatcaaacgatcccaatctcaaggaaggcgccgccaaatgcctccagttgtacctcgaaaccgccgataagattaatgattccgtggcctcggctaagtccaaagctcatactgacgtcaatgctgggctcaatgctgcgatcacaaactcaaaatcatgtgatgctgcactttctggacatgagtgtgagttgagtgggaagaatgaagtgtttcgttggctttgtgagaatgctttgggtgtaaataaggcagttatggatgggaaaaaattaaactgaaaatttagtaacaatataatatttagaaagaattaagcttaaataattttagtatttttttttaaaaaaaattcttcttattatattttgag

SEQ ID NO: 203488 - DNA, 1424 bp, Cannabis indica
gatatataagagcatttctataagacatggtgcccaacactaatttgagataatatcatacgattagttagtaatattttttataattattaaattatattatatagaattcgacacgtaattgtaccagtaacaatataatacttaaaaagaaaagtattaggcactacgtactaacgcctttaagtatttctgtaaatatataagagcattgctataaggtataaatagtacctaacaccatttaaataattagcgatttttataaaaaaaaaaattatattaaaatatataagacttaatatttcattacaaacacatagcaccataaaaaatgttaaacaccaccaatttacatttttgtatgtatatagtgtgaaaataaaaattataataatattacatacaaaaatgtaaattggtattttttatatgtaatattacgtatttttgtatgtatataccagtaacaatataatacttaaaaaggagagtattaggcactaacacctttaagtatttctgtaatcatataaaagcattgttataaggtataaatagtacctaataccatttaaataattagcgattttttttataaaaaatcatattaaattatacaagactcaatatttttgtacgtatatagtctgaaaataaaaattataataatattacatgtgcatgacatgtgtcttacatgcgactaatattgaagccacgtggaatgcacactgattaagttgacaaacctagaattgcttttgacaaatatttgtgaacacactcgactgtggggcttcccctatacctactaatacatacacatacataatcatcatatatatacatatatgtactttgaatttaattgcatgcatatatatagatttatcttttcaagagtttttagtttgaaaagatatccatatatattaatgtgtatatatagatatataacttgacaggttagagaactgaaaaatgtcacattccctagtcttttgtgttattattaattttattatttattttcaaaactaggaatgacttttaatgatcatgatcttgatgagttgggtggcatcatgggatgtcctctcttgaccttttttacctaaaaatttaacttgagttgaatcttaaattgttagtttatatgtttagaattttatttagagatgaggatataattggggtcaaacaatactttattgtatatatatgtatatgtatacgtgtaagatatatgaagaagtagagagcagcatggtgcatggcctaataaatatgtacgagctagttttcttttatgtgtgtttcatatggcaacaaatgcatgcccattaaaacattattgctagctaatattgctgcatatatatacatattgatatgatcttattctcatccacgaaaataat

SEQ ID NO: 203489 - DNA, 891 bp, Cannabis indica
taatcttaaatcgtaatgtgcatcacaaattaagtcaccatcttaatcgcaattcaagttgcagtccaaaatgtaacaaattgtagccttaattgcaatttaaaatcgtaaccaaatcataattgccgcaatacaaattacaacactgcactagttgagccaaaagtcaagaagtttggaaccaatttttcttttcactctaatttttttaaactgtgttgtaagttggtattctttgtaattttataaaaatatatatacagtataaataattagatttattaatgaccatattttcatttaaatttttaactataacagtattaatgaaaaaaagctctaatttcttcgaaccaaagtcacttttacatttgatttttagaattaaaattatttttgagctaatgtcgtgttattctagtcaattatataacacttacatttggcatcatagagtgaattgaattttgctattaaaaattttattttaattagatagttaagtattctatttttttggtaggaaaaataataattgtaaatgtaattgaatattatattttatatattttaatttaataattattattatgaaaagttctttatagtgtgaaccatagttttttgtgtacctaataggttacaaaaatgaaattacaattcataaccattatataaaataaattattaatttgagaattgtactcaagaaaatgaagtacaaaatacgtactaactagctttttaaaagagatagaaagctttaaaacttgatgaggaaattgataaagagacaagattattatttaaatgatgaaaataattacatgcaaggaattttcgatacaaatagagattgatgtaaattattaatttcattaattaattatt

SEQ ID NO: 203490 - DNA, 528 bp, Cannabis indica
agggcggtattgatgaatttacaatattttgcaggaaatcctaactctttacccttagtttctttttgaagaagaagaagatcaagggtaattttagctgagcttttgctatgtattttttggccttgcccctttgtatgagaatgaaggggtatttaaaggttgagtggcgggtatgaatagacccatgacccgcctaagatttctgcttaaatcccactattggggtaaattacatgcaatatagagcaaagtgattggtcccatgcttagtattatgtccgtgcgtgcaacagctggataatgggggccattttgtaccacttagacatgtgtcacgcaaaagtttaacatttaaaagcaagggacatgtctcactcaaagcttgttcctttacaagaagaattctatagtgttcgtctggtaaaaggatggtggtggtgcgcgcactaccatgctcaaatgtagaagacaagatctgattctgccaagaaaagcataactgtcacttaggtgacctggcgtatg

SEQ ID NO: 203491 - DNA, 1025 bp, Cannabis indica
ttttttttttttggaaaaaggcatagttgttagtcttaattaaaagtggtccaatgtaaaattgaaaccacatcatttcacgcttgctttccaatcttatccctataaatgtaatattgaatagtattgtaaatttgtacttctcgtgttagcttgattcaaacttttttcttcttttcaaattatatgggtcgatcgtggtgccataaaaaatacagatcgcatcatactaatatttttagaaagggtaagtttatatgacctgtacatcttgttttccgtgttatgctcaaattcttatcctactttactcgccgaactatttttcttaagtaaatagtttatttttatatttagattcgaatttttattttactttttcacaattttttttattattaataaaataattactaaactataagtaatttttatagctaaaattgagctttggaatgcaccctaataaaaagctgagcaaaatataaatatatgctattaaacaaaaaaaaaaaaatcaaaaggtttctacatttttaattaggtagcgtatctgataatgcatatattgtaatttactatattcgtaaatttgatataaaattttttattcccaaacttcatgaaaaatatagtgtgtgaattggtttaccacaactaaaacggaaagtaatcaattctttattacaaccatttaaatcaatatatatataaaggagagttttaggggagttgatgtggcaacttctatgtcaatttttttcaatctctcttctctcaatttcttaaatttactcctattattttaaagatttaagtatatatttagtttattattttattaattatatattaataaaattaataataaaaaaacatttccactaccgttatatccttctcattccaactctttattatctcaaaaaaaaacctttcctctaccgttatattattctcattctaattttttatattttttttatctaataattaataataataattatctcaaaaaaaaaaaa

SEQ ID NO: 203492 - DNA, 518 bp, Cannabis indica
taaggtatgccgccagttagaaacctaacagtgatttcgatctatgccataaccaggcattgtcatattactaccacccatatctagcaaggtacgctgccagttgaaaatctattagcagtttcaatctatgccataaccaagcattttcatattactgccgcttgtatttaataaggtacgccgcaagttggaaacctaataaggtggatagggatctaagaccatggtcggccacatcgttggtggggtatgatgttataaatattattgcctaaaaattaataattttttatgtataaaaataggctaattccgagacatgggaacttttttagtgttgtgggcactttccaaaagttccactataagaacaacaaatgacgcgatgaatactcacaaaaatcgcgtacgtaattttatatcttttagaaatactttttatatttaatttatattcaatataatagtttattaaattactttttaggccaaaatagttgaaattcgtgaaactt

SEQ ID NO: 203493 - DNA, 794 bp, Cannabis indica
gatgttgcaatgataagctggagcttatggaaagcttgaaataaagtgttatggcagaaaaaaaacctgtacagcagcaagtgttgtgaagtcggctcgttcggttattgaccattggaaggttgctaaaaaccagtcgtcattgtatcatactggtgtttattttcagtgcaaccattggcgtaaactagaaggattaaaggtcaaggttaatgtcgacggagccatatttgaagcatctcaaaagttcgggtttggttgtgtggcgcgtgattcaaatggcagattaattgaagccttttcagctagcaaaagtggggttgttactcctgaaattgctgaagtcattggaatgaaagaagcgctgagttgagttaaagctaaaggctaggaagaagtgattattgagtcggatgctttattggtagttcaagcaataaatagctcagtctccatgtcgtctcagtttggtttattggtggcttactgtcgctcaattttattatctttaagaaatgtttcaatttcctttgtttatcgatctgctaatgaggcctcccattgggttgctagggggtcattttatgtcaggttgcgtttttaatgagctgaatgctccttctgtgttgaaaaacattgttatggctgaggccttttttaatgcataatcttcctttgaaaaaaaaaaatgcacctcacgaatgaaaatgaggtattaaatgttccatctatggggtgttttttgtaaattctcttttgtagaattctcgtatatattatattttaataaaaaa

SEQ ID NO: 203494 - DNA, 520 bp, Cannabis indica
gaaaattgctaaaagggcaactacttgtggtgtcatactactattagtgtaattaagtattaagttttataaattttaaagaatatcactaactaatagtgtcaactataaaaagttatggacactaccagtattcaataacaatactcattaaaaattatcactaaccaatttcaacactcgtctagggatgtaaacggggcggagcaggtgcatctcccaccccatatccgttttttaaattcaccccatatctgctccaacacccgtttaaattaaaggcagggcaggaattacccgatggggaaagaatttccatcggatatccatacccgccttgcccccgaaagtcaacccccatacgtgcgggttggtataattgccatccctgactcgtcattattctcttacaaattttactttacacatcttgagaaatcgtaaaatttcacttactttttaattggacactctaagagaaaatttagttttcaattactaacaatcattttttatcgat

SEQ ID NO: 203495 - DNA, 1342 bp, Cannabis indica
ataaattatcattcttaagttctgactaactaaaaaatctatagctaaaagtatattagtcacaaaaattaaaatttgttatgactaaatgtgtttttagtcacaatacttgttgtgattaaaactaaattagtgacaacttgtatctaaattttatgttttagttatgactaaaaattacatttagtcacaaaaaaaattatattattactaaaaaaaacagtcattaaagatagttttttttttaagtaataattaatggtctgttttgggtttgtataatatagtctgtttggttttgtatgaccatgatgatctgtttttaattttgtatgaccagtatgattttatttttaattatgaaatggccaatatgaataattttaattttctaaaattactatggtttaaacaaaatatcagatgtattagagatactttcaaaacgaaaaataatataaataagtcacattatttatatcataaaattatgtgtgataatatttattaaaatcttatttatttatttcttatatatttgatactaattaatttttttattatttttttttattttgtagttttctaccatggtaagatggaaacaagttaaatatattttttcttgtaatgtttatacgttttattgtctagatatttttctatacacttaggataaacaataaatttttttaaatataagaaaatcctccaatttttaagtattttaatcttttatacccttacaatatacatatacataatctcataattaatgataaatatatggattcataaaaaataaaataaaaaactaactattacatatgtattattataggccatcttttactaaaattccaccaaaaagaatattctttattattattttataacacaaattaataaaatattatgtattttcgatgtttttttggatttgttagttcttgcaaagttattttgcgctctgtgaatggtattgcatatggcacttcttctattactagtttcatatgagattgtatttagacaaatgtctgtctatatttcattaatttttctgtaacagttgatttaatttaatgaaattttacttcctttaaaaaataataataataaatgctagggtgccattatagcaccacttaattttgttacaatgttgttcggtttgagagaattttaacacaatttttattgtttaattttgcagttccataaatggagttgcccttatatataggactatatggctcttggttttcaacaataataagaataataaagggatgtatataaataatataagtccagtgttttggtagatctcctatttgtt

SEQ ID NO: 203496 - DNA, 963 bp, Cannabis indica
attgtcatcagatacaatacttactacttagtcataagtaagagagataagagtatctcaatggcttattattagatccatggtttctaatcctctttgtttcttttcacttgtacaggttatcattataaaattttgtatgtgagtagttgttatccaaaactgatgatttgatatggactttacacttctgaattagtgttattctctatatgttgggtaaatatatctaatcttttcttattgtcaaattgtggggctctgtacatgggtaaataattgggtggccaccccagaacttgctgaaggattgggatttcgtgaggttctaagctggatcaaagagcgtcaatagcaggaggtgattatagaaacggattgtttgaccgttgtgcagactttacggaattccgttcattattgtaaaagtttactttccgttttgcaaaatgttttttattgtttttattaaacgatcgactaatatggtggctcataactttgctagagcttctatattatatcttggtcttcgtttcagcttagatgatgttccaactaacttgctaccttgtttggtagtagaatttaatgcttaattttaatgcgagaatttccattcaaaaagaaaattctaataataatccttaattttgcaaatcaatttaaagcggtagtttgagtttgaaaattgataaggatagaaaatttgaagaaaggaggattagttcagttatagatttgtggcaatcaaatgataccaaaattattaatagagaagaacatgaaaactgaaaagtattagtgtcccccatcaaaaaggtacaaaaaaaatgtaaagttatctttacttatataaatggcattatttgatttttgagaattaaggctgacattttaatcaaaataaaaacagttgagaaaaacataagataaatagagtatataaaaaaataaaaaata

SEQ ID NO: 203497 - DNA, 3032 bp, Cannabis indica
tccatacatccgatactggtaaacatttgccaatgccctggaaaggacataacacttatccaaggtgtaagtatacctatcgctgattatcatgccagtctaaatccagtgaactgacaaatcagggaattaaacttttgaacatataatcatgattatattccactgtgctgacaacactataatcatgaacaaatacatatgttctggacctaatagaatttataatcatgaaataaatcatgtgaaccatgcaacataaaatgatttctgatctttattaattagtaaatctgattatattgaaatgggttttatttagggcacaaaacccaacacaattttcccttaaaaagccattttcaatgaaaagtactttttaaatgattacagatggtattctcgccataattcattttgaaaaaatgcatgcctttaattttgggaattttgccgttttgagggagatcatgagcatttattaaccattttttccacttctttcttatttctatctgttggatcctatgtcttttaatctaacagagacgaacccaataaagaaaaaaaaaaaaaggatcctctttccaccatttctgccattttaaaatttcttgagattctctgccataaactccatttagattcttcgaagctttgcatgtcctgtccgtcactcaccttatttctacgagtttattcagatctactattcgacctcaaggattcgcgaagatcatcacgtcattcgttccatccccagttgcaggatcattcattgcatcaccactcgacttcaagtagtaagtaacccatcccccttgtattttttttgtattttctgggtttgatcattatttttatagtctacatttttgtcattctatttggtcttagagatttctagtttaaaatcttcagggtaattttttagggtttaggcagagtgtagatttttaggttcctcatatttttaagtgtctggtttgataaatttcatccaggaattgagattgttctttttccgtagaaatgtctcaacctggttctgaagtttatcctccagaatgctaaaaaacagagtgtcctagtgaattttccatcccatatacaccaaaaatttcaaaacctcagtccaaattagaaataaatgatgcaagaattagagaccacttaataaaaatccaccaggatgatattgctagtcgccataggcatttcctacaagaaattagagagggtaaatgtcgcttcttatgagatgctgcttggcctgaaccttcccatacatcatcttttcctttagctaaacccttatgtttacctagattcacaattgctttttcaccaggtgacctagattttgaaataatgacctccaagcctcgtaagtccaagactccccaaggtcccaacattacctacgaggccaaacttatcgagtcaagggtatgagccaccagagactatgtaggtagcatcttaaagacttgtggtattgaccataaacaaaactgtcgggtaagatccgtagctcctggcgagtttagctattacccaccagaatggcttactcgcgaggcacccgaggggactagtggcgaggcgagtactagtggctcgacaaggataggcgtttggagcctcgagcatatcagggctggagcaattctccacctgcgaggttactttaaggacttccttaaccatctcagaattgccccatttccgttggttcctatttcctacggaatccttgcaagcttaagggttcgtacaaaattcttagattggagtgccctactcccttggaaatagtgtatctctactcagtcaaggcagtccctgcgaggaagaatgatgcaggaggcttttattatctttggactcacacaagtgatcgtaagattattgttgggtttccaaacaagactccttttagcctctctccaatcaacacaaccacctttcgcataataggtaagtgactatttgtctcaaacttggtttattattccatgtttttaactttggccttgctgactttaattttactttttttcgacaggcgtctcgaaaagaccaacttccactcccaagatggccgagcgacgcaggctcctactgggtcttctcttcggtctccgatcagttgattttctcttgaacgaagccaatctgagatccattgatcttctcattgaaaacaagtgtacttgtgattataaatatcccaagtatacatcatggcaaaaggttccagttccagctgatgagaaaccccaggactatgcagctcgtgtgcactatctccagaatgcagtccctcgggaagctgaagaagagacatcccaaggttatcaatgtggatggttgcctacagtacttaggaccgagtggaacactctagtgtcttttcgagatatcaaatacaacttttatacatggaatcccctcctcatagatcgtatagctcataggttcaatagttggtacccagaattccatgtccagattagttgtagtagctcatattatgggatttccaagcaatacgggactatgctagatagatcggtgcatatagactcaagttgggacctagaaccactgaacccttatgatttatttaggataacaggatctagggagtttagtaagtattatagccatccttcattgtcttcttacgactatggaaaatcccttaagtgggaagtcattcccattatcttctttacctattttttaaataagtgttaacacatttcattgtctcgcagatatggatctagacgaccttttttatacttcgagcaaaaagaggaagaagaggataaccacctcggaagcctcttcaaatgtcaacgtggagccccccaaaaggtccatgaagactactaccaataagaaacatgcctcacagaccataaatctcgaggtccttgggagccaagttcaaactcatcctcctgtcgttgcttggtagcctgaacgagatgctcgagaggagtgtcgcttttagcctctcg

SEQ ID NO: 203498 - DNA, 693 bp, Cannabis indica
aattttattaaatgaaaaagagcctaaattaaatatcataatcaattatcatgcctatagaacaaaccacttaatatacaatcaattatcatgccttccccttcttcaaaaaaatgactatctcatcctccataaaatatcaatttaaaggaattcttcatttaagctattttggaaatgcaattaactaatttcaaactgtgacataggtaaaagatacaaaaaaaaaaaacaaataattagataaataaaaagaaagaaagaaatgagctagttatgatgaataaaaagaccttcccaaatcagaatataacaagtataacctcatttgcacaatacaacaaaaaaaagctaagattgtcccattgaacaagtagaagacaaaaagacttcaaatcattataaaataaaaaatcaatgcatacatagtaacaccctacaaggagcaaacaattaaagaacacctcctgcaagtcattttctcctaattgtactttggagcatttgtctacatacctccagtagtatatttatggagctgaatcatatggctcttgaatttaatattaccacgaaaccagatactctcaaggcgccgctcatcctcatgagtcgatgtcttaggcccggctccacgagaaagagtgtggaaatctggaaccgggaggtagaagtgttcagctgcggcaacgt

SEQ ID NO: 203499 - DNA, 1289 bp, Cannabis indica
taagatcaataaaatatgaagattgcaaagtcataatgtcattgacaggataatgaacattcagcatttcacctgtcctgggacatgacaagcaattactcttcattccgtcaataagaaatatctcagcgaacagcttctgaactgatagaaactgcatcactaaagggttgttttcaggctgagatatcatctggaacaaaatgaagaaagcatcttcactaaagacgaaatataaacatgtctataatttacattagataaagaaaaagtccacagcaagacctttagaggatcttgttcaaggtccacaaagagcagctgtatttctgagttcaagcttgactgaacatgctcagcaagtcctcttatgtgtaccaaatatatcatatcttctatgatcattactctcaaatgttggaaaatgctagactcctgctagtttttttttttcagaatctagatgtaagaaagtagtacaaccaaaaaagttttcagaataaaaagaaatccagacaagagagaaaattacatgataaggatgatgagattaattttcaaacgaaaccaacaataccctaagtaattcatgtaaatagcagaactgaaactgcaaatgtaacctatggaattaaactagtgaagaagatacaaatacaaataatttaatagaattgaactatgacacaatgattacagatagctaattgttgttgttacaaagaattgtttagccatacagtagcaatgcagtacagtagttcagatcagcatagtccaccaatacaacatttacaaataattaaacgaaaagaaaataccttttgacaaagtttgagaagtgcacataatcgttcttgcagttcaggcatctttcccccatagtctaccatgatgactggtctcattccagtgcataatgcaagaacatctgcccaaaaataatttcacagatcaacataaatcattagagcgaatcagtctttttattcatacacactttcttgaatttgaataaactaaagagtcatttaacgaaattaacttgacagttttctcatttttgtattccttatcataaagtaacatctcattctttatcaataactaattaataccaacgaactaaacatgagtctaacatttgaacttcttactccactttcagtacattttactctagatcaacattgtacactatcaaatgatcagaatagatggatataagatcctacaatgtgctcacttatatatgactttcctatttcaatattttcagttgttaattt

SEQ ID NO: 203500 - DNA, 872 bp, Cannabis indica
tacatgtcaaagtttaggaaatacaatttaattacatatttaagtttgagaggcgtaatttagtacaatcatattagaaaaataatataaattaaataaaaattataaatcaaacaatctcaataatttggataagttcgaaaagttgacctaagtatagtccaaaatctttatattgttcctttccttacctctatcttgatgtcttatcttccaatttaggatagaaactagagaattaatcatgggatataattaattatgtaatactacacttaattaatttgaaattgaatgaaattactatatatatatatacaataaatatttctggaaaataaatatatttactaaactatatgtgcacatacctctctttcaagctcttctctctttcgttgcccattttgcttcttctttcgctatatataatatgattaaaaatcaataaacaaaattaaatattaaataattagacaaaaacatattacttaaaattataagaagtgaattaataatattaattagaaagaatatatatttagcatatgatatgatatatattatcatcaccactatatgagatttttctcaaatcaaatcaaatttaaacatgcaaactcaaagtaattatccaaaacttacaataatcccataatataaaaggataataattaataagcatacatatatatacatatttatacatacaaatatatattataatattaaacttacaataatatttccggcggccgccggtataccgccatagtgatctccggtggttagctggctcgccatgaagtagccgaaatatttcctaatttattcgccccgaaaaaaagaatttaaagcaaaaaaaaaaaaaa

SEQ ID NO: 203501 - DNA, 637 bp, Cannabis indica
aagtagaatttgatattaaattagatgaataattatattacatttcataatagtggtagagactatgagtgctttttaacttttctaaaatattaaatgttggaatttgacagcctcgtgagattgctccctatggatggagatggagtgacttctaagggttgttcttgttcagttataaaaattccaataaagaatggggtgaacaatgaaggatgggaaaatgggtaaaaagaggagagagaaagattggttagttggtttgttggataggtgaaagaaagggaaaaaggccaataataataaataaagagaaagtaagtaggtagcgaaggtgtgtacaatacacaagagtaattaaagaaaaagctgtactctctctctataatatatggttggttggttggttataggcaagtgtaaatgtaattataggcaagggaagtagtggtgtggtatatgatgcagatgcagagtagtactggctactgggtgggtttgagtgggactctacttttcaacttttaaagctttcttaaattccttccaatgtgaaaatgctaccccacctaatttttattatctttttctttctttctatatatgctttaagaaaaaatcatatatatttttatta

SEQ ID NO: 203502 - DNA, 1014 bp, Cannabis indica
gattaaatttgagtctttcaaaattttgacacctcctttttcaaaaaaaaaaaaaaaatgaccaaaatggaaaaattaaaaatctttaattgtttattaaaaaggaaaaaaaaaggttctgtagctctagtttcaacctaaaagatagcatcttcaattggtctcaaataaaaaaaaaaaggaaaatggctctgattctcacttgagctcgaacaaaaaagttagctctgattctcggttaagctggatcccgatcttgattttgtttttctaaaagaggacggtgtggcagtgggcaatgaaggaattggtggattggtaaacaagttatttcgaaagtaccatgaatttggtttatatgcattggtgaattattttttgttataaaatgtaaattttttattgaatggattgatttatgatactgagaacatttaccaaatgcatttggttgaatcgggagaaatagacaatttgcttatatggtattgagaaataaattacaaactctatatagtatagatatttcttttattgctttggaaattatagcagtagctacagataattttcaaacttggagaaaggtgttttacttttctaattattctttccaagtcattgatctcaacaccaaatactcttgtaaaattgagaatttttttgatttatttttattttttttggtctggaagaagcaagagcaccgtaattcacaccacctattccaaaatattattactattattattttaatcctgtgttccaaactattattaaaaaataacaaaattaaaaataatctattaaatcctaaatatttattattgctatacactcattcatttatcaccttaaacttttaatttatggctgtaaaaatccctaccgtagagactgttatcccaaattgtgtccacctgacgtagtatgtccacatagtcaaaacagaagacatgtggaattcagcctgtcagaaccggacatgagtgcttgtacggttcaataattcct

SEQ ID NO: 203503 - DNA, 663 bp, Cannabis indica
agagacagcattattctgattaatattaattgctcatccttttttttagttgttgtttcggtttttagctagttttcctactggtttgtattctcttttgaacgtttgttccttgcttctcccctgttcggtgggggtttgtttttgcttcgctttcgcgactcttaatcaaaaaaaaaaaatttcacttgccgacttccatctgaaattgttttccatttccaagccttcttttagggtccccttttttctagaacactcgtagagtttcttgcggttctcaagtccagcattgtactcatctatcttctttcacaactcagctatcttattcagcaactcatccttcttcttttctattttcattgggaactcagtctcaagcactttacttacttgttggtaatagaaatttcttgtgatcttccttagagattcccacataaaacccacctcaatgtcagcgtagatttctacaaatattatgtagtgataccattgttgacgaagatgcttagtgatgtcagtgaccaaagtagtatgcatctctttcatcactttacatacaaagtaaaagcatatgctcttgaactctttggaataaaattctcttgagttggtagtaatgtctccttgtttatgaagcaagtatttgataacaga

SEQ ID NO: 203504 - DNA, 752 bp, Cannabis indica
taaatatattaattatatgtatacaaacattatgatagctaaaatgaatgttgaccacctactttaaatttatacatgaatgtaattcttattattattatttatacaatataaatttacatgcgaatcttctgcttatatagttagctattagtttgctttggtaaaaaaagaaagaaaaccatttagtttacatcttgtagtgctaggcaccttaaagtacttcttagcatttatcattaatcattatcagtaataatgataaagaagatcaatgacaagtatgaactaacgttgacatctcaaaagcttccatatcggtaccacgaaaagcccaatcaagtttcgcatcataagattatgttattctattggttcaagtgggctcagttactatatcgaatggattctttagccttcaaaatcatacgattcgcctatcaaacttcaccgaaacatgtctccacatcaatgaagctacaattcttacaacaaaatagtatgccaggcttttaaattcatcaacagagaaatgaagtcttgtttctctccatcactttggtaataaccattttatttcataatcacaaaattacttataattgtttaaaggaaaatgaatggcatttctacaacatatttaaaatagggaattaggaaagaaaacgaaaatattgtatttagattcttcatactacatccataatatatatgagatttcaaatgaatattaacaaaggagaaattaatat

SEQ ID NO: 203505 - DNA, 1186 bp, Cannabis indica
cagtctgaattgggctacacaacaacaattgctaataacacatgtggaaattgatgccctaagaatatcctctgcttcgaattctccgcatgaagacttatcttgttattctgatctaataaatgatgttcgttgtcttttattctcttttcttggagttactgttactcatgctcgtaggcaagctaactaagctgcccatagcttagcaaagtacgctgtagagttggatgaagatgtatcttggataggcaaaataccttatcttattttctctattattgtaaatgactgttaatttataataatatgaaaaatttctcaaaaaaaaaaactaaaacaacgtttcagaaagaaaaaaaaaacttaactaaaacaaataaaaaatttattagttaatgactaaaacaagactccggtcaatatctagaagtgaaaacttatgcatgtccttaaaaatatgtttccaataaaaggaaaaattagacatttatattttacattaattgtgcgtgttttttttgtaaggacatttattgtgctttataagggcaaatatattattccattattgaatattgatgacttaggtgtgaatattgagaaaaataaaattggttcatgtcggtggaaataggaaaaaataaattaaattactttaaagccccactatattatattaatctttaaaaataataataataaagttacaaaattgaatattattttaattatcaatataggcaattctcatccaaatctcagagagagaggagagctgttacgaaaatttcagtcgcacacagaaaatatagcgaagcacttttgagacaggaagccgaagaagtcgaaaaccaagacgaaggctaagatctctgatttaaagtctctcacttttctacaacatgtttgtttatatatatatttatactggaaattcgataacagcaattaagttcttttaaatagatatataaccaggagaacggaaaaaataaggttttgctttcttgacttttgactcaatcgaggaagacgattcatttgactcattcactcaggttaagaaagtgtcctgtttaatctaatttgttatgggaatattacttgtttatattgaagtgatttgggcactgtgcttgcttgttgtgatctttgatctgaggtaaaggggctttgtttttcg

SEQ ID NO: 203506 - DNA, 1165 bp, Cannabis indica
tagacctctcggtcattacaaagaataatgttaagtatacaagaggggtccactataccttaaatattcagtgcaaaagcccatctagcaacattgtgagctgcaaaattacaacatatgggaataaagggcatgacacctccttgatgataattcttttagccaggaggccacggacaggcagagcatcagacaaaatattgctccaccagagaaccttatgtctctccataactttagagttccaaagtttattccacaggcctggcacaactacacaggtaggggccctctccatggcttggactaaataagcagactttgtagagaatagcccattccgctcctttgtccaaacccatttgtcacttcccaccccactaggatttcctcgtttaatgatgtcgcgaacagttcccaagtcaaaaagagtctcgagcttgggaatatcccagtcatctgtgagtaaattagcaactttagttacattctcgggtctagaagtaataggtttaacaaagaagtccttgctatgcaacacccaaggatcagaccggacattagtatcttacccatccgagataaatttgcacgctcctttcaacatgatgtctttagatttcaccacattcttccagaactaagagtccgaacttttataagaaccctccaagaaaggtttccctttgagatatttggctttcaacactctacaacacaacgattgctctcattaaggagggcccaaccccacttcgctagcaaagcctggttcatctccagggacttacgaaaactgaggtcgcccctggacttcggaaggcataaacggtcccacgccttcaagcaaatacctcggttaccttattcggagtccaccaaaaatccctaatcataccatcaattttttaggccagctttttagaaagcatggtagtttgcattgtgtatatcgacaaagcaagtccagctgacttaattaacgtagcatgaccggcttttgacaaaatttttaatttccacccatgaagcttcgagacaagattctcaagaataaaattgaaatcaacactttatttaactaatcaatgtatcattttctagcacgcgattctatcctctcatacacttgaactagttgactaatatttcaaaaggcccaaaa

SEQ ID NO: 203507 - DNA, 1032 bp, Cannabis indica
ggaagaatgttgtgaaatctaaagaaatttttaaacaaggggcctgtaaacttttttcgaatgggaaagaaacaaatatctaggatgatctgtgggttatacatggccaaaatttctattgtcaatctaataacaatcgacctgagggtttggagaaagttgcgaatttactttcaaacaatgggaattgggacatctccaaactacatgcttttttttgacccagaaacaaaccaataatatgatcaaaagtggtagaccctatggccaggatagggataagtggatatggactaaagagctaaatgatttattctctactaaatctagatacctgattcaagatttgaatcgtgcaccattgtgcaatgttgctcctgctatgtggaataaattttggaattctaaaattttggagcgtcacaaggtcctttggtggagattctctcaaatgctctccctatccactttctcctctctagaagattacatattgaggaagtttcatgtcctctttgtggggagggagaggaaacaattgagcatgtgttactatattgcaatttttcctttcaccagtggaggtcatccccctagggagtaatgccggttatggattctagagcccgtgtttgggattgagttcaatttctatggagtatgaagtctaaaggagtggacgatgttcatgaattgttcctttatgcttcgttgtggtggataaaatctgagaagcatgcaagaataaggtacaaaatgattttttaagtaaccttaaacattgtattgactctatctctatttgttaagcagattacggttcttgtttgtttgattcgtcgaaggctattgagtctctgcttgttcccctcttcctgatgattgggtcaaaatcaactgtgatgttaaagttggttggagttcaatgtgcgtggtgactttggccagggaccatacagagtctgttttgtgggtagctactaacatgctcaatttttgtgatactcttgttgtagaagttacaacctgtct

SEQ ID NO: 203508 - DNA, 571 bp, Cannabis indica
agcgacaagcgagagactacccactactcacagagtagaccccatccttatgatagggctagcactatctatcaccctcacaccaatagcgataccaataatgacatccacatccctaggaagaagatcattacaaagcttcaccacatcccaacccccattcgacattaagataatcatgaaccaatctattatcatcaccgcatacactaattggcttgaacaaacatggccttagaagcgacgaatcttgaaaatcccttgtaagtctaccatccccattctaaagcctaaacacatgctttcaaagttccataccccacataagactaattcacaaatgagacgaatcgtttttatcaaaagagtcaagtatagaacaattttgaaaatatttgtgcttaagactctagctgcaagtgtatctgaaaattgaagtacacggcacacttgcttggctaccagtgcttaattgaataaatacaaatcccataccatctttcaccttaggctgataaatctcctcccaatttatcaggatattttctttttatactccaaagaatcccac

SEQ ID NO: 203509 - DNA, 2076 bp, Cannabis indica
tggtatcgaagtttcacgaaattggaaggaagtaggggtgttcgcggtgctggtgatttttgaccattttttcaaaccaactcgcacatgtatttttttcgatttcccaaactgcacctgcaccgcaaaactaaaaaaccacagtaaccgcaccacaaaaaatagtgcggtgtggtttctacagtttagactatcaccaataattaaactatcacaaatacaacaaagcttgagcaacacttatcaaaaataccataaggcttggaaataaatatgaaaaaaaaaattaagtttcaataatacaataattagttggctttgggttgtacattcacatattggacctaaataaatataaaaattgctatttttataatgtgcagtgtggtgcaatttgaaccgcgtattaacaatttaaaattgcaaaccgcaccgcactgcccggtttaggccatgaccgcactgtaaagaatttcaaactgcatttttttactgtgtgggacaatttgacgatttgatgattacccctagaaggaaaggactattagcttaaagcagtccgggtacattaagaaaattattcaaaagttcaacacggaagaagcaaagtatatctgttctattagggaatcaatttgttttgtcaaaggaatagtgtcccaatagtatgaaagagaaagaagaaatgaaggatgtatcttatgttgtggttctcggatgtttaatgtatttgatggtgagcacaagaccgaatatagctcacgctctaagcatcctaagcagattaatgtccaatcttgacatcgaacattggaaagccctcaaatagttattaagatattttaagggaacttaggattatggtctgacctatgaaaaatctaaagaaaaattacaattgtaagggttcttggacgcggactacgcctcgaatatagatacgagaaaatcaaccacttcttacattttcatgaaaaaccagaactgtatatgctgaaaggctcagttatagtctgtggttgctctttccaccatggaagcaaaatttgtggcgactacggaagcattcaaggaagcattatggatttgggaaattctttatgacttgaaacaaatcaaaggaggagtgactgtgtattcggataaccattcatctatccatctttgtaagagcccgatttatcatgaaaaaagcaaatatatagatataagactccattggattagagagaagatagaagaagggctggttgatttagagaaggtcagaacagaagataatcctgctgatgttgggactaaggtcttgacagtaaacaagttcaagcattgcttgaacttgatcaatctcagaagttaatactaagattcttggagcaccaaccatgatggctgcattctttcttcatcatcgtcatgtggtatagttccttcaaatgaaaagatctccacgagttagtgtcattcatggaaagtcttcactcgtggaagctagtcctggaaggcttttatgtccttctgggaaatgtcttcaggaatagctagccattgtctaggatggagttccagttggctagctattcctcctagaaaggacgttccagacagtcgactccaactgctctatcctatctggatgctcttatagtgagtacctttggtctatgatcccgaaagctcatatatttttttcggtacactttatgctgacgtagagatctcactaaaatgagagtttgttaagttagttatttcctaactaacttaacaacttcaattcttgcggccaccgactttaggatcttgattctaagtctatatataccatccacccttaagcatttgaagaagacgaacatcagatggttcagattgagattaagagtcagagagagaagagattgagaggtagagagagagagaggtacagagaaaagagagagattgggtttggattttgtaagaagaatatgctgtagatagaaaagattcttggataaggatgtgagagttgaaacactttgagaaaactcaatagagaatccttctcgaatgtattgtacctgttcttgctca

SEQ ID NO: 203510 - DNA, 548 bp, Cannabis indica
caaaggccttttttctagttgtggggatcgaaaaagtgaatcataaatttatttctacccacctcttctatggtaacagatccattaagcttccaaataaaatcaaatttttcagtcatttgtttcctcgaaataattctagatgagatcattttgccgacaagattccgagccacactatctttgcccacgtcgttgaaagctccttctaaatttgcttcaataacctcatcttcaatatcgtcaccatcaaaagactcatatagagctgctcatccgttatgacccatgtcaaaaaataacgacgctctaataaacaaacttcaaacacctactgtcacttttttataagagacaaagaagaaaaaagcgagagaaaaaaatttattactctttttacatatatattaaattaatttattaaaatgatatattgttgttaagtgtatatagttaattttcttaatttccaaaattttaaacaatatttatttgtaaaatatgaatagatgttaatctcatttttaagagaaattatctcatatatt

SEQ ID NO: 203511 - DNA, 928 bp, Cannabis indica
tagtgcaatactaataagtctcccttcctaagtctgtaaacatgatgcagattagtagatcaataaaaacatacaattgtgatcatgggcactcacatagaggcgagagggggcggttgcctccctaaaaaaatcgagaaaaaaatatatatgtattttgattagttagagcatatatttgtaattaaaggtgataaatataaacataataataactttgacatgttggttaagctatttcacacatgttatagaaattaagggttcaaatcctagtaaaaatatcatcttttaatatttaatttattttttgcctcttctcaccagaaaaaaaagtatgtctccctcaactttaattctgggtctgccacttattatgatataaagttagggaagggacctaacaacaaaactctagttggattgggcctccttatgacttcactcgtgactttagttaattagaaaagttcaaacttctatttcaactagaccttgctaagcccattaacactataaattaggctgaaacggtaaaacattatttattaacccatattataataaaacatgggaaacatttatgtaagcccaaaataaaagtggtacaacatggttacaaatgactttgagctaaaataagtttatgtgttagtgaagaaagtgctacccttttgtcttgttttgacattgtcaatagaatagtatcaactgtgaatagcttattaactatgtaagttgtcactgcaacttaaaacaggtggatttggaaggactaataatgactgggaagttaaatatgctcgtgattggacaagatgtccttaaacttaaacggcgaggttggtattttaatacatgttcacaataggtggttgattttgaggttaaagataaagggggaattttgggaaaatacactggcaat

SEQ ID NO: 203512 - DNA, 1533 bp, Cannabis indica
tgaaactgtaattctatcacattgtcagcttagcattggtctaaacctgacacagttggtttcatcaccattattgttccaataatttgcagaaaaaagaaaagaaagatcctgctttttcgatctttcatgataggggaacatggtttcagagagccggaccgacacacctgttcggtggtggaagagagacggcctcagtacatgtatgccagacatggtgatgggaatttcaaagggtcttcactcaagtctctaccagaaccatgagaatggaaccaaaaaagaaaaagcatagaagaatatgctgatgggatcatgaatgaatgtttagaatcaaagttgaagaaagatgttttatgtaatccaattgtgtattgtgaaatactgttgtgcaacttttgtatgatataagttaagttgatttctcatttatctgattacatacattatgttgtgataagttttcaaaggtggaaactttagagtttgactcagcaaattttaacaatcccacaagccaaaaacaacacacaactcaagctaataatgatttgatgattatggttggattggttggttggttgaagtgtttgagatgtctcgtgaaaatggtttgaacgtggtcgaattctttaccatcaaattcagacatgaaataaaacacgacaaaatgacaccttaacagtcctccatgaacattccttacttaatcatcttttcaagaaaacgacctcattccattccttctagctttttcttctctctggcaatatccctttcacctgaaattaacattaacgatttgtcgtagctccacaaccgaattccagcttgtgtttgtgctttttatgacgtggcaatcgacttgttgtgtcgattaattttctcctaattaatatatttttcattttgggtcaattgacttttcaatttcacacaataacaaaatttattcactttgctattaatgattatgtctttggatctgccaattatgtcatggtcggatcattactcatgatgatctcattaaattgggagaaatctattgagaaacgaggcattcaaattcaactaatattaaaaactttttattactactgaatatgttctaatggtaatatcaagtgaagatttggctcatccacagctatacttcattagcatctcagctttctatgttctataaattaaatgtaatttttgagagtaaatattatctacaatgtgactattttgctaaaaaaaattaattttaatttaaaacgagatatgtagaattagaacaagcgattgttaagtacactctaaaacttgagtgtaccagtgtatttttttgtgtttaagatatttatatagttttaattttatttttttatataacaatgtatactgtaattatttaaaataatttatgttaaatataagattcaaatagtttgtgttacaatgtctttattattttatatgtttgaaataaaccgtttgaatcttattttgtaatattataaaggctaattagctaatttt

SEQ ID NO: 203513 - DNA, 542 bp, Cannabis indica
gaatcgcccaaagtatgcagcatataaaaagtgtgctcaaacaacaggaaaatgtacaaatttctacagcttaatcaataaatgcagttgttccttctccatggaatgtactcgaggagctttcagacggaagaaactacagcctgcactagtttcccgtattcccggtctccttcaaactcttatatcacaccctgtagcaaagacgaagagcagaaatatgttatattaattcatagaaacgtttaagaggacagaatgttaagtttcatcaatctactaacaatcaagaaactaaaagttctctaagaaaacataaattgccaaaatttgttcatgaatgagtaactgcagaatttgtcacattcttcgttgacagcttcaatacattttgcctcttagttaatctaaaaaaatgatatcttattgtgtcaaccctcccaaaaaatcacacaaaatcaaaaagtgccatggatgaaccaagcttgagttttcaaactcaaacttgtgcatccatgtcaccaaacctccaaaccagcaac

SEQ ID NO: 203514 - DNA, 509 bp, Cannabis indica
atttgggtataggctttgggatcaagttaacaagaaggtcatgaagcagatatgtggtctttaatgaaggtcaaacaattgaaggcacaatagaagaaaaaagtcaaccagaaaaggttaaaattgagttatttccttcagaacaacaatggtcagacgatgaattacaaaagttgactgagatgacccatggtgatgacagtgatgctgaagaagatgtaccggcacaagaagatatcaatcaaggggagcagtaccagacaactagaaaaataagaaatctcgcagaaggtcagctagaggactaattccatccaaaagatatccacagtcagagtataatcttttaacagaaaagggggagccagagaactgccaagaaacattggctcacaaagacgaagacaagtggatagattccatggatgaggaaatgaattcccttacaaagagcaacacctatgagctggagaaacttccaaaagacaggaaggccctgaggaataaat

SEQ ID NO: 203515 - DNA, 1093 bp, Cannabis indica
tataagatattcaaactcttttattaaattatgagaaaaaatattatatcatagtaaaagtaccttaagctcatccacaagctcttgaggtgcaaccttggtgttcaggaactcatcaacttgttttagaatttcttcctatcctgtaaatccaagtttttagttctctgtccatttatttgtacacaaatatattatacatatgaattaataaaagagctagctttttcattgtaagtacctatgttcatagcaggtgctactacaaattgtaaaacaagaacaaaatggtacaatggttcctgttgcaccaactgcccccttaacaattgagcagcttcttctgatttcacagcttgatgaagattcctgcaaaattaacagataaattacattatatcaattttacttggatgaggaaactgattttccatcaacttggagtgatacatagggacttgaaaccagagagtttcttgtttaaagatagcagtaaaacttctcaacttaaggcaattgattttggactctctgtattctttgattccggtaattatagtttagaaattgaacaaatatccaatttggcttcttacttccaattaattatcatttaattaatctatgtttgatgttataattaaaacaaacaacacatgtcacatgtaagacaatcatttaaaattgtggaccaaccaattaaagagaataagcacaaaagaaaaaagaccagaccaaacaaaacacaaataccttactaaacaaagattttgtaaatgaatcaacaaaccgaattatgggtactaaacaaagcaagtgaatatataaatataacatatattccaagttccaaccttgtgaatgaaagagaggaatataataggactcttaaatgaaaacacaacatatacatatataattaaataaatacataaagataagttcgaattgaataaatcaaaatgaaaaataaaagttatagtgacgtacagaaccaataatacccaggtgttgaattgaaaaccaaatcaaaaaaaataaactgaggagggagagtggagattcatacctgttaagggaattcagttactga

SEQ ID NO: 203516 - DNA, 640 bp, Cannabis indica
cctagaattaacaattagatttgcattaatcgtttattttatttattgtgttttacttttagcaataactttttattccactcaaagtaaaaactcaccactaaaccctaatctaccatactaccattactaatatttaggttaattaggaattttgcttcttaaaatttaacatttacaaaattatgctttttatactttttaagctgttaaaaattttctctaattattgatattgttagatttaaagatttttgtccaatgacatgtatgaaagtttttgtatacgatttaatacatgtcaaaatttgagaggggaataacatagtaaacattaaaattcaagggcacaagtgagtagatagaaaatcctaagagagagagagagagagtagtttttgttatgtgtatatatgaagttgcttcgttggaatgtttcttaaagcaagtatagatagtgtatgtacactataataagattaatatttaacattatatcatatttaataaaacagatcattcgctttacaatcaaaaacaaacatatataaaagcatatttgataatctaaatccttttgatttgtaaaatatttatatacatatgctatctgctccccccatgtattttggttccttta

SEQ ID NO: 203517 - DNA, 1136 bp, Cannabis indica
cagaattttttaaaaatttaaattatcttacatagttacaacgtacgcaatcatgaaaaaaaaattaaattaaaaaaataatccgaataccaaaataaataaaaaatctaccaaaataatccttgaggtgtctactacataaattttttatatatatttacataaatcacttccttatgcatataatattttttttggaaaattaaatagaatttattcaactaaaatataatctttcgtactagattaattcaatcttttaaatacataaaaaaatattttaaactaaaaacattacaagctatactattacaattttttataaatattgctacaattttattggaaatttatgtactacacctttaaagagtcgtgattatctgtttcggtatttaagaaagctttctatttcttttttcttcttataatcgcatatgttgtacttatttaagactatttgtagattttcaaaaaattctaaatattttacagtattaaagataaaactttaacagttaccacacgtatacgtgcacaaaatatgtaaaacttattttagtattataaattacttgaaattttttaaaaatttacaagtaatcctaaatagctacaacgtatgcgattatagaaaaaatagactaaaaaacgctcttgaatgccgaaacaaataacaaatctatcaaaacattcctttaaaggtgcaccgtaaacttactcaatattctctatacagtaacataataattataaaaaaaattatttgacttttagtaattttgtatttaaaattctctgcatctctcctaaaagaatggaatgttatcttctttcccatctaacatctaacttaccactttttaattaatccatccctccctcttaccaaatatagccttaggaaaacttgtccttctacctctcctaaaaaaaaattattttggtagattttcattgaggtcatccttttgatgagatatttacggtgaaatccttttaacatttataattattacacatacgaccctaataaaaaatagcagcaaaagtactttatcttacgactttactgcagtcgtaacattttttagccatcaaacgtcaactcagatatatatgaagtattaaataag

SEQ ID NO: 203518 - DNA, 655 bp, Cannabis indica
taaaattaattattcaacattttaaaaatgccacacatatataatttgtgcctgctcgttctcattacactactaaaaatcaataagattaattacataacatggaatttttattaacaaaataactttatatgataacagaaatgattatgaattataacgtgcgaccataaatttataggtcgattaggattgtggctagaacccacttagtccaagaacctaaaaattttttatccctttttataattatacatattttttctaaataaaagcataaatatatttttttctatgaccaactacaaaataactataaatttatactataagactatcataataacttaagtgagattattttataaattttaatatttttacattattagtttaattcaatactgtgtattaatatatgtatatatatttatatatatatatatatttatagaagttgaagataaaccatatgcatttgagtgagtagtcgacataagcatgtgaagaagaaaagcaaaactctagtttttttgcaaactaaaatggttgatgaaagaaagaaagaagagaaattaattagtggggtcttatatatatatatagtacatgatgggattgttagcaaggaagtatggtggtgaccaacccatgt

SEQ ID NO: 203519 - DNA, 632 bp, Cannabis indica
tctaataatttgttatttttttagttaaaaaaaattacccgtaaataaagaattcggtcatatagttacattttatataaaatagatatatatatatatatattagatttttaattattattttttatatttgtttatataattttattaaaaaatatataaaaattaaattgtataattatttttagacgtcaagtaacattcattcggtataaaaatatacttcttagacttttcaatctaatctaaaatattgacactttacattagattgaaatgaattggtcatacaccggccacttgcttatttattatattccttctcatttggacatgcaaaatcaaatgccaatatatcatattaaaattattccactctgaactacatttatacactttttaattcaacgttcaaccacatgatactattttaaatattattattttcttctgaataatttttaactaatgctaatttctacgtacgtaggaccctattttctttttctttcttaaaatcttaacatttaattcttttactaattaaatgtgactaacaagaaaaataaataagcatttatgttagtttaactctacgttattatcaactgctcaaaaaaaaaaaaaaatta

SEQ ID NO: 203520 - DNA, 521 bp, Cannabis indica
gggacgttacattaggtgtttatttatgtctccaaatcccaacttgcttgcagtaatttttgaacttattagaatagtactctaggtcattgtctgttctaagtttcttaatcttcttccctatttgatttttaaccaatttcttccattcaacaaaagttttgaatgcctcatcttttgatttcaacaagtgaacctaaatttttcttgagtaatcatcaattatactcaagaaataattagcaccaccaatgataaatacccttgttggtccccatagatttgaatgaatgtatcctagaggctctttagttgtgtgtcttcctatactgaacttcaatcgatgacttttcctaaatacacactcttaccctctagaataccttgttttttaagttctgtgagccctctctcactgaaatgtccaagccttagatgccacaacttagtctcatcacaactcttctcagatgcaactgtgtttgcattactaacaacagtttcacctttaagaaaataca

SEQ ID NO: 203521 - DNA, 1224 bp, Cannabis indica
acaaatgacaaaagattaatgtatagttctttcccttttatttttggtaatggtaattaattaagttaagagtttacttaagaaaacatatatttataataattaatatatttatatatgtatatatatatttgtgattggtgaatgctttaacttatatattattaatcttattatgcacattctaaaaacattataaaaaataaatttatataattaatatttatattataatgtgtgaataataatattaatttgaccttttttttctttttatagaaacaagtcatcaagacacctcttcccaattttctaaggtaccttccttattcaactttggattaattccttttattttacttttattatattatttctcacactagtatatatattttacaataaagtattaatattagtccaaacaaactttagaaaactaaactaaagcatatggaagaataaagaggaatagtgtaaaataatgtgagaaattcagaggtgtcaatttaaagtttgtaactttatattaacactttttttttggttaaaaattaaaattataataataaaatgtagtgataaagaaagaccaacacattatgtaattgtcaaatatcttagaatcattagtgaatgtgttacgtatgcatattgggcctatatataaagcataattattcaacaacgaccactatatattaaaaatatattttttattttttatatattattattgattaataatatatagggtttttattttcatttttacacttcaaaacaatttttttttttttttgtatttttacgaaattctacacagaaactcatattgcaactagcgtttcaacctaaattgcaacaagaaatctataaaaacccctattgcaactagtgctgcaactattttagaaactcaaactgtaaatttgaaaaaaaaaaaaaacgttaaaaaaaaaatatataaagtaattcccctaatatatataggtgactatttaacgattacattaaaaatataattataatagttatattttttttatgacttactatagtctataataggctattaataagtaaaaaaattatttttagactcaaattaattatatacttaaaataataattttctaatttaaatttttaataagatattttgctaaaactaatatttataaatattttttatttttttatttattaaagaaaattaaaatc

SEQ ID NO: 203522 - DNA, 1237 bp, Cannabis indica
caaaacaaaattatttacacattgacaagactaaaacacttaaaaccatatcacacaagcaagactaaaacactcaaaagtatgtcacagagacaagactaatcgcactaacaaaatataatctcaaccaagccatacctaagcccaaaaaatgccgacgggtgtggccggagaaatgattttcccctaaatttggattcttcttcttgtttttttttcaactaattccaaaattgtttgttattaaatctgtgaatcactcatcattttcatcacattaccaccttagccaaaagtaaggattaacttgctttttgaaaagtagatagagaagaatgtaaggattaacttgctaattaatcataattggggatcaaattgaaaaaaatctactaattcaagggctatcaagctaaaacccaaaacccttcttcttcaaccttcactctctctctctctctctctctcttgcttcagacaacaacaacaatggcgatcaccaacagctctgaagaaatccttatgcttgaagctcctccctccggacctctatggcatgtaccagcaaacgccgaaatcgtcgacgctttaccctatatcgacgacgattacgccgacccaaccgtcaagagagacgtcgatcgattagtggaggaagaaatgcgaagaagttccaagaagccttccgatttcctcaaggacttacctcctctccctaaatccaatttccaggtcagttatgaaaattcaaaattttgtttttttagggtttgaactgtttggatgctgagaaaatagcctttttaggatcatccaatgctcgctagagagtacgaacgtgttcgagctgcgaagcctccggtgattcttgatttttctcgtgataagttggagattcctgtggctaataaaaggaacgatgaaactgcttggaaacaagctcttcagaaagctcagtgttctttgcagcaccaaactattaggtaatgccatttaattaattagttagtgtttaaacagaaaatcatatgtgaagtttttgctttaatcattttctgggatcgttgtttttgtaggttggaaaatttggacttgacttttaagtatggttctgaggcttggaagcagcacaatcgacggttggaagtgctcttgtcaaggttcgttcttggtaattgttcttgcaatgctatgcttgtctgtatggattttgcaatatatatatataaatgtatat

SEQ ID NO: 203523 - DNA, 1512 bp, Cannabis indica
atctatattactaatcactactatatgagcatgtgaaatagaagacgagaaaagagagagagagagagatagaaagaccgagtgggttccaattgggaaaaggtggaaggctttgtatgagaaagaaagaaaaggcgtttgtggtgttattgagtacagcctgcaaacaggggacacttctcacgagggacacaaatgcctttatattattttagagttgtttattcttcacgaggactttttcttcacttgctttcctttatttcttttcttcacttctctgcctttcattttcagtccctaaaatgagggtcattccaacacaagaatatatgacatctacgataggaaccttggctcttgtgtgtgtgtttttttaatttgtcttgttagtgcttgtcggctttggaaggtagtcaattaacactttatagctacgctatactaaaatatgtagccacagaaaagcctgcctggtttattacacctaaatgagaaatcttcttcttgctcgtatactttgtttttcattcctttatggctaatgatacgtacactgaaatttgcttagaatagacgcattgagtggtcaaatcatgcttagcatagcaagcgtccttcccaatgtcttttgaggaaattgcgagaatttattcagagagacataagggaaaatccaatggttaatcctaacttctttctttacccaacgagctattcccccacggttttgtgtgtttccttgttttctttttcagtagttaaacaactaaagttagatagctgcatttgttttgttggtaggacttttgtcctttctatgattgtgaagatatttgcgtgtaaatatttaaaatttgtaaccaatagaaacctaacgaaacttttaatgacataaatatctaatattactaaaattataattattgtctcgttgttagtacgaattctgttaatgtcttaattttgtaactagattgagcttttgaatttgttgaaagaagacctacatcaaatgattttgaatctgagtcttatatgtgtcatttttaagtcagtaatagtcggtgctagcgatatttgtgtaattatgtcaattgcaaactcaaaacttaatatccctattaaatatttggatacatctcctttatgccagattttattaaggtcaattaaacattaataaattctcaaatgaaattgttactcctcaatatgtaggattaaaattaaatatctttggatttcaaaagaaaaattcttatttttttaattttgtatataaaatttaaatgtaaaataaaaaaatgggagtatatttgtatataaataaataatttttaaaaaaattcggagagtagagacgttaaagttagaccaagatgcaactcacacaccacacaaaagagtgcaatttaacacaaaatgacacttaaaagattacgtatttcagctgctttcatgacttgtatctagtagaaatcattacatgaaaaataaaacatatacaat

SEQ ID NO: 203524 - DNA, 570 bp, Cannabis indica
aaaatgactaaaaggcttcaacattttacaaaatggtgatcacacttttataaatatggaaaaaacagcataaggtacttgttatctttttgtagcaagtggttacctctctgcttaccataaggtacatggttactttacttgattttattatttttttcaaattttcttcaattttcccataaaatcacttttttagaaagagaaaaaaaaggccatatttttacacaaaaagtataaaaaacttataaaatttataattttctcttatttttatctagtctttttattttcgaaaactttaaaaaatttgttagttttgtacactttaaaataaattctttattctttgtttaagtttgaataaaataaatggatacggtcttcattgtccatcttgattaactggatcatttctttgtacattctgacataaaacttattaactgccttttcggatattcctttatcatttcatcgaagaaggagagttcttctcgagtgcaaaagtagaagagagcttgaatgcaagacccacatgtcgagtagggacgaaagtcggccttagtg

SEQ ID NO: 203525 - DNA, 524 bp, Cannabis indica
ccttgtttccatgccaaatgaccacattcctttcttgacaaatctggtaaaccactgctactatagcagcagccagcaccaattttttaaactttgaaactcttgacctgccaatccaccgaactagttgtggaagagacatgtttattgccttccaatcaagccaatgcttgatttcatccaagcagtaagaagataaaaaacaatcaaaaaataaatgctgctcattttccatgttagaatcacataaactgcaatgatcttgtaacaagatgccatactttttcagcctctcttttgttttcagtcggttaagcattgctagccaaagaatcacactatgttttggtgtgtttaaacgtgcccaaacctccttacaccacttcactcttggctgtggagcagtaaacaaactgtaaccgattgcaattgtctattttccatgctgaaatgaatcacagtcagttaagttggtaagttgattcttgaatggttacaagattcttccaataccaactcgcatg

SEQ ID NO: 203526 - DNA, 1749 bp, Cannabis indica
ctaaataagaaagcactttgttcaaaagaaataactattgagagagagaataaattctcataacccataccaaccaaacaaattgcaaaacatctataacctaagaaaacacttgaaaaatataatcgaaagttcctggataccccagtcttgtctattgacatgtcgttttacagtcttgttttgttgatttgttaatctttccactgtcagtttttgttttactgggtcgactgttgagtcatcttgatatggcaaccaatagttgggatatgaaaggaattgaggaggagatccttcgggttcaggtggcggaggaggaagaggatgttgcgattgaaggaggagaggaagatgacggtattgatgcgagatggtgtgtagtcgggagatttctgtccgatcgggatgttgattttgaaactatgcagaatgtgcttgcatcactttggaaaccaggtatggggatgtttgttaaagaattgccacctgatagatatttttttcaattttaccatgaggtggatatacagagagtcattacagggagtccatggacgttcaatagaatgccgttaatcttgacaaggctccaggaaggagatgatccgcagaaggttttattgaaaaaacttgatatttgggtccaagtgtatgatctacaaccgggatgtatgtctgtaagtgtccttcgaaatgtggctaatgtgatgggaaggtttgtggaatcggatcctaagaattttgtgggtgtttggcgggattatttcagagttagagtgacaatagatattaacaaaccgctaaggaggagaatgagattgactaaaccggatggtgctaatttctgggctacgtttaaatatgagcgagcgccaacattttgtttcatctgtggtattattgggcattctgaaaaattttgtgtgaagctgttcgaaaagccactggatcagatagtgaaaccgtatggagagttcatgcgagcaaagttccaaaaccgaaagcagaacataggggcgcgatggctgagaacgagaggttggactccgggaatggtggtcggcgagagtagtggtgcaggggagatggggcaagccgatgatacccatatggaaagtgacaatcagggcactaatgggggagagattggtggcgatactatgggatttcataatcagggagttaatgtgggggatatgcaagttggtcaaaattctcaatatgaaaataatcctataaatgggattaatgaagaaaggaatgagatgccacctgggttacatgctaatgggagtgttgtgattatagacaataaaagaagaaaggcaacagaggagttggagaaagaagcttcgggcttgggcctggagagtaatgggctttcaaaaaactcggatttggcaggtctctcttatggggctcgcccaacattatgagtattataggttggaactgtcgtgggcttgggaacccacgggcctttcagttcattgctgagcttgttgctcaaaagaagcccaatgttatttttttgtgtgaaactttgtgtatcaaagaaagagtcgaaagattgagtagtttaatggttttgaaggatgttttgtggtggatgttcatagaaggagtgggggagtagcgatgttgtggaaggagaagatgatgtttccattaatagttattcaagaaatcatattgatgtcgaggtgttgtgggaaggaaatcatagatttcggctaacaggattta

SEQ ID NO: 203527 - DNA, 1942 bp, Cannabis indica
ctagcaggattttgtgatgctcgaccatctcaggggtgggaattggtcttctagagactgctgccaacacaacaaatgtaataagtcagcgacctcaaatccataaatatgaaaataactcaaaaccaagttttgagacaaaaattacttacgtataatgcaaaatgcagttgtgttgataaaatctccctgaacatcgcttcctcgtgggaactgctttaatggagtataaataaactagttcaaggggagtgggacactccaagcctaaaatattgtacaaaacttttaggcctgccagaattctataagaacttggaatcagcttaaagggggcaattccaagataattacataattctttgaagtactctcttagggggagaaatgctccagccctgatgtgctcgaggctccaagcgcctatcctagacgagctactagtacttgcttcaccacattcctcgcgaataacccgttgtggtggaaagcaattgaattctctaggagcaacagatctaatgtgacatcctcgtctttgcttgatgccacaagtttttaatacaccaccaacgtaatcttttatggcccttattttagactcattgagctagacttcaaaagttacagtgggtctttgatttacgaggcttggtagacataatttcaaaatcatggtcacctgatgaaaagcaacagtgactctgggtaaaaacaagggtttaactaaaggaatagacgataaagatagaggtttaggccaggttgcatctcgcaagtagtgacgtttaccctcagttatctcttgtggaaaacgcctatagcgactagcaacttcatcatgattggttttaattaaatggtccctaatttttacatcatttatctcaggtttggattgaggtttctggattttgagtttgaatggaagggtcgattccttaggacattgtatttctatgaattctagattgaaattttaaaaccaaattgggacatttttttacaaaaagaataatctcaatttttggaagaaatttatttaaactagaagcttatgaatacgataaacctaaattttttctctgttaaaccctagaaattaattacaaacgtagtgaataatgatgcaattaattacaaaataagaatacaaacttaggaaagtgaaatataccaaaaaaggagtaaaccacttactattcagagatggatttttgcacaaagaagaactctgtaactggggatgagatgagtgacttggtatattctgagaactcctaaggttgaagattaaatccgaagagattcacaaaaaataggttaacgatcaagagggcatggaagggtttggaatgtcgagaatggttttttgcagaaaagtttgaaagttttgtaaatcagaaatggcaaaatggtggttcttcttaagttttataccttgagaatgatcactgttagattaaagaataaagatctagcgaatgggaacaagagagaattggaaaagatgggtaattaatgctaatgatgtgcctcaagatcatgaaccaccaaaactcaaagcattcaatttttcaaatcgggattaagacaaaaataccattgtaatcatttaaaaaactctttttattgaaaaagaacattttaaggggcaattgttatacccgaaattcggttacacttcagaggatgacacatgtcagatagtgaaatatgaaccacttagtataatgaagttatatcatttaatacgaagaaaaaataactcgttatataaaggattaatagaaaatattcataactcgctgactacgtaatcttaagcgagacaaggatagaaaactattaaaatttacattgacgagacatatacttgcatcgaagcacacagacccaaagatctaatttatttattacaaaggaataaatgaagttactc

SEQ ID NO: 203528 - DNA, 1345 bp, Cannabis indica
atatataaatatgtgtagaagatatttccaaggcgtaacaaatagagttagtgcttgtgtttgcattccactaatagaattataacacaattaatatattaccctttttgggttgtgcttatctctatttcatatttttatataaacctaatttccctctattttaatgaaacagggggctgcattcatttaggtttaagctaattattaattagtagtaaccaaaaaggagaggtcttttatatccaccaaaaacaaaaaaaaagaagaagaagaagagatcttcaattttaaaaaaattacatatattattttttatttttttttaatttacggtttgagttgttttggtgattatttttatagtatctatataagttgctatgtgtaaattttagttgcgatttaaattgttcaattaattattatgtgggttaatatatgtgtttttagtaaaaatataaaaaacaattattttgaagtctaaaacttcttaattttatatatataattaataattggggaatgtatatgtatgtaattattttcaataacgttattcctagctttataaattcattaatacgaaggtacaattattactactgtaatggtgcatgttataacaactatatatagttattataatagttgtatatctagttaggttgtgttgattggttgagatataatggcttgtttttaggtaacttttttaaaataactaattgctagtaaaaagaagtagtaatattgaagtactatgcttggtattattattaataatacaatttgatattaaatttctctacatattttaatttaatatttattataaaaatattattaattatatataatgtgtgttcttaatatcactaaaaatattagatcatgcgcctaattatgactttgtgaagcttaaaccaaaattagtttaagaaaataaataatcaatcgaatttgacatgaaagatttgattgattgactgattgtataaccgtctcatgcggagtggattgattttatatatatatatagggcaagactatggtaggaactagcaaaagttccttaccggtagggtactttttttaaccattcattttaaatcatgtggttattatgacataagatgtatattcttacgataagactgcttgtatacaattaaaactttatatatattataataatatttattttttaaaaaatatattaataattaaaaaatttattaatttttattttaaattattattattttttataaagttaatttgaattgtttttatataggtatatattttcaaaaaatagttttatttacgaattttgctatta

SEQ ID NO: 203529 - DNA, 955 bp, Cannabis indica
taaaaaaaaaaaaaaaaactgttttaaaagtgtaaaaaaaaaaaaaaaacacctaattaaaaatagcttggttaaccctatattagttgatttataataaatatttcctttattaaaaccataccacaagaattaatatttaaactttatttattttttttaagaaaaggtattatatattaatgaataattcatttacagcaatagcatgaatagggccaaaaatgacaaccatccaaacaatattagaatctactttaagagcgtatctacaagaccataagctgcagagctagcagtcttacgaatatgctgcaatgaaacacgtggaaaagagggcatctaataaataacatcacgaatcaagccattaaatctgctgtaatattcataataataggcattaacgctttgcgggataacaagagcatatatccgtttcaataatttggacctcacattcaatctccctcaaccatgcattgtaagcaaactgagatggttttaattagcttcaatttctttaacgattaaacaccctctaattggcttggaaatggtagagatacacgaccattattagtcccggacgataccacctacgtacactacccatcactcccctctcattgttaatagccacatccacattaagtttcaacaaacctataggaggtggctgccatggctagtagctagataccatttgcttgttagtgtaatggtggaattcctgtagataggtgagagctttctcaacaagaataatttcaggatcacccatgtcctccttcctgttagttgccacagagtagtaagttccatctttctcaatgaatggaccgaccattggccttaaagccccatcagaatctagctatcatgctctactagagcaggaacaagcaagaagaaatatttaaatccttgttaactaagaattttattaacatta

SEQ ID NO: 203530 - DNA, 668 bp, Cannabis indica
gctgtataaatatttaaagggccagcctattgtattttggtaatatagttacttttttggtatatacttgaaagaatatcaaaaatcaatcataaaatccactgatttcacaatgttttccttataattttaactacggctaatctgttaaactgaatttgatttataattattttgactttgggattaatgttgctttatattttatttactattgcttatgtttttcttagtaataatgtgtagtttgatacacatttatgtggaatttttttcaccaaccatcattatttaatataattttaactatggtttgtaaaaaaatagaaaatgttaatatgcagaaatgtatggttgaggaagtaggaataagttagcagttacttgaggttctatctcaaaatcaattgacaatgagatgagtattccatgcatcttatgtgtggtatttagttttcacacattatcaatgtgggactctctatcatctttccttaagatagtggctattttttgctcaccaatcttgcacgactcaatcacaagtaactttttagctcacaacggctctttttggctcattattcccgagtcacaagtgactcttttgactcttccttgtagactagtttttggatttatattagatactcgttagagtttagttt

SEQ ID NO: 203531 - DNA, 1418 bp, Cannabis indica
ttgaatgttttaattatgctcaagaacattatttcccccattgaacgaccctatttctttttgaattgaccaatgatatggttggtgatcattgaaatactaagctgaaaatcaaattataggaattgttagagctttgagctagattgaaattgaccaatgttatggttgtggtgttcattaaaatactaagctgaggttcaaatcataggaattgttcgagcttttccatcattttttgttttgccatggaagtttttaagatcttgtattgtggtagttcagtataacaatacttttctgggttgtatatgtttttattttttaaaagagacaaagatcacgtgtccttggcgttggaaaaccacggttacaaacaccgaaaaggaactgtacagattttgtctgaaaataaacaacaaatataatggtctaataatactgaagatgatataaaacaatagaaaacatcttctgttgcagaaaactttcccagtctctgataagatctaggaaggatagtccctcaagttcggggttgtatgttaagttacaattaggcgaaaaagcatatgcccacagacggtgatgtaaagcatttgttcattgatagaaatttaaggtttggacagcttttgttgttgtgttgctgaaggttatgttgtgtgagcctagtttagtgtttcattaccatagagttatgactaaaacattttgttgcatacttgtctaaatttggggatgaatttatgagatttggtcagaaacttagtcttatggttttgcttctttgtagtatagaatttcatcccttgtaagttaggcttgtagcttgtatggtattcagattctttattgtattttgaattcgagttccaaaggcgagtttgctcggtaatgtcactaaattcatttattcattgtatattcagttatgcacttagtctgtctattattatcttttgttatcaaagataaaatgtaaaagtcattccttaagttacattctctgacttgttttctcctgttattgaacttgtgacatctgactccgaatctgacatccttcgatttatgtagttgaaagaaagagcagagaagcttgagaattggaggatgaaagagaaacttagagaagaaaagaagaaagagaagaacgagctgttgcgccgaaagagttccttatgggttgaccaatctggattggagaagaaaatacttgaagcaattgttgacacaacacccttatgatataataacaaatgtaagttttatcaaaaccacaccttgtttcttttggacttcttatgatactctttctgttatattatgtatatgagccaaccatagttgcatttctctcaacatttttatatatcagtgtatattgtaaattgtagctatattcatgtccaaaa

SEQ ID NO: 203532 - DNA, 568 bp, Cannabis indica
tttttttatttatttaatatgtttggtacattctaaaagcaaatgccacttgtaattaaaaagtgggatttttttttaataatttagccatttttgaaaaaatcttccaaaataacaatattgattttttttatttattattgtgttaaaaacgttgataaatacattgatggttttgaaaacagatttgaatcgacaatgcaaattatcatatttgataatgctgactagatacttggggtgttttattaattcaaaatttgtaacaactcatatgtcatatagaataatattcttttgtgattaatgacaatatattgtataagcaaaagaaaaaaaaaagacaatatattgattcaatttctgacaactcacctactatacaaaatgatactacaaacgtgatatatgaggtgggatgatgggatacctagtattatccaagactcaaagtaccaaccactcatatgagattttccttttggatttcttacttacttattttttttttgagttaaaaaaacagaatttttttttctttaagtcaaaaaaaaaaaaaaaaaaaaac

SEQ ID NO: 203533 - DNA, 803 bp, Cannabis indica
agagagagagagaagttttgagatgtgggtaggatttttaattttggttttatattactagggtagggttttgaaatgggcttttttagttggattttttgttttaaattgatacattgtaagtgttagtttataactgagaccaaaggatcttttagtctcggttataaactgacacttatgctcaatctgtatgtatatttttttaaaaatttattttggtctcagttaaaattttagtgtcagtctactaaccgacactaaaagtcattatgtgtgtcaactataaattgagatcaaatatttggggtggtctttggtctcagtttaaaaaaacatcatttgaactgacactaaaagtctatttgtagtagtgctagcaaaagcttacaatcatgtacctcttgagcaaaagtagaaagcatatctatcgcactattaatcgcttgaacataaactaaagaatctaattcaagcctaactttgtcccactcttgccttttaatccaacttagtatttccttgatcccaaccagtacctctaccattgtcagatcaatttgtccgaacttacacattaaatctgcctcaactagttggctggagttatcgcgagccaccaagccaataccaaattttctttcttgagtaaagataggctcgtcgacattaatcttaatcgtattgctttttgcttcagtccaaggctcaacatcttcattcattcccaaaggaataagtaaatatatactttttttttttttttaagattgagcatgtgttcattaattaaggactatacg

SEQ ID NO: 203534 - DNA, 1098 bp, Cannabis indica
tctacgagaccgtgtttggttgctgtgaaagtgttattaaaaattgaaaattcgagtctttgagtatttactcccagtataatttttggtgttgaatttgcagcattgggctccagttagtggtaaagtaaatgttggttatggtggtttaggtggtgaagaggataaaactaccatgaaggttgattcgattgcatcttttgctgatcctgtgaagaggaagacaaagaaagacatggattttagccggtggagagagattctaccgggtgaaaagtctgacatggctgaatccgaactaaacacgttaggttcaggtaaaactgaaaatcgaaaaaaagatagagaagcaattgatacttcttgtagtagtgaagataagcttcatattcaagataataataaggattgcatagctgttaccttcgaaagtgaaccaaagcccacacgggtaaatagccaaattgatgcagagacaaagggtcttgacaatactaatgcattattagagaggccaaagagaagagagcaaaagtgttcaacttcaactatagcttcttctgggaataatctcggcagtgaacaagaatccatgtcacttgagagtcaaattgatgctgaaaaccgtcagcgcctgcaagaaatgtcacctgatgagattgctcaggcccaagctgagataatggagaagatggaccctgcattactgagactactgaaaaagaggggtgattcgaaatcgaagaagcagaggtctccaggtctggatagtgccatcaaagttgaatcagttaatgaacagaagaatcaggatgaaaacgacatgaaagcttcttctgtccctgtgaatcctatggttcatgaaatgacgaaaacaacatcaaatgaaatacatagtggggtggacaatggggaggcacaaaatccaaacccaaccagtggcggtttgtggaatgcttggagccagcgagttgagaatgttagagaaataaaattttccttggaggggactgttgttgaaagtgataatttccatacagcagaaactggttagtctaaatgtcttttttttttttgtttttgtttggttatggtgtc

SEQ ID NO: 203535 - DNA, 1227 bp, Cannabis indica
gacttccaggagataagagaaggaccaagaccagtgatggatcttctggtgtttagacaggttcccccaatcagcatatgagaaagcatgaagttagaaagggtcatttgatgcataagagctgaagatgagaccttaggggtgccttttagatattgtaggatcctggtggcagctttcatgtgtggttgtcgtggatcactgaggaattggctgagacggttgactgcaaaggtgatgtcaggccatttgatggttaagtataatagttttccaatgaggcttctataagaggttgggtctgaaacagggggtccaacatccttgctaagggatatgttgacctccataggagtggaaacaattttgattccaagtgatccagctttagtgagaacttccaggttgaaaggtctttgagagatagcaatgcgtgctttagatcgagcaatttctaagccaaggaaaaatcaaagtggaccaagatccttgtgttgaaattttgagtttaagatgattttgaaagaatatgcatccaaatcattattgcttgcaatgactatgtcatcgacatagacaagaagagcatgaaaaatgttatttgatgatctgatgaatagggaattgtcactgggggattgagtaaagccattgctaagtagaatagtgcttaactttgcaaaccattacctagaagattgctttaaaccatataaactcttgtttaatttgcagacaacatttggtggaagctccctctcatagcctttaaaaattttcatgtagacttgttcttcaagatcaccatgtaaaaagcattgtttatgtccatttgatgaagggaccagttgttcaaggctacaagggcaagaaataatttgagtgtgttaaattttgcagcaggtgtaaaggtgtcaacatagttgatgccatgttattgattatacccctttgtaactaaacgaccttgtatctttctacttcaccttttgaattgtatttgatcttatatacccatttgtttccaataacatggcatccaggggggagagaaacaatggaccatgtattattttgtttgcaaagaattcattatccgtggctttgagccactgaaaaagttttgatgcttgactatatgaagttatctcaagttcgatatatgcttgaagaatagctttttaaaaaaatttgtgcagcctgtcatacttgaggtatttgtcaagt

SEQ ID NO: 203536 - DNA, 798 bp, Cannabis indica
atagattccaaacaaactttctataaagacttgagttataaaatattttataaaaaaatgacccaaaaatacttaaattagtaaaaaaaaattgtaaattaacttctacagtatttgaaaatagttaaatataacgtattaacgttaattaaatttctaatatcatgattactgttatattttaactgtttttacataggtgattaacaagaacaaaatatattattaattatttgagtacttttcccgttaattaattataataacatcttccccgaatattttgtatagatagttacacaagactacatcaacattaagctgtaattatcttaagatatgatattaaatactttgatgttggagactttaataatattctttaacatcatatgcaatatatatatatatatataaatatatataaaagtaaaacaatacaatccagtctattcaacaatggtccatgataatgaacaatttagatcaaacatgcttccccctttgaattcaaaatcttaatcatgtagtagtggaataataatagtgaataaataactaactagtcacttctaatttatgactcaacctaattttgaatgtatttgttaaagtgcctaacactccgtccaaactaatttaaatataagtaaatttgacaagagagattaaaaggctatataaaaccttttttttttgtttaagatggtagatgtgaggaggtgattatgaatatacatttaccattaatgaatacacaattggtagagagtgtccttcaatgctctaactaaccaa

SEQ ID NO: 203537 - DNA, 626 bp, Cannabis indica
aggacatgaattggacacaccaggaacataattgaggcaacaaaatcaaattcgaagaactttcattttcagcactcggtgcccaggttgacaatttgtcaacctaggccacttcgaatcatcaaactgaaaatccaactcatgcatcttctttatcttcatcaaaaatggagaaaatgttttcatggaagaaacagaccaacctgaaggccaaaacaagggaccagtgcccaagttgacattatgtcaacctaggccaattgcgaggagttttctaaaaattcttccaggcatgtgctctattttcattaaagattaatattcaaatatttttggcgagcaaacgaaactgtctaaaggcctgaaattggacttggcgcccaggttgacacctggcactagacccatcaggtagcttgacatattgtcaacttgggctgtttctaatcctatttttgaaaaagtgttatgggtttttatcaacagaaataacaaagatacaagtaatttttgggagaaaaaacaattatagggcttcaaaattgagcccagcgcccacccaacactaagttaacaatcaatctagtgtgttggttcgatcattcaaatgcaaattatgctccaag

SEQ ID NO: 203538 - DNA, 925 bp, Cannabis indica
tgggtctgggtcccaggttcgggcccgggcccgggctcgggtccagggtcctgggttcgggtccgagtcggggtccgggtcggattggtgttaaccccaaactctttgtaaatattataatacaaggtactgcagaccatttattatgtattaaataatacaacatacattgtattcaaaatttggtcgtaataattaatacaatacattgttgtatccaaacatagtattatttattatttaatataatatgacccttgtacggcgtaccaaatgagccctaaaaggataatattatacggaggatccatattactatttttagtttaaataattagtttttagtttaaatatttaagaagactatttttagcaattaatatttataaatatttttatatttaagtcaagtccttattatattttttttaacaattaaaccatatcatcataatatatttataataaaattatattttttattataaaaattagacttccacctcttttaaaataaattttgaataattattaattttttttaaaaaaaatgatatttaattatttttttgcaataacctcttgacccattttattccttataaaaaaaacctccaatttcaaaaatctaaatggtatgcttatttgtgaaatagaaacaataatattaattaattgataactattttagaaattttattttttgcaagccctaaattgatgaagataaatgtaacgaagagcaaaagtagttaactaatatttaattttataattcttattacattttaaactattaaaaaaatgaaataacttgaactaattttagacttaagcactgatttggcacttaaaagtattgaaaataatattaagtgtaaaattgcctgtaattagaggttatttttgctattttttataattt

SEQ ID NO: 203539 - DNA, 847 bp, Cannabis indica
gtgctgaaaatgatattcccactttgtatttttaattaaatgatattaccatgagtcactaaaaataaaatcttaaaacctctaaaaaaatatttaaattttcgtataattgttactttttttaattttttttggtggtttttgtatttttttttaaaataatccctatatatattatcacactccaaaaccatttttttaataaaaaaaaataataaaattaaagattataaagagtactcgcaattcacattcttaaaggaaaaattattttatattccaaatgaagtcacttcttgaattacgtaatgttgtgagatttgttgagcgatatacaatattgtaaattagttttgaatctgacaaacttatagtatcatgtgactcgtccgagtgatatacatataacatttttttttataaaaaaagttgaaaaaattaatatgtaaatagaaaaaattattaatttactctaaaatataaaatattattattgcttggaaagtataattacatataatttttatagtgtccatgcatcatttataataattaaatatatgcatgtataaatgcatgctagataaattgaccaatctaatcatatcttataataattaacatgcaagtgtaatataataaagtggtgtatctctctctctctaattataaagaaaattgctaaaatacatcatttaaaacttaatattctttttcggtatcatacagtagtgtaattaactatacaaattttatataatttaagaaaataactatttaaaatatctctaactaattataaagtgtcaacttaaaatattgagcactattaatactcaataacaat

SEQ ID NO: 203540 - DNA, 537 bp, Cannabis indica
aaaacaacatattattgatttcatagtagcgattggtttatttggctcttcatattaaaattattgcagtaggcataaaattatttttcatagaacgcctaaaaatataatgaacaaaaaattaatatataaacataaaagacattaaaattttatgataatgttaagtaagagtttgtaaatggacaaacacaatgattatataaaaataaatatgtctattatatatttcaatatagaaactcatgtaaaaaagtgtaataaaaaaaatgttattaattttttattctgtgaatgaaaaaaaaaaattactcttaataattagtactttgtttagatcttcatagaaaagttgtgatgtaacaaaatattttgctcttcgtataagacctacaatgagaataaaaagaagaagaaaaaaagtaagtatatacatatagttaacatgcatatatgctgtatggaaccaacatcaactaaaaagtgaaagaggataggatgaatcattatcaactatcccctgtatttttaaagttt

SEQ ID NO: 203541 - DNA, 931 bp, Cannabis indica
gatataacagtttgaatttggttattgtctgcaatatttaggccaaacgtttcttctgcactgttcttcaaatataactctgcactgggaccaccttatcgggttttggtcgatactaacttcatcaatttctcaatccagaataaagtgagtattggaagatgttttcatgttgagtagttaatgcactgagtttgatatcatattctgtttcaattcaatttcaaacttactaattgtttatttcataacctatcaatcaaataaaaagtgtatgcagctgattgttccgatcatgcatgtttgttcttctaaaatatatgctgcccttctagtatcacagtttttgtaacattgatataccgcaaaatatcttttgttttggattgttgattgtgtaggataacttacactgttcttgtcttcctttgtgtagttggatctggaaaagggtatgttggactgcttatacgcaaaatgtaagtgttggttgcttggtagtcggtacaagagcttcatcacttttttttccttttgttgttattgtacttgctcttttgactttaaatttaatgtagtatttgatatagtttttttttgataaattttaatcacactcaaatagcatttatccaattaccaaaacccaaaaccctatcatggggttatggcttggtagctatgaggtggtgtttggtatagtgggtagagtatggttgtggggaaatgtgtaggtcccatatgaatttaaaagggaaagctaaatattttgtagaggagagttttagatgccccaagttcaatccctctacactttcccatgcaactcaaaggccaaagcaaacactccctgagtgtaaaataaatctcacaaatcactcacacatgaacaatattggacaaaacacaagttttatatatatatatatat

SEQ ID NO: 203542 - DNA, 850 bp, Cannabis indica
tccctctgttgcaccctttccccaggaattaaatttgggttgggagaggatactggtacagattcaaccaattttcctttccctttatcgttcttgccaacgactgtagcagctgccttgggtataggcatcgtctccattgaagtatccatgtttcgaagatcttcatgaagagttccctcgagaaccctctgaatcacctcttcaggattctggttgtaagcttcaagacaggcagccaagaatcccttaccataatcggggaataaatcttttatttgacttattttagactccataattgcagcatcctcatccatctgtactttggtgcttgtaacagggttttgcatagtagggagttccttcacagtggccttcttagaggacatgaatatccccgacaagtactcgagttgctcattatcaacgaatatccatcctgcaaaacattagtaagcgtaattgttgaaaaccgaatcacaaattgtttgaaagcagtatatataacaaaagccatgcatttttcaccattaagaaaagaagaaaaaaactaaccagtttcttgtagattctccaatttactcattatattgaagttcttttcaatatgttgaagaaatgtttctctgctctggttctctggactagatactgacactgtagcgatttctctaaacgtttgaattaatatatcagcccttataacaggatcttcaatattggctgggaacattttgttgcagcttgtacgggaagattatcttcgaacacctcatcactcaaatagcagatgtccaataacttccatccaaacttgattattctcgttgctaacagtttcaagccc

SEQ ID NO: 203543 - DNA, 549 bp, Cannabis indica
tttgggtccgattttgtctttgccataatctcaaaagtcaaaacaattgaaaaagaaaaaaaagaaagcgagcaacaaagaaagagcacccaaacacgaagaagtcaaaatctcaaaccacaaaatgagaagaaccaccgaagatagatgtaaggaggatagagatgagctgaaaaaggagcaaaaagtattcagtgtgggttcaaggtcccacgcgcccccacacgcggggaagatctctgcggataagggcgacatgtgagcctcacgcacgttgtttttagtggttggacttttggttttgacgatcggcaactgggcagttctcctgtgtaggcggtgagaacatatacactccaaatagggttttcggaaaaaattctaaaatcacaaaccctatatttttttttttaaataaaattttgagtttcaaattcttaatctagaggagctttgataccatgtaaacagtggtgaccaaataatgagaaattagagaagctatattaggaaattaaagaatagaagaaattgattagcccaattctt

SEQ ID NO: 203544 - DNA, 1728 bp, Cannabis indica
tagacttaccatacattattttatagccttatgtgggtttggtttggtatgccatgtactgtacagtctctcgaggcagaggattagtactgttgttttgccatttagaggtttacagtacatgaagtgactcacacttttgatcccatttcacttcaaatgtagactagttgatcctcttgataaggtttttcagtacctaacagcaaactgtcccttttaactgcttttccttactaaacctgtaaatcttatgcctgtcatgttattgtttgaaaggttttcacatgagctttgtttttggtatatgagctatacacgtgaccatgagttctattctagtaaaatattgtttgagatgtgttcttaaaacatatttttcacaaattagtttcactgcactctaactactaagaggagtaaaagtaagaagaagtgtattaattactaattggttagttgaatctttaatgttattattataatttgagtaaataacattaaaagtctcccacctttataaataaaatatcgaatgaattacttctttcattactaattaattttgagatgaaactccatgccttaaccaaacaattccaaattctaacttttaagtcttcaacttttttctcattagtggtagagtgaacaaaaaattatgagttgacttccaaaaagaattgtttgaagtagaaatggtagagacgagtgatgagcttttctagggggagagaacaacttcaggcggcaatgaacaaggggaaatggtagattgtgaaagttcaaaagagaattttttagtgtagagatgtggaaagttttagggaatggtcgagtcaaagggtattgtttcggaagtggttgaaaaagtttttgggatgacataatttgtgagtttttaatatatttagaatgaaatgagacataaatagtataggaaaaatgtttagtacatttttgggtatattggtagactttttatttattttaatatttaaaaaataattagtttatatacattgtagttcaacggtaattttttataaaattttgaatagctaaaaatataatttaaataattattcaccacgtatgtataaaaaacaatcatacgaataaatatatatttcaattttatttttaatatgataaattatttgaattaatctataaatttactattaccttaaataactacgataaaaaaattgaaactaaaaaatttctaaaagtattaaaataaataagaaatgtaacaaccatgagtcaactgagaatgaagcgtgtggatgtgtctttggtttgccccgtctgtaacaaccaggaggagacgatttatcatgctttcgtgtcttgcccagctgctgcactctgctggaacagagttggcatcggtacagtggtacactagcagcaggagagttttttcggctggtgctcttcaaaatttctggtgttagatgcaggtcagagaaaacttttggttgctctttgttagtctctttggaatgcaaggaatgacaaagtgtggaataacaaattggcgagtgtggaaagtatagtgttgtcggctagaacttaccttaatcaatggcaaactgctcagagttcaaatgttatctacccgaatcctggtttaattccaggtgatggagctaaacagtggaagccaccacatggagatagtgttaaggttaatgtcgacgccgctatatttgcaaatac

SEQ ID NO: 203545 - DNA, 1475 bp, Cannabis indica
ttatagaaaataaaatataaaattagatagattgaaaggacaaattaaaactacaactgccaataataatcatgtaactaaatgattctttagttttgaataaaagttttgaactaaaaataaatatttataagtaattttaatgatgattttctttacacttataagctataattgtattcacaaaattacaacttataattgtctcttaacaaattttcaaacgctctttttcattagtacaattctatttaaatttattcaacacaataatctcatgtgaaaagaatgtatctatcaaaagctttcattttcttaaaaagaaagataaataaaacatactagtcactaatctaagctttcctctctttctctgccaaattcattcaaaagaaaaaaagggtataaagaaaagagttaaccaatgaaaaagcatttctcttattttttttttcttttaatttacaataataaacaaagaacaaaatctaagttgtattgtatatatggaagagcattatattaaatataatatatgtcgtccaaatccaaatccaaggaatcacgtgcagatcactcttacgttactgggttggttcatttaatgggccgggcccactaccagtcagtgaaactggaccgtccaataatggtactcccactcttgtttttaggtgtggagctttccacactatatactatgttcctctcttctgtatctatatctatatctatactatatccattacttatatacagtttttgtctttatcttcaagactcagaatatacgtagttttatactctcagaaaatacgtataaccaaggttaatgatgagagagagaaacaacaaagcaaaccagtgaagaagaggagacaagtatttgagaagcctttgctcttgtgaactctaagccacaatctttgatacattttctgattttagagaaagaaaacacatatacaaaagggtttctttttttctttatttcctccgcatttgaaggctctctcaaacaaaataccaggtgggttttcaaaaaaattcttactttattttatgggtttaagaaatttgtttgattctttgtttcttctgatgtgatattggatttttggcagtttaaaaattggttcttttttactttcgatcatcttagtttgatcttgacttgggctatttttttttattattattttttttgtttgggttttagaattttcttttttttgtttggggtcttgatttttgggattttaagtgaattgattatgttgggctgttgattcatctgttgttgacccatttgatgcatttgaagtgggactgactggttgatcgaattggattttttggtatctgatcttgtacttacttcctcctttactctttttttcgcattgcaagttcaaattacatctgggttttggggtacagtacataatcaaatgatcaagtgtgctttcatgcat

SEQ ID NO: 203546 - DNA, 744 bp, Cannabis indica
tttttttttttgtaatgagaacaatcaagcaagaatgatttattctgtaaaattttccagaaatgagactatgatattcttggtacagagcaagttctcggaaaaaattattgaccatttctctttaaccaatctgtgatatatatgtgtttgtagtggggtttaaggaagatgaaagaagagcattgggttttaaggtgaatttctagtgggtaaaagaagaagaggaaggtgaaggaatgagttgggtaagtgccatttctgagcttatagaagatattttagtgagagagagtgaaaatagctacaaacatattatctgtttcattctctatctccacttaccttttccttctttctaacaaaatcatgtatatggtttttctctctaaaaaatctggtggctttagatgtagataatatggagaattaaggatttggtggtcttgaatcttgattaatccaaatgagcatgtatatatccttgtaggtgctctgttatagaacaataaaattgaagtcatgtatatgtgtgaactgtatatagtaatgtatatatgtgtgaactgtaaataacttaaattttctgatcagattttaatttctgccataacagttacgatcgtatttggttgattttgataaatttgaggcaatagttgaatctttgttatggtatttgagatatacaatgtattgtttggttcaatttctgtatgtgtctatttgatgagattgctatta

SEQ ID NO: 203547 - DNA, 830 bp, Cannabis indica
ttagatctttcatcggatctaagtacctgagtttgattgtggacaagatcccatggtagtttgttttatgtgaattaagtactataataataaaaatattctttgttgtgtaatttttggaattatgattggaatgagaaaatacataacagcctatctcataataaactttttttttgttataccctttaagtgtcggtttataaccgagaccaaaggatcttttagtctcggttataaaccgacactaatactcaatttgtatgtatatattctttttaacttcttttggtgtcggttatacttttagtatcggtctactaactgacacttaaagttattataggtgtcagttataaaccgagaccaaagaattagggtggttttaagtgtcagtttttttaaaaaagcgtccatcaaaccgacactaaaagtctattttgtagtagtgttagtggtattatttttaaaaaaaataaacataataaaaaagaatctttaacttagtgggtaaactatgctttcattattgctgaataagcttaaagttaccttacaacttacacctcatatcatgcccctataatagtcggtgactaatatggaatgcatttaatttcaattaattgatgagctctttagtacttcatctgtactcaaatttattttttaccccttttttttttttttttttttacttactttattgattatttctctaatatcttgtgtttgtggtctagtattagaggttatacagtaatacatttatgattatctaattaattcaagctagatagatagtgcatataagttgaggtatcgtaatc

SEQ ID NO: 203548 - DNA, 863 bp, Cannabis indica
tgagaaaatatggcgaattccttgcacaattagtttaaaataaagaagggctgtctcaagtttgtttcatttctctatcctcgtatctttttgttattttataatggactaataaacatgcctagggtgtatgtaaattgagagccttgtttactagagtcccattgatagaagtatgtagatattaagccattagtggaagtatgtagatatttcaatttatttttcgtccgattcttattaacaattgtactctgtttttttagatgtttcctgttgttgaactgatagaacttctagaagcttttgaaaagcctcgaccaacttgtctccgaactaacactttgaaggtgtgtggaagcattattattattaaaatttggattactatatctctattacttatgccctgttctaaaattgacaaattttgtctttgaatttattcttagactcgaagacgggatttggcagatgttctaattaatagaggagtaaatttggatcccttaagcaagtggtctaaagtaagttactttttctttttgttttttcctttctctgctttcattttttgccttgttatttaggatttgagaaccttcacaggttggactggttgtgtatgattcacaagttcctattggtgcaactccagagtatatggcaggttattacatggtatgtgttttcttctcattcaattttttttttcggcaatcttgttgtttgaatacttggtcatttatgttttatatatgtttgtttagctccaaagtgcaagttcctttttgcctgtcatggccctagcaccacaagaaaaggaaaggattgttgatatggcgtaagtgctgaacttttat

SEQ ID NO: 203549 - DNA, 685 bp, Cannabis indica
gtatcctggcattccttccagcaatactacgaatcaggtaacccctacagatccaattttgtctcttcctactgctacctttgtcacttcaccatgcactaattcatcttttactaattttgtctcttcctactgctacatcagttcagcccttacatcctataccagaaacacaacatacatttccatcacagcctgctgctgctgctcttaataccagtaatttacccaacaatgatcaatccaacaccaccatatcttccgatcacctatctgatactggtgtctctccccacacacaaacttctcacccaaatagatcccatcctatgataacaagatccagaaatggaataacaaaaccaaaagcctatctagctactaaacaccctttgcccgaatcccttctaccatctgaacccaggacactacaagcagctttacaagatcctaaatggctcaattccatggaaactgaaatctttgcattgaaaaaagcaggcacctggacccttgttcctaaacaacctgagatgcacatcataggcaacaaatgggtgcacaagataaaactcaatgctgatggatctttggataggtacaaatcgagattggttgcaaaagggtatttacaagaacctggtattgactatgaggagacattctctccagtggttaggcctgt

SEQ ID NO: 203550 - DNA, 726 bp, Cannabis indica
ggcataccatgttgaaggtccccaaggaacatgcatgcttaattaaccactaatgtcacttgagtatccatattattatgcaccgttgtattctttttgtatcaaatatgccacaaaattacaagcacacaatctctatttagctgattgataagtgatcaatattaacatgaataatttgaaaagaaaaatatccatacagtcaaattcaggtcccaaagcttgaaatcacaaagtttacaacaatcatgaagagtaagacaaccccaaagtgcatggtgagttgattccacatgggtagtacacaccagacaaagaccattttataataagggcgtgtttgatcaagtttattctctttaataggaatccaactcaaagaagttttccaagctaatatgttcataactttgggagaaattttacgactccataaatttttccaccaacccaaaaaaatgagaggtagaagcacgatcaaaacccaactagtgcaatcccaaattgtcaacgagttacatagaacaaccttaattagcttcatcgggaaaaaataaaccacaaatgagaagaccatcgcactcttgagaatctgatttaagcatggagaccacactatcaccaccaaggtacataagagacaaagccaaaaaaattaatttgagaggaagtaaattgtaatattctttccgttccccacccttcatatggattcaaaatcaaaaa

SEQ ID NO: 203551 - DNA, 2193 bp, Cannabis indica
tttttttttttaaaattatttgaaaacttttttaaacaattttttttcttaattaatactttagactctcacccatgaactttgagacctagactccgacctcgagcccagtcccagacttgtaccaccgtcctggcccaaactcgaacctgaattcgacttaaataaaatcaaaaaataaaaatgaaaataaaagttataaaacacacctttattttctactttttaaattaaagaacaaaagtgattataaaacacattcttattttttaaaaacacaaatttaacttttacttctatcttttcccttacattttccacgcaattttaaaggtgtgattttgctcagtcaatcacaaccttatcaactcattgtaaatttgattgtaaatttgtaatatttttatttttcatttttcagttatccaaatccaattaaaaacgaagaaaacatgcattacaagtgagcattgtctgcccttaaagtttgctctgtggcagttgtggtagttttttctttttaacttctttctttcagttttcttcacccgttctccttaaactcatctctatccatgaattatatacatctcctctgcatcttcatcgtttctctgtgattttctttgatctctttcggttacctatggattctttccatactgatatctcccaagctctcactgaaaaggaaaaagaggttgtcaaattttccaacatctctgctccacttccccgaactcaatgtaacagagtttattccaaaatcttctccaaaagaggccataacccgaagcagttttttaattttgtaactaggaattggactggcagatttccagtggaaacttcctcttatgatactgatgtctatatgatttcttttggttgtcaaggtgatcttctcagggtcctttccaaagagccatggcattttcaaaaccaacacttggttctctgccttccaagtgctctacaaaatgcctctttagagtcttttaccattactcctttttggattcaggtttatcgactaccttttctcagcaaatctgaagatcttgctcgtaatattggtggattgattggtaactatatagatgtgcatgaggattcactcaatgagggatggggtccatttttaaggattcgtgttgggatcgatgtctccaaaccacttctgtgtggccaaatggtggcgtttccttggattaaagatgaactttggcttgaattccgctatgaacgtctaccggatttctgttatgagtgtgggataattggacatgtttttgacaaatgtcaagtgtacttagagaaaatcgatgatggtaaagagcctgatcttccttatggcccctggatggaaggttctcctcttccaaaatcaccttatgatcgttataggcaagacttctcaaaggcaggtccttggccttttgttactcggctggttaggaacacaattactcctatcattaagcccccacgacagcctcctgctcttccccagaacgttacagatcgagaaaaaggaaaagaaataatgcttcctaagtttactgatcatgagtactcctctttaactccatcctttgcagcactctcttgtggtctgactcatgtttctactgatgggaactctctcaatgatgcacctataacagagaaatgtatctcaacaccatttcctagtgcatcttcagtcaagaaggctgctccttcacagtgtcaaccaatgtatactccgcctgaaccatctggggttaaatgtcctactgctgcaacaatgattcctctttcgtcaaatcccccatctaaggctgctatcactacctctccgacagtggttttatctactgccactccgccagcctatttccatttaagtgaagatcattcctctggttcctccatgatgaccatgacattaccacctgccactacaatgtttgctccatcaataaccactacatctcagcatattgcttcagcaagtatcactcaacaacctgaagtttctccatctgtaggaaaccgaatggcatcacttttctccaaaagacaattagtctcttcaagtggaaatgtccgtcaagtactgaagcgttgtcgaacaagaaatgtacctttcactgatatcaccaacctcaatgtctcatctccaaaccttgactctatctctggttcttc

SEQ ID NO: 203552 - DNA, 841 bp, Cannabis indica
ttttctcttatttgtctatctgttacttcttgttctacacttgttttcatttgttataaataagttggactcggctgtaacaagtttggcacttgaatcatgtcatgggtccaatttggcatgtttgattatttggcatcatttggaattaaattgagaatgcatatatactaaaagctcttattgcagaaagtatctgttctagatggcttaatcatgcatgtattatatatatatatatacatatatatatattaaagtgtgttattacttctctaatcattgagatcccctcttttaattttagcttaaattgatataatcatttatctgtcttgcaagcaattaaggagacaaacaaaagacaagaaatagtaacgtgcgtgtgaactgttgttgattctgtatgaagaattatgattcatattcgtaaaaggcaaatcaccttaaaattaattctcaataattaaagttttttacacttaaatagaaaaggttgaagggaaagttggtttgtccttttttttttttttttaataatacataaagttaaaaaaagaaaagcccaagttgttatttacttgtaggaaagagagtttcaagccaattacagaaacacaacacagtaaagtaataacacaacattacttttcaaatacatatatcatttatacacatgaaatatatgaataaacttacaaagtccacactatacatcatatgcaagcatcctccactatatattgtactaattcttttctttctttcttggagataaaagcctgccatgcatatacaatatacacacaaacatatatatatttatatgaattgctaatta

SEQ ID NO: 203553 - DNA, 905 bp, Cannabis indica
taatgcaaaagtaacatgtttttctagttttgtctttattctgctttttaaagtaacttggtactaagaatattaattttggttgatgtgctacattttttacacgtgtaactcaaggtcttctaaagtaacctagtacatggaatattaaatttggttgagtgtgctattttttgactagttttaattcaaaagtaacctatttttctgtttttatcttttatttttttttctaaagtaacttggtacttgaaatattaaatttggtcgatgtgctacattttttacacatgcaacctattgataacatcaaaaagtaacccgaagttttctaaagtaacctagtacttagaatattaaatttggttgagtgtactatattttgactggttttaaagcaaaagtaacatatttttccatttttgtcttttatcatactttctatagtaatttggtacttggaataataaatttgattgatgtgctacattttgtacacatgtaacttattggaaacatcaaaaagtaacctaatattttctgaagtaattaacctagtacctggaatattaaatttggttgagtgtgctacattttgactggtttaatgtaaaagtaacatgtttttccgtttttgtcttttatttttctttctatagtaacttgatacctggaatattaaatttgatcgatgtgctatattttttacacatgtaacttattggaaacatcaaaaagtaagtaacccgatgtttctaaagtaacctagtacctaggatattaaattttattgagtgtgttacattttgactagttttaaagcaaaagtaacatttttttttgttttatctttatcgtgttttcttaagtaacttggtactcagaatattaattttagttgatgt

SEQ ID NO: 203554 - DNA, 1374 bp, Cannabis indica
taaatggtttatatattatggtattagcataagggtgaaatgttgaaagtattaatggtgtcatgtactggttagtaatcttaatgtttatggtatgaccttttaaatttatgaatgttgaatgactattatgtgtgtgcgtgatgtgtaatttgtacgttttagcatttccaagtatttgttagggttggagagatatccaaaccctagtttgataatttgaatgattgttggtgttgtggttgaaatctgtcattttttgtgtttcctactagtaagattgacttactaatcattctcttttacttaattgtttcgtgttgtaggttagtgtaaactcaaagtagagtagtgagtgtcgaggtttggtttcagaagatgtaaatgtggccgaccttaggttgttttgaaattggtgttttggaaaaggaaactttatgggtttcaatacttttggaataattatattattgtattacttctaaatgatgtaaaactaaagtgcacacactattttaaggtctttattatatgggatttcaaaatcatgagcttaagtaaaatgttttaattttttttttatatatttttgagtttgtatttatttgggtcgttacaacaataatcctttaagtttatttttatttgtgaatttaagatattatttaaattttattattaaatatcaattaagattgtcactgcatacacttatgtacacgtgacactaaaactttgaagttaataaaaacatgctacaatacacaagtatctacagtgacaatccagttggtatttaacaatgtgattttaattagaatctcaaatttacaaacatatgtgaagttaaaagggtattgccatgaaaaaatcaaaagattaagtgtataaaaattaaaacacttaaaagaaaaaattagtgaaaatgatatttgttttcaatgacattattagttttcaatgatatttgtcattgttttaaaagaaaaaaatcaatgaaattacataattttgaattgtcatcacaagtttttaaaatttaaaatgataataattaaataacaataacttaaattaattttaagagaatcaatataatattaaaattatatattttttttaaattattagaaaatttatattaaaattttagaaaattaatatttgtatgaaagtagtgattaagcatacatatttttatattattcaagtattttatattactattttaattatttattaaattaaaaatatgataaattattttataaaacattttttttagacccttattataaagataaataatatttttaaaaatgattaagaaagtatgtctattttttaaaaagtatatttttatttgggccccta

SEQ ID NO: 203555 - DNA, 1256 bp, Cannabis indica
aaaaaaataaagaagaagatgaagaggggaaagggagcttaaatataatgaaaaaataaataatgacaactattataccttacaaaaaagaaaaaccgtgtgggaagagatatattaaatttttcatgattatttttttcttaaaaaaaaaaatctacatcaaaactttttcacaataaaaaccatcttcatttggctttttttaaaaaaaaatctgtcacggacgtgacaactagttttctcattagcttttattaatcatttctttttaaaaaaaactcaccctaaggtgacaaatagcataaagggggaaaaaacttttatactgactctagtatacagaaaattacttcagtaaaaaaaaaatatacgcgtgcatcagtaaaaaaagaaagttttataaaagaaacagtacccatgtaaatatcccaaaaaattatattcaattactgttggattggatcaaattttaaaaaaatatattgacgttgaatttaatcagatggatgtcaaatgatacttttaaaatccaattaataactattaataggtaaactgcacaataatttattacatgatgaattaacaagatagaaaaagtatgtcatttataaaaataggaatgaaaatcctaatagcactttcaacaacccccaacattgaaccatcaaagaagtgtgaagaatgctagatctccaatccaaataaacatgtgacaaatcacatctatcaacgactatcaaccaaagatcttaaaaaaaaaataataacaaccctattattcaatctagaataaaaagaaataatcacatgaccaactatagcgataacaatcgtaacaaacaatcgcaccataaactatatgggcaataaaaatatgagaatctcccagatccgaacatagacaagaatagtcatgctagtaacacaaatatgctttgagccaacatgaaattcctccaatgtcttaaaaagaaacaagattaaaattatgccatgaagaataaaaccctactaccataacaatagtaaggtaatgtagcaacatcattattaaaaataaaaataaatttaacaaaataaaaataacatactaagaggattaacaccaatgaagattcaatctagagccaatgaacaactcaaatctctaaaatacacctctaaaaatagaagacagaaaagaaaaaaatactcatacataaatataacaacaaccccagaaaaataaaaaaatagtatgggagccacgccat

SEQ ID NO: 203556 - DNA, 743 bp, Cannabis indica
gtgtatatagtttacaccaatttttttgaaaggtttttatgtagaactatactataactaatgtattaattaaatcatcatcacttgtggtttcatatatgcttagtagtattaattacttattggtttcgatatacacaccaaatatcagcaggtatgaggtaattaaaaaatcatgcatcgttcgagccaagaccaaaaaagaaaaaagaaaaaagggcctaattagatcgagccatttacttttaatccacattatatatttatttagtttttttatttttttttttggttgattgagtcatttttgcttttaatcaacatagctagattggtgttatgaataatcaacattgattgagccattatatatatacacaacaaaaaaaaggggttccacttggtcttatattatatatacaatctcaatctcaccccactatgtgcctgaatacggcgcaacacacattaaggtcacgccccatcgccttgtccatttactctttttgctgtgtaagtattcagatcaagactcaaggtccccttagtttaggttaataggtcatgcatgcatgcgtgcaagtgtatttgtttgtttcccccgaaagttttttctagctagtgccaatttcttttcctttttgtttgggagagaaaagaaattatacacagcaactagacacaacactaggtatatatcctcaaacaagaggagatatatgatcgatagaaagagctgaaaa

SEQ ID NO: 203557 - DNA, 714 bp, Cannabis indica
agcggcaatgattcaggcattgccgcaattctgaatactgaaggtgattggaatgatactctgattgctctcgactttgggatggtgcacagtgtgattgaaggggaattatcggcaatttctcttgctctgtctacagcggcttctaaaggatttcataagctagctattgaatcggattgtgccgtggcaatacagggattacagttcgggtgttttccagttggttggggtagttatccagtttttatggattgtatgtctaagagcagggagtttgaatcagttgtcttttcttgtattaagagatcttctaaccactatgcagatttcttagcccgtagggcgcgcatagggaaaatccatgttgttggctctgttagggaagtagcccccctttgtggctactaagtttgtgtttgtttcaataaatggatttaattataaaaaaaaaaaaagtacatagaatagaaatataaaaaaccaccacaataagcaaaagaaaatgactggaatctgaaattttgatatatatgccgctaataagccctttgtcaatcacattgcagcttagcatgactgtctattgattatccaagcaactttttttttatctttcaataaacgaacaaaacttttcaaatattcttaatggaaaaggacctttctaacctttgaatttcaacttgtactaacagttagatataaatcaaa

SEQ ID NO: 203558 - DNA, 1615 bp, Cannabis indica
attttattttttatgtcagtgtacatcatagttgtttaacacatcctataaattttcgagaaatttaaataatttacataccgaataaggtttaaccgtttatgtacgcgtgacttctttttatttatactcgtgtagaaataaactgtttgaattgtaattgtatcatgagtttacttttgaattcagtatggataaaagatcctcctatgttatactattcaattcttgacgatgaatcgatttattggatattgttatttatgatattgatccgatttgattacattgaaatgtaattcatcccgttgaatttacacacaaaaaatttatcatctctatgagattaaatctcgagttacttcgaaccctattttttgtattataaattattctgaatttattaaaattttacaaaatattttaaataattacaatatatatcattatataaaataatgaataaataaaaattttgctccccaaactttaatatttatataattttgcccctaaattatttatttatttttttaaaaaaaatgttgccgaacttttaaattaattgttaatttatccatttaattgcattttactcattttttgcaaacagtttcgtgatgtgtaagagtgatctatgaataatttactgtaatttaaaagtttatgtaaaaaataattatataaatataatagtctaaggataaaatttaggattgtatatctataattttaaaattaatgtttgaatttatttcacaaaatttgcatcaaatacaaaatttaaatactaataaaaaaatatctttcttctaaaaatttatggataaatttatagttttcctaaaaaaaaaaaaaaaaagttttgtacactctatttgttttggcattgaaaaattattcataaatttttaatttttttttaataatttatagtactgaaaatacagttcaaataactacttatcacttgtatagcgataaatcctgaatttttattttgtgaagacatatttatcataaaaaaatatttatagttacattataattattcttactagatttatttaattttatgaggatttttttattatttttatctataattattaaattaaaaaatttacatttaattttttaaaaataatatttttgttagtggagctataaatctcacattaatactaatgggtttgtctctacacgtgtataagaaaaaatagttaaacgtgttataaaatatttaaattttattttgacaaatttttgaaaaatttaaaaagtaaccttaaataaataaaacatagataatcataaaaaaaagaaaattattaaaaacctctcttaaataatgaaacaattttcttttcaaatgtaatgaaatgcattttaataaaaaatagagaaagaaatggtacctacataataggagttgtcacattcttcttggattcttccttccctaatatatttgactttgaatttcacaaaccgtaccaactattcttttctccctttttaatctaattatttattattaaaaaaaaccaaaaataaaaataaataaatgcaattattaaaacacaaccccaaaaaagaaaataataataaaaaa

SEQ ID NO: 203559 - DNA, 646 bp, Cannabis indica
cctcaaactcctctttggatagcttatgtcgaatctccatgagaagatcaaacatagagtggctgtgactgtctcaaattagcttatagtaaggcagacatttccaaactactttagccttggaacaacaccataaagcatgagggagagattcaacatacctaccacactgattgcaaaggggatcaattgtcatgcccctatgaatcaagtttagtttagccgggagccaattatggcaaagcttccaaccaaataacttgattcgggggagttgaagttgccaccacatcttccaccaagcgttgattggatccatattcgaacagcgagtagggtgaagattccttttccgagccactctatatccattctttactaagtaatgcccattcggagagcaaagccatattaaggtgtcttccaattgcatatctacgagtgtacccaaaatccatgggatgtcttctatgtggaaataatgatggatcttctctttattccactcttcttcgttattcaaaagcgtgtgaacggtggtgtttggagctattcctgaatgtcgataaagtatagttccatttgcacgggggatccatttgtcttcccaaattcgaatcgttcttccattcccaactctccaacg

SEQ ID NO: 203560 - DNA, 1702 bp, Cannabis indica
aatttcttgttatagaacttagaaaaatggaatactacaaaaatctagacgtgtcatgtagaatgaaattaacaaaagggttattacgtgtaatttcaacccctaaatcgaaactcagagaaagataagaaagagagagagaagcagccttatccatttcgcacacccaaagcatcttttataaaagcccatcaaaatcctcattttacacaaacaacccaaacccaaacccttctctctccaaaaaaaaaaaaaaaaaaaactactgtacaactcgagcttcaaaaatggcgacgagtaaaagctacttctcaaggcagaactaccgttttctgtccagcgaccgtaacaccgccgtggtaacacccaccgattcatccacattcgaactcgacgagtcagacatgtacaactccagccgatccaagtctcccgagtttcgaaaaccgctcaccacttctcgtaagaagacttcctcgaagcgatcggggacagatctcggaggcgatcggactggcggaactccttcgtctcttccggttaatattcctgactggtctaagatccttagagatgagtacagagataatcggagaggctccgagcgcgtggatatcgacgacgacgacgattatgatttggacggcgattgtgacggcgattctagggttccgccgcatgagtttttggctaggcagatggcgaggacgagaatcgcctccttctcggtacacgaagggattggtaggactcttaagggaagagatctcagtagggttcgaaatgcaatttttgaaaaaactgggtttgaagattaaaaaagagaaatttgaagagttaaaaatgaaaattttcaaaaataacagcgggaatttacggaatatattttcttttttttaattagataaaattttaatcctccaaatatgggtaggctttaattttgtgatttttatttttatttttttaattttggaggagcatttttaattttccacgatttgtaattttctctaactcggagtattttaggattgtatttgggtataaattctatacttcaattttgcattattattattattattattatgtttaataataattaaacgaatattagcattaatatttttgtgaattttgtgtgtggtttgatttcgatgttcaaacttcaaagactgtaaatttggtatatttgaaaaagaaaaataaaaaaatggttgaagaaggaagaagaagaaggtacaatggtggggccattttggtaattatataattgagagtagggtcattggtaaatgattggtggggttttttttaattttaatttattataaattagttattatttatttattttaatttaatttgggtggggttggtacgaaaaatgaaaagcagaggttaagaatcaacgatgatgacctctttttattttaaaattaaataaaatttaataaaataaaattaattctatcatatcatatgataaaactggtcacaatttatttttttttcttttcctttttttgcaattattttttttttaattaataatacttggttttggatgtttctcccaaataaaaaatattgtgtaataaggagaattttatttgctaaccacctcatttaataatttcattttacataaatatttatatcaatttttctttgttcttatatttttaaaaatacacat

SEQ ID NO: 203561 - DNA, 1011 bp, Cannabis indica
atgttagtatatggacaaatttgcaaagagaattattaatatcatttttattttatacttattttggaggaagtgtaaagacaaatgttaggcataaaaagtttgaaattgaattgtggaatagacaattcatgtaaaagtacttgcactactatcttatgcaaaattaagcaaatacatatgcaagttggtataatataaactttatgcttctattttgacgactttacttgaaaaataaaattaattatgctaaaccatctttatatgaattagaatacaatgggatccctttgtttgacctaaaattaaatactttgatatgattttaatacaatggttattataatatgagatagttcactattcaagaaataaagaacatgttaaccttagtatccaagtcattaaccaaataaactcactcataataaaaccttcatattcatattaatatacacttaagctaaaagaaagtgttacaaaataaattattataaggataaacattaaaaaagtcaataatcatttcaatgaaaattaagaaaaatatataatatttgtttattttaagtaatcaaaatcaatagacactttaggccccaatgatactaaagccaccacctatcattacctaacctcttcattatcattataatatgattagttttatatattaacataacaaataatgaaataatgaatggttgatatataagtgaaataatatattagaaatagtaataatttgttataattttagtttcatatttctttttctttagctctataataataaccaataagaaaagcattgatcttgatttttaatcatattattaaaaaatgtaaataaagttgttagtgttaatctcttatttttcttctttctttcttcttaatcaaacattcaaccattattgtttaatggtctcaaacttaaaaactctctctttaaaaacctcttctttcactatccaaaacccaatccaactctctctctctctctct

SEQ ID NO: 203562 - DNA, 623 bp, Cannabis indica
aaataaagaaattaaggttttggtgagatattttaaatgatagagtaaaaaagatgatgtgagggtttaaaatgaccattttacccttacactattttatgagttaagcttgtgggaaggggtatttttgtcattttaccttaaggtgtcgtggctgattttttagagtggcagttcgccactatttgtttaataattctaagtttattattgtttttagtaaattatagaaattagaggaaataggaaaaatcaagaggagtcttctctttctctctccttttgtttgaaccctcaaggatcaacaacttttggagaattttccttgtgcaaatcagtgaattagacaaggttttagtaattccaatccaaggtataactccctagcccttctcttatgaattccttaagtttcaagctatgttttgcatgattttcttggagtttaggttctatgatgttaagtttgttgtgttaggttttcaaaggttattaattatgttttgagctgatgttgttttgtttgggggattgttgatgtgtttgagctaagtttgaacttagagttcaagctttgctctcacagtggattttgctcctttgggtttattcctgttttattg

SEQ ID NO: 203563 - DNA, 1037 bp, Cannabis indica
aaaaaaacatatatttaggtgtttttatattgccaagggagcatgtatgatcacgattcatctctttagtttgggataacagatactacatatatgcgcttaaaaaatagcctcatttttcactttcatatgataaaagaatttgcttgattattataatataaattttgattattataatataaattgtaattatatgtatggagaggaggcttgactcctttgctttctcttttggaggaatctctgaagagatctcttcatggaaagaccttgagaaccacatatctgagattgcaagcacactgatgatagtgccaattccaacccttctccatctcttccttcttccacttttttatttgcaaatagtagtatggctctagcctatattataatacaataagtaaaaaaaatcagcaatttgtaattaatcatgaccagtacttaacctaattcttcttttctctcttaaaaaaaaaaacaaacaaattatcccagcaagtcatgtttatgaatttatacttgtctccgttagaaaccaatgggaaaggtctatactaacatagaaatagaaaacagagtactgataaaaaaataatactcatatatgtaattatatacatcaattcatgtttagtggttttccaaaaaatatagtccttgttattgaaacagaaataaatattatcatatatataatatatatatatacctggagttcagtcatgtcgcagacgaaagccctttcattgaaaaacacggtaactttttggttggcactcggtattggcttactgttcctgaaataatatataattattaagctacaacaatttctttcttcaaattaattaatctcctaattactcggatctgaaatacttgaatggcgattttcactcattccattctcttcaaatactactctatctgtaactcacgtgaacggtcaaattccctccatttatatatataaataaaattttataatttctaataaaaagtaaagcaagaaaagaaaaaaaaaaaaaact

SEQ ID NO: 203564 - DNA, 2578 bp, Cannabis indica
tcaggaattgctaagtgcaatttacttaccagttaacaattaggtacttaactaaaaattttaaaattataacttatgtattattactaataaaaaattaacttaggtatttattgtagcagagaattaaacttaaatatttatgccacaaattattcaaaaattatagtaagaaaagaaagacagtaaatccctaccgaataattctccaacattgaggttttggtaagccctggagcaactgtgtttgcacgaatgttgtccttcgcccattcacatgccaaattctttgtcatttgattaattgctcctgtccatgttattaaaactattacttgaaagtaatacaaaaacaacataacttattttaatatacaaatttttattaatgctactagttagacgagtatacattactttatatttatagggtaatataatatgtgcatacatacaaaatatatactaaaataattagcctcaatatgtaagtaattatttaaaatgtgatatttcctgtgttaattaaccaaaatatgcatggataagtgaatattcatgtgaatatgtgtattttagttctcgcgtaaaagaccggattagcagcaatttgttgggctgctttgttgtcacaatgtaacaacgcaggtccaatatgatcaatgtctaattccttcagcaaagatgttaaccatataagctcacaagtagtattagacattgctctatattcggcttgatcagctgaggaccttgatatagtgtgttgctttttacttttccatgacactaaagaactgtcaaggaacacgcaaaacccagttgtggatctcctcgtgtcaacacatgctgcccaatcagcatcggtgtatgccacaagctgaatttttgagttggttggatagaaaagcccttgtccaggtgtccctttaatgtattgaagacctcttaaagctgcatccatatgattagatctagggctcaccaaaaactgacttaacttgttgactatgtaggcaagatcgggcctagttatagtgaggtattggagttttccaataattctcctatatagttttggatcagcaagcttttcctctccatcttggcttaatttcaagttaacttccatgagagtattagcaactttgcatcccaattgccctaagtctttaagaagttgaagagcttgattagttctagcaatctcaatgccaaggaaatatctcaattcaccaagatccttcaactcaaatctcttatttaggctttcctttaatcttgttactgctgaaatgtcattgctagccaaaatgacatcatcaacataaacaagaagtatgatgatggtggagtctcttcctttgaatgaacaaggaatgatcggatgctgaatgtgtggagccttcttccactaaagctgtagaaaacttctcaaaccattgtctatagcttgtattaacccatagatagatttctttaacttgcaaatagcattaggtggcaactcccccttaggactataccctggaggtaaagtcataaaaacttcttcatgtaaatctccatggaggaaggcattgttgacattaagttgatgtaaataccaatcttaaatagcagcaagggcaagaattagcttgacagagacaagcttagtaacaggggcaaaggtttcattgtagtcaatccctttttgttgactatagcccttggcaacaagtcttgccttgaatctgtcaatggatccatcagcattgtacttaatcttgcatacccacttgcaacctatagcatgttgaccagcaggtgaactaaccacaatccaagtcgcattgtcttcaagggcagcaatttcagtatccatagcattatcccgaaccggaatgcctcgtgcttgatcaaaaaattctggctcaaaatgacttgaaatagcaagcagagtagcacaaaaccaaggtgacaacctgatgtaatcaatgatattggaaagaggatgagatttgaaagacttggatacatgagattgcacactattagtagaaagaaaacaatggtcaccttgaagataggaaggtttatagatctgtccagtggaccgagtagtgatgataggttcatgtatggggacaatatcaggttcaattgacggagaaaaggatgcagatggtgactcaatagcatcagtaggcataagagtaatggaaggggaatataggattgaaacaacaacgctctaacaacatttaataaatgttggtgttttctttccacaactgaattttgttgtggtcttcgcacacaagagtgataatgcataatgcctaatgatgaaaataaggcaggaaattgaagttctttggcattgtcagacctaatgccctttacttgagcattatattaagtttcaacaagttgaaggaaagatgggatggctgtttggcatcaaatttattctttataagatgaatcctgtggtttgtgccctaataaacccattacaatctgattagtcatcaatttgaattttgaagtgatttatgattacatgtatgttacatgtttgtggtttaatata

SEQ ID NO: 203565 - DNA, 586 bp, Cannabis indica
  modified_base (507)..(507): a, c, t, g, unknown or other
gccaattgccatgggccaagctagccagtaagaagtagcataacatggcaccaaagaggtgaaggtgacgtgacatttatatttatatataaatataaaaaaataagaaaataaataaaataaataaataaaaaaaagaaatagcagcttctacacattgcgatttatagcagcagcaagcagtggtagttctattaacttttgcccatgcttttgggtaagtaggagtagtgggaaatgaactatgtaatatgacactattgtatatcagtcttcaagagtgacattattgatgagagaaagatttatttttttttactttttaatttcacgtaattcacaaagggggtaatcaattatatattggattaacccaaaagtgctttctagatctctttatgattttggtgtcaaaaaaaaatcatgtgatgatgagtgttggattaaattgagaattggtatttaaggttattacccgtagtacagcttgtagtttttttttttttntttttttaaagggtcttttttaaactaaaattccttttttcatatagagcattattattaagtattagtagtatttaac

SEQ ID NO: 203566 - DNA, 1304 bp, Cannabis indica
aaaaaataaaaataaattgcggctaaattttctaaatttttgaatttatcacgatcaattcctactaataattttttttggtagaattctctaaacttcaattcttgtcttgggttaaaaaaattaaataaattttaaataaaaaaagtgcccgagtggggtttagtttttctctgtttttgctccggtgcggttaccacttttttagcagttttttccagtcttctccggcggctcccagtcatggctctgagttcatcccctcaacccgccttccatggcattgtgccccatgatggcactcccctcaaccagtttgcctaggtttctaatgctatatatgaatctctgtatagcatctttgctctgtaccttcggtttttattcgattactcttcttctttttcttttatggattcattcttcaagatatggattctcgtatggtgttgtctgaaaaggaacgagcagtccattccttcactgatactgacctttcccctggaaacatacccctaaacacttccttgttgctcgttgtctgtcaaatgctctaaaccctaaaactttcatcaagaaaatgggtgatttctggagcaacaagtgtcgcttcccagttgaggtatctgaaatgcattccgatttattcttactaacaattggttgtgcaggtgacaaaattaggattttgaatggggaaccttggcattatttcaatcagcttatattactacactccccaaaaacagttacacaatgtctctaaggatgatttctcgaaagctcagttctgggtccaggttcaccgtctcccttttcttagtaagtcaagagctttggccatgaaggttggggaatggattggtgactatgttgatgtctacgaggattctatgcatgaaggatgggggtctttcatcagaattcgggttttgattgatatttctcaccctcttatgaggggcaagcttgtcactcttccaaaagttcgggatgagcattagttggaatttcggcatgagaaccttcccataatttgttttcattgtggaagaatcggccacccttttgagaagtgtcattttttcatggagcttgtggattctgggattgatccggttatgaccgttatcgaagttattttccaaggctaatgtgtatccttttatactaggcttgcctgaaaatcaattgcctcagctatcctaatcactaaccattatcaaactcgtatgatcaaattttacccaccacaccccttcgcctctcacacgatgctgaatctagcaatcactcccttcacc

SEQ ID NO: 203567 - DNA, 510 bp, Cannabis indica
ttaatagtctctttaattaatcacacccttaccatttaatagtctgcttatttaacaagcttctatagaaactagactgctccgttaataagcttctataaaaatctaagttgcctattttataacctctacgtaatttttttttttttttttgaaaataaaccatcaatttattaattgcaattatgtaagattacattaagaaaatcataagaaacatcatgacttctgatgacacgatcagcaacagatgctctagataagaaatgagcaacactatttgcagaccgtttaacaaaaagaaccgaaacaccaactaactcctctaaaagagttctacaataaaaaataacattcccaaagtaaggcaccgctgcaagagggcttcgaattgcttgcacaacaataagtatgtcagtttcaacaattactctctgccaagatttcttctttatccaacttaaagcctatctaaccccatcaccttagccatttttggtgcaactaacc

SEQ ID NO: 203568 - DNA, 646 bp, Cannabis indica
ggtatatatagtgataaaaatgtctttgctgataattatattcgaatcccaccataatagaaagatttatatatgattagttcccaaaattgtttatgcttattatttcatatatatagagagagagagaaatgttgttattaaaattacattactactacatccctttcctttcttgtcctctttctctcttaaaaaaatatattaactacaacttattatacataaacagtagtccataaatatctttttgtttagtgactttggtgttcataagcataatacttttatataaaattattaatatggaaacatctaaaaaatatattgcaaaggcaggcacttagctaataacccactattgtcatttgaggttaagtgggaggcatatatataacacatatatatgatcatcgatgattacaggactaatctccactactactttcaaagaacaaccagcaatagtccgtcgatcaggaaactacaaacccccattgtgggatgctcattttatccaatcactccaagtcatatatacggtatatatatatacatacatatattatatatacatacattatattaattaatgcatacattatattaattaatgatgatttatatatataggaggaaagctatg

SEQ ID NO: 203569 - DNA, 740 bp, Cannabis indica
ccatgatttcctcttcctcgattcgaatttcctgctagttttccaggtatgttagcagcagtaagattagccgaaggtccagccccaagtccagttgtgttgttgttcttgctgtttcctcctacagcgtgtagcctctcgagtttgctgtcaaagctcaataacatgtcttgagtttcctgccatgagatgttagatctagcttcaatttgaacaacaatagcaaggtattgagcattcaaaccagaagttacattcgaaatgagatgtgcttctggatagggatctccagcaagagcaaggctgtctgaccacattttcttttgtctgagatattccaccatcggagtagctccttttcttgtcgtctgaatcagtgtcctggtatcgtccatttttgctcgagagtgagctccaaataagttttccagtgcactccacaaggtagcagatgaggggcatcccataacttcagtggccacagattcagtcattgagctgtaaatccagcccatgagcaactggtcactgacaatccagtgctcatagtcgggatttaggcatacttctggtttttcctcagtcgaagtaggtgctggtatgagttctggtgggcatggacggctgccattgatgaagctgtcgagtcggtgtcctcgaatgatggtcgataccattgttttccacagtgtataattattccgatcgagtttgagtgagaatggttggtttagggtatt

SEQ ID NO: 203570 - DNA, 1608 bp, Cannabis indica
actcatttaaaacacagtaaagaaaacagattaccttcagatccacgaaaatgcaaggcattggctgctaagcatatttccatcagcagaagaattatcttcacccccattttcaaacaaaaggaaagctagagaacagttctcaaaatctttgagacagttcacactccatcatctgaaagagaattagaacagtgaagatgaagtaaaaactggaaccataacaagacccagaagctgaaaatggctcacctttaagaaccaaaccgttcagtgaaaccaccaaaattgattaggtgaaaatataaatattatcaatgtttttgttgtcctattgaaactaagcacataaaacttgaaatggaatagtttgtttgttgtcaaggcaaaggatgattaaagtttcctagcaactgatcaagccaaaaaaaaaaaaaagctgtacagaacactaaaaagacaaagttatgtgagaaacttttctgtaagagagttggtggggttggaggaaaaagagaagaacaagaaagaaaactgatttttttttttttgaatattattatataataataactatcaataagtgttaataatatcttgtttgaaagtgtgaaacactttagattgaattaagatgagaatgcttgactagtgttgtgttaattgtggtagtggatgatgatatatactttcaaagtatcatatcatgaatctattatgttatttggttttaattaattattttttattttcattgctccttttcggttatgtccaacttccaactatgaccacgggtgaggtaggtaaagatgacccatagtggtccaatccaataatctcaactgaaaattaaacaatttcatataacaaaggtttcaagttctaatcccctttgatttttgattgattaaattctggtcttctcttgtctattatagtctaggtaggcgtataagacccaaaaattttgggtttttttcatagaagtataaagcttgagttgatgagcttattataagtgaacattaaatgaaatcttattgattagtgaattatatatggatcatataagtccaactccccaaagttttgaagtctaagtttggtatccattaatcaattttgaaaccccacgtggccggcgttgcctctacggtccaagacacatcacaaaataattgtaccactttttttgactcttctactcttttttcctttgttattcatttaacattttaaattaattttagtattttcttgtaaaatgttgtgttaggaagggaaaaaaaaaacatatatagttattacatgaatattagttaataattcgtaattataatttcttttgctttatacaaacaatatcaaatttaactttgactcgtaagacacataaatttagtaaatttttttaatggcataaaaatttaatatttataaaactataatttttttcttattttatcaatacatactctatttcaaacttaaaacatcaaatattatatattaatttattaattaggtagaaaactaaagttcaaacacaacatatttataaatagttgacgtacacaaatttataaaagattacgttaagagttg

SEQ ID NO: 203571 - DNA, 1831 bp, Cannabis indica
catattaacaatttggtaaagaagtttttggtaaagtaaaatcagaaccttcaagaaaacaaaacgtgacttgtgtgtgatttgttcagacaagaaaaaggtcatgtttgaccttgaagattgacttgtgtgtgtgagttgtgtagggttattttaggtataatttcctatagtggtatcaaagctatggttgtatagctaaaactaactcacaaagattccaagaaagtcaatactggatgaaagggaccctcaagaaagaagccttgatcgagaaaaatttgaagatgtcccattggacaatgaagctgagttttctttaactgaagtttttcaaattcctgaattcactaacatgagtaatataaaggttgatattgatcgatttgatagttctggtgattatagaatatggaagagaaagattaggtctttattaattagcacaatagaaactacttagggtggtggaagaaccaagtgaattgcatgatggaaccaccaagatccaacaagtgcttgaaacagctactagaataatcattttcaatctgtctgatgctataatcagacaagttgacaaggaagaaacccttgctaaaatttggaagaagttaaaagagaaatttcagaagaaatccatgaccaacaagatttatttgaaggaaagaatttttggtttcaagatgtcacattccaaaacccttgagcagaacttagatgaattcctaagactagacattgagctggcaaattctagggaaaataagctctcagtgatgaaatttaggccattataatactcaactcactacctaagtcatatagggaagtcaagaatgctataaagtatggcagatcagaaatcacccaagaagaagttatctctgacttgaaatcaatggatttggagattaaaactgaaagatgcaatggagctcatggtgaacttaacctaagcaaggggagatcagtacataacaaaccttggcacaaaaaggggaggagcacaagtagagattctagcagggaccatcattctgagaaaccaaagtttcaaccaagaagccctaagatcctaatggttgctaccattatggaaaacctgaccatcttaagagtgattgctacttttgaaagaaaagtaacaaataaaaatctgatggaaatgacaataactcacaaaaatcagatagctacaaacacaaagaccataagaagccaatttcagtaatggttatgataggtggggaagtctatgtggctgcagctaccctaaaggatgaatggatcctagactcaggttgtacattccatatgactaacagcaaaagtttattatgtggttacgggaaagtcagaggaggaaaagtcatactagtaaataatcaaaacctgtaaaatagaaggcatatgcactgtgagtttcaagatatgtttgatggggtaattagatcactaaggggagtaaggtatgtacctaacctgtcaagaaatttgatttccctaagtgtgcttgatgatttgcatattgaaagcaagattgaagatgggcaaataaagctatgtaaaggatccatattgatcatgaaaggagaaaaaggaagatggtttgtactatctatgtggagagcctactgtaagctgcaataacactatttttagtccctgaagatgacaaagtaaccttgtggcataggagattaggccacatcagccaaagaggactgcaaataatcattagctacaatttactaggaaaagacaaagtatccaaggtagattcatgtgaacactgtattttaggaaagcaccatcgattgaaatttaa

SEQ ID NO: 203572 - DNA, 1773 bp, Cannabis indica
tattttttgaattttttaaaatatgggtcgtgatgttttgggctataaaaaaatatgagtcgtgccgtgttgtgccgtgctataaaaaaatatgagtcataatgtattatgcaataattttatagggtaggctcgttatgacccgcaagtccaataattttatgttgtgcttggatttgtatcatactttactcgggtcgacctatttctctttaatagaccaacctgttttcttatacgcactaaaattcattctccatatttttgtattatttttacaattgatgaactaaatattaaaatatatgtgtatataggaaaattacaactaaaagtgcaaaatcaaatcaacgaaactttaaataatcacacttattgccttaaccctaactcaaacatactatacaatttttaaaacacaattattaacataattaataatcatgctttttttataacattatatcttttagatgcttatatgctacctataacaaaaagcagcaaacatttaatcacagaagaagttaagcatttactctcaatatttattgcaccacgagtcgagcttgtctttggtgataattgtacatgttcggccaatctacaggaagtttaaaaaatttggcgctccgatacaaaattgtaacacccttacaataaagaatgccacgtgctgagtctaaacatatattgatcccactaattcgagatatactataaccaagagcaaaaattaaactttaaaatacaaaataaaataataaattgtaataaatacactttaaaatacatccaaaaaaaagtacattttaagttgggatcccgtaaaatattttcaaaatattacaagtcattagtacacgccgacctaagtggcaaaagtggagattacaacagttccccctcgtggagattacaaccctcgtggtctagcttagtctgaacatgtacaaggcaccgcaaaagccctcgatatctcatggctggtcaactaccgacgtactctttcttgcacaatagagcacccgtgagccaaggcccagcatgacaatataaacaacaatatgaataacaattaaaatcacttaagtgttgatgcatctgcatctatagtctatttgacatagacctacgtgttacactcacacatctatttacaataaggccttgaaatggtttatctcgattttgaataccgagtctaacctagttatgcctagttatgccttaaccgcataactctttatataaacatatataatacattattacattcacattcatataaattctagagtaataatcatacaccacaaaatagctaaacctagggtaacaaccctagtctcagttttttgcataatataaaaaataacatacatgagcaccactacactaatctctatgggctaactcattgtcttacatgataatccaagtatgtggagattctaaattcctgggtgtttttgagcaagtaccggtaatcctagccacacattcttgagatttcacaaatagggtttatcccaaattcaatttcatatatacacaaaatatgaactccaatcatagactaacacatagaccccgaaacaagctttttaataatcaaatctaaactaacactacaacaaaagggactttttatcccactttttacacttgaaaaaataaaaagagggataaaaacttttgatcccacttatacatttggagccttaaataaaagtttagaataagggctttgtttggaaaatggacaaaaaa

SEQ ID NO: 203573 - DNA, 844 bp, Cannabis indica
cttgatgctgatgaacacaagtcccttgctcaggtattctactactagcctataaattgtcactaagttttgactttttagaaaataatgtaactttgccttgatttgaccttactttcttcccgggcaacctttcgaaataaaggagaattgatattttattcttgggatagtaatagtataataggcgagaacgcagcttattcaaaatgtaatgttatgcttttttcatagtcccatgagtcaaactgcagctctatttcagagttcttctaaatgaagaagtacatctaataatttaatgtaaaagctactatgtcctgtttatgtgaatgtaattaatagtagattgaccctctgttaatatttttgaggatgataatttattttagtttttttttataggaatatggtattagagggtttccaacaatcaaggtatttgtacctggcaaacctcctgtcgactatcaaggagcaagggatgtcaaatccatcgcaaacttcgctctctcccaggtttgtaattcatattgtgatctgttcctttcttgtttctaatcactgatgttccattggaatttaatcgaccaaaatgtgaaagcttttggtatgatagatttcatacttttgtacaatgtctaaagtgttttatgtgtaataataactcgcatttaacttggctttgtaacgtttagttaacaactctcataacttgtaatgtattagaaactactgatggtaaaggggagaaaatatatatatatatatatatttatatataaaagtaatcagtatgtgttgactattctattgcctgcaacagataaagggacttctaaag

SEQ ID NO: 203574 - DNA, 925 bp, Cannabis indica
acatgattgagtcacatatcgcaagcatgccttggaatcttcaataccagcatcctgaggcaatgggcaagtggggtccaacaacataacttttggcttagccgcagaaagagtgacttggtgaacagaccccaaacttcgcttgtttgtgctcgtgggtgcaggggcagaagtagaatcagtttttgcaacattatccttctcaataacatgccagaagatgtagttttctttcttctagtttccttattccacttgggaacctcgggttgcttctcagaagtatctgcctcagaggcacttctccttttaccttgcttgaccgagacaccggggctgctaaggagattttacaaatcatccatctctaaaaaaaaaataaaaaaatttaaagtgaggaatagcataaagtggcgagatcaaaactcccacctaagtaattaccataagtgctaggcgaggaggggctgctattataattactaaactccctagaactagtgatcataaagagataaaggaaattaagtggagacataactcaatcccaactagcagccctatgagtatttgtaccatattggtgagcgattccataataagaactgttgctagtcaactgaacatgtgatggagctcagggtaccaactatcaaatctatgagcaattaaatcgacatagtttcagataaaaaaattgtattgactatctttaactttcactgaagttgttggcttggtcctaaggacggtaggagaccatctataaaagcaagaaattttaccttagggagccccttcttcaaccttgacgacttcctaagtggttacattttttaaaaaagtcggtttgggcaacgtattcagagtcttcttcttcctcatgcactggtatttgctgccaagtaggatacttgaggtcctt

SEQ ID NO: 203575 - DNA, 674 bp, Cannabis indica
gctgagttttacgggaattgtttggcaagaaagccattttcatccttggaaacattaagttttagtaagatgtcatcatgggagaaatggcagtcaatgcaaattgaagaagcaacaacatatgggaagctcaaaacacttaaaatggttaattgttctaagctcgtcggagatctgcctcgcttccttccttcactgataagtttggaaatttggaatttggagaatttggagtcatggtatgaggcaataaagccaagaaaaccttgttccactctcactccactctaccattaccctcctcttcaatctcttacattgttgttttgtggatcatccttcaaatccctcaatatggatttatttcctaatctaaaaactcttgagattgaatgtaacgactactttgaagctatctcagtgtcagatgggaaatctcttgaggaactaacatttttacttatcgagaattgtggtagttttgtatctttcccaaatggtggacttattgctcccaagctgagtgatttgcagatttttaattgccctaaattgaagtggttgccagagaagatgacttccctctcatctctaaagtcgttgacaatcataggttgtccattgatagagacttcgcctgaaaatggtatgcctgctagtttgtctgaactctt

SEQ ID NO: 203576 - DNA, 736 bp, Cannabis indica
attttaccttcttttttaaaatctatcattttttaccgcttttttttaaacattgtaccaattttgccccctgtacactttaagatactctccaatgtgattctcttaatgtaagggtattttgggtacaatatatataaaaagaggtaatgtttcaaataaatataaaattagaggtaaatttgattaattgaatgaataaagaggcattttccaattacccctaaaaaaaataaaacagaaaatctcagcatggccaatctggacaagagcccaaaccgtttagatttagtatagtgggccaatgaaaagcaatatatatgggcctgcccaaacccggtagagttgtgaacctgactagggtttttgcgtttcgtcattggaataacaaaggggtttaaaacttgttagggtttttgggtttgttcagtagaggattgaaagcttgaaatccttagacaagtgagaaatggatcccttttcttccccatcgcctggatcttcttccagccaattcaatcccgatgtcttcaaggaccagctcaagaaccagcttgcccaggcttatgccgaggaattccttgaggttcaaaattcttccactttaactttgtctcttctttgattatgtattcatcctaattttcgtgatggtcttgggtttctctaacactcacaagaccgttgattcttcagttggaaacttcattgccttttttgggttttttttttttat

SEQ ID NO: 203577 - DNA, 1085 bp, Cannabis indica
gaatacgacacgattaattagtgtgtcacatgacataataacacaattatctagataaacacgatttttgtaaataaaaagaaaaaattaataaaactatggaaattatattatctcctgtcaatatgattatgacatacgattaaggtaaacacaaatacgacacaattattaaacttgtcaaaaactcatttatttcatgttattttcaagttgtgctatcatatcttgacgagaattactaaaagtatcatcggtgtctagcattctcctcagtatcataccgctattgatataattaagtatcgggtcctatataacttacgaaaataaaaaatatcgttaatcaattgtggaatgctacctgtggaagattggtgtccataatatcttgacccatattgccagcctcaaattatagtgacctatgttatggtacaccttgagtgtctatcctctgataaagaagttccatacttaatttcttctcatttattatgaagataagagttaggtatctaatatcaaagatatttttttcttttatgaattgttagattttaatatattgaataaaatactttgcttttactctacaaatattaacttaccgattctcatcctctaaaacttttcttttcaaaaattttcttttgaatgataaaaatggttgtaaatatttccattaaccaaaaaattaaaaaaaaaatagcaaacaaacaaacctaaaccttacatttatttttattattttaacaatgaacatatatcaatttaaaatatttatccaatcaagtgtataatctatcaagttattaaaaaaaaagtgtataatctatcataaatgtatgtacagttaaattatgatagcccataaaatataaatactttaagaaaattgaaaagcaaactttatcttgttgtgaaaaaattaaatcttagaaaaatcataaaaggtaagggaaatttcatttttaatgcttaaaaaaaatactaactaacaaattagactcctaatattatttctaatttctacccaaaatatcctccctttcattttctttctctctttgtctctttctctt

SEQ ID NO: 203578 - DNA, 2481 bp, Cannabis indica
gatgaagagatgtgataataaggttaggtatatatgcggctgaagataaaaatatggtaggtattttttagttaaataggaaaaaatattatttaataaaaataagaaatatatataggttaaaaacgtgaatgtatagaaaataaagtaataaatcaatatttatagtagttttcattactaaatttttttaaaaaaatatatcaattctaatgtaaaattatatttttttacctctcaattaattattttattatttatttatataaaataaaataaaatctgatataaaattatcctctaattacaaatatataaaattataaatttcttaattttataaattcttaaattataaatttattaagaattttttttaaatataatttttttttgatattttattttattaaatacaaatttattttattaagcaaataaaagtatattttttttttaaaaaaaaaacactctgaaactttttatttagtattttcttttattaaatagatttttttttaaatctgattttttttttatactaaaaatatcatttttccaacattttataacttttgggtatatttagtatcccaacaattataaaatgttgggtatacttagtattccatttagtattgccaacggttttccaccgttgcattagttttttctaacggtttttttgcttcggttctaaactgttgggaaaatttttcccttaccttttccaacggttttcataattgacccatttattaatcgttgagaaaagtcaattttgtagtagtaaattcaagaaaatattcaaatctgtgtggaagactgtgtagaagaaggtgttcattttattaaggaagcaatccagattcactacttagtgatactctactatagaatggaatcaagagttagagtactaaatagaaggaaccatattattctactgccatttatgtaagtaatctcaaacttatatgtgcttaattattgttttacagtttttcatatttaggatgttagatatattatttataatcaacatacatgatagtaaattaagatcctggtaaaataagttccaataatgtattactcttttctctccagtaaactgttcttactcatgtgttgaaaaaaaacctaagaatatcattttatatatcatatcagcccacactaatccttttgtgtagtggtagatctagaagatctagtaggattgtcattaccattcccaagatacaacttacgtaaaagattgcgaggatacttgatagttcatcaagaggtagctttcctattcatctttccttattctggtttaataattatgtatatggggggttctagggtgtggtacaatgataatatatattaaatgcttttgatacacactttacttagtaccacaaaaccaacaaatggtaacagagctgattctattctgaatgtatggttgatgatggatcattaattatatactaatattgggtgtaggaattacttttatttttcctagaaaaatttgcaagccgttattggggcataagaatttttatgtgatttatttttttgaaagtttattttacaaaaaaattattatgttgtaatattcatcacatggagctcgaatttgtttcgaatcccagtcgtgtaccatacaagtacagagctcgggttctatgaaccccgactatgcacgtctccatcgttgtggcttcgagtatcatgccttaagagcagctggccttgtggccttctgtccattatgattgtgtcgtcctaatttgagggactcatgatttattcctatctggcaatcgatgtttagactaggaccttttgggtttggctaggtaatccggttgttttgagaagtgaggagctcgaatgggttcgagggtcaccagaccctactagtagctgggctaccatgttttgcaacctctacctgaacttttggtccgttcactactgcatgaatggcatacatggatgttggatgtctgcttattatgagccatgcatgagactcttatgggtctttgcgtctcttaacccgtatgagtcctcaactgtcaatgggcaccccaaaatgtgtataaatatgtatgaaatatttctcaatggataatacacattgatgtgaactttaaaaaaataactataattaagcatcaactttagaaatattaatttttaaaaattagattttaatcaatgaccaatattaaaagaaaaattagagtctttataattaattttactacataagtaaaaagtatctctctctcttttttttttacactaaattaaaaatatgtttacatttagtattacttttatctctttctctaatttaaactcaactttttttatctctttctcggctcgattaaacaatcccaaccatataatacaaaaatgaagtatttattttagttagatagcaattaatcatagaaactcaattttttt

SEQ ID NO: 203579 - DNA, 1442 bp, Cannabis indica
aattagaaaaaatagcctaaaattttatatgtaattaataaataaattttaaaaaattattaaaactgcgtgaagtgcagattaattacctaatataatataaatgaaagcacacaaaaagtctaggtggcattctatatttttttattgtttttaaaattttgtgatattttctatttttttagaaagaaactactacacatataaactaaaagtctcacatagtttagaaactactaaggtgttactcatatagattataaatattacttttgttatgttactttctttagtctatgaaacatatattttttataggtaataaatttatttcttttctaataaattttaagtttttatttaatatgtactaataaataatatattgtatatattatgaagtatgactacagtacatataaactaaaagtccggtttagaaactactaaggtgttacccatctaggttataaaaaatacttttgttatgttactttctttagtctatgaaacatatattatttttcatggatgattgatttatttcttatccaataaattttaaatttttatttaatatatactaatgaataatctattttttatatatttagaagtaatatttttttttctaataactacttaaattaaatttatttataaattaataaatattaattattattcatatatttatggattaaatttattttaaaattttttttttactattctacatttttatgtctttataatttagaaaaaaattgatttagaaaccactaagatattattcatgctcgttataaataatatttttattatgttactttctttgtctataaaacatattacttttttgtgggtgatattgatttatttcatgcccaataaactttaagttttttatttaaattatgactaataaataaacttattatatatatttagaattattaattttttgtataataactacttagattaaatttatttataaattaataaatatattaattattttaattactatttatatatttaaagattaaatttactttaaaaattttatttttactattttacatttctattttttaatttccaaaaattataaacatttttaaaagctaaattaatttaagtaaatttaaataagttcttccaatgagctctatagaaacgacccaacatcccatccgccttaacccaaagcacttggcgaatttcttcaccaaaggggatcctaataattaaggaggtgaaaattgtcctgatcaatgactggtttgctagacgagagcattgtcttaaagttctacgttaaaatagttaccaatagcatgtcggtggttaatccagtgaacaccatcctctgcgatcgacccaatgaaatttctcttccaacttatcaatagtagaaacaataggaagaatctcgt

SEQ ID NO: 203580 - DNA, 560 bp, Cannabis indica
taaaataaaaaagatttaaaatatttaaaaaaccgtaataaaatcacattagagtagatggtctaaaatctttcttcattttaatttttttaaaaaatttattattcatgttccacatttatagaatattattcattactctaaacatattttattatttgtttgagtttatatttttttttgttggaaatatgtataaatattaataatatatgttataaatttctcaaaatttattatatgttattataaactcaaaacttagagttttttattacttctagagcactgatcacaacaatttctctaaaatagagaaaattttaaaatatttaaagaaccgtaataaaatcacactagagctgattgatgctccaaactcctttgtcttttaaactttttcttaatatttattattcatgcttcacatttatagaatatttattattcattgctctaaacatattttatatattatttgttcgagttttaattttactttttgtatggagatatgtgtaaatattaataatgtaaattttaaatgaataaaatatatt

SEQ ID NO: 203581 - DNA, 555 bp, Cannabis indica
aaatccagactcgagacacggacccggacccgaagtcgcaccaaggacccagacctggggaaaaaaagagaagtcgggttggatcaaatccgatttgaataagtcgggtcgaatctaatccgattcgggtatctcatctaacgaatttggcgaggcgaggtggatcattacatgatttggatcgggtcggatcatagccggatcagaactgacccgatccatttacactcttactgagaacacatactttttgatgcttggaacaaggaggagacttcttggaactaggaggagattggatcgattttaaagtttttcatcctttcatttctgtttctttatttttatttgtaatttgatggataagttcttgccatgtgtatgaactaaataatttgagagaacattagatcgattttttatcttttaaattttatttatctaattttttagtttttaattaatttttaaaatagtttgtatattaattgtgacaaagacattaaataaaaaaaaaaactacacatagataaaaatatatactataaatataaa

SEQ ID NO: 203582 - DNA, 434 bp, Cannabis indica
cctcatttcacttgcaattgcattgcatgcatgaattgattttggaataatgattagtttttggtcacgtggtggggagacagatggaagaggcccagcccagttgttttcaaaactgccaccggaatctgtttatttaacccataccattaccaaacaaacactcctcctctcgatttctccaccaccaccttttgtttttattctttaatgcttaattacttattttctcattatttaaatctctttcattttcgatttcaaatatactattttatttactaacaccattagcaatgacacacttgatttttttttttagttatgtggaagctttaacagttataaaaaaattatttatatttgttctgaaaaaatagtataatccttttttattataatgttgggatttttttactattttattgtatatt

SEQ ID NO: 203583 - DNA, 1443 bp, Cannabis indica
taatcatcattacaatattcaatacaataagcattatatcgtaatggattagaaaagttaagaaagaaaatcaaacgatgtaatggatctattcattactattacaatgaaccaaacataattagacctgtaaaattaaagttctggaactctctagcgggaccttccctgtgcgtctggtttccatcctgtgttttcgatcgggattcaatcctgttttctcatcttttgttaatcttttagcttttcttcaggtttttaagtcgttttctttctttgagggatctttccctgtcgttggtagttgtttcgttttctctttgtcgtttccccctgatcttgcattttaatgcttctgcactatatctatctgttattaatgacttaagattttgcagagcattttgattttgtcttgtttgtcctacttcattttctttggctatttctctgattttactattcctccatttatggctgccgtcgttttgggttcctctagggagggggcgatgattattcctatagccttatgggatatgcagagatttgttgcagggaggggatacagcatcttcacgttgacttctccaacaagcttttcgtctccaggtacatatctatttttagctatttaaggatttggattcttagaaggtcgttacttcttttccttaactctgtttgtttagtccctttccatactccctcttggtctgcactatattttatggattcccttgccctcaatatgtcccaaattcttaatcttactgagaagaagctgtggtccatgatcttactgatgatgatggaggggataaccagcccaggaaatccttttgtcttgtctttagagtccttacctcccgttccattaaacctgactggttcgaggatgccatgaaaaatgcatggatcactcgtgcacccctgactttctctgactatgggtctgggatgttcatggtggagtttgcttgtgaaggtgacatgcgtagggtgcttgagggccaaccatggcatttcgatcatagtctagtcacttgtgccaacccccagggacttgacactctgttgcccaatcaacttcgttattcccctttctggatccaagtacactccataccttttggtatgaaatctctcaagcttgccaaaatgattggtgatgaagttggtgactttctggaggttgacaagtccactattcttcaggtctcaggctttttccttcgtgtccgtgttctgatagatgtctctaagccgattaccaggggtattatgattgactttaagaatatacatcgtgaaaaatggcttaactttaaatatgaaaatcttcccaatatttgcttccactgtggcatgtttgatcacactttgactaaatgcatgacctatcttcaaaaatgtgataaccatgcttacccccccccccct

SEQ ID NO: 203584 - DNA, 518 bp, Cannabis indica
tcactaaaagtaattttttttttctctagtgggaatatattttttcatactttaagaaattatatactcattttttgatataacgtgtatattgtagttataaagtatcttgtctgttttgcatgcttgtaaaataaaaacaaatattgtacagctgaatattttaaccttattttttaacattataaattattaaaaaaatttgaaactagataaatacctagtatatgactataatattgagtacaccatcatataaaaaaaattagtttataatatctcagtaaataaaaaattgatgctttcaccaacaaattttcctagtgctaaaatgtacttacatatataattaataattcattaatatgtggtttagtattggtaggttaattaacatcatgtcatcatgtatgtaacataacatatagatattattgtaacattttctcttttttcaagtgttttttttcttcttctttttctatggagttgaattaaaatagagaagaagaagaaga

SEQ ID NO: 203585 - DNA, 784 bp, Cannabis indica
tgtggatggcagttgttttgttgataaaggtccaaataatctaaagttgtttggatgacagtgactggtgtcgctagcttatggtggtgaagaaaatcattcctgcaatgccaaagcttccagagcaaacagagaaaaaactggtatatattcacttgccgtgagagaggaagcagccacatgaagaatatccctgcaagttagtgacatatgttttgatacaaaagtagagaattgagttaatttccatacgttctggacagttgaacacctgaaaattgtgagaatggtctttctctcatgaaaattgtagcttgtgggaagtatgtcataaaaacctctcgagataaagtgttttacttttagacttttacattaataccaataattagttatgtgattttctttgcacatatacaaaataaattatttacatcttcttttacattaataccaataattttaaacgtctccaataccaaaattaaaagccacaaatctcgatcccttgtataattaattataaaggaaattagctattaatgattgtttatatatgaaggaaggaatacgagatcataataggaaccataaatgtgttgctttacgttaattaataaaggagctgacaaatagaaactatcataaatcaaaatgctcatataattaagcatactttaaagtaaaggcaactataataatggagtactacacataaattgtacgtaatagatttaagaattaggaaaatactctactttgcccaaaaaaaaaataaaaaaaa

SEQ ID NO: 203586 - DNA, 1165 bp, Cannabis indica
gtatgtggcccctcaactatttcatggaatgtatggtacaaaacattactaattccaaaacaataaaatatggtattattctaattaatatgtaaatcatgatatttttatgtaagatatattttcgtggtatttttacatattagattctttttagttggagactctttcattttctcatttgcaatataaactccaattccaggctagggtgtgggctactccagcactagcactagtggctaagagatattattctcataacattacattgtataccttgttttaatttttacttctattttcatatttttttagatattttcacttttatagatgatgtccccattaggccccttagattatgtaaattatgtgctagacataaatagagagtgaggatatattaggtaattcactcaaaaaaatagatatattttaataaaaaaacaatataaaagtatttttgattaatagatattaaaaagacgtatttttttaacttatccacataatatttgttaaaattaaaaatttagaataactcaaactatacttaaaagtttaaaacaaaaaaattaaatcaaaggaataattttatagtttctccacgtggccattataatccaccatcgagaataaatctttggtttgatttgaatgtttggaagatatatcagaaaaatcaagtgggtatacaaaaatgttctatttttttttattggtgggagttccgtacgaggtccacttattgttcgtacaagaatttggagtaagtttaaggagattgccttttttttttctcttcttcacctctttttagaaatgcaagtttatttccactaacaaaaaaaagttaatttcttaaaattgaaaagagttcaaaataataataataataataaaagattacgaaatatatatatttttttcttaattatgtcaaaaaatgttagtttatttccactaaaaaagtttatttcttaaaattaacaaagagtacaaactaaacaattttggtttttcatatacatattattactatttgtgctttaattgaaattattacatcttataataataattaaaaaaaatccatcgcaagtttgttacaaaaatattttataatagtttgtaacaattttgtaatgggatattggcggct

SEQ ID NO: 203587 - DNA, 1455 bp, Cannabis indica
agaggttagaaatttaaaaataatttgtagttcatgaaccacattggattaatttatgtaattaaataaatgagttattacacaaatgagttatggattcaaagagttatgtttctagtaattagaaactaatattaagcttatttatatataaaaaaaataactattgggacgtggttggggtacgtatgaattaattgtgagaagatttacaaaactttatttttttagtatgctgaaagagtaccacgtgacaagacgacatgtcgcctgtaggttttttgtaaaataacttgtgaaccattggttacgttccccaaatcaataggggtgttaccaataatcaataccaacgttagaattctattttcatactagaagacatatatatataaatatatatgtatgtctcgactcgtaatattcatgggctgtaagaaagtttgaaaattaaatgtaatttgcatcacaaagttaactgatgcttataaggtttttcttgagcccttatacatactggatttctgtaagaggtgtaactctactcatcaccaagtctcctttctcaataatccagtccttgttttcatcaccaaaagtgacaactccctccttttcttctttgtaattgattaacaatttcttgttgctagtcatgtgtcgagagcaactacaatcaaagtaccattatccttctagaaatgtagacagtgaaacttgagtcaccaaccaaattcgattcacaattagacctcgatctccactcactttgatcgagatcctccccttgtgttctattgggtttttaaaaactattaagtcaattaatcatatctttcaagtagttttgtagcttattgcatctgggtcatatatgacccctcctgttacagaagtgacacgctaggatgaatctctccatttgagatatatcttccggggcaattcttcgtctttctaacttcaccttggtaggtttagatggaacatggaatcttccaattggatacgaggactcaaatgtcaagggaagtgatgattacttgtaagcctttttgtccaggttgatcactggtgtagtggactcttctaccccaaagttatctcctcgcttatataacatcttttatccgatagaggttcaattaccataagatttttgaagttgaagagtttgattgatggcagccgttcctggagggataaactctaaagcctgtttagctcttatgagttcagctgaaagcttgtagatctcattgtccttctcatcaagaagtttgctgcactgctacaaatattagaatttgcaatggtcctaaaaagatttttttcgggaaccgtcgctaaaaaaattaagcgactatttaaaaccgtcgggaaaaatttagtatttccgatggtttaaaatcgtagtaaaaaaataggtgaagttttttaataaaatgcaatttt

SEQ ID NO: 203588 - DNA, 1094 bp, Cannabis indica
tgcaacattattgaatcatatttgttaatgattgcctttgtaacaaagggcttgctttcttttattttaactgattctaagattggtgtaatctgtgagaataatgtatgaatttgggttaaggaaggatttatattaatattgtttgtaatttgcggaagtgttttcagtccctttcaatttgcgatgccaatttggttcgaaaaatttatgaatagaaatggaagaatttttttttccttttcaaaatttaaattagtttgtgggggagatggaagaaatggaaattgattaagaaaacaatgtattatgagcaaagcaattgtctgtatagaacccaattcttttttgctgtttcattttaatttcgtgtattcattgtaaatcctagtcattattatgtttacatctattttcactcaagttttctatttttaataaataattgaaagtaatgcataacatttgataatttgattagttttgtgttttggtgttttatatttttgtaatctaattcaatggtctcactctgacttgcattgtctatatttcaaggtgctcaagctcaaatcaaggtttcaactcttctgaagtggtcagtctaagctgagtgaatccttccataattgtttaaatggcagattctgaggaaaagccaccaactgaacaaggtatttttttgcataagctgtatggtactttttgtctggtatctgtttttgtttatttcttgtttgccatttttctaacagtatatgttcattacattttcagtctgcaatttttttcggaagccaacaaagaacaaaaacatcagaaagcgaacagttaccgatgatgatgaggaatcaaataaagatagcacatttttgcatagtcagaaaaaggccccaaaagtggacaataagctttatttttcttctggaccgtctaaaagcactacacttgtggagtcaaatgtagcacccgacactaccgtctttcagttcgagtcttccaaggaaattcaagtccaacacgacagcagagcaacagcaacactagaaaccgagactgacttttcacctaaaagatgcacgagctatacgtga

SEQ ID NO: 203589 - DNA, 1072 bp, Cannabis indica
acgcaaacaaataatgaacccaaaattttttttaattacattatccaaattcaatacaaaatattaaatataactcaccaacacgttccttaggtgaatcctcactagtgattgaatctgctctagcaaggcgcttcaaagcagaggattgaaacgcatccttgggtgtagtggtagtaatattagagctttgaggctccggaattgttaagctatcagtattccaccgccgctgccttttcacaggctcattgtttccaacgactgattcatcttgagtaaaaaaaaacacttttttagaaaaataaataaaatagaaatagaaccaaaggaaaattttgctttaacagttattcaacatctattgaaaattatatttatactcatttcatactaatgaaataaaaataaaattggcacaaagtcgttaaaaaagaaagccacaaatacttgataggaaaattacaaacaaatatcaaaaaggaaaatgatggaaggttgcctttaagaaaccatatcgccttacaaattgcaaggcaaattcttacagaaggtaaaagggtttaggtcgagtttaaaaacaaaatcagacaaggcaacacggattccacatacagatccatttgcaataacatcagggcccaataaaacattgaacaagcagaattttcatttactaccgatagcagaaactgataattcaaccctgaagtctcaaaggtctttcactataacacacatactatgaaggcttttaatgcatttgcagttctatgactataaaaacttgtttactctaatttcttctcctaattaatgaatcataccatctgttaaattcttggggaaatgtttcgagtgttgaaattacaacttcatgaatccacaaataggaatcaaccaagagagcatcagtaataagcaagaattaacctcagtaattccaacacatacttgcaggtctaagaaagctaagtaaaaacaaataaatatggtacaagagttctttataccacattgagaaaggattagccttgaaaatagttttaatgtaaagaatctaaaagaaaaa

SEQ ID NO: 203590 - DNA, 638 bp, Cannabis indica
aataatatttaataatatacaatgaatttatttaaactcccaaagactttcactaaagatattcataggatgtgtgctcgcttttagtggagtggttcagatgtgaaagaaaaaaatacaatggtgtacgtgtgatcggttgtgttggcacaagaaaaatgggggtatgggctttcaaaatcttcatctgtttaatcaggtgattattatataactttcctcactctttgggtgctacagtgatcaaaggtctttatcatcgaaggactttctttgggccagtttcgtcttctaaattgagttattttgtttggaggaatattttgtggagaatggagctctttgcgtgattgggtgataggatagcttttactatctacttggataagtggattcctactccagaagttattgtgtatgtctcgccgcacgttcttggtgataatgcaattgtggcagctttacggagagatgatggtgagaggaatgaggatcttattcgggctagctttaatccttctgaggctttagccattctctcatttccctggtcgaatgatccttctgaaggcaagcttatttggggtcatgataagtcgaggttttactctattgatagtgattattggttggcaatt

SEQ ID NO: 203591 - DNA, 1030 bp, Cannabis indica
ttcccttctccaaagcatgtttagttgtcgttatcataccagaattgcttctgaagtttttcaatcacatacttgtcaacttggaaagccttggcaagcacatcagggttaatagcaggatctgatccaaataccgtgtttgcaatggtgatggttcctgcgttttggctactaagaccagcaaacgcaacagctggagcatgtgccggattaaactgaaagtgaatcatgcctattggaaacacaaatacatctccctctttcaaaaccttagtaaacagtcggtttccatcttggttcgatgacacaaagccaacgtagagagttccctcaacaacaactaggatttcagagccacgaggatgagtgtgaggtgggttttgaccaaatggtgcatagtcaatacgagccaatgttattccaagagtgttaagtcctttaatcaagtctacatttacttgtgtcacattagatccaactggattgtgtgtgtctcttggaatgttgagcccagtaaagaagaaatcatcagcattagcaagcttaggatccttacagaatttcccattcacaaatactgcttgaaccaaaaaaaataacattaaagaattttaagtaaatgcatatagaaaagtgctatagtaagtaaaagtgtattacttacaagctttgtggggtcatctacagccacacagaagtcttggagagggcttgggtcagaggcagaggctatggaggatgccaaagccaacacaacaagtgaaagaagaaaatgagcacctttcatggttgagtaatcgatcaattcactagtatatatatgctatatataaatctcttatcaaaaacggtctttttttttttgtcttgagtgagaggtttgataatatatgaactagattaacaatcctatttatagatggaagttcttgaactagtctctctaattacttcagggagcggataagagactatgaattttttctccctcttatagaagacttggtataaattagttagtgactattaa

SEQ ID NO: 203592 - DNA, 1076 bp, Cannabis indica
ttgttgttatgatcatcatgatgagctggaacagtagtactgcactgacctgatgatgatattgatgatgatgaatactgatgatgatgatgatcttgatcagaaagcccagaagatgaacaagtaaaaggggcaaaatggtcattttcaatattattggatgaataatccaagaaattcaacaaagaccaatccatgttattaaacccatcttcatcactcataataatattactactactgctattattatcattattattagtaatagtagtaatattattattataatcctcgtctgaaacaggttcaccagacgagtgatcaacatcaaacccattagggttttcttgttcttcttctcgatctttgatgatgaaatcattcgcaaatttagctgcaacgacttgaatctcatgaggactcaaagattgtccacctggaatatcaggtggactttctgggaaattgaagcgagcgtgaggacccctcaagcaaaattgagcggcgtcaaaagctctcgcagctttctcagccatatcgtatgaaccaagccatatcctctccctgctattgggaagcctaatctcagaaacccatttcccccattttctcaatctcactcctttgtattttgggtactcatcgtgttgttccataaaataataataataataatttatgtgttttctatatataataataataataataataatttagttgtaccaatcatgagactcatttcatctcatatttatactcccaaaaattcttcataataagaaaatgagtagtgtcacagtctttactgtctttctcattgattttttctttaaaataattttttttgggtcttaaattatttatttatttataatttataattttaattatttatttttagtaaacgtgtggattattattcagtgtaagatacgtggtcagtggaagagagtaatttttgagtctgagtatgactagaagagacgcggtgggcccactttcccatttacccaatttcaccacgtgcctaattttttttttttttttttttttttaaaaaaaaaaaaatt

SEQ ID NO: 203593 - DNA, 664 bp, Cannabis indica
acttaatgtttgtttagtttatattactgatctttgatttcaataaaactaattttcttcataaaaaaaaatctatgacaaaatgttaatacacattttaatcatatagatctcaaacccacaatttgagtgagtacattgtgagattgaatcttgatatgcatccaaatcaaaatttatcttatcatcaggctatagagagtccctccttattagcttaatccactgctaggacctttctcattatattgttgtatgtataccatttaccaaatacctttctcttttttgcttttaaaataagccttcagcttcttttaagtcattcaattcatgttgttttcttctatcctcctcaaaattgcgtcttttttttttttttctttttgatattgagaggggattcgaacttgaaaccttttctttgtgaggagaagtgtgaaactatcaaccctatgcttatgaccccaaaattggatttcttttagaacatattttgtactctttgaaatctaatatataattaggtataataaaaattaacacaatcatttaactacttattagtttgcatataaaaaattaaatataataaaatatttagcaactaaactgataaagattaattaccaccgactaaattgaaatttgtagttcagtcttc

SEQ ID NO: 203594 - DNA, 725 bp, Cannabis indica
atatatatatatataaaaaagcatcacggcaaaaggtcgaagcatctggtaatcattaatcataatcacaattgtccacaacttctgatggaggagattgataggtcaatgaaatacaaaacaaggcattgaaaacgaatccaagttttattgattgtttacttcttattttcttatctttgatttatttattttttacaagccagaggtaggaattggagggtggacttttctaaagatgaattacccaagtccaaaagggaaccgacctaacaaaaggtgcttggtgggacccttaatatgacagacggcagtcgtacacccttgaattgaaaggatcatttttcctttctctctctctcttatcatttattattaatcatctctctcaaataaataaaataaaataaataaataaaatagagaaatgaaaataaatatatatggtggatgttcaacttattgccacttaaaaatctccaaatggatggacaagactagttcctaaacaaataaaggaaaacaaaagtgtggagtggggttccagaacacacactcacaggcacacacccccttaaccaccatcaatggtgctcaaacgcccgaccccctctcaataattcctccacaaccaaccatttatatatatatatacatattctaattaagtcttatttatattaaattctaaacactttctttctttttttttcctttactttatt

SEQ ID NO: 203595 - DNA, 801 bp, Cannabis indica
attaacattgcaaaataaaacacaaacaaagaaaccaagattgaaaacgtaaaagaagtcaacaaaaggaaaaatcacttactagttcgggtgaaaaattctgggtgtcaaagaagcttgtaatgagaaccctgggtttgagaaatctagatcttggtgattccaaagtcgagaaatacaatcggatgaaatacgaagaaaaaaaagtgaaagacagtgaaggcatgcaatttcagatatggaagtggttgagattttttcaaattctaaaagctttgtggggttgtaatggcgaaagtggagggatgattaaaatttataccaaaaaggcaatactcgttcaatcacaaaaatcatagatcgaatggatgggaactaatagaaagagaacggtcagaacattaaatgttgaaatgatttgcctcgaagttttgaactaccaaaatgaaaccatgcaattttccaatggagaaaatacgatcgtactattaagacaattgaaaaatcttttttattttttttttaaaaaaaaaaaaaactttttaggggcaattgttatacccatattttgaggagcaatatgaagctaacacgtgtaacaaagttaaaatatgagccagctcaaattatgcatcaataaatgcatttatatgactcgcctcgagaaatacagttgatagaaatacttgaactcgccatcacatagataatggcgaagcatgagtaataactacaaaccgataagaccagcgaggtgaacaagtctatttcgggatgactgaatcatatgaaattatttgg

SEQ ID NO: 203596 - DNA, 1556 bp, Cannabis indica
ctgctgtgacaacattgatttcaaacctcaataagtaattttctcttaaggatttaggggttctctcctattttcttggcattgaggtacactagtactggaatgcatctttgtcaagcaaagtatgcaagggatctacttataagggctcagatgatgggatgtaaaccctctcccgctccaatggttagtagtcttcgcttgtaagctcaccaaggggaaccctttgtagatgttcaaatgtatcgttctattgttggtgctttgctgtacctaactatcactcggcctgagttatcatttagtgtgaacaaggtttgtcagttcatgcaaaaccctataactactcattggcaagttgttaagagaatactgaggtacattagtggtacaatgaactatggccttcatctcacaaaaccagtttcttatgacttggttgccttctgtgatgtcgattgggcatcaaatccagatgatagaaagtcgacttttggctttgcaatcttccttggatcaaacctcattgcctggaaaagcaaaaaacagcagataatatctcggtcaagcacagaagccgagtattgcagtgttgtaaatgtcacaacagagttaacttggctgcattatttgttctttgaacttcatattgaacttcctcaagctcctacaatatggtgtgataatctgagtacaataatgctcacacagaacccggttttgcacactcgaacgaaacacatagagcttgatttgtactttgttcgtgaaaaggttctaaagaaaatggtgcaaatcaaacatgttgcagcttatgaccaacttgcaaatgggctaaccaaagctatatcaagccaaagattcactgatttcaactcaaaattgaatcatccaattatgagtttaaggggaggtgttaaggcagtctgttagtgtgtctgttagaaatatggttgttagttattaactatcttagtttgttagctggttgttaccaatcttagctgtcatgttagttgttattttcgtttatgttggttgtatataagttgtactcttctctttcatattgaattgagatactttttcttctccatctctttcctctgttttctttctctttctttccctttctttggttctcagtttctttgttaatggctagacggttcaatagggttgtttggtatactgtcttctttacttaggaatggggatttaaagtctaacctgtgatttggtattgcatttttaatttttttagttagagagttcattttactaggggttctctttgactttatacggaggtaatgtccacctcttcaaacattagagtttcattttcctgaattgttaattcaacttttttcggtcccactttaatcgtgttgcatattccaaatctaggcacttttccttctcagaattctatattttctcaggagtcaaacaaactacattcatcaccacattgtgttttgttttgttttaatacgtttggatctagaaataaaaaagaaaaaaagtattgaattttttcgtttttttttttt

SEQ ID NO: 203597 - DNA, 1375 bp, Cannabis indica
atttaagtcgggtccgaggtcagaattacgactggggcgagggttggggtccgggtcaagggtctgagttagggtcttggtccgagttagggggtctaggtccgagtcgtggtccgactctaggtcggggtcggggtctgggtccgtgatcgggtccaaatccagttcgaggtcaaggtcttggtttgagtccaggtcggggttcaatttcggatcggggtctgaggtccaggtccaggtcggtgtttaggtctgagtccaggtcagggtttggatcgggatcgaggtcgaggtcgaggttcgggttccaaggtctaggttggggtcggagtccaaagtattgactaaaaaaaattatttaaaaaaattttgaaagtgattttttttaaaaatttgattaattgaaaaattaaaaagtgaaaacaattttatagaacatgattttagaaaatatttttatttttctaatttaaagaacaaaaaaataaattaaaaaagtgttacgtaccaaacacaccctaattaattaatattcatacttttttttcattggatgattatagaaacaatggctctaatttttccaccaatgagttgataattttataaagattattaagtacttgactaagacatttcaaagagattagtataatagactcctttatataaacaactatataaaattaaagaataaacaacaccaaagcaaaaattgattaagataatttctatgccctaaaaaaaggtccaatatcattaaaatgtatggatcaaaatttggtcccaaagttataataaataagtacaactcatatcaatcaatttcaattattcccacccaattaaatgagacaaatgtggatctctagtgtctcttcaaattgcctccattcattgccttgatttttattattttatttttctcaatgattttttatgattgatttaagtgcaagaatttgtagaaaaagaaaacaaagtttcaccaaaaggttctacctctatgtactatggttaatatattcacatacactaatattatttatataggaagcaattatagtatgggagggtgtcatatttattactaccgattgagcgagacatctaagttctcgacatttggaaataattatctatttttataaaattttgaataatttatgatatcgaaaatatgttagagtatatttacacaggtgaaaaaaaaaatacatacagctaaatatttgacttcatttttaagaagaaaaaaaaacacatgtaaaatcatgtgttataactaaaatatatatgcacaattgtatgataaaatttgaattataatttatctaataatccttataaaattagaaatgtcccccaaaaaaat

SEQ ID NO: 203598 - DNA, 931 bp, Cannabis indica
gcttgacacgaaatataaaagcatgtcacataaaatctaacacgaacacgatacgatgacacgttttgccacccctaaaggtcaaagaatagaaagaatagcaaaagtttcacgagaagaaaacaaactatgaatcaaatttgcatcccaatctccaaaattagatcgcgaaaaatctaccgtactatccatcccaagtaaattttgagacaagattccaaaacttgcccacttgtcttcataaatggcaatatctctattatcccctactctctaaagtgtcccccatcaaataattcattaccctacaaaatgttcttccaaacttaagggcctcttttaacagattttattgccttaaaaagtctattgcaatgatataaacttaaaataattacaggttaagccactaaggctagcatagtggtgagagaggaatggaaaaaggaagaggtcatgggttcgaatccaggatctttaagctattaagctaatatataattataaaataccattaagctacatttaaaaaataataataataataataattacacgttaaatattttaaatataattcctgtaacttataattatataactaattagttagacgccaattttgggattatataatagtgtaaagatcaagaaaagctttatacgatgtccgtgagtccgtgaccaccgtttcaggaatgtaagagaactttttactcaagaccatgacacaacaaaacaaacaagaaaacatcatactcacccaattttaataaaatattataaataaaaatcaaaacattgcattggagttttaaacatcttgtgttttttttttcctctctttttccttttacacatttcaccataaaacccaaaatccatccaggatttttttgtaacgtaaggccattcaccgtaaaaataaaaa

SEQ ID NO: 203599 - DNA, 3067 bp, Cannabis indica
aacgtagaaatgataatttataagtagttacaattctttttacttttaattataagttttgttgtgattaaaagtaaaaattttatagtatctgaataacgctatataattagttatcaatattctttgaaaattattatatctcaaattttattcttgtgataaaaatatatatcatttaaaattgaaaatgagacaatataataatattgtggtggattagtccctcgaatgccaccacaatatctaaccggcaaaaaaagatgaattcatcaatattgttatatattattcaacaataatgaatatttattattaaataatattgatgaataatattggttaaagtaaatttagagtaatgatatattgaagtgaaaaatgaagataaaaaaaatttaaagtaaagataggattatagtcctttcaaatctcaacaattttaattttgagagtaagccttgatattaacaagggataattttaataaaaaaaaatataaaaataaaaaaaaaaaattataaaaattcggttgtacgaaattttaaatatttttattatttttatgattttatttataaaaatttaatttttaaatatatttttatatatattgtatttttgttaatttattgttaaagttttattatttatatgttatccatgtccacaatcttgaagagggaacatctaaatacaaaatttaaagagcattaaatcaagttctatccccttgttgtattatcttgatttttgtatttttaaaaggactaacaaagataagataaggtatagaggtttaaatcaataaatagaacaattaatatttcaggcattaatatgtgtacctcttatccttatgacctgggtcacaataatattactctctcaagtctcaataaatttattaatgtaaaagttaatttagttgtacaaaatatcttaattgttgtcaaaatcagttaaaattatgtcattctttgttatcatcatatattatttatcaaaatgataaatatatatatatatatatatatatatttcaaaatgttaattaattagaaacctacctacatacttatcattatcatgttcttaattttcgcccaatctctttcacattctcttatctcttagagtagctccaatgctaattgttcatgaagccctttgtcagtctaagaaaagtaatattgattgcttgaccactaaagaaattaaattgtgtgggctactacaattactacatgtcaagcaatggtagttgaattatttttttataatttttctatcaaaaatgagtattaatataatatttaaaatattaaaagtaatttaataatatattaaataatatagtgtgggtccattctcttgacttttaaaattgcttagcattagagtaattttaagagtaaagtggtaaaaaataatgtgaatgaaacaaaaaataaatataatattttaagataatgtggaaattgttagctatttttttaaaatgcttgcattaaagttgctcttatggaccgcacaaaataaataaataaaaattaatattattattacttttgctgatatggcataattatgactagcagaactaagatgtcaaaaattttaaataattaaacaattactaatgacaaaatttacacatcaagaacaacaatgagataaaataggggcaaacacatagtataaaaccagaaacataataaatgtaaaaaataaaaaattaacaccgaataatatactggttcaagtcctatagatcgatgtgatttatagctctactcctgtcttggaacaccattgaaatccttctttattgattgagcaataataggtaccatacagtcgagacgagattctctattaaattctcactaagagtttcaactctcacacttacacccaagaatcttcttcatctacagaagatttttcttacaaaactcaaacccaatctctctcttttctctgcaactctcaatcttttgtctctcaaagtcgcaatcccaatctgaatcgtgtcttcaattcatgtgttctatctttttttttcaaaaaaattaactagtcaacatggtatttatagtcttaagatcaagatcctaaagtcagtagctgtaagaagcgaggttgttaagttagttagaaacaactaacttaaccaactctttagtgaattctctacgtcagcttaagtattaacacccccgagaacatgtatgagcttctagacttgcggatcaaggacacttgccgatgatgcttggatagcatatagtctactggagccgactatctagatctaccattccaggaaggacaactagccaactggaactcctttctagaggagggctagctatcctgaagactgaacccgaagtggacatgatagatatccggaaactcccttccagactcaactatcattttacaagactcctttcgggactggcatccgtgagcgaataactttctaggaatgacatttgtggagacctttttatttgaaagaactatacaggagatgcagataccagttcatagtacaccaattatttggtgtgataatcttggagcagcatctttagctgctaatcccgttcatcatgcacgcaccaagcacattgagatagatgttcattttgttcgtgatatggtgctgcagaaacttattgacattcgctatgttcctactgctgaacagatagctgatgtcttaattaagggactttcagtagctcgatttctcagatttaaagacaagcttcaagtggttgattccccttttcgtttgagggaaaatgttgagaaaccgttagaagatggtttaacctctaactgtcagagtcagagtctattagaaagttagagtttctgttacaggttgttgtattgttagaaccatttacagcagtatctttactctataaatagcttgtaatctgagtctttgatcaataagaaaagagctccattcaatccaaattttctctctgttttctctgttttattctatctataatctagattttattttgcaaacttgatg

SEQ ID NO: 203600 - DNA, 1754 bp, Cannabis indica
ggtaaggcgaggtcatcattcttaattccgttggttgtatgtgaggtatatgtgagaatttctgacatttatcacatttcttgacaaattcatgggtgtccttatttatggtcggccagtaatatccttgttgaataatcttttttgacaagctttgccaacctacatgatccccagaaaagccttcatggatttctttgattatctcatttgcttctaaagaatacaccataggagaggcatcgatagccccttctatacaatttgccctccactatcatgtagcccctttgtgcctcatttttgttagttggaagttgcccattgagaagatatttaactataggtatcattcaggtaggcgacctatctatcatctcgacttcttttttctcacatatacttggctcgtttaacacctcaaccggtaccaagtttaattcatcaagttcattttacgaggtcagttttgctaaggcatcgacatttgagttttgttctcttggaatttgttcaattttgaaataattaaacttttccaagttcttccgaaccttctctaggtactttgctatttttaagcccttagcatggcattcccctagtacttgatttaatatcaattgcgaatcactatggcatataagatttttttcctttaacacttcagctatccttaatccagcgatcaaggcttcatactcagcctcgttgttcgaagtgttgaattgaaatctaaaagcatagtgaaacttgaagccttctggccaaattaatattacccctgcacccgagccttactcattgggtgctacatccacatgcattttccaagtgtccgtgtctcgctgaacaagcagattttctttaggagttattccctctatcaagaagtctaccaaggcttggttcttcaatgatgttcttgggtgatcagttatatcaaactgtcgtagttcaatcaaccattttatcaatcttccagaagcatgtgcttttgataaaacctgtctcatgggttgatcagttaacaccttaatcagatgtgcctggaagtaaggccttaacttgcgagatgcgtgaattaggcataaggcgagtttttcaggagggggatacctcgattctgccccccagtaacctcttactaatatagtaaacaggttgttggtgctttccctcttctcgcactattgctgcactaatcgtgttgttcgagacagccaagtagaggagtaaagtctctccagttattagtttcgcaaaaactggaggtgttgacaaatgcctctaaatgcttttaaaggcctcctcgcactcttctttccatttaaactttttgttgcctcacaatacattgaaaaatggtagacacttattagctaacttcgaaatgaatctgttaagggtcgccattcttcctgtcaaggcctgaacttccttcggtttagttggtgatggcatatctatcaaagcctcaatcttttgaggatttgcttcaatgcccctcgcgttgactatgaatctcagaaattttcctaaggaaactccaaaagaatatttttcaggttaagtttcatattttacttcttcaatatttcaaagcacttcgcgaggtctgttgtatgatttccactctgtatcgacttcaccaacatatcatcgacgtatacttttatgtttcttcctatttgtctcgcaatgatttcgttcacaagtcactgatatgtcgccccagcatttttcaaaccaaa

SEQ ID NO: 203601 - DNA, 1430 bp, Cannabis indica
gcacctagatggatgtcacatcaccttcgtgcaaaaattaggataaaatttggcccccaagtcccatgcgggaacttcctgcctgcacatggacttatagtcaccaaccgatcgaatgggtgacacgtattcgttctttagaccacttttgatctgatgtgactaatcgattgtctctttgatgtttagggcatgtaatgccaccttgggtgtgcgtgatgtctactactttttaatgagtattaactgtcattcttggggggggggggggggcgaaggacccaaaattcaaattttatcttaccaaattgtccctccaactgcatgtattataggtcaaaaattatcttatactcttttagccattttaattttcaaaccatgagagccatatttttctttttccttttaaagctttgaagagttcttactggaatttcacactaccgaagccatctaacagtattatttaagaatctgcaaacagtgagtaagttttctttcacatttctatatatttttatttcatgcatgattacttcgaactattctgtgaaattctgtgttcttgaaactgttcttggatgatctgaggctaagagatattaaggcttttaattattgatgttaatctatgaacatgacttctaggcttctaaatttcttgctttttcgttgctattttgtcataaattatctaacattgttcattcaggactttttgaaaatttcttaaatttttgccgttcttttaattttttgatttgggaatttcataatttatttgaacatttttaattgaaataggcaacttagtagattttttttttttcaaaattgcaatttattggttttattgttagaacatgattaaattatagaatacatatattatctaattatattgctcctataataaaaatacacataaattaattaattagctagtgcaaagtgacttataattgtatgaattaatttggtgacgtaaatctataaatatatagactaaattcggtgaatcaaaaattggaaaatttatcatggaataaaatctattgtttcatcattactaggacatattaggagaatgtcaaacgttataaaaagtatgataaaaattggcataattccacgaatatttttagaataattatgtgtatatatatgtgtgtgcactattgtttgcacaaaacaagaatatttaagaaataaatgaatggagaagaaaaggagagaaaatcaaaacctagtgaaaccgtttacttgtaatagtagtaccaataattgaaacaaaaccaacaaaaataatttggatagtcatgatgattagttttggctgatttttgaaaattattattatcattacaaaatatatatatatatatatatatatagtgtatatatatatgtcatgtgagtaattaagt

SEQ ID NO: 203602 - DNA, 817 bp, Cannabis indica
tctctctctcattccattgctctcattccactgctctctctctctctctctctctctctcataaggaaaaagtcgatataccaccaccaccgctgccaagataccctctctccgtcactctccagacttctctccaacactctctctgtttgcttttggcggcagcgctaccttctcgaagctttcacaactatagtaaaccctttaaaaattttatatatctgataaatttgatagctctgctagggctagtggtactactactaacccacctttccaatggtagaactagttattgtggaagctattctgttttaagggatttcaattgtgtaaatggttggactattaaaatcggattgagttgaattgcttccagttaatgctttgaaagctaagcgttgtcatgatttatatttaggataatctgttattagaaatgtcattttaatttgtaaaggtttttctaatattcagtttatacattgttctaagttgactaatattcagtttctaatgagcataaggtctgcagagtaatctggctaccctcattttattactctattgaatctatccattaatgacatttctttggcactctttttccaaataaaagtttttagccaagacaagatttaaaaaataaaaatccttatatttatttttaacggagagatgggctactgttattgaccaatgatttttttagcaattggagagagaatgaactccgaccatggcttttcaatcttatggttctgatctaactgaaaatagagtattgagtagtatgaaattatgaatttgagacctt

SEQ ID NO: 203603 - DNA, 745 bp, Cannabis indica
attaaaaagaatggaacaaattgccatggatgaccatatatgctaaaaaaatagcattttatatgaggtgtctttctaattattttttttttctaattttttttatatttatttcattttttaattattattttcatcatcgttttataatgtcacgtattcatacttttctcttctctatgtaaatatctcaacaacatatttgttttctttgttatctttttgtactctattttttttttttatacatgtataaatattacacacctttgatgctatatataaaatagagcctaaataaaggtaaggtatgatattttaaatttatttcattctaaattatttcatttgtccttttctctaacttctataattttatgtatctaagttattttagctatcaataataatggaaaagcaaaaaaaaaaaaaaaaatgttattgataactctattttgttggctatatgacctttggaattctaaggctagtattttgttattattagtggaaaaaatgtaaagtgataaacttttacggaaaaaaaaaaatagttgaccctaattatatattgtagaggtcaatagacttttcctttttatttgtttttttctgagatttttttttatttaattatatataatacatatcaccttaggacttacatctacatatactattaaaagaaatatttgtggcttatcattctcaagttccttacttttattgttaattatttttatat

SEQ ID NO: 203604 - DNA, 690 bp, Cannabis indica
taaataatattattataattgtttacaaggcacccctatataatagtaatactcaaaataaaatgacttaattttactaactggatgttgcaaaatttccactagtgactatcattattggaataaaacgtgggtccattaaaacaatggaaaacatgatttacgcgtgtgcaagtgcttaggtaagaaatacatgtttagaacagaaaagaataaaaaatgaaacatcacgtgaatatttatcaatgtattacagcagtactatctacactacggtcttaaataaatataactgtatttttagagactcttttggaaaattgtacgttgttttgtttaataagaacaattgtacgtagttatatatacatgtttacgtatacatattatagaagaaaggaagatgagtgaaggtgaaggaagttgcatcgaaccttccttgttggactcacatcgcgatagattcaatgagattcacatacacaatgatcattgcttttacgtaccttttaatcctgtcctctccttttcaaattatattttcctatgatgtcttttccaaactattacgaaatttgtaataataaaatcgaatctatattaaatctcttctttatatatcaacttccaggaacaaataaataattgtttatattgtgactttaattgttttataagtatttgtgccat

SEQ ID NO: 203605 - DNA, 633 bp, Cannabis indica
ggttactttaattaataaatataagccattttgcattaactcacatgtcgaaaaagaatattagttgcaatgcaacctctgaaatttgagcattgctattaggtatcagtggtgcttagcaccttctcgacatcgcgttgcgattagctagcgatagtccctaaaagttattatattaaattatatgggacccgatacttagttaaaccaatagcgatattgacacacataagagggtgctagacaccactagtgctctttaacatttctcgtgaaatttctacgctcattaaataatataattaatttgaaggttagttgtcgcccataattgctatagcaagtgttttttatatggtgtaccaatatataaggtgatattttgtaattgattaattgttctcatttattaaaataaaatgagggactagtgctaagtaccattaatatccattaaaattcctaaattcgtgtatataaatgtacttttattattaaaaaacattgttatttgacataagtggtgcttagtattattttagacgtgttaccttgtaactagttagcgaaactctttaaaaattattatataaattatatgagacccaagatttatttactatcttattatat

SEQ ID NO: 203606 - DNA, 1008 bp, Cannabis indica
ttattttatttacatgtttggaattggttttccgtgttagatttaattagttgtttgatatagttggtttctataatttaattttatatacatttgtaaaaaaaaaattatagtatgttttattattttattatctttcataattctttttaagtaactagtttttataattagtattttaatatatatataattgagttttaagttttaattttctttatttggttatttcaagaaattgatttttgctttactagttgtttagcctgtttttccttaggtagaattttcactagatgattaatgaaactgatatctgtgtgtaagattcagacgttcaactccgatgacgattctgacatctaactccagtgacgacgacaactccaaccactttctgatgactttttctagtaataattccaattttagcaaagtttttagggacttttttggtgtcgatgtcaactacgacaaattgtccgacaccgatgctaagtccaacgactttttcgatgatcattgttatttaaaatcttattaaatttatttatgatattttgttgaggttctcgtatttttatattattttctctaaaattaccatattttgttcactaggttttatgaccataaatatgtaaaatagcttttcttttcccataaaaatattcattatatcaataaaaaaatagacactatataactctattgcactttaaaaaagtgattatttcaaaaatacacaaaaacaaataaaaaaaaaattaacaaaaataggtatttttactaatttttttgatttttatttacagaaaatacgatatttttatactgtactcatgttaatttgttgttgatcttttgttatctgtatgttattttttgttgttatttaaatgttattttcatgttacttttatgtagttttcttattactttcatgttgtttctatggaaaaccgtaaaaatgtaaaaaaaaaaaatctttaaacataaaaaatataa

SEQ ID NO: 203607 - DNA, 881 bp, Cannabis indica
acttgtctgacttcatagctctcgtttactatggaaaactagacgaacactcgaggcagaatcagaattagataagtagataccagcgcaccaggtcacatgtcaacctgggtgttgggtgctctttctggagcttccaatatgtttttttgatacttccaaggttcttgaaattaaggatgaggtctcctacccaatttttttaccatgctagaaagaatgcttagagcagaatttgcatttgagtgatcgaaaccaacgcaccaagttgattgtcaacttgggaacttggctcaactttcatgcccttgggattctcgttttctctccaagtttacttgtatcttcattatttctaatgacagaaaaaaaaaacccagaacacttttttgggaaattgattggaaacaacccaggacaaaatatcaacctacgcgttgggcccaacactaggtgtcaacttgggcgttgggtccagtttcaggccaccaaatggtgccatttgatttccataaatacttgtatcttaatctttgataaaaacagagaatatatctggaagcttcttggaaaaactccttggaaatggcccaaattggcaaaatgtcaacctgggtgctcgcttagcaccaagtgtcaacctgggcgctgggtcctcattctggaatctaggttagtttgtttcttccccaaaagcacttgttttctcgtttttgatgaagacaaagaaaatgctaaggacagttctttagtttgatgctcggaagtgccccaagttgacatggggaacctggtgctctagctgctcgaaaatgaaaatgctccgaatatgattctgatacctcaaatatgtttgtgacatatctaattcatgtctcatt

SEQ ID NO: 203608 - DNA, 1885 bp, Cannabis indica
agctctagtgcctttgtcaaggtcagtagtctctttgtttattttttttactagtcttaatttggtttcactttttattatgaaatctatactgttcttaatcaatgtttcaggttagtttggacaacaaccacattcttaaaagaggctgtaaaggaaaatccacaagaacttttttctttttctttctttctttctttcttttccggctgcttgtaaataaaataggcatttatgggttttatttttatttttgttccttttttctttggtcaactcatttggctgctaaaatacatgtatttgctttgcataaatattgaaagggaagaaagagctaacatttgaaatattttcatctgcctttattattcaaaactcttattggttataggagattttttattttatggtttttacattaataatttgcaaaaatacgggtatttatttactttatttttttgactttttttattaattatttgaatttttatgttgtttaatttgttgaagacaatttgttttcacttctattttgtttttctttctcaatttttacatccatattttataaaaagtactcactgtgtgtttatattggatttttttctttcaaaatactgtcctcagtattttagtaactatttttaaaagttcaattatcaatataaatctaatttaagctcaattaaaaaagtagttccattttctaaaaaaaactgttcaaaaacactaatctacaatatgcatattaataactaggtatattgtcggatttttgtgcagtagttttgaatatttattttttaaattattttttataatttttttgagttattattaataaataaaatattttttaatttttttttttacatttacggtttgggttgctccggtagattttatatgggttgttatatgaatttttattgtgttttaagttgttccgttaaaaaatacaaaaaaaaaaaaaaaagaatatttgaagtgtaaaaaaaaaaaaacaattgatgcatcattaatagatatttttaataatatccattaaatctaattaattgtaatattttttggtttttttttatttttttttaattattaatttacaaaaacaaacacataactatttttaaaagtaagttgttccattttcagaaaaaaaagtgttcagaaacactaatctaaaatatgcatattaaaataactagttagtataactgctttttgtgcggtagttttaaatatttatttttgtgagttgctttagatattttgttttttaaattattttttataatttttttgagttattattaataaataaaatatttttaaaatttaaaaagataaaatagaaatttaaatttaaaatttaaaaatatttattatgaaattacttaaatatttttagttgatatttattataaaattaaattcatacattataaataaatatttttaataatatcttttgaatctacttggaatatttttttgtatttttttatatattaataaaacaaacacataagggattatctgaagatattaatgaggaggcttgttttttggttcttgacacgaaaaggagaagaacggccttggaagatactgatggggtccatgtgaggaatgatgtggtaacgggcgaagtagtaaatggttcaaatgagttgagtttggtgggtactggtgtccaagcccaccaatcattatgaatctaatttattctgtcgttaaagaggaaattacacttactataagattttaaaagtttttatgataaatatgacatattaaatttgaccaagtggtatggtatttttttgtttttaggttctttttagggttatttgtatatgccatatatatgtaatta

SEQ ID NO: 203609 - DNA, 774 bp, Cannabis indica
catgtcaaaaaatattattagtgttttttaacatttctcatattttatatttataataaaaatagaaattgaaacgctgttaaaaatgtccaacactagataaaataatacgtaagaattttgattggagtgctattaaagtggtgtgttactatcgttttacaacactttcgataaataattaatattaatgtaattaatatgtgtcaaatttaaatcatgttatactttatcttaaatttaggtaacaataaatatatatacatatatttagtattttgctacattaatgaattaacgtgttttacaattttttaacttttttatttaataatttttatatattttcaataaaattaagtatttttgtctaagataaattgcaacaaatgcattaaggtcatatataatactgattcctttgtttttaactaaatttagtataaatcttacacagaggagtggtcaataagttttaatgttacttattaaataaaaattatgaaattcaatattgaattgaattaataacatgtcattatcaattccattaataataatattattagagtatcataaagcacagtaaaaaatgattcatataagagaattactaaaagtataatattataaaaagtcttgtcttttgacatggtttgagtgtttgtcatggtacgtgtattttgtcatggtataagagtttttgtcagtattctgttttggtgaaatttgaatcaagtgttatcattttcgattggtggattttttggttac

SEQ ID NO: 203610 - DNA, 657 bp, Cannabis indica
ttctcaatcaattaaaacatttaccagctaatataaaatattaaataatagaatataaaataaacattaaaaaaaacttaaaaaaaagaaaaaaaaagctaagtataatcagcccatttaaaaaaataatatagaataaacctctttctctctctctcgactattcctattccatatcaagaaaaccctaatttccttttccatctatctctctcgcctcccctgtctaatgagttgaacgaaacggggtgggagcttggggacgacggcgccgtggatgtcgagcttaggtcgtggacgacagggaggagaagtttaggccatggatgtgacggcgagttggggatttgggcaggtttgaccgggagttgcgcgaggatattggtcctctctttatctcttgatcctcatttctttctctctttataaccattaaaatgccttggccaagtgttcaattccaagttccatcgcaaattccccattttggatcctcattcatattgtgatcccagaacgaccaactgagtgcgaagtgttcaatgttgtaacaggtattacacacccttctttgcaaatgttgctccttttttactgtctatgactatgagtttttgcttcaattataaatcaaatacttcagataactgttaagat

SEQ ID NO: 203611 - DNA, 1201 bp, Cannabis indica
ctagcttctttcaattgttctctttatatgataaagaagagggcagttttaagataacaaattagaaatatatattaagcgaagaataaaaataaaatattgccaagttatcaaaaaattatattatatttctcaaccacgttccaaaaggcccaactcttggtattcaaagaagcaactatatattatattataatatatgtctgtgtgcaataaatagatgattaagttattatggagaaaacataaagtggtagaagataactcaggcttacttcttagcaacttcctcctccttacgcttcagcttcttcttaagcttcctcttcctcctaagcttctctgccttctttccagagatttccccatccctaccaccaagtccaacaaggctttgtaggcacacacactcgtcaaattggttaggcataccaggaatcatcacattctcagccttattcctttccaaatcatacaaaataaactttttggaatcctgatccattagtattttattaccacgaggcttcaagtatgtaactgggtatacataaccgaaagagcttatctcatctgattgcaccattgaatacagcttagtccaagattctttaaccccatattccttcattacccatatgtcaatacgatccgctttggtttcccaaaaataagaagattggtcagaggtgtaattagcaatcaggcaaaggcaacttcctaagacattcagggtcatgtgaaaatcacaatccacaaaatcaggttgaggcaccacatagtactcctcactcacaatatcaaaagcaccaattaagttggaaacatcagattctggtttcctagatacaacccaatgtaaagcattatcaacaagaacaccatacgcattcttatagcaaaggtaataaggaaagtcctcgatcctcttccatgatttggtttttaggctataaactttaacctcagagtcaaaagagtcatcttcatccccaatatactgtaccaaccgtattaacttgtaatcatcgtgaatggggtcatacccaaatccgtaaataatatattgacaaatacaaaaatctttgccggcaaattcaagctcagtatttggtaagttcctgtaccttttagtgaatgggttccacaaagccacatcatcatacgaattaaacagaacaagtaagccattgcaagagcc

SEQ ID NO: 203612 - DNA, 897 bp, Cannabis indica
tcctcaaacaaatccacgcttccatgcttgtcaatggcttcaattcaaatgcttctgctctcagagaattcattttcgcctctgctgtaaccatttcatgcaccattgactatgcccaccaagtgtttgcttttattacccaaccagacacatttatgtggaacaccattattagaggctcagctaggagtggtaatccctttaatgctatttccttatataatcagatggaaagccaatattttaaacctgattgtttcacgtttccttatctcttcaaggcttgtactaagctttgttgggtaaagatgggtttcgggattcatgggaaggttgtgaagttcgggtttgaatccaataagtttgtgaggaatgcccttattcattttcatgcaaattgtggggatttgagtgttgcagctgcacttttcgatcaatctgaggagacgaagacagatgttgtagcgtggtcggctttgactgcagggtatgctagacgaggcaatcttggtattgctagaaagctttttgatcgaatgcctgaaagagatttggtttcttggaatgtgatgattactgggtatgcaaagcaaggtgaaatggagtgtgcaaggaaacttttcgatgaggttcctagaagggatgttgtgacttggaatgcagtaattgcagggtatgtaagctgtggttctaacacgaaagcgttagagatgtttgaagaaatgagaaatgttgggaacagcctgatgaagtgacaatgctgagtctcttgtctgcttgtactggtcaaggagacttagaaattggccaaaagatacacagctcaattttggagaagggttcaagaaatttaagcattctactaggaaatgcactaattgatatgtatgcaaagtg

SEQ ID NO: 203613 - DNA, 582 bp, Cannabis indica
aaaaaaaaaaaaaaaaatcccaactgagaatttaaacaattaatttgaatgatcaaatataccaaattttttcaagttgaagtggtaatagtattatgtataggcatgaaagttggtgtggatattatatatataattgggtttttattttatttatttatttatttttgttggtagtttgatcaaattttaattttaataataataataataaagttggtaaaatataccaaatctttgaaccaaaggaattatcacacaacagaatcaacaactataatggtggatgtgaaaatcgtgtcactaacgtatcacatatattattattaataataaatttactattattagtatttgaattaatatgtatctatataattatgtataaaatatttaaaaaaaatatatttgagtatgagtaataataaataatgatggagattggagaagggtgaagttgagagggagctttcaggtaacatcactcacacgtgtgtgtgggtttgtacgtgtgaattaagagagagagagagagagagagagagagagagagagagagagagtagagagtagagagagaga

SEQ ID NO: 203614 - DNA, 1315 bp, Cannabis indica
gtttaatgtatattaaatcaattaatatatattttaaataaaatatattttaaataaaacttattacaatacgcattattatggtgaatgagctgaaacactagaatgagcagcatctaacatagacctgtaaagaagttctgagagtagcatccaaatccctgctttgtgaatgagctgaaacactagaatgttgaatagtttgctgcgcatcaaggtactgaaaaaaatagttgacactccagtcataaatatcagaagcaggtagaacattattatgatgtatatgattattcatttggttccacaaagcccataaaaagcaaaataaaatgttagtataatctttatccaaagcctcaaaagaacataacaaaaaattagtgatatccagatgtttatattgataataatgatccacaaacctagaggatttccaagcttttttcaatctggaacaccctagcaaagcatgacgaaccgtttctgggctattcttgcaaaaagaacaaagaggggaatcgataatatgtctagcaaaaagagaggaagcaacggggatagtattagatacaactctccaaatgaagtgcttgattttaggaggagctttagagtgccaaattttattccaaaacttcttagaatcagaaatagtggaagaagatgggatatcctgatacgagagagctaactgataggctgacttaacactgaatagaccagaactttctctagaccaaataatatcatcttttccaaccagaccagtaataggaacctcaagaacatcctgtataacagactcatgaaaatgttttcttagattgtcaatatcccaatacctagagtcagaaataaaaaaagaaagcttaggtgaggtaggcacagtatcatctttgtaggaaagatatttaatattgggaagccaataatcctgaatggttagaatattatccccatccccaaccttccaaataagacccgaaaccatcaaatctcttccccaaaggatactcctccaagcataagaagggttatgactagggacggcttccaaaatagatgagttgggaaaatatctagctttaagcacttgacacaacagagagttagggtgtttaaaaatttttcaagattggcaaacttttttccaagattccaatgaattttgttggtactaccagaagatccccaccagaatctagccatcgcagcttcaattcctttacacaatttaattggaagcctaaagcaagctattacataagcagggattgcgtgaataacatccttaagaagtatctctttacca

SEQ ID NO: 203615 - DNA, 584 bp, Cannabis indica
aaaaaaaaattaaatgattatccaataaacttgaccatattgaggataatgcaactatgtttatttttttgaacaataatgcaactatgttaaatccaagttcttcaatttttgaacaggtttaggatataggtcaaataaatcatgttcaattgggatgtgttgaatatcaatctaaattagacactaaatttgttaaatctgaacattgccttctagtaatttgtttctatatatgagccttatgttcctaaagaaaacgagcaatcaggtaagaatgaaaatttaattttataaaagaagaaaaaaatttatttccacgtgtcatttttatggtgttaaaggtcacattcgacctaagtgttttaccatgataaaatctaactctatcgaaattttaaaaatctaactttttttaaaataactagtactcaaatcaaaaaattaatttgaaaactcagtagattgatcgtttagcttacttataatgtgatttaaatgttttaggttattttagttagatatgaaaaaaatagataaagaaaatagattgtctaagggatatgaagagggtgttgagtatt

SEQ ID NO: 203616 - DNA, 509 bp, Cannabis indica
tttttaaaaacaattattttcacattattttttctgttgcggcaactaaagataacatgatttttaaaaacagcatatgtcgaaacaggagatgcattggtgtactcttttttttgagtgcattaatctcattattagagcactcacatcagttattctactctattgttcaaaatagctcacaaaaactttattttctttattttaattcacacatttatatattactatacatcaatttttctatattttttctctatctcatttaaataatatatgatatataatatattatacataaatatttgtagtgaaaaatttagataaatattaaaataagtttacctcactactattcattactctatatgtgctaaatgtatagctcaaaataaaatggggcaaaatagagaaagtttttaataaattctctaaattttgagctaaaactctattttaccaaatctgttgagaggctctattttaaagagaaatttacgctgaaagac

SEQ ID NO: 203617 - DNA, 922 bp, Cannabis indica
taataaaagaggatgacgtattatctagaaaagggaaagtggtaattttttttaattactaattagattttcagtgagtcagaatcagtgattagagctaacagaaattaattcctgcaactaattatacaaatatatttgattgcaaaatcaacattaagatagttagattgatcatcaagtaaataaaaaaatataaaaaaaatgaaaattgatcacaagaagaaataagagaaaccatgaataatacagataaataaataaaagtactgacctttgcacttaatgacctgcccagttgtgctagacatggctccttcttcttctttttttcttctcagaaaatgactgtgaaagtaaaagtttttttttcttcaattaacttaaatgattgtagtgagtaacaaagttgggaaaaaggggtatttatagaactgtagaaagactaatttacaattaaaaagcaataaaaaaaaatccaagttgtactaaattgtcaaatgggtcccaaagcatattataataataccatacttgttggatacaaaattaaaaccagattatctgaatcccaaaaattaaaatggaaatgtggaaaccagatcatggttgccaaaagaaaatcaataccagattaagaaaatagatgtgttggttgtccaattggaaaaccagagcttaaaaccagtgttctcctaatgactggttttggttttggtatttttggagtttttaccagcggcgccttttggtaggcgacacgtggcatcaggggaagttgttatgttgaataagattctaaatgacgtggcggtttttgttgaagccaccgtaatatgttagccaacagatcatgccacagtaccaataacactataaaattgtatagtcattaatcaatactcagtctctcctaaaaaaa

SEQ ID NO: 203618 - DNA, 1486 bp, Cannabis indica
tagcacacaaagtacatagtaacaaagtaaaatcatcattatttaaagtagtaattccactcaaaataaattctctaacatctagatttctatggtgaaaataaaagtgatttagagaagaaagtttccaaacctgtctcgctctggagcaatctagtagtgtatgagttacggtttcaaaagaacacttacatgaagagcaagagggagaggaaatattttttttttaacagagattagatgcagtaggaaggatatgataaaaagcttttcaaccaaagattttaatcttgagagggatacacaaattccaaaaaaatttccaccagctattattaaaaaatattaaaacagataaattttgttgttttgtaattttaaaggaaagttatcttataattcagtgttttaattattattcataaatcaccataaatttaaaagagaactttatgatactatttaaacaataaaatttgtatatatataattaatttaacattatatattttgaaattattttttttttaattttaattgagagaaaaaataagtatttaggagtgaatatactttttttttttgaaaaggaaatttaatccttaaaaagagagagagagaattacaaaagagtatgcatttagaaagtcactctttaattgaaatatttagaataataagttttttttttaataattctcttttagaagccagtcattctcatctcttacttggcaaggcattctttgggaaagagaattgctcattgaagggctaggctttaaaattaggaatggattccatgttaaaacttggttggataaatggattccagggcatactaacttcaaacccttctctttttcgagtcatgttacacttcatgtggccaccttattatagaccaaagagagtggaatctattgcttcttaatgcattttttcagcctataaatgtggaaaaaattattgctatcccactgagtttctttcaattaaagatcgattaatttggcaccatacaacaataggtatttacacggtgaaatttggtttccatttgactgaaacattgcaaatatcaatgagtcttcaccttctaataatcatatagattggtggaaaactttttaaggtttaaagctacttccaaaggttaaaatatttacttggagggtgttgtaccagtagcagctgcactattaaaaaggaagtcatcgattttgcaacatgttccatgtgttcaaatgcttggaaattaattggccatgccttatttggttgttgaagagaaaaagttgtttggaaacaaactaagttcaccattgattatcaactaagcgcaaaaatatgatgaatggggattacttgatccaattatctccttgcattaccaaagctgactttgaagtaataatatgcataatgtggaccatttggaaagtaaagaaatagtagtcttcagtgggggagttcgaaatgcgtg

SEQ ID NO: 203619 - DNA, 801 bp, Cannabis indica
acactattgagtttggattttttttttttttggctggaacgttggattgcctctatgtgtagtgtgaagcgtttcagattcatcaaactattttctctttctttttgtttggttattatgatttatgaatgatgtgtacttttttatgtttgtagttgtactagtttagttctttttctgatagttgtactagtttagttctttttctgatgagcattgctcagactagtaaatggtgtttaccattccagggccggccttgggtcttgggctaggccagaggccaggcccaaatcaataatagtttctcttaaaaatatacaatttttttaataaattgtttttggaaatattacttatttcatgtctatgtcttcacactatatattgcaagcactgatctgatatgtatgaagttttatccaaagtactgaatgctctcaatttcgtgaaaaagaatccaatttcaaaggaatattttcacaaatacccaaaaataattaaaaaaattataaaaatatgcatttatagttttatttaatttttttacctaaaaaaacatactgacagttatttttatgttttttctgaaagaataaaatagaaaaaaaaaagaaaaaaaaagaaagagaaattgtatactattttctaacttttatctatttttacgtatttttttgtttttttattttaataatttggattactctcttggttgtaatttgggttgctgtgtgagtttagattgctaggtagattgcacaacatacatatctactaaaatgtaaaaaataataaaaa

SEQ ID NO: 203620 - DNA, 557 bp, Cannabis indica
attttttataattattatactaactatttacaacactttatcaaaactatacattcacaagtaataattatttctaaccaaaaatgtataaatcatgataaataaaattatcacaaaaatttcaaacatcctttctattttttttcccaaggtgattagaatcactttaactttaagaattcacatcaattattcaatgaatcaagcatgaacatcttcaaaccaaaatcattcattgtttaacttaattaagagcatgttaagtcaatttatgattattattattacgaattataagtaataaaaaattattctcaaaaatttaaacaatataactataatattagaaaataataccccagcctattaaattacttcttaattaatatcccctttttaattaataggcataaaatctaaacaaactgtgttaataagggtcccacgagtatgaacccaattaagacaaatagtcgtgtatgtggtttgctcctatacaaagttcgaggttcgagtccccggagttaaaaaaaaatggcttcactttgcaactaata

SEQ ID NO: 203621 - DNA, 630 bp, Cannabis indica
aaaatggtattttttttttaaaagcttaacaaatattcttgttgtgttattagcagcagcaaaacctgaggttagagtagtgcaccaccatgatttgaacaagagaattcttattgctctaattgtttcttccactttccttggtggactcttgctgtttctctcttgcttttggatttatagacatagaaagttgagagactccaatgggaagagccaaaaggaaaagggtatgttcccttttcaccattacttcattaattttgtttagttaaaaagttaattgaaatcacctagattatgaaccttgttttgccttcatttcctcttgttttttcataaatgcgtttcaatcaattagaagaggcttcaaaagggttatcattgagttcagcaatggtggggtttagctcctcaaggatgggaagtagtaggaagggttcagtggctattttcgattatcaaacgttggaagctgcaactaacaaatttgggagaagtaatgttttgagtgagggtggttccgggactgtttacaaagctgttttagatgaaaaagttcttgttgctgtgaagaaagtagatgttactactactggatcagatgctgaaagaaaatttaatgtaatg

SEQ ID NO: 203622 - DNA, 1319 bp, Cannabis indica
tcaaaatctatttggacgaaagcgcgatttggtgaagatgtaattattgcaaatttagacagtggtaattttcttattgttcttaacaactaaccataatatgcgaaattaataagattacatatacagtaatgtacatattgctttataaattaatgagttccaatttaaataaatatgattgattaatttaaaatgtcgcatcattaacgatatgtaattcttttttacaagtgtaattagattaactaatcatataagttacaattatatatattttatgtataggtgtttggcctgaatcaaagagttttagtgagtatgaaggaattggacccattccatcaaaatggcgtggaatttgtcaatccgtcgttaaagataaagttcgatgcaataggttagtcaaaaagcgtaatataagtgttgattctgatttaaattacagtttagtaaatatgatataaaaaatttataaattctttcttatctttggcctcaaataacttataattaggatcggctctgaatatgataatgactaatcaatcttctcgattttgaatatttgtctaggaagttaataggagcaaggtactttaacaaaggttatattgcacttctaaagtccataaatatctctactagcgaaaacttatttactagtcgagacattagtggacatgggacgcatactctttccacagctgcgggtagctttgtctctggagtaaacatatttggcaatggcaatggcactgcaaagggtggatctccgaaagctcgggtggccgcttatagggtttgttggggcgaaggcaattcatgcacggaagctgatactttggctggatttgaagctgcaataagtgatggtgtagacgtaatttcagcctccattggtggtagaccttctgaatatttcaaggaatcgatttcaatagggagttttcatgctgttatgaaaaatattgttgtcattgcctcagctggcaatgacggatctaattcaaacacggtagctaatgcgtcaccatggatgataactgttgctgctagcacaattgaccgcgagtttcatagttatgtagctcttggaaacaaaaagcatcttaaggtaatattctttaactttttatatgacagtaatcaacatagttatttaatagtaatacatcttgcaaaaatttaagaaatctataatgatttattatatagaaagcagagtttaaacaatgtgtaataaaacaaagaaatgtgtgcaagtgcaatagactatttgaacatttcagtgcgttaaatttttatgaattttttta

SEQ ID NO: 203623 - DNA, 513 bp, Cannabis indica
ttaaacggtctgctaataaagtcacgcactgtatggcatgtgatacttgttattggtgtgaccgtctttttactaagagtaatattccttctgcttttcagtctattattttagcggaattatctatctaataaattataattttcattcaaaaaaaagaatctttaaaaaattacacgaaataaaatcttattagttttattttttttggaagaaaaatcttattagttatacaaagtacaaacaaacgaaagactcttcaacaacactagcaccagtggggctcatcattgatcatttcattttttttttttgttgaaaaagtttccaacacatttgtacttttgatttttttagttttgatcgtgattattattattattattattcttattattattattattattattattattattattattattattatttcaaatctataaatctgaaatctatagattttttaggaaagacgatgcttaacaattttgtcatagtcccataaaa

SEQ ID NO: 203624 - DNA, 1086 bp, Cannabis indica
aaaaaaaaaaaaaactagttatgccagctgtaatgagctaataagctcagtataataataaaaaaaaatatatgaggattctcaggtaatacattgaaattgattgaataaacggattttctattacatgtaaaaaaaaatacagtaaaacaccaagatttccggttttttccttcattttctcggaagagaatcagacactaaaaccaccaaaagtaaaatacctcagtcaaatcagtaagcaaatccttccaacgagctctaatctctccgatctgcaactcaattaaaattctcaaaataaaaatacaaaaacaaaagcaaaagcgaaatcaaatcaagatcaagatcaagatccaaaaagcaaaaacgagaacgcagagatgaagatctgacctctccaagagagaaaaagagagaggaaagagacgtcagagaaattcgagcgaatgttcgaaaccgaaaagcctcaaaaccgccaaaaagcgacacgaattggagaagtaagagagagagaaatgcatgaacgaggcttggcgcagttttattccttctgcggaatccaaataagttattatttttaattttaatttcttacccgttttaatttttttcttcgttttcgttccgagctgtgtagcataatgtacgtttcaaatccggtactaccagtgacacgtggaagacattaaataagaggcaactcaacacatcaaatatcgatttcacatagctataaataagtaacttccgtttgagtgatttgacggcgttaagtagtcgccgttaaagtttaatcccgataaggtcgtgtggcatatggtttttcgcatggacaacgtgtctataataatcatctcccttttctaagtcactccgtagacgttattagtagtagtgactactactattttaatgaacttcccccaactgtcgtatttattaaattattattatgcctaattaatcatttattattattaagcaacactgctttttatatgtccgttaattgaaaatgctactaaatatttccattttatgttttctctaatactactttcactactcccttgccaaccaatg

SEQ ID NO: 203625 - DNA, 850 bp, Cannabis indica
atgaaatgggtgcccgatcaatagagattgtcgccaggaagcaattttttttcctccttggctaaaagatgtcattggtagtttgtgaaagtaaactgtgttttgtgggactatttttcctgaaaatgataaatacaattagcacccaaaatttaaaggtaaagaataatcatcatagttgaaaatgaaaaggagaatgggtcccatcagacgtgccaaaaattatgttaagcaaaaattttacatttaaaatattaaaaggcaaaatataattccacttatgccaaatttatagcataagaatttattaatttaagttcaacccatccaagattataagaataatctcttaaattacaatcatttcatttaaaagaaacacattttgattccaattttgataatattaaataatcaaaataatttgggagaaaattaggtgaatttgaaattgtagctgaactcagtagttttaattaattaagctacctacatactttcttgtgaaggatcaagccacttgtagttcagaataaggtattttaaaatttaaatataagagttccgatagatgaccactttcaagaattatgtgctatttaaaaatttggaaaaattccttagtggatgacgttttatgaaatttggagatttttgttttatatcattttgcaatattggtgactgcactacatatttttttttatgaataaagtcaaacgtagttcaaaatatttgagaggttttgataagtaagagatgaatgacctcttttttaaaatgtcatttaatttattacggttttgggaaatttacaccctagtacgtaaattgtaattaaattttaaaa

SEQ ID NO: 203626 - DNA, 747 bp, Cannabis indica
acgtattttccaaaataaaaagactaattgggaaagctggattccttgggccatggattttgtagcaactgcattacagcaacctcacgagactagtactgggacggttgtggcaaaacccaaaagctgggtggcccctccaatcggttacttctctctgcactgtgatgcagcaactggtaaggagcagcaggataatggaattgcagcagtcatccgagaccatgatggccgtctggtagctgctgaagtattattcatggaaggttacagatcaacagttatggctgagtgtctagctatccagttggggctgaacctggtgcagaaatctaaagcttgtccattctttgtcaattcagacaactaaaccgtgatcaaccaactgataacaaaaaaggctccttgtgctgactggggagtgccgttggtggatatctttgcaacaaatctcttagaaggttgtgctggaattaaatttgtgaatagagattgtaataaacttgctcactctttagctaagtgggctataactcaaagatgtaattatttttggtcagaggttttatcctcttgtgctgctgccgttttaaaggcagagaagccttgaccagttgtaagcattgttttgctgaataaaatgattttactttcaaaaaaaaaaaaaacttagattaattgcaactgttaacaataataagaagaaaaaaaataccacacaacattttaactaaagatcaataaatg

SEQ ID NO: 203627 - DNA, 918 bp, Cannabis indica
tggttacaaatgagtcaatttattgaacactttaaccataaatagatagtagtagtagtagtagggggtgtaatctaatgatcaatatatattttatggttacaaatgagtcaatttatatagactataaggagtggtacatatatatttggaagcattattatgaaaagtctaggaatgatctaaacaattaatgcatgtgcattcacacttgcttagccaccacttctctataaatttttctctataaaaggagcttctcataagtttaattttcaaaatacacaccaatagctatagcttgctcaatctctcaaaccatggccaaaatatactcccatgcagctgccaataataataataatttatccatggccatttccacaatgctcctactagggttgctaatgtcaactttagacaaaacaggtcattttatcttctctttctttaagtaattgttatgttcatgattaccattgtattcagggacgaacgcacattgtggataggctgcgtcatctcttatttaccaaatctcgtttaatataaatatttgacattattttatcttttaattttaaatttcaatccctaaatatttttcattatttatggatagtatacaaataattaattttttttttactaactttatcaaaacatttaatatacatatgcagttgcccaaattggagtttgctatggactattgggcaacaacttgccatctccacaagaagttatcaatctttacaaacaatacaacatacgaagaatgagattatacagtccaaacgacgccgtttcccgagctctaagtggaagcaacattgagattatgcttggtatcccaaacgatgctcttgaaggtatcgctaacagccaatctacagctgacacgtggatccaaaacaa

SEQ ID NO: 203628 - DNA, 558 bp, Cannabis indica
tatcacatctatagtgatacttatttttcatatcatatatacacaaatattgaatttattggtattgttatatatatatttccaaagccatgcttgaaaggtccctcccattctctaaaaaatttggattatttggatattggaagatttggatcaaaaacatagcttcaatatcctttcattattgttcatcaccacacattagctctttacttggctgtctctactacttcaatcatacatatatatatttatatatatatatatggggatgatattttgtccctttttgtaatgaatacttgctggtgaggggttatgtcgttgactatcctaattgtattattgtatttttggacatgactcgctgaatttttttagctagcattgactttgaagagtatataagatatatgtttaaatttaaataatggaatataaattgatctacatatttgggagtgaaacttaaaatatcatatgtacgtgaaagtggattgataaataatattgttcacataaattaaaacatgcgatcagaatttaatgtagcaaatt

SEQ ID NO: 203629 - DNA, 638 bp, Cannabis indica
aaattgattgatactccctctctccactccacaagtgactcaatcacttccctttagcccattctcctcttcgattccacaatgaatccttatctcatccttaccgacacctttaagacacacactcttctgtatttttttattttttccgttttttttttatgaaaagaagaaaataataaacctaaatattctttctttttatacaccatttttaattttagaataaaaataatcactgtgacaaaatcatttcagcatctaaaaaatgttttcaatagttatatttgaccaaaataattgatgataactatgctttaaaataaggttgattattaatttctattttggaaattctattttatattagtttttttttcgcaaagtctattttataattttttttttattttatgattttgattgtgctcttcttttttatcatctctatcttttaaattatttcactgtttcaaaaaagaaaaaagcaattttctttaaattttcttttttggtaattttatttttattttacgtatttatctatatttttttcctatattactaaaataatactttttttagaagaattattaaaataatatttatttatagtatataaataataaaatattata

SEQ ID NO: 203630 - DNA, 1732 bp, Cannabis indica
ttgaagatctatatatatatatatgcatgaatgatgaatcaacagaagaaaaatctttagaaccttcttaattaattaaaccaatcaactataatatataaataaatatatatcataatcgcatataaaaggtctgatcagccaaagtagtactgtttagctatagtgtttatatatatattatcatcaacattgctttatctagtactagaataaaagagaaagaaattaaaactactcatatgttattatagtaatacacaaatgatttgaccttaatatagattatataattattatatttatgtctccactagtatttataatttagaaatattgaatatatatatatatatatatatatgtttgattacttagtttcagaattactttacagtagcttgtttaaaatattttaaaatatagagattttttaaaattttgaacaaagtagcaaattcaactctattttctttctttcaaatatattttaataatatttaaattatactttattctatttttgttaatattgctattatatagatataaagaaaatttagagaacaatatgatagatggtgtgttatgtaaaataaaaaaaaaatggttttttaatgatttatttaaaagatagaataaagaaagtactattagaaatgctttgaggtaggtaaattaacgataaaaatcatgcactaaaaaaaactctttagtgatgattacttctaaaagattttttacatattaaaaatgatttattattaaaaagtaatatttagatataaattattactaatttaattttaattgtcatttaatatttttactaaaaatatatttcgatcacaataaattacggtaaataatactgttttagtaacaatttatttattttctagtaatcatatttaggaaaattttatggtacaccctctgaaataagtatactgatatactctttcgtattttcaattaccagatagttttagtcctaattacttcatatgatagtatatagcatagttattaaagacattttataaaattttgtaaaattcataatatcatttaacatgttaattaaaaataagattcaaataacttgttgcacacatgtctctttttttcttatgcgtgtataaaatagactagctatttgaactatatactgtctatattgtaaattattttaaaattttcaaattctataatatcttaactaattataatatccacatcatatcaaaaaaaaatgatataagttataactatttagatataaaaaatatgagttttttgcggttaaactcttaactatcattaattcacttgtacttaaccctctaaactcaaactttgatggtaaatctctcaaaattactgaacgattaacaaatttaaggtgtcatctatatttcacaattaaccgataacatagattgcttatgtgcactcttgtacacgtgacatatttataatattggtacacctaataatattataatttaaaaataataaaaattattcaaattataatattatattttatttaattttaaatgaattataaaacaataatattaggtgtaccaatataaatgttaaacgtatataaaagttgacacataagcattccatggtggtaaataaccagatgaaactataaatttgctaacagtttagtaatttgggagattttatagctaaaatttaaactttagaagattaa

SEQ ID NO: 203631 - DNA, 1234 bp, Cannabis indica
acacttttccaaaaccacgaatctgtggctttgtctttgcacttgaggatatccatccccctgagatatttttccttcagaatgttataacaaagcaactgacatcttgttagaagcttttaaccccacttagccaagaaggcttgattcatttctttagttttcttgaatccaagatcgccctgagatttacggaggcataatttgtcccaagacttcaagtgtatctcatggttacctttttcaaaaccccaccacaaatcacgcgccaaaccatcaatcctagaaatcagacggttagaaagctttgtggtttgcatggcataaataggcattgccaatcccattgatttgatgagggtagcctggcctgccttaaataaagtctttgctttccagccttgaggcttaaaagtcaggttttccaagataaagttaaagtctgcatccttatgtctagaccggaatagaggaaggccaagctacttagttatgccttctggacccccgattctcaaggaatttttaatttccattttcaagttctcaaaggtattctttctaaagaagatagaggttttaagtttgttgacacgctgccccgaccaatcacaaaacttctctagacaattccacatacctctagcttcccctacagtagcttttccaaccaggataagatcgtctgtgagaaaagatatgagaaatagttggtcccccacgggacaatttgatccccttaatagtaccctgtttaagagcatcttgaatatgtctagagaggatttctgcagcccaaatgaacgattggaatagtaaaaacatttcttgagttggcgaaaaaattcttcttaaggttgttattcaagatatccctacacatacaatatcttgctttagaattcctattggtgtttgtagggatgttgagtctaggatgactaaattttggtgggtttccttaggaaaaggatctaagagcactctcatcagcttctctacactatccttgaaaatacatcaccaaaaccttactttttctattttacctcaaacttttacattacactgttgactcaaaaatttggacacatacttctaagccacactcgcttgctatattgatgagaatgagatgtatgttaagtataaataaagagacacaataatttatagtagttcactcattgtgttgcgacagtaatacatcaacatctacttcaagtttttattc

SEQ ID NO: 203632 - DNA, 1405 bp, Cannabis indica
gcctaggttgacacctagtgctagccgaggttgacattttgtcagcctgggccgattctgaggagtctttctaaaaagtttctaggcatattctttgttagtggcaacagggggtttgtcttgactaagagggtgactttttactaaagggtgacttatcttgactaagagggtgatgtgagtcaacctaagaaggtgacttatcttgactaaaggaattaagaagagtattgtcaacacacttaacatataataacacttaacatctctataggggtcttcctacctaggtggtgcagggggtgcttccaccactcctacgccactatgtgttgccaccatggtggtcgggttgttgcatgtcttcatcttcatcttcttcaaaacttgtcatcttcaacttttcacaagagattggtatatttttatgggacgggaagaggtggtgtccacaacttttggaaagccatcctgagagataaaacccttcacctaggtggtgcagggggttggtgcactctcttagtggcaataggagattcgtctcttttttggggtcttcagggtatttttcgtctatcttgaataggtttatacacctatttacacccccaaagtacccccaaaactctcatgtttgcaatcatcaaagcactcatgtttcactctgttagataccttggcacaggtcttgcaaagttggtatcacagatcttgcgccaccatattctctgtgttcacaaagaatttgtctgtaagtattttggccataattttctcaacataccttaaaattagacgatttaagatattttgaaaaactaagaatgagatctaccacttttcatgcacaactaattcatgagcaactttgttggctgtacgtcgaacataaattaaggatgcctcaggaaaactagaaatcaaactagcaatatcatccaataaggaacctagttcaatatcatccaatatcaacctagttctaccacttttatatttatgaccatatccaactctaaatttaacattatctaaacaatttctacctagtcacatagtctctccaaccttactcatgtttattggtctccattagaaatgcctcaaataattccaaacacatgattggccttttaaaaccctccctaagtaatgtcttcctatttagaattacttcatttagaataatttcgataattacactttgattttaattttattttataaatttttacataattgaccttctacctattttattattttttaaaaaaaaaccttaactcctaactttttttattttatttttctaatgtagatttatcctattattattctaaaaaattacgtataaagttatttaattttggtatactcaactaattaacttgtttctatattt

SEQ ID NO: 203633 - DNA, 2060 bp, Cannabis indica
aaaaaaaaaaagaaaattaggaatatgaaagtaggaaaaaacattatatatcacaagagtgtcctcgtcagcattgcactttcgacaattatttttgtaacaacgaatacaatctgtacaagtgccactcagttcacactactctctccacccgatctaaaagtcctagcaaaccctaatttattgccattaattaattacatatctatacaacatgggccataacaaattcccaaatatacaagttcatctgtggcatgacaagtaatcaaaatcttataaatgatgtcaaaatggtatatgtacatcaaatagttgagtgcgtagtgtaatatccaagtgccatacagccagtatgaccatgcgtcatggatgaaagggatcagttctaatgctcaatacccatgtgtgttgtgatgcaaattatatatgttagttggtggttggactccaaatcgttttcacccaattattttctgttttctatatttttttaaaatttcatttgtgaacacatttaaatagtggggtgcttttgtttgggggtgaaattattaaaatatattcaagataagatattgagaaactcacatttccattttttattgactaactctctcaagtggataatatagttgtttgcactcaaaaaatatatactaagtcaaatgaagaagtatagtactagctaatagtagtttttatatatttatattataaatatatatatatatatagtatagtactctctcctcgaagctatctagctagcttggaacccacaaccacaagcatggcggcacatgtgattttgtaaaatatataatacgtacctattttaattagttcatcatgtatttggaatgatataactgtataagtagtaggtccaataaggaagttttgtgttcaaattaaattaggtctttttaatttgtttaattagtgcagatcaatttgtcaaaagataagctaacaagcactaattatatatatgtggatagtatagacttccatgcaacttttcatttaactttttcgtctttaaaaaatatatataaatatatattctcttatgacaaaaatagattactgagggaaagttccgaacaacagacttctaattttaactcaacttcaccaaattaaatatatggcattagcaagcaacatagtaattatgctgttttttaattgccattttgatcaagtattgattattgcaaagaaataccaaaaaagtaaaatatttatttactttggatatatattgggatattttacagaaacaagaagtgtatttttatataatttatcgtgtcacaaaaacatatatattgataaatttaaatcccattggcatctacatagaatatataacgtgcttgattagtggacgttgagaaaaccatttgacgtatttgaagtgactaaattagggtggaagtttaattttcgttgaccattattgacatagcttagctagctagaagattaaatatctaacatagatagagatagagaatattattccctttacgttaatctaattttatttcttaaccaaatcactctaaataaattatatcaacttaatttggcctaacctatattacatataatatatttaatattgttacaacacactctcaaattacacacagtacttaattatcaatgtattaaatattagctatatattttcgttatttttatatgtatggaccatatcaattttagttatatggttaaaaattaattacgtacatatcaatatatgtagctcggttaaaaagaaaagtctgtttaaattattattcttataaataagaacccacttctcatatcttttcctccacttctttttaattagttaattaattaataattaccaaacgtatattattttaatagattgacctaaatattttcactaaaatttagaaaataaaaaaaaatatacataatccataatttatttttgtgagaatatatgaaatacataacttacgtattaatagggtttatcattttttaatgatttcaaaaaaaaaaaaaat

SEQ ID NO: 203634 - DNA, 1322 bp, Cannabis indica
ggatcccgagattttataatatactatttttagtttctaattaaataagcaaattttaattaatcatgtttattattaatctcattgattagcgtcgagatacacagtatgttaaaaagcacgctaacacgcctaaattagttaggttgttacaatttggtatcagagccgccaggttgtcttccgaatatcgtcacgacatgtacaatcttcatcaacagttagctcgtttcatggttcagtaagcttttatagctttagtagtttatgttaataatatgatttaagaaaagtctgataggaagcatgttagtagtctgatagctgaataggggcatgtttttaatttccaaataagcggcattagtaagttattcttgatcgcaatctgaccagactagctcttggttacgcgggttgttctagtagtatggatgccaggcaaaataccagaagtcagtgtaactcggtcagatgaattggcagtcagggagttcaattcccccaaacgtttgtggctagagcagaggccttacaggcagggcacgaggttgggttgatgttaacccgccgcaggttccccaagctgcccaagattgggaaaataggttcgcagaaatgcaagccaggattaaagaacaagatgaagagatttggcggttgagatagcagggtgctcctgaatccatgttccagaaataccattagctccagcaattgctgtgcaggccaaacctgtagttgctgtgaacctgatggaaccccattatgaaaggttccgtaagcaggcacctccagttttcctgggaggtcccaatgtcatgaaagtcgagcaatggctaatagtgattaacagaatcttaaactttatgggtgtcaccggcaatgaccgggtggcctgtggcaccttccaatttcaagaagaagctctggtatggtgggacatggtgtccctgactttggatgtaactacaatgacctgggaaaagttccatgccaagtactacaacaaggcagtcagaagtgctaaaagaaaagaattcacccagctgactcaggaagagaatatgagtgttactgaatatacgattcagtttaatcgtttggtgaggttggcctcgggaattgtgcaaactaattttagcaagaaagagaaatacttggatgggttgaatgtgaagatcagacatgacttaatgatcactactgatgacaacaccacctatgctgatatggtgggtaaggcactacgagctgagggcgcagtggagtgcaccttagagtctcgagtgactcaatttgttggtggggctcctactcct

SEQ ID NO: 203635 - DNA, 2892 bp, Cannabis indica
gctggtttttggtggaaaggctctaataatggtaataaaggtatttggtggatgtcttgggatagaatgtgccttcctaaggataatggaggtatgggatttcgcaatctccaggacattaatttagctcttttaggaaaacaaggctggcgttttctgtcaaagtcagatgctcttgcaactcggatctttaaagcttgatattttcctaatggaagctatctctcggcttctcttggttctaattcgagttatgtatggagaagtgtttgggaagcacaatctttagtttgaacgggtgtcaaatggtgcattggtgatggttcttcaatcaatattctaaatgagtcgtggcttcctgatccagagtttccctttgtgtcttcgacacatcctaccttagaaaactctaatatatgtaatctcttaaatgtacaaggcagtgactgggatttggaaattttgcatgatttgtttgatgctagagatagacaattgatacttcagattcctcttggaataacacaaacatctgatatggtgtactggtctatggaggctattggtgtatacacggttaagagtggatacaagctgcaacagagattaaaaggcagagatagagaggttaattcaacagctttttggaaagatttatggtctttgaaagtaccttcgaaagtcaaaaatttgatgtggcgtgcttgctcgaattgtctaccaatgctggtacaattggccattaaaaaagtggcggttaacacagtttgtcctctatgtaacagggagagggaatccatttgtcataacttggttttatgtagtgagctgaaacaagtttgggacatagttggaattggaacttcacaagcggctgagggagttttctcgactggtgtgtggatgtttttaaaaataattcagctacaacaaaatgtctaattgcaactgtttgctggtccatttggggagcgcggaatgatttaatttggcaaaaaaaactcgtaaatacttcggccatagtagcttctgctgttagttttcttgatcaatggcgacatgatcaaaatactccaatcgagacttcttggtctggtttacagcaccacgatgggaatgagcattgggtcaaacctcaatacaatagtatcaagataaacgtagatgcggctttattcgaagaccataatcggtttggaatgtcccttgtagtccgtgatcataatggcttccttttgcaaggccgaacgaggttgttctctggtaatgttgctgctggtattgcagaagaaatgggctttcgcgaagctttgagctggatcaagaagcaaccaatctgcccaatttggattgagaccgattgcctttcggttgtccaagctttgaggagtgttgtcaagatggtctctttgtttggtgctatcgttcaagagtgtaaaaccatgttgtgtgagttaagtcatgttaatttttcgtttgttaaacggtcaactaatattgttgctcatgagtttgctagagcatctttattatattctgattgtatattcagtatggggtctgtcccaactgatttgctaccttgcttggtagctgagtttgaaggttaataaagtttgaattttcctttcaaaaaaaaaattaactattcaaaaaaaatattatttttacatattatattttacaatataattactagaccgtctaattatcaccataataattacactagtaattactaaattactttcaaacacaactttaaataatacgtatatatatgtttaaaatctgtcaataattagtttggtcatagacaaatattattccgtttaattctccattttggaaaaaaatagcagtgatcatcttgttttgttattctccattttgttgtttgataaattagaaggtgaggatctacagatcaaagtgtcttggatttggaagtgtcaagaaggttggatcggtgtgcttcatcaaaaatacagatgttagggaccatagtagtgatgtcacaggtagcatgggaagtgtttttcatgttcatccctgtaaatgcaatctgcctatggtaccaagagggtcgggggcagcgggcaatgtcgtaaaccttctagggtcagccgggagtgtcagtgagtggaaggatctcgacaagattgttgccgatgacgccagtgactccgaccaccagggctacgctttggtattgaggcggcaaatgcgagcgtcttcaatggggtttcacaacccagatctgagatcgcaacgtgaaatctacagatcgatagttattcatggcaatatatacagttcatggttgttcgtactcgatgatatagtggtagttggttcgtaatctagagtattggagatgctatcggtcttattagtttttaacgttttttccggtggaggtggaggtagcagagcttaggaggacgatggttgtaagcggttgattagccggacgaagttcatgcacgtgatagaattgaatggtggagaaaattaagctaattaattaccttatatattttaatttattaaaatttgtattcatttcaaattattttacatttaattatcttatttcgttatcaattagatttttattttagtaattgagaggttaatttgtgcatcaattatgtctttgtaattgtattaatttcaatcacattttcaaaatgttaaataattttaagtcaatcttattttttatattttattaattattttttttaaaaaatttctttatattattgacaatcaattagtattttttttaattattttaacaataatttatgtagataatattttctaagtttggttttttacaagtttttagttttgaaataaggtaaattttcttttgtgattttt

SEQ ID NO: 203636 - DNA, 619 bp, Cannabis indica
ggtttggatactcgcgatggtggtcaaaaaagtgttgaaaaatcagtggcgatgtttagaaatttggtggtggtgattgaaaatcaagtagacacgacctttaattttaattcgaaagtaatgttatttgtggattttattgttgaaaacctattaatataatatataggtgtaggattaagtgggtttgaagttagaaaaataattaatcatttaattacggttttgtgggttttggactggacgaaggcagtgttaaactatgagacttcaatttagggtaaaaatatcatttttttcaaagaaaataacacttatgttttcggttatttcacctatgtgttccgttatttcaaataactgaagatataagaatttatttgaatttgttttatttagtactactacacaaaaaggagctttatcttcgattaaaaaaaatctcagtaccaaagattattaaggtgaagacataggtccctaaaatactgaagatatgcaggggaccatcgatgtcttcaaaataattgaaaacgtacgagggacctatgtcttcgatcgatcgggaaatagctagatcgacaagaatcactataactacaaatttaacaaaaaaaaa

SEQ ID NO: 203637 - DNA, 608 bp, Cannabis indica
atgtattttcttaccgtagttatttacttgttacaaattcttcgacaacaataagtttctaaactatatttccaatgttggttagtgagaagtaaaagataaagaaatacacatgctcatgctattgaaggatacatcatcacaacaaacatgaaacatgaaggtaaagatacaattggcaggactaatgttccaccaccacatcatttgtaagaagaaattgggcactcatccaaagtattttgcacgatcggggaatttaatctccagtgtgtgaactaacaaaagcaatattttagatacatttatgaagaaaacaagatggagttcgacatgacgttgatgaaatccggcaaagggaccctccatcgttttgttctaagcctcttggaaaaaataggttgtgattaaactgtttccaatgccctttgaatagtttcacaggcaattcatcgaacaggtagaaataacattctacaccctctggattcatttcttaaaaaccagttgattagtctaactaaaacttgtaatttcaatttttattttgccaagtatcgtgccttctgtagaatgaataactggtaaggattcgtgtattattagat

SEQ ID NO: 203638 - DNA, 1288 bp, Cannabis indica
atataggttgatatcccaataatcctcctctcaaaccaaggactacattgtctccttttaaacaaagtcatcttgcaccgccgctattaccaaaccgaaaacatctcctgacttttaacattgtcaagaagactttcaacacaaagtgtcaaacatatattttcatttttaactgccataattatcaataaaatatactacctaactatcacaacatcaagtagatttttgatacgaggcacctctctatgtattttcaacactactattgactaatgacttgagtttaaacataggagctggttcggaatattggatctttgaccagccaatggtctcttataacttatagcccataaaaatcaactaaaatggcataatgggctctttatatgagtttgtactttttgttgagataatgtttttgggcccaataaattgatgagcttaatctgttggcccatttcttattgatatatgagcaaaactttatttaatttcatttttccggcaacaaacttaacctacattattattagtttttttttttttttaattgtattgcaataaatcaaaccaattataaactatcagcaccttttaaaaaagcctgataatctatataaaactcatcttactttacataagataataaaactaaactctatcttctctactgacatgtttagtccaaatcaataaaattctacttttaacactattcaatcttattagctcttgaaaccataaaatttcatttcgggttcgctacaaatagtaaactaaagaagccagaatagctgaaaaataactccttttgaatttactcattttggaccgaactatccacctataaagtgcaacaagaatgctagaacgagtgcgccattcaacccactctttagcagcccttaaacaattcatactcatagtacaattaaaaaagagatagtttatgttttgagattccaaaccacataataaacatgtcaattcatgcatagtattgaatttaatcaatctatctcgtgttttcaacctgttttgaacagccaatcaagaaataacaacatgttttggactattaaatctatgccatacctcattgctctatctaactcttttattctttgagtgaatcaaacgatatccatcctgattgttgtagtgttctatcggacgatgatgttgctccattaaatcctgaaatacatccttgacaaccactactttcctccagtaccaactactctacttaggtgcagtaagcccaccaatcctcactttt

SEQ ID NO: 203639 - DNA, 855 bp, Cannabis indica
aaaaataaaaaaatcataaatttacaaaaaataatcaaattgtcccatccgggttctcaagcaagatcattaataatgttaaataatctagatcacacaaaagcaactcatcaaaacacataagacaacctccgccaataaataaaccagttaactctgccacagactccttgagaatcatgctcttgttctatttagaatacaaaatgcgtagtgtgcacctcatagcaggtaaacactatcttattagtttttcttcttagtataatatgatatagcaattacaatcacagagaatacatgctttttttcactcttaatatccaaaatggaacgtgatttcagtaagaagcaagaagtataaaagaattgatcaaaatcagcaactactaatagcaaagttgatgaattcacaagacttaatatatatatatatatatagatatatttatatacaaagcatttataatataccacatgatgacccataaagcatatcatccatgaatgtttataaactaatttttcacacaatcattttatcaaacattatatatgcatgtatacgcaatatcatattgccaaatgtggaaccccaaaccaacttccccatattaagaaacatcaaagcctatttagttgtataactgcacagaaaaaatcatactattttaaaatgattttatcatttcaataccaagagaacaaaacccaatgattctatcccatgcacacataatataattcttgcagatatagatacgttataaaatattaatgaaaaagatctgctgattcccattaatcctatacataaaattatatgacactgtctgtcagagagagagagagaga

SEQ ID NO: 203640 - DNA, 508 bp, Cannabis indica
taaaatgatagaattttaaaaaagaaggtaaaaataaaagatgacaatataaaaagggtatagaatgtaatttcctcaatcttttatcctttttaaaaaaaaatgtagtatcggaatattatctccaatcatagtgctgtaacatattaataattttaaattattattttcaaaataatttatcaattctttcttgtattcaactaaataatataatttaactaataattttctaactaaatactttatgcacaagtaagcacagctataaatttctaaataattatattatttgccttggttttctatttaattaacttattttaatctcaccctaaattatataaagataagcattgttattgatgaaataagtaatctttttcctcaaaaagaccttatatcaaacatagtatttattcaattgctaaaattatataatataattaaggctaaatccttgccaaggttcattgtttcttcattaatttttgaacctattgtcaat

SEQ ID NO: 203641 - DNA, 921 bp, Cannabis indica
gctacatactaaaaaagattcttctctattttttattttatttattaagttcgtcgtcttcttttccatctttttatctttttgttttttttttttttccaactaaataagccaaaattatatatattaaaatccaagcaaaaataaaagagtaactaagcaaattcacttcacatgtaatttactagtgtgaagacattctttttgttcgttcacacatgtcaactatatataccgattatgagaaagatatatgtgaaacttatttagatataaaaataagataattttaaaacaattgattcttataaaattactatttatattataaaacaattgattcttataaaattattatttataatataaaacatgctgcatgcaaaatatgaagcttgatctggtgattttctttagtaggatatgtattcaatttagtgagttttcattaggacatgtacacttttttgttatgttattttcattttcatttgctatttgtttttgttattattatgattctttccatgataatgatatatagccagatatcctttatgctcgaactaattaatctataataacatgttaaataaaattaaattatgattttctaataatttagccagacaaagttgatatggcttgacgcgtaaagaacagtgtccaacaaagttcatacaaaatatgattattatgagtacttttcatcccaataatatatgctatgttatttttaattaattatctgcaatgaaatatgtaacgaggatacatattattttttttatttaaatcaactcaaaagcaatttttaagaattaattggtagttatttaccgtacgtttatcctttatagctataaatatacaatattttactatatataaataaaatattaacatttttttttttttttt

SEQ ID NO: 203642 - DNA, 565 bp, Cannabis indica
taaatgttcttttaacaaattcagaacagagtttacactgatgaaattggaaaaaaattacagttttacaaatattgaacacttatctcgttaaaattatatattaagtttatgttgcttgtaaacttaaaattttaaatatgtaagactcgatattaaatttcactaactggtttttgtgaaaagatttaaaaagcaatacatatatattgtttatttcaaagcattacatcaagagaaggacatcactagattagcaccaagatctttatatattatagatgctatatttgtatgctatctctgttaatgagggcctacatgcataagtggcagcagtattattagcagaggtgagatcagatgagatgagaccacagccacaaatcaattaatcgctcacaaaccattcaggctttttattaaacaactaataatcatggtgtcagatcagatctcttctgcttcataatacaaaagccaaaataaagccatgcatttcacgtgaaaagttaattggtaaattaaattggaagcatcaaatatttgttatcactacataaaa

SEQ ID NO: 203643 - DNA, 1595 bp, Cannabis indica
attatttaaaataaaaagtttttggtaattatacaatctaattacactcaaattatgtaattacatagtcaaataaacatatcaaaacatgtaattatttttaattacacattcatttttcaaacgtgccctaaaaaagggcttgtttagtacaccgtattgtaatgtattgtattgtattgtgttagattgtgttgtattgcattgtattagtattatttaatacaatacaatgtttggtattgacttgtattaagtgattgtgtaaaattataatatatttttaatacactcgatcccaacaccaattacgggttcggattcggctccacgtcccgagttcaggtccgggtccacgtccttgggttcagatcggggtccgggtccatgtccaggtccgagttggggtccggggtcccgagtctgggtctaggtccggggtcttggtccgggttcggggtcttgatccgggtccaagctcgggtccgagtttggggtccgggtccagatttgggtccaggtctagggtccgggtccaggtttgggtccgggtctagggtccgagtccaggtccgggtcgaagattggtgttgaatccaaatcttttataaatattataatacaagctaatacagaatacaacatacattgtattaaaaaatttggtcataataattaatataatatattgcttaatccaaacataatgttatttattatttaatacaatacgaacgagccgaaagagatctaactactcattagaaaaaaaaaagtaaaactatgtcacatgcatgaatacatgcatgaccatcatcatcatcacataaatttgagagtagaatagaatagaatacacatcatcatcatcatcatcatcatcatcatcatcgtttatagttttctctctctactttctctctcttacctttctttttattgatttttttggggctctctttctctttctctcgatcttcacggttctgcctcctttcgatctcgtaattttttttttattttttttaatttttgaaaattagggttttcaggtccataataatttttttttgtttgggggttattacaagaactgttcttgctagcctttcaaatctcgaccactccgcctcattcgtcactctgaaaaatcaacaccctagattcactgctctttctagggtttgcttgcagatctaaaccaccagctcttctcttactgatttcctctcgctttctctctattctttctcgacatgttttggaagcttacttctctctctgcctcctctcctgtaagtttaatttcaaccagttctgaaatagtaataataataataataatactaatactcttcagtgatatgggaattgtagttggaaattgcttctttgtttatatatttaaagttctttgttatgggaaaaattgaaattatttatatgttgctagtaattacgtgtttcagaaattgtgaaaatattgctttggttctgggacttgattttatgttgttattcttgtttgatgtttatatatatttgtgtgtggttaagttgtatggctggatttatgagcatattgagtgaaaaag

SEQ ID NO: 203644 - DNA, 677 bp, Cannabis indica
ataatatacttaaatacacaagtattgatgttgaaaaatgaccaattttatatcgtctgataagtgatagcaacaactaaaaaaaataagaactaaagagagaacactacaatttatagtagttcactctttatatctcgatgataataaaactgcgtttacctcaagattttattaatcacgaaaagcaagtagcttacaagagactttgataagaaaataaatagtgtttaccgagaaactagtcttggtggcatggacatcattcttgacatgtggcaacaagaaaaatattcttgaactcccacgagcctatagtcatagtagtcaacttcaagatgagtccctaacccaacgtccaagttgacatgggtccctagtccagctcccaagttgacatgggttcttagcccagtcccaagttgacatgggaggactctcaggcaaatattggatcccgccaagttgctttctagttaccgtccctcaatagtctaggccaacaagtcaagaagactctaagtcacatgtcccctagactctaagtcgcagacctcaaaaaaatattctaacatataatatcgtgtgtagatgttaattaagagattttatttaatgtaaaaatatttatatacatgtgaattaatagataagtttattttaaaaattatatttat

SEQ ID NO: 203645 - DNA, 619 bp, Cannabis indica
agagagagagagatgagtgtgtggtgtatgtgttggggttttaaatgctaggggtaatttgggaacaattaggaatagttattgtggatattatcccatggaataaatggtaaaatattgaaccgtatataagaacatggctactccacttattaccaattgcttttaagatgaaaccccacgattctcaacaataatagcataatttttaaatagaggggtttgtagggtgtttattttgggtccatacatatctattaagcatgtaaccagaatttctcaatgaaaattcaattaataggacaacccgaacaaacaaacaaaattgaacgtacgtactgaacaaattaacatacatgtgacctgttcacaatttttcttcttttaaagagagtttataatcattttatgtacttatatatgaaccacatattttttattgaaatctatacagttattcacaaatttcattatgactaaaaagtggtcaagtggtgtatgtacaaatttatgttatttatacatgtgtgatcaggacttgacaataatattaatgaatccgaacttttataatatatagtttccaataataaccacacattttatcaaaaaaaaaaaa

SEQ ID NO: 203646 - DNA, 351 bp, Cannabis indica
agcttaataattatatattatttcaggaacagtaagccaataccgagtgcctaaccaaaagttaaccgtgtttttcaatgaaagggctttcgtctgcgacatgactgaactccaggtatatatatatatatatatatatgataatatttatttctgtttcaataacaaggactatattttttggaaaaccactaaacatgaattgatgtatataattacatatatgagtattattttttatcagtactctgttttctatgttagtatagacctttcccattggtttctaacggagacaagtataaattcataaacatgacttgctgggataatttgtttgttttttttttt

SEQ ID NO: 203647 - DNA, 1998 bp, Cannabis indica
cgttgaagcaatgaagttcaaattcgactgagaaggtagaattatcgcaggcagattgaggtttctcgccttttcccataattccgggacggttatgacgagagttggattgcagtccttggcttggttggagagctctgtccaagtgtaggaagggttgcaggtggtggttatggcgccgagagaggcgacggagaagaaacacaccgggaaatgaattgaattgggggcgaagattagaacgacgtcgtttttcttgatgttgagcttgatcaaggagtgggcgaggttggagactagggtcttgagttggagaaaggttagggtttggccggaatcggcgtcgatgagagcggttctgtttgggtaagaggcggtggatcggaagaggaaggaggtcaacgagaggttgggatcagtgggaaagtcaacggcaggtctatgcgatgagtagatttgggtttcggcattgaaacacttcgccatggctaattacttttctaagttttttttttttttaattttttgtttgcttctctggatttttttttgtatggaatttaactacttgaacggttgatggcatttacaaagaatggggtttgactatcaactttaattttgaacatacttgtccacgtggcttttttctgttggagacattttattctacggcatttcgggctgtggatgatatgagatcgtggccaaatcggatgatttatttatttatgagatctatttgttctttaatatatatgtattgactttttaatgtgaataataggttcgaagagaagactagattttgtttttattattaatttgaatgtaagagaagactattaaaaaaaatggtttaataacaaagtcttctactcacattaaaataagaggccttcaccaagaaatgactcatcttattagcagaacatttaaaaaaacaaaaaatgacaatcatcaaatcacacgaccaaaatagaagttcagttacaaatgtcttacacaacaaaaaagcaatctgtttcaaaaattacatcatgccaccaacatctcttgatacagcttaatgcttttttttttcgttaaaatattttatgtaaattaacataatgttaccacacagtgttaatattaacatatgtatgtatgatattatgtatgtaattaggattataatgagataattggctgttttattaattacatttgagacacatggtagcactctaataactataaattagctcattaaattatagtctaccaccactaacatttgagtctaaactataagcatatatgtgtgtagttttagtgggagaagagagacataggggtgataaggtggtaaaagggtcttttacaaagggatgctttccacaagccctctcaacacaaccgccttatttgtgtccaggtagttccattgcacaggacccaatatgaaagggtctaaattttctttaatgctttttggtttttttttttaaataccatttcaatcattttttaaatcaacttgccgttggtaatgataccacctaatttcctaatttataggctagaagtgaagtaacggtacaattctttccatatttatttatgtcattttactatttttttcaaaccttttatattcacttacctatatgactatatataaatatccaatttatatttttcatcaaaattaaaaattaaaattgtttatgagaattgggaggaaaaccattaaatatattttgccatcatctatatttctagttttcttttctttgataaaaaaaatataaaataaaagaattcgagaataatcattcattggaattttttgaggtaaatttatcaacggttaatagaaagtatgtatttatcaacggttcattggaatttcattgtatctatgttgtttattatttttaaatctgtatttttattatatttgatctactagccatcatcaatcatattcatatctcaatttttatcattgac

SEQ ID NO: 203648 - DNA, 541 bp, Cannabis indica
aaaaaaaaaaaaagccaccaaaattccaaaataaacggacaaaataaaatgaaaacacaatgaattgaacaatggcgatcaccaaaataatatccacgaacaagagcaccttattagcaaatttcaaataggaagtaatgttttgacaaaaggaaaaatagaaagccaaaaaaaaatcaataatttacaattgtcagtttcgttacaaattaattggccacatagaaggggaggatgatactaattagattactatttttttttaactaatttaaatcactaaatatatttcttatcaatcacaataacaaatagttacttaacattaatattaaaaaaaatgtgatttttagttacaataaaaagttacttgtattaaaacataatatttacataaaatttatcatgaaattagttttagaccgagcaaatattgtgaccaaaaattacatttagtcaaaacaaattgtaatttttgtgactacagatattttaatcataatataaaaataatgatctataatttgtcacaattttttta

SEQ ID NO: 203649 - DNA, 1261 bp, Cannabis indica
aactagtataattctcatgtgttattgtgtctagacgctatctagattcatctgtgtttatctttttggtttaatatgtgtttgttgatcttggttcttgatttgtttgttttaatttaatatttatttgtttaagtgtgatcttaatgctagagttacagaggttaattcttatgtatcagagctaaatttcttacaaatcagagcttggttctttgatcatcaagggaaattcaaagatcacttgcttccacaccaagaactcatcaagaactcatcaagaattcatcaaggaattctacaagaacacaaattgaaggaggatgtcgatggctaggttcaaactagagaagttcattggatcaactgattttgtaccgtggtaagagagtttgaagggtttacttgtgaaccaaaaggtggcaaaactacttagagatgaaaagttgctggctgagaagaagctagaggaaattgtagaaatggaggagatggcatactacaccatcattatgtacctgtccaatagagttagaagaaagttaatccaagaaaaggctatgaaaggattgtggaataaactagagtagctgtacatggcaccatcaatatcgagcaaaattaatcttcctgaaagattatacgagtttagaatgaactctccctttccttagataataatattgataaatttaataaaaaaattgttggtttagctaacattaatcataaggtagacaaagaaagtcaagcaatcacattgcttagatcattgccaatggcatataaggaagttaaagcagcaatcaagtatgacagggatgtgatctcattggttggtgttcatgcggcattaaagtcaaagaactttaaattgcaaatcgagaaggagactaggaaagaagaaaccaatcttgcaagaggaagaagtccaaagagaggatcatcaaggaacagccagtcaccatcaagattgaagtcaaagatcaaagacaatcgacaatgttaccaaagtggaaagattggtcacattaaaagattttgcaaccaattgaagatgcaatttggtttcagatcaaactacgatgacaagagatgcaacaatttccagaaccagtattcaaaatctaataatcagggaaatcaaagaaaagactctgcagctgtggctggagcagtgaagatggaagttcagataaggaattattttctatttcaaaaaataatactagtaaaaaagtggatccttgattcaggatgc

SEQ ID NO: 203650 - DNA, 717 bp, Cannabis indica
aatttacagtttttgttgctccgctggtttctccagtggattctatgtgggttgctatgtagatttttattgtgattaaagttgctttgttagttgctatgggagtttctatgtagaatttcgtaaaaataccaaaaaaaaaaatgttcaaagtgtaaaaataaaaatgccccacagtttttttttgaaaaattaccccatataccatatttaatttttttttcaaatttacggtttgggttgttccagcagtttctcctatgggtttccatattatgtggatttttgttgcaatttaggttgctccgttagttactatgtgagcttctgtgtggaatttcgtaaaaatacaaaaaaaaattattttgaagtgtaaaaataaaaaaaccttttttttttctttttaacgatgaatacgcattgaaaaaaactattcctatatatcacactccaaattaaaaatattaaggtaatagtccgagtttgtctcatgtttctcatttaatcttcttaaatatgtatatatataattttttttagggaaagtatgtatatatagatagataaatttggaatgcgttatatatatatatatatatatatatattaataattgtgtgaatgtcttaattttttagtaccattaattgtaatcaatattcttttttcttagttttctttttttttttctttttttccctaatatttgacttctta

SEQ ID NO: 203651 - DNA, 1712 bp, Cannabis indica
gacagctcagtagtcatcatcacacctgtaatgtaccagtgtgcacgttaatttgttaagagctttagaaagccctattaaatcgtattgaattatatcttatataatattttttattgtaaaactatacgtattattaacttgtatgaacaactaaatatataatattttagtataaattaaagtttaacataataatatataaaaatatgatatctaatctaattcaatataatacaatacaatacgacctaatacgaggttccaaacgagtcctaataatacaggtaattaatgagatcatatagagattatttataattttagagagaatattatagtttgagtttcacagatatgggagtgttaaaatagaaaatgagttagagttttcttttactgttagatgaatttctctctctctcactataattctacttttgctcaagctcaagtactgtaaattcagcactcacacagggagattatattactaaactaatatatttttcctaattatatatagacttagtttttttttttttctttttttgggttgatgactgagatgactatacaataagttgtaccagttgatattgtgacaataagaaagaaatatatatatttgtataataattatttacctttttaagttacctatatttattattttaatttcatttttttttttcaaataattcaaaaagtccctcaaaaataaataaataagttgaaaattatataagagtcaaaatatctctccaaatggtatgtagtatgtgttacactattaaaatagtgtacgggtttattagtaacttataatagtgtgagagtaaataaatatgtaattgtataattattatgaaaaattgattgaaaaaataaaaccttaatttgtcttggaagagaactattatctatcaccctctaccataataatttattataatgagacagagaagagctttgtataaaaggaacttccaaacaattggcactgacaaatgaaattattacacttattaataaatagacaaattaattaatagaaaagtgatattttgatctgcaacatcatgttcgtgacaccctaataaatttcacttcacttacatttttatataattttgtttaatgtgattgagtagcttctgaccagtagagaaaagaatataatcttttactcaactttttctttttaatttggataaacacaaagttttccagtaaaacatatcaatcaaggctagctgtatgtgacttaatcattattcatcatagttctatttacactacaaaaaatatttactggatttttttattttattttttgtgaaatgcaaatattaatttaccgatttaaagtaaacactattttcccctgaacatttttgttttgcaaaaaaattattgaaatataaaaaattaaagaaaatatcttctctaattacaatttgctcattttctttaaaatattttgttgatgtataatgtgacattaatctgatttagttgatcaagagccaaaataaaaaataaatacataaacaatagtctattgataaattataaaagtatatgtaatttttaaagttaatatttaatgttaacaaattgaatttgagtagtttaaaattgttaaataaattagtgcaactatacctataattcatgtccacataaataaatcatttaaaaaaaaaaaa

SEQ ID NO: 203652 - DNA, 1434 bp, Cannabis indica
tgaaaaattgaacaaaacccaagagaacataactccaatgctgacgtctttattaaactggcgtcgcaaaatgaacttgataacttaaatttcgtaggggtggaagtgttaagcaagccaagtatatgtgaaaaggaataagttgagatgattgatgcctcacctacatggatgacgcctatagttcactacctactcaacggacaacttccagccgacaaaaactcttgttgccaataccttgctacacgatagtaggggttattcaatgcctctcctacggtgtgtgctccgcacagaagcaagcaagataatcaaagagattgtcaaagaaaataatctgacaaggatagtattggccaacaataaataaatacacacatgaatttatcaagaggtgcgataaatgttagagattttcacatatacctcgcgtaccaccaacagactaagaatgatgaacttactgtacccacttgtaatatgcggaatcaatttgattggggcatttccctcaggtcgaggaggaggctgaacctctagtttccataacttgcaagaagattctcaattttgttgtcaagaacataatttgcagatttggaatacccattacaataatgtctgataatggaactcagtttgatggtgaatttttaactaagttctatgaaagtaacaaaattattaagagcttctcgtcagtttcaaggccttaagcaaatggacaagtagaagctgttaataaaaccttgaatgatcctattaaaaagaagttggatgctgaaaaaggtagatgggtagatgaactaccacaagtactttaggctcacagaacgactgaaaaaacaacaacagggcacactctgttctcgttaggacttggcttagaagcaatgctgccagtagaagttaatattgcgacccacagacgagatttctataatcaagagaaaaccagaacttctgaagttttcattgatctacttgatgaaaaacgtacggagtcgcaaattagtaatgcaacatatgaacatcgaattatgagatatttcagtaaggcagtgaataagaagctctttaatgttggagatttagtgttaagacaagtatttgcaaacacgaaagatgcatctggaggagtatttaacccaaacttggaagatccatatgttatggaggaaaaagttggaattggggtttataaattttcctagcttaacgactcaataataaagaaccagtggaatgttgaacatttgcgaccttattaccagtagacttatgtaattgtcgtattttctctttgtgatgtaaatttttattatcaataaaggtgaagtatttttttcaagtaattacaaattttactctttaaaattagttgaggggcttatatatttgtatgattaactgtaatttatctacactact

SEQ ID NO: 203653 - DNA, 510 bp, Cannabis indica
tttttaacccaaaacctagtaattcaagctcttgtagtagcaggatagtaaatcattgaagaggaaaagcttaaggtaaggattagtttcgttttaagttgaaaacaattaattttatatagtgactttgtgaatttagagtacttatggagattttaacttcgtggaattgttctttggttgctatgggactagttttgatgtttacttgttgaatttgaggtgactgtgagttagaaatcaagtttgaaactttttaaagcttatgtccgagctttaataacgttttcgtttaaggactcgattttaatttctgttacgtaaggattgttgtatatatgatatatatatatatgtatcctgtgaagtttggaatgatttggatagatttcggtagtattttggagagttcaaaatttgagattttcatgccagagaacggtcatccgtttttaccaaaatggtgtgctgtttttggaaagattagggagatcagaaatcatatttttg

SEQ ID NO: 203654 - DNA, 1624 bp, Cannabis indica
ccggtttcaacttcgacgaacgactcgtcggtttcatcaaaggctaccgccgcgtattctatcaaggtctttgattttttttttatttattttggatgggtctctctctgtgttcttccttcgtttatcgatgtctgtcgttttgtttgatttgattgtcgttttgtataggcagtactgaccatagagggacaccggagtttccagggagaacggtgactttagagcctgccgatccccacgaagtctgtgtaagtttttttttttttttgctaaaacgccatagcaatgctaaattttcagttggtatcaaaaattttagcttagttattattattattattattattattattattattattattatatgttctgtaaaaatagcttatatgaaattttttataatttaaaataatcttgtatagtccaaaaaaatgatcatgaattataatcttcgatcataaacaatcattgtggttgcaaaacgactatataaagtaaattaagtaagattattttgcaaaattttagtatttcactagtatagcaaatttcactaagagtaattagcagttttttttatatatattaaataaaaactataaatttaaatatgttggacttcgatatttaattacacgataatattttattagtaatgttaaacacttctcatatccttcactattattaatacaatttaataactgaaaaacataatttaattaataataattaataacgcgctgttttttttggattgaacaccttatgtgcttaatagcaatgtgatagcacaatagtaacaagaactaataaaatagtagccaaacaatgaaaaatgtatattgaatatatgagtaaaccaattacaattgatgggagaccttaacacccccaaagattttactcaatacactacatacccattctcattctattctattacttacctatttatactattctattcttcactcaatgaccatctcaatgctccttcactttaattactacctatcttaaaatgaattttgattgattagaagaagttaccacatgaatgtgtgtagtgtcactagattttgagttcattagctcactaactttatagtaagttttgaaattaatgaaagtgacaatatttatgtttgattttttgaggttaatagtggggtgctgcttataagattaccaagaaggaagagcaagaaattgcattaacggtaagacttttaaatcatacatacaaaagtatgaatgaattttctatgtgttttattccacattgtttctaatgctgtgcttagatttttagtgagagtttagaaataatgaatacaatatttcactagctaagatgaaaatatcataaaaaaataacatttaagaattttctaataaatatataatcaactatgaagttgttgtagtttttaattttgtcaagttttacatgttttgagaaacagtgttatgagtgtatatatatatatatatatatatataatgctattagaatgtatttttatttatactaatttaacttttgtgtgctatttgtttctatttcatgtctagtttagaaaaattctttacactacttctcatcagtcatcac

SEQ ID NO: 203655 - DNA, 1017 bp, Cannabis indica
taaaatagtagccaaacaatgaaaaatgtatattgaatatatgagtaaaccaattacaattgatgggagaccttaacccccccaaagattttactcaatacactacatacccattctcattctattctattacttacctatttatactattctattcttcactcaatgaccatctcaatgctccttcactttaattactacctatcttaaaatgaattttgattgattagaaaaagttaccacatgaatgtgtgtagtgtcactagattttgagttgattacctcactaactttatagtaagttttgaaattaatgaaagtgacaatatttatgtttgattttttgaggttaatagtggggtgctgcttataagattaccaagaaggaagagcaagaaattgcattaacggtaagacttttaaatcatatatacaaaagtatgaatgaattttgtatgtgttttattccacattgtttttgaagagcttttcaccttgcctaaaggctataaatatccttagtttgtttaacaccatttcaaaagagttatatatatttttcaatgatgtgcttggattttttagtgagtatttagaaataatgaataaaatatttccctagttaagatgaaaataccataataacattaagaattttcaaataaatatataaataactatgaagttgttgtaatttttaattttgtcacagtttgaaaaatctttcacatatttcccatttacttgaccttgacttaaaccatattgatgtttactaattattctaatctactatttattgcagtaatgttatcttaacaaaattctctttttggttaattattattatacacagcattagaagtgagagagaaacagtatgacaagaaggcctatgttgattttttcactgtaagttatcatgagatattttaacatattcataggtatgtatgttttgttatgttacttaatattttctcattattcaatcttcaggagcctttggctactact

SEQ ID NO: 203656 - DNA, 1510 bp, Cannabis indica
tacagtttaaagctatggttgaaactcagtttgggcgaaaaataaagaaattaaggagtgattcaggtggagaatatcaggctttttcaagtcttgtttcacagtgtggcattttgtttgatcactcttgtcccaacacttcggctcaaaatggtcgagccgaacgaaaacatcgtcacattgttgaaaccgggctcacacttcttgcacaggcagcaatgcctcaaaaatattggtctgatgcttttcagacggcagtctatctaatcaatagactcccaacctctgtccttaaccacaaaacaccctatgaggttctatactcaaagcagcctgattataatctgctgaaagttttcggctcagcttgttttccttgtctccgcacttatcaaacccataaatttcagtatcactctacaaagtgtgttaatctaggatatagtaatgttcataaaggttacaagtgccttagttcacatggtcggatatacatctcaagacatgtcatttttaatgaaaaagagtttccctgtcaacatggtttttttaacaattaccaacctgagaaagaagtgactgtcacttttccacactcgtggattaacttaccattcaatacaagtccatctcagtcctctgcagcatcactttctcagaattcttcttcacacgatcaggtaacatcatcctctaatcatggttctcccatttctgttgttccatttcactcctctgacttgtttgctcaggaatcacctcattcacccactgccagttctcattctcctacacctctgcaacatgaacataccatttcacctattcctcagttgtctcctgcagctcaggtcgatgaacatgtcaacttacgagtggcacaacctgctccactcacttcgcaacatcctatggttactcgtggcaaagctggtatattcaagccacgagttctggtgtcacaaactgtttctcaatcctctcgccctggtttaccactgactgttcaggatgcactccaccatgaggggtggaattcggctatgaatactgaaatggctgctttacttcgcaacaaaacatgggtgcttgtgcctccttcacctcatttcaatgttgttggaaataagtgggtctatactgaaaagtttgatgagaatggggtccttcagaggcttaaggcacggttggtggctaagggctttcatcaacgacctggagtagattttggcgaaacctttagtcccgtcatcaaagcttccacggtccgtgtggtattgactattgctgttgctcataactgggatataaggcagttggatattaataacgccttcttgaatggtacattggatgaagatgtttatatgttgcagccccaaggatttgttgatcctaacaagccacatcatgtttgcaaattgcagaaatcgatctatggcttgaaacaagcaccgcgggtttggtatgagcaactgagaagtacacttctgcagtggcaatttgtgaa

SEQ ID NO: 203657 - DNA, 1094 bp, Cannabis indica
gacttaggttttaagccaaaaacttatcaacagcaacttaaaatggctgtaccctaaactagcagggaatcaactaactagaaacctgaaactgacacgaaacgataagctgaaatttcgggttttccctgctgcaaaatccgggtaactggtttcacccagaaaacctacaaaactccaaaccctaacaaaaacgtttccaaacccaaccaaactttcccgacctacataatacaccccaataaacattttccaagtaataaaacaattacccatactcagaatcgaattttaccattaataagccaagcttgagttcaaaaactcaaagcttgctcaaccaacaaactacctaccaaaacctgcttaaatcaatctatataaacataatttagctactgaaaacataactcaacaccagcaacaagaacaacaaccaaattcacaaaaacatgcatgattccttttctttaaaatcaagaaagtaaaggaaagttacaagaagcttacctagaactcaaacacaccaaaaccttgctgcaacaagcttggattgaaggagaaacaccacaaaccctagttggtctaggggtttcgaaagagagaggaaggaaagagagagaaaaagtatttcttgaatcttttctttttttttgaataaaatgaattagaaattggttttactaacattaatcttggccaatatattttttggatgtgtttttcctgcagaatgtattgaatagatgaaggcctggtttgggtggaatacaagtgatagttcacttcagaacattatgagaagggtaagaaaagcaagttgttccagattcaaaaagagagtattggctgctggtttagcagcccttgtatacatgctttggaagacctgaaatgagcagcagtgggaagggaaaatatcgggtgcagctgatgtgatttaacaagtaaagtggtgtgtaaagagtagagtagtgtctatatggcctaaaatgattaaacaaaaagatagagattggtttgatttgttataagtaaattgtatagaaaaagttaaggcctactagttaggtgcttttagtttgtaaagattt

SEQ ID NO: 203658 - DNA, 2301 bp, Cannabis indica
tttagggagcaaaaatcataattagtctatatcataaaatgattgaaggacaataaatgatatacactgattcttaaaagctataacacttgagagaagagaaatgctagtatttttttatgtgtcaatatcgctattggtctaataagtattgaatcctatataatttattaatgcaataatttttaagaaatatcgctaaccaattataaggttatatatctaaaaagcactaaatactactggtgcctaataataataatactgagagaaacatgaaatattggacaataataattatatagtaagtcaagaaaaagttgttgaaaatatcaatttcattcaaataaccattattatttgaaggaaggggcattcaagcaatttatagaccaaacaaaaagaaaaatgaacccttatatgacttttaagatggagagagattaatgatggaccaagtggtcaattgatgatcatagttgatgctgcaaacccaagattatacaggataagcttcaacacaggtaagtactgcccattaaggttttttccttatgtttctattgtctttatcaaataatcgcagaagcgggaacattttcatgtaccgttgctgctatctccattttcattccgcacttatcgtgggagttagaacttttattgcaaaattttttcttgacttcttgaactttgttcacaacatcaaaactactagctctataaatgttgatgcaaatcatgacggacatggttccttaggcaataaataacatgcttgtcttgtaatgttaatcttaaggattatgtcaaatagatggattcatgtaaatttatttcactattaatgtatatcattgcagaggagggacaatgatttatcaagtaacaggctgtagaaacagcttcagcccaaaagttctttggcaatccagagtgaattagtagacacctaactttttctaaaatagttctattcattctttttaccaaaccattttgttgtggtgttcttggtactgttttatgtctactaattccaatttttttgcaataatcagtaaaagtatctgaacaatactctaagccattgtcagttctaagatttttttattttcttgctagtttgattttcaatcatggttttccattcagtgaaaattttcagggccaaatctttggttttcaatatatgtacccaaacaaaccttgagaagtcatctataagggtaagaaagtacctgacaccacctttagatactgttcttgagggtccccataggtctgaatgaatgtagttgagaatgtctttggaaacatgcttaccagttccaaactttatccttgtggcctttccaagcacacattgctcacataagtctagatccatgatcttgtcttttccaaacactctttttgctgagaatcttgagtccaccattgctgatgtgccctagccttttgtgacaaatttctgtcttctttttcccttcatcttctgctacatttgtctgatccatcatagtgtttccaggtacgatgtaaattttattctctttggaacgtttcattatcaacattgaccctttgacaattttcatcatgccattttcaatttttacagaatagccctcctgatccaacatagccacagagatcaaattcctttttatttctagaacatgcatgacatgcttcaattatgcagttcctccaccctttaattgtaccttgatagtgcctatgccagttatggggcatgacctgttgtcaccaagcctgacagtgcctccattaatcttcttataattacagaattaggactgttctgggcagatgtgaaaagaacacccagaatcgagtgcccaaccagttcttaagctttctttagacactaccaatacctctgcacttccatgtccatcactatcacagtcagaaactagatcaacatcacctaatgattgtttctggttataattcttgaggatatgacagtctttcctaagatgagtggttttgttgctaacaaaacactttctcttgaactttaagtctgactttccttgattcttgcttttccctgtgtgttctttgtttcccttcttggaattcttccctcgaacaaatagtccaccatcattcttgtcatccttttgctctgattttttctttaattcttttgacattagagcattttgaacctcttcaagagtcaatgatttttttccatggttccacaaaatgctcatagttttctatgggaagagaatttaaaatgatgatagcttggtcttcatc

SEQ ID NO: 203659 - DNA, 1035 bp, Cannabis indica
atgtttagcgtgcatgtttattatgcttgttagattacatcgatggcagtattaatatacgtagagttatattgggtactgatatatagatgtatgtttggctcagatattgattgatgttgtcacatcagtatggttagagtatgaccagcatactgagtataggctggcattatggtcgatagtattttcgtacgaatgttcttgactcagcatcgtgtttgactcggggataggattatgaatggtgcatgcgcgcctgattataatttgggttaaagctatgttattgtttatacttttcttactgagtctgtcgactcatagttattgtttacatgtgtaggtaaggacaaggctaaggttgagtagctgtgagagcgagcagatggagattgtacatgttaggacagttaagcctagagcatcgttaacatgcctaaacaagtaagtgttacaatttggtatcaaagccaccaggttgtcttccaaagatcgtcacgacatgtacaatcatcattagccatcagctcgactcacggttgagtaagcgtatattgctttagtagtttatttaaatagtatgttttaagaaaagcctaataagaaacatgttagtggcctgatagttgattaggcgcatgttttaaattttcaaaataagctgtaattagtaagttattattgatcacaatctaaccagactagctcttggttacgcaggctattctagtagtatggatgtaggcgaaataccaagagtcaggataactcggtgaggtccagtggtgttcagggagctcagtttcccacgaatgtttgtggctgaagtagaggccctagagggagggtatgtagtcggggcgatgttaaccacctgcaggctgctaaggaatgggaaaataggttccgcaagcaggcacctcgagtttttctgggaggtcctaatgtgatgaaagtcgagcaatggctgacagacattactagaatctttaatttgataggcatcactggcaatgacaaagtggcctgtgc

SEQ ID NO: 203660 - DNA, 601 bp, Cannabis indica
taaaatttggaccaataatttgtgagcacgtggcatttttaataagtaaacggctcaattagaaaaaagttgttacaaaaaaatatcaccttattattattgctattttttgaggttggaaatttatttacatcaaactgaactttttaagaatttttgttgtaaattttttatttaatattactataataatatcacatattaatatttcacttttatatacaaattttaaccatttgtttattaagttatgtttgatgatgatttggtgttgatagcctatttataataagttaattatgtgcattctaataacgtatatctctatataattttaaattttgtatacattgtttttttttttccaaattttctatatacatgtttatatatttttttactaactatatcattttacacagatttttggatatactaatatgtttatctattatataatatgaacaataacagattaattatattaacacaaataaattaatatatccaaaatagaccaaacaaaatcaaattaataatcacaatcaaaataaaaatatccaactactattagttgatggtcaggatatattagttaggc

SEQ ID NO: 203661 - DNA, 1064 bp, Cannabis indica
atttcgaactccaaaaattgattgattatgtgtaataattcagtaagatttccagttccacaaagctcttcatttcttttgaatagttcatcaaactattcaatattacaaaataaaagctattataacgactaggtaggaatcaaaaaaaaaataaataaataaatagcaattgatcatttatgaacaaatatgtaataatggcttttatttctgataatcaagcaaacaattataacattgtctcaattaatatcaagcaaaacttaatatacaagaatcaaagatcaaaccataacaaattcctataaacacatattattacataaaaataaaaagtaattaataaatcgttattataaaataccacactgtatatttattataatgtctcaatatataaatcaaccaaaacaataaaaaaaaaaaaaaaattaaaaattaaaaaaaaaggtgtggtagagcttcatactaaaaccatattattattccaaataatgaacaatgatcaactaataatgaaacctttggagaagtgccattaaagagatgaagagagaaaagaatgtcgaagccccagaaagcgacaatgcgaacccggctccagtttcagctccggtttctaacccggatgtgggagcaagggccaggtcttgtgccatggttttggttactaaactaaccaataatattcccatcattaatgcaacaacaaaacgagtaccaaagctctccatttttctcttgtttttttttttgcttgttgtatatattaggtttggaaattatgagacaattctctagctgtggtgtttttgtggtttttgtatgagattgaattgaatgaactacttatatatgaaactattaagaggatttaagctatagctaggtaattgagtgaaattttcaaatgtcacaaaacaacatctagaatggttgatgtgtatattttggctacctttttggtcacggttagtgggaaccacaatttttgtaaattaattttcgtagggagaaaggtgagcctaattaatattacaattggttataaatagagtatt

SEQ ID NO: 203662 - DNA, 565 bp, Cannabis indica
ctcattttgcctatgcatgtatttatgagcttcgaaattgttttcaaatgtgatacatttttattggacgaggttgcaattgtagtcattcattttaaataacttatttaattatctcatatttatttggagaaaatttgtagtacatcttttaaaagggtgtgtttgtaatttctaattttttttgggtttggtccgagttcagatttgaatctagggtttaggtctcgatttgggtttgagtcctgggcatgttttgggtttgagatcaggtaatggtaggattcgagtttattataaagaatttataattttacacaaacatattagtacaaattaatatcgaacatagtattgtattaaataatattaatacaatacaatacaatataacacaatattatattatactatattatataatacatcatggtataccaaaggagccttcagaaaatttatagtacacgccttaaagggatgtgtttgtaatttcttttctattttggcattaggaaagctttttagtttattttttatcattatatatgttgtagttatttaa

SEQ ID NO: 203663 - DNA, 615 bp, Cannabis indica
ttaacatttatcagtttatcttttgagttataggtcaatttgatatagacatcatactgtacaatataattaacaccttgaatcttttcttagttatagtctgccacttggatcagttgggtttctctctctctctctctctaggggttagaagatttggaattttgcagtttagggtagaaatgttttttcatttccatgagctgggcagcttatattaagatgttaaagagaccctgctaattgagacttgcttgtactgcagatctgtggttggtggaatgttttgccggaaggagagaaatctaatgtaggtgatattgatcttacattcccttttaacatttaatttccacgtgttattaagtaagcaaatttgtgatcttaggtgcggaagtatctttcaattacgaatgaagatgatatctcatgggaactcatcagagcagcattatcttcagtggcccaaaccactataatacccatgcaggatattcttaggctggggaattcttcaaggatgaacattccagcaactcaggtaaaaaattattttcagtttgcatatcatttaatacacactctctacttttgattgcctcaatttatttatta

SEQ ID NO: 203664 - DNA, 1265 bp, Cannabis indica
gtcaaaataataaaatttttatttcattccatattataccaaacatcataatttttattcagttattgatttcatagttttaccaaacaaaagaaaagaaattcaattccattctattcttattcttattaccatttctattctgagtcttattctatttttattttgtaaccaaacaccacctataaatagttggtggaatcggtgggagataataaacaccacttgatttcttttaaacaaaatgaatggtactttatgttttaagcaatgatacaaaatgttctctatataaaaatttttgagaattttttaagagagtccaaatttataattttgagagaaatcatctttaatatatcgactttaattgactagctgttgtggagtagttggaagaagtaattgggtacataataaaatcagatataattcctttaattaataacaaggaaaataaaatatgttttatgattgacaaaaaattagaagttcttctatgacataacaataaaaggaattttatcatattaaaaaaatcaataaaaagaaattgttttttttttcttaaaaataatggttgaatgaataggattttctccaaattatgttccttgtaaagtattgcttcttgttacaaaaaattcctcataaaatatagaaattgttacaaatatttcctccaattacattataattattttttaaaataatttattgaaatatcacttacatgatgttaatctgatccaattcaggagtccaaataaaaaataaatatataaataataattaaatgataaattatgagaatatgtatatttagaaataatatttatgcctaatgtgaaaatactaatataaaattgttaaataaatccttacactaattatattaaatctgtaacttatggccacataagtaatttattatttttttttttaaaaaaaacaatatataatttaagatatttgcaatgatttgtattggtcaagaaaatttttgcaacaaattaaaaatattcaagggaaaaaattgttgcaaatttttaaacacacatacatattattttttacaagtaataactcatgtgagtgagatcgttcctacgaaaactgcaactaaataccaaataattgaatttataatgtagatttcactacataagagtttttttaagcaatgaatatgttattgaattaataatctaatgccaaaaaatttcaagaactaaaaactccaaagattccttcaaaaaaaaaaa

SEQ ID NO: 203665 - DNA, 1046 bp, Cannabis indica
aaaaaaaaattaagaactttgctttactcatttttttaaaaatgaaatatattggattataaaagtgatcaaaagaaaatattaaatgagacaaaaggggctgtttaaatttgacactagttttaatgatatttaacaccccctccttcatcaagatatttaagagccaaaaatgagaataattaaatgaaaaataatttaataatacctgtaggtataataatttatatatagtattttcaataaatagataaattatatatttattttacataacgatatgcataatgtaatctgaatcttacaaattttcaaaaagctcttcataatttaagatcacatatatagcaataatttgtcgatagagtttataaaattcgaacacactaaaaaaatactctcattttctctcaaattatgaatatttattaattataatttgtgtgttaattaatatgtatttatatagtagttcatactattttgccgggtagaattgttaaagtctctcataatatatccccttattgtaaataggtcaaatattacttcattctttatatataaaatgtacattaaaatattatattatgtgctatacagcaattataattatttctttttttaaaaaaaaaaataaaaataaccccatctgtagcatatatatttttcatatatagaaaaactgtttattatgaatatttttaactatatataaaaaaaaaaaaaaaaaaatacgatcttcatgatattttcatgtgtttaactaaaaagacctataaataattcatttgctcaaactataaaatatatacatattaataattcatttaaatgatcatgaaggagaaagaaataaaataatatatataatattataaacatttttgtagaatcacaaataacaaggtgaaaatcacatacccatcaagaaatagatatataataaaaatcaaacatacgtacatttgaagatatacttgttatgatttaattagttatatatatagatacagaagagagtgttgctgtctttttcttccacc

SEQ ID NO: 203666 - DNA, 888 bp, Cannabis indica
aaaaaaaaatataaacttaaaacaacttttaaaaatcaattttaatatttctttaaattttttttcctcacattattttatgttaagttcaatacttattttgatttcatttttataattttttttaaatcgtgtgtatatatatatattttctaagaaaatttaatataattttttattttaattttttgtcataatatttaaaatataatttaattttgtttgagaagtatatttttttatgaatatgaattgaaagaaaaaagtttaaaaaattagtacaattaaagatataaattttatataaaataaaaaatattaaaatggggtgtctttaaaaatttttgggctgtaaataaaattttccttttataaaaaaatacaaaaataactaaaaattataaaaatatggtctgtacgaaaatttcaacatttttactactttttaggtttaatttacataaaatacaatcttttagtatatttttgtgttgtactcttgttattttgttaatttttttaattatatattattttaatgttatttttttattactttcatctattttttttgtttttgtttttatagaatactgtcaaaatatataaaaaaaaaaaatagacgtaaaaatatgtaaattttttatataattagttttatgttattatcctagtaagggaaagcctagttcattagaggccggttcggcccatatttgttagatctggcccattaattgtgacagtgccaccaacctctcctcccatcactatcgaactacctgcagccgcataggctagcttcctctactctccactcttctttttatttgggataataataatatgacgatgtgtctcagactccgacccaataccacactttct

SEQ ID NO: 203667 - DNA, 1048 bp, Cannabis indica
tcaaatattaattactaattaacattaattacttatggtactatttatcactgtacaacagctatgtttatgttttttttgagataataatgatagaaatggttaagtaaattatccttttagagttaaattgtctgagtctgaatcattacatcaatcgcaatcaaaacccatttttctgaattctgagcactgatagaactggacacatatgcccaagaattattatttatttgatttggttatataggtttctattctagctactacctacccatgcactctcatttaaggccctttaactttatttcatttcactgccgcccttgcacagatttcgttttttaagctatggtccaccattatattgagtcaatattgaccgcattaatcttatcttacaacactatttttttcatccaatgattttaatagcaaactaatgttaattatggtttcttatttttttgtttcagttttttaatcattagtgattatgcgagactgtttaaacacattattgtataattaaacatgctagacttgctacatttatgccaaggttacttgttatttgtaagccctatatatgctaatgtatgaacctgaaacctccaacacattatctattatactgcgaattttttgcttagaaattttagatcattcttttatgaaattgacacgtgaatctaattttcaaaaaatatggatgaactgtcaattaatgactctccaaaaattaacctccactactacaaaaaaagatatttttgtcaggttttaagtgatacatatagtttttgcgtcggtatacaaaaacgatatatataccataattgcaaataattttttatttatatcattttttaagtggcgcaaataacaattctcttcattttgaaaccgacacaaaatgtacaatgttctttataatattatgtgtcagtttggaaatgacgtaaaattatttgtgccatttaaaaaccgactctaaaaacttttactgtcagtttataaataacgcataagttgctgaatttttttt

SEQ ID NO: 203668 - DNA, 721 bp, Cannabis indica
agtttttttttttctaaaaatgaaataattccattagttaaaaaggcaaaaatccaacaattaatataagtatgataaattaaagtaaattaggcaaaaagttaatcatagacacgagaatcaatctaaaaagaaagctaatttagttaaaagaaaatgtattaattaaagtattattaactcgcttacaataaaatataaaaatactaaaactttcacacataaaaaatatcactaataacaataacataaaatgctagagatagacttttacacatgaaaaatatcaccaataacaatatcattcttattgcaaacaaatttttctagaaactagatgcaccaaatccaaacaatcagaaaatacactaatgcaataatagcccaactgcctacatagaagaagaccttgtagtaaggcccaacctccgccacgtgcggatcaatcaaaaaaaatattattatattattttatgttgttttctgaattttcataataaataacaattaatttttgtatattttctttgaatagttttcagcagtactatagataaaagaagaatagtttgttgtgtttgtctccgattctatgctattttctgaatttccataatgtgtttatgtgtatcttgtgagggccatttgttaataagtagaaaatgataggaatttccccctttatttcaaagttaaaatacataaactttccttcttttca

SEQ ID NO: 203669 - DNA, 1256 bp, Cannabis indica
gctccgtacaggattcattgacccacctgttgatttcctgccacgccaactcagatttaaatatctagttgtatatatcagtacttataatttataactcttgtctgatcgaataagccatgcatgcatatagataattatatggtgattcgaaggtacaaaccctgatatgagaacattgaggataacggtagctccaactgctattcccgccaattctcctgcctgccatatatatgtatccctcttaaccattagaaatgatcaaaagatgtttatatatatgtatttatgtacttaccgcacgtgtgtcggtggagacagcggtgacaatgaacatgaggaagaaggtgacgacaaactcgacggcaaaagcttcgtgaagggagacagtaggaagggtgagtccactggacatgaagggtgaaaggctgccttgagaaggaagaagcggatatggaggccagaacttggactgctatgtaagggaggacttgaacccaagggaagtgcttgaaggttgcgaatgcgatggtcacagcagggttttagatgggctcccgagatgtggccagttcgaaaatatgaccgaccatcactgccagacccgagcacactcgcgtttccaactaacggctcctgctgatccatcgtgctcttgattcaccagggggcgctggctgttgctccaaagacccatgatgaacgttcctacaaactcagctcccagctgaaaacaaaccacacacaccacatacctataaaattaaaatctagccgcgtacgttgggaagaaataaaattagcaagtgcaagtgcacaataaattttttatacatacataatatatgtggaccccaattgatcaaataacttggatgctaaaatagaaagaaagaaaaaaaaaagtgaaccaaaatcaactgatttttattaatatcatgggcaattaatagagaatcacaaagcccctttggcatatagtgagctacagtccaatatatagccatgcaaatatatataatgttcatacgacggctagctagtcatatatgtttatttggtaaatacaggatataaataatataaactataaattatatataaaataaacatacacatagttatttaataatttatagtttcaactttcagctaaatttaatgtttatttttaacagcataagtattataatttgtaaaattttaattttctctaaattccgtcactatattctattattattttaaacagg

SEQ ID NO: 203670 - DNA, 694 bp, Cannabis indica
aaaaaaaaaaaaaaaatgaacaccctaccttagccttagttagaagaagattgcaagttttgaacgccaaaaagggctaatgaacaaaaaaattgcaaagacaaatactagaaacaatatgcgaaaaatctcaaacccacccacctcccctataatttaattttcgaatcttatgtttgtccatatcagatattttttttttctttcattccaagtacttattatagttaagtatcaataataaatgatgatttactccactctatgggttattatacatactaatacaaatgtttgcatgaacaacaattctatttttttttataggagaaattgtaacaaatgaccttaaatctcatagtgatgaaggttaatgtccatttttttaaaaaaataaagtaaatgaccttttataaatattaatacctaaaatgcccttgattatataaatgaagctcaactcaatttttttttttatttgttctactgtttgctttaacgattcctacaaaatagagcgattctcaaacaacgacaaaaattattttctcatcaaattttttccaactagtttcttcaatcatttctcctaggcaatgaaactctcctctatttttttggatttgttttacattgccttgccggatttattcatttgattcttcaaccgaatcctcccacagtcagccattcc

SEQ ID NO: 203671 - DNA, 2164 bp, Cannabis indica
tttatatatattgtcaaaaaagaataatttatattgtataagtgatcgcacgtcttaattaaatcaatataaaaaattaaatgctgctgagtagaatcgaccacacaggaatattgattctcattgcgtaaaattttgatataaaaaaataattaaaaaaaaaaggggttagggacaactattatgacgtgtaattgcggcagctttgtttgctttctccctacctctatttgctactcctaaaataccagctgatgtaaataagtgaaaatagtaagggtaaaatagtaaaataataaaccaaaaaactaaacacatgaatgaagggccgagaaagcaacagaaaagaaagtgaagaaaagccctgattattattatcgagttctgtgtgagatctgccaaaaacccaccccaccctttctcttctctctcgtttttttcacaatattattctcaaaaattacataataaaaataaaattaaataaataaaccctaagaccgttttttatatttgggcgttgcgttggactccaaaacgtcgtcgttttccaatgcgcctcgctacctcttccatcgatcttcttttaactttcttacatataaatatctaattttatatttattatatatatattgacagacaggtatctttctattgatttcgtcttcgaaagaaagaaagaaaggaagagaggagaagaggaagaagatgaggatccggaagaacgcgaaggtctcccctttgctattctcttcgcacgcttcagctcccgaggttctgcagtcgcacgtgtgccagctcaaccagtctccctgggatgtgattcctttcgcccaatactctttctccaaccaggttacttctcctctcccccttcttcttcttcttcttcttccctcatttctctttctctacccatcgcagatctaccccaacccctcttctgcattttctttttcatcattattattattattattattattcactagggtttttcttcttattattatcattttatctttttatcgtttctcattattcttttagggttactcaaaccctaaatttcattctcttattctgtttggccaacaacggccgattaggttagtgggttttcctcattattttgttttttcggtttcatcattattattattattattattaaatatatacagacagaaggggatgaagatagtttcaccgggaatgggagcctcggcgattctaatattggagcagtagagaggtaaatattaattataataagcataatccactcatccatattattattattctaattattgactgtcttgctattattcttttttcaaagttgttgatgagattcattttatcgagactcgactgttactgttattagttagggtttttcgtattcattaatttttgtggtgacgaaattctttaagcttctgggttgtactgcaattaatacatatatgggttttgcgaaagcagtgtgtcatcgttgatggacgtggtcgaagaccctataatgatcattaaggataataataatgatgatattatcgtcaaaaacgacaataatattatatataaacaactatcgaacgacaacgaattacatcgagcttcgtccagtagtactgtcgttggtgaagtattattattgtgccagaaaaacgacggcaaaggatggcaatgtaaaaaaacgagctaaagacggttactccttttgccaccaccatttgactctccttaggtcttatgcccataacactaataatagtactaactacgatactactatcactactacttctacttctactaaggccaaatcagctgccgtcgacgccaccggagttcggcgaacgaggggacgcgccgccgccaccaagaagggtttgaataattccacaaacccaatatgaattttactattattctgggtttggtcctctatggggaaggaagagaggggagagaggtgaagttagggcggccgacagtggccgccgctgaggaagagaatagcgattcatcggatcatagcccaccgccaccacggccgccgtcgtcgtcgaattacgacgactttaatggataacgatgaattcgactatgattttgacgatgacgaggattgatgaagtatactgccagt

SEQ ID NO: 203672 - DNA, 1038 bp, Cannabis indica
gcttgactatataacctgcctatcattacatattatttacaaactgtttaacatgcattaatgtatttgaaacacatacttcgattaatgggtgacaatgaatgtcaaggaacactttacttagtatataatagatttacctactatatttcaattagacaaggaaactctttatttcttacctactatataatataggtgttgaatttttgaactacgacgatggcttgaaatttgaatagtatgatttggatgaaaaggagatgcataaaatgaagagcttatattgctgcagttgctgtagggggcacaatgagtgcttcttaatgtggttttacaatggccatttttggtatgaaccttatgttatttgtagaacaaaatgaaatgtcttgatgtgttgtaacattgtccatgattaaacaactctagccagtgtaacaaactgttaaaaaggatcaagaaaaagtactgcttgtaaatgtcttacattgcagatcttagctaagctagccaaactgtagaaccaacttaaaacttgccatacattgcatttagcaaaagtaggtttagcttagtctcttgttgagttgtctaagactgacatgggttttaacactctactcaaaattgcatagttgtataactacagttggtaaaagaaaagaagataaattctctcaagttgcacctttgaaattgtgtcgagttagtagttacactgagtcatggatttaattttttttttctttctcaagtggtctcaagttttcttttgtactttttctttttaatctaaaaatttaacaaaattgcagtgtatgcctctacctcctactatttgagagtaaaacaggtcaaatatgaagcaaccaaccaagcatgatgattgtgtacaagaattacaaagctttgtccttggacgagtttctagggagtctgctaaagacattctcatcgactatcttatagtgcttagataactgtctttgaataattccacaatatctatcaacacgttcatcatttttgctgtat

SEQ ID NO: 203673 - DNA, 539 bp, Cannabis indica
actgtaatagtaaatgtgcattctagtagtaattatcttatatttgaaaataaaaaaatgtgttcagataaaaaaattgtaattacaaattaattcttattattttgttggaaagatagttagtagttaatattgtttagtaattaattaatatttaaaatagaaaggtttttcacatgtatttgctagaatatgcttatctcagcacaataaaataagcatatattctatttatttattatggatctaattacacacaatgatttatttatttattttagtgtttaatattttaattatcattaaattgaattattacagcctgcagagaagttcccaaaattattttccaaagaatctgtatttgggaggtaagaatggcttttccaagatatatttttttgatactaattaattaagctcatttctaattaatgacagattaattaaccttataattatgaaataacagatttccatattttttgccttgcttggtcgtatcaacatttgctttgggtgtaactattttgtgctat

SEQ ID NO: 203674 - DNA, 1060 bp, Cannabis indica
aaataaaataatatatttttaactgatgtggaaatttttaacattcttaaagaatgctactattagagatgctcttaagtagtagaataatacagtatttaccatttgagtagtagataaattatttattaaatattttgggtgttggaatttgtttagagttctaaagttttaaggaatatgtttgacttcataacttaaaatctattttcaatttttaaaactagaaaataacttttaaaaattaataaggagcatttggccaaattttttttaaaaaaagttttctcaaaacagagttaaaaaaactaaaaattagaacatattaaagtgttgttttttattttcaaaaataatttttatttttttgtcaaatacatattcttttttatattttctctcacaaatccgggtatgggtctgggtctggggccagtgttcgagaccgagaccgaggtctgggttggggtttgggattcagattttggtccaagttcatggtttgagtcctggggtagggttgcgtgccgggtctaggtcgggtcaatgtttaggtccggatcgaggtttggatctatgctggtgggggtcggtgatctgagtcccggtccgaggccgagtccgagttcatggtttggggtacaggtctgggttcgggtcccagggcaaggccgaggtgaggtcctgggttcaggttcgtgccttgggcctggattcgtgtcccgatccccgtggtctggggtcagggtctggggttggatcctaagtccaaggtggggctgggcttcatatcgtggtatagtgtagaatattgaagtattcttttttagtataacaatatttagaaatcgcttttaggaaatattagtcaaatactattaaatttttaaaaaaaaattctttctatttttacttttaaaaatataattctcaaaacttataatacaaccaaacaacctttaaatatctctaagaaaaatatgcatttcatctatttaaacaagttttctgaaaacttgaaattatttttgggcaatctatgtatagtcacaataggtga

SEQ ID NO: 203675 - DNA, 1521 bp, Cannabis indica
aaaaatattgatgattaaatcatagtgtggcatagggatttgcaattttttataccacttgtcatttctattattgtaacggctaaatatgcatttgtccatgttattgattacattgaattttttctataaaaggaaatgaatagctcaacattattgagctgagaattacatcaaatatattactctgttttttaacttgatattagagccaataatttgactagcagccaaaatgttccccaaaatcttagagtgaatactcctgatcaggctacagtcgttgctgcagcatctacaattgtcggtgctaggtcaagtcactatcaactcccaaatctagtctcacaccacttcagtacactcaaccattttttcttaaagcttgatagacataactacagtctgtggaagactatgatgtccacaatactatgagaccatcgattagatgggtttttaaatggaactaacaattgtcttcctgaatttgttgatacaggaacaatgatggaagctatcaattctggagattcaaaagctatcaatccaaaatataagacttggatcatcaatgacataactcattggacggctatataagtctatgacagagactatagcatgtcaaccttggaaattggcacttataattttcaaggttagcaagaccaagaaatgcaggacgacatggaaaaagtcactcggcctaagggtgactcaaagtcactcggccccgtcatgaccaaatgtcactcggccttaggagtgacaatgtcaatcagccttaagagtaacaaatgtcactcaaccttaatagtgacaatgtcactcgtccttgagaatgacaatgtcactcgattatgacagtgacaatatcacttggccttgagagtgacaatatcactaggccttgggagtgacaatgtcactcagccatgacattgagaagtcattcggcaagggcattgtgaatgtcactcggcaagggcattcacgaatatcacatgaaaatgacttctcaaaaaatcactcggcatcctccgtagacaagtcactctgcaaggacttttcaaaaaatcactcgacaataacttcttgagaagtcactcgaaaatgacttctcaaaaagtcacttggcagcctcctttgaaaagtcaatcgacaacctccctagagaagtcacttgacaatgacttcttgagaagtcactcggcaacgccttctcaaaaagtcactcgacaacctcctttgaaaagtcactcggtaacctctctagagaagtcactcgacaataacttctcaagaagttactcgggaataacttctcaagaagtcactcgggaataacttcttaagaagtcactcggtaatgacttcttaagaaatcactcagaaatgacttctcaagaagtcactcggaaatgacttattgcaaaggtcactcgaccatgacattgcaaatctcactcgaccatgaccttgtaaaacttggtagacactactacaaatattagaatt

SEQ ID NO: 203676 - DNA, 1183 bp, Cannabis indica
atacaccactgtcaaatagctcttaaaactaccatcagctacataaattctaacatgcattaattgactagtgcatttgagaatttcaacaacatacttgttaggatcccacgctatcactattttacccccttggtgccaagctatattcgatgagaaacaccaacccttaaacacatttaggtacaagattccaagcttatgagccttcaccctagtttcgagaagcccaacaaaaccagcattttgactgttaatgaattgcttaattaactgttgtttctgctggttattggctcctcgaacattccatacaatgattctatccatgacccaaagggggaactccccgcccccctcctctggtattatccattactttacctgctgcaacaaactcacattcagcattctccaactcttcattatcgcccagtgcctggaacccattctccacctttgtagttgatacatgaccataatctttaaccctttttcctttgctcacttcctgaaaaccttcagcatcaataacaggtttagttttcctatgatcttctttgataacccattcctgtttagccttattaacattacatcagtccttagttttatggcctaaaccagaacaatttgaacatgtaataggcttccattcatactgaatccccacaagacaattcgagccaaactcgtcttcaaattccaacatatttgggagctcttgattcatctgaacatcaatgagaacccttagatagttcaatctttccctctcttttgtcacactatcaaccataattggtttcccaacttggccaacaatcttaaaaagatatttctggccccagtatttgagctcaaggtcctcgagatgcacccatataggtatttgcttaacatcctctttcctgaaatttgtgttaggatcccatggtttcatgatcactgggcgtttgttaaagaaaatataacctccattcaacacttggtccctaatctccatggtattaaaccaaataagaaaaataccataagcaagcattttcaccttataaatcttatttgcccaaattttttttgcaaatccctccaagatgtgcaggggggattagacactaagacatagcacacaatggaaggactccaaaagctaatctcttcttcaatatcttaaaaattg

SEQ ID NO: 203677 - DNA, 1537 bp, Cannabis indica
ttttttttttgtccaaaaaaaaatattaacatttaatgaaatattaagattaattatacttactctaccaataaagtatatatgttccaatattttacgtgtaacatgttgtaactaattcacttcacttttcttttcttaattaaattgtattatatggctctataataatatattttatatgcttgtgagttgtgacaggcctggccgacatgtagaaagcccagttaacaagctcaaacagtgggccagtgggcctgtgggcccatgggctagtctgtggaggacctcatgcctcattagctaatgagttggactggcagagatcttaaaacaaccaacatgtttgtcttttgactcttctaaagctaaagttagggcatcaatagggtttgtggggtctatttctttaattcttttcctacccaataaaatccctaataaaaatgaatggaaaattctacattgcacccttaaaagaatatattgatacacttttatttattttagtattcaaaataattttttagttaatttttttttcttatggtcatgtacgttatatttatttgtctgtaaaattttaagaaatttataaaaatttaatatgctgaaaaataaggttcaaacattatgttgcactcgcaactattgtattttatatgtgtgcgaaatagactgtttgaacactattttttatattgtaaattattctcaatttctcaaaattttgtagaatatcttaaataactacaacaaataggaatatgaaaaaaaattgcactaaaaattcttctagatactaaaactaggttgagggtacattcgtacatctcttttaagcacccatatatatttttaaaaaattctacaatgcatcccttaaaaggggtctaccgatgcactcaaatctgtttcgaacatctcacaaaattttaaaagattttaaaaaaaaaattaacacgtcaaaaataaaattcaaacagtatattttacacgtgaatataaataaaagaatcttacctataacaaacttataatttgagtgagtggccaaacttattgacgtattgccaacaaagcatttacacaatcaaaataaaataaaattaataaagatccttattttttttatgcttttgcattaaaatgatgaatgtcttaatcttatcaaattcaaatttcataaattgtttctttagtacctttatatcaagtcttgcaataacttatctacacataatatcacaatatcataaatcatggagttacatcattgatttttggtatagacaaaaaaacaatcaaataattataagaagctgacaaattctactaattaaaaatctcttatttttaataaactataataattatggttgattaatattgataatccctttctttcttattcttttcacatgaaaggaagttttagctatatgtcatgaaaataaaatatttttccattttttatttctataagtatgcttgtgatattaatttagaaattattacacaacatattaaatttttt

SEQ ID NO: 203678 - DNA, 1311 bp, Cannabis indica
ccaatcaaatcagcaaaatttattcttctatttaattttctctccattatggaatcttactaaaaattcaaaatatatatatattaaataggtaatttctcagaactaccgtaaaattaaatgacacagagtgaataatcatctgtaaaaaaaacgatagagtactagagtgcatttttccttttccgaatagaaaaataaaaaaaaaaaaaggaatttggtaaagtaaggcatcatgcatcgttagattttaatcaaacgatgcagagaatctcaggtatttccacgtagtcgtaatccacatcatttactgtccgattgacacgactcatcattataaatattttttttcatttattttgtatccatatccaatcaaaataaaataaaaaagtccaagccttgtgtttatgtaattctctctctacatcatgcaaagatgagaagaaatagagaaaaagtcatagcaaatcagtcagtcagtctattatatcatatcaaatcaataataacacctatctatctatctttcttttgtcttttcttttttactatttattttcatacaaaattattaatggttattttttaaaaaatatttatttatttatttaagcatagttttcgaggcaaacaaagatgatcagatcagctctcatttacattttacacgccaaaacgaaccggcgtcctcgaagccaccattcttttcctttgttttttcttcaaatttttcaaaactaaacttcttccattcttctttttaaaaataccatttttattcttccttcgttttgtataattcataaaaaataaataaaattaattttgtacgttattagcagaagtataataaaaagatttgttctttacccaaaaagtaaaaaaaaaatgaaaactttttgttactattgttctgcaagaatttcagatgatatgatcaggaaatgcagaacagagattgaattaatgaataaatgtaataattttagttttgtttttttttttaataaattagagatagtatatgttatatgcatggttggattgggtaaaaatgaataataataaataatgattgttgttgacaaaaaataagaaatggtggcaggaatttccatcattcctttattccattattcccacctttctgtgctccttctgccatttcccatcattaacattctgctactttggtcaccacaccctatttatttatccataattccttatatatatttattcacataattataatatttcttcttattcttagatatcagagcccaattgaattttttttttaaaaaa

SEQ ID NO: 203679 - DNA, 540 bp, Cannabis indica
gttttagtgtaaatatggtgtgggaaagattggttctgttatattatgcagaattttatgtatatatatttttggaaaattattgaaaaccatcctgattttagatggctagtattataaaaccgggagtggtttcgtctaaaatgttgtcgaattttgattggttggtttggtgtaataaaccggaatttcatttaaatctaatttaaatttgtcctctttctcaccacacactttattttgtttttttgttatttattttttaaaaaaaaaaaaaaattacatactttatttcctttagtgactccgcttttttcaacttttaatttttactttttacttttaattgcgtttcctcgtatatttgcaacgcaggtacaaaattttgtcatctatgtgctatgttatttatgtattttttttttttggattgaattttgaaagattaataataaaaattaataaaacatagtagttctagtaaagcaataaatctatacaaaaaaaaaaaatgttgtattgttttgctttttacatttt

SEQ ID NO: 203680 - DNA, 985 bp, Cannabis indica
atatatatatttttattcttataaatttgttattgaattcatgtatattatgttcttattatttataatagggtaaatagcagtataagtacccaaagttttaaatttgtaaggggcataattccaatatttatttttagctgcataagtacccaatgtttgtaagaaaatttcttttaatattaatcgtcctttttagagatagaattacatacgtttctcacatactaaaataattattttattatttatatatgtataaaattttaaaataatttttttcatataaaagtaactaattgatatcttattcacatcaaaagtaactaaatggttgtttttttcaaaactcctaaaaagcgaaaatttttagaaacgagattttttcagttttttctattttcataattgttttgaatttcggtatatatgctgacgtggcacaacagtatttgtgcaaataattttcttaaatgtatttttataaataaaatcaattttaggtataatattgaaaaattcccttttatactcattcttttttctttatttttctacttttttattatttttttaatactattttcctacttttttattatttttttaaagtacttaattctttttttctctattttttttacttttatgtattgattcaatacaccaatattcatagtatatatttttttttatttcatacgtgcaccaatatttgtctgttttaaagttgtctattaaagattatcaagaggcaaaacaaaatagaaccatttaatttcagaaaatgacgcataaggtacgggcttttacaacaagttcatctatcactcccttattcttggtagtactatgtggcttgcgattagatttttgcagctcatagtttggcaaaacatgtcttttggttagacaatgaaatcctggttcgaagaggttccaccgccgactgtagtttactacattgttaatcttgtgtgactct

SEQ ID NO: 203681 - DNA, 638 bp, Cannabis indica
aaaaggaaacaaaattttgtattagtcaatgtttaggatgtaaaaatactaatttttaacggtaaaagaaacagaacctaacagaagaggcataattatgtaactgttatattttaggagaaatttttaacaagctgtatattttagaggacaaaataagataatgccaaaagttgaatgggtaaaaatgataattattcttttttctatcatgatttaaatttaactaagtagataattattttattttaattttatttgaaaaattaaaatgtcatttttttaagtaaatatgtaaatgtactgctcaatatatcaagtgtaccaaattgttaccatctatacaaattagttaaaaattcttaactaatctaaccaatttaaatcctctttactaattttgtctcttttgaaaagaaaaaatttatcgcatatttcaatcttaactccatttacaattattgaaactttatacatctttacctcccatatagcactattcctagcttcccaaattttatacacaacagtatttattatagtcataaaaaattactcttgaactatgaatatctgcgcctttttatccactttaagctaatatttattatagtcataaaaattactcttgtaactat

SEQ ID NO: 203682 - DNA, 840 bp, Cannabis indica
gaaccaggactctcggaccctagactacgaacccgaacccgaaccccattcctcgaccctaaccccgaacctgaccaagactcagacctagaccccaaacccaaacccgaacccaaacccagacccagacccaaacggacccagacccaaactcagacctggatcctagaccctgacccaaaccccgactcaaaccccggaccctgaacccaaacctggaccctcacccagatcctaatccgaacttggacctaggacccagacccatacccaaacctggaccctaaatcccagacccggacctcgaccacaaaccctaaaccccgaacccaaacctcgatctcgaccctagaccccagaagctgaaccccattccccagacctggacatggaccccaaatctagacccaggccccaacctcaaacactgacacggatcccgaacccctgacccgagcccaggaccccaaaccccagacccacacctggaccccaaacttggacctcgacccaaaccccggcttgacccagactaggacccgtaccccgaaccccaaaactagacctaaaccccaactcaggtccgagtcctagttcgggtctgggtccaggtctgtgtttggggtcagggattgggtctggtgtccggatctagttccaagttcgagtttaggtccgggtttgggcttgggtctaggttcgagtttgagaccggagttcgatgggttcatgtcatggtatggtgtagaattttaatatttttttgtaaaaaaagaattaaaaatagtttcaaaaaacatgaaacaaacaccattacatttttaaaatgataaaaaaaaa

SEQ ID NO: 203683 - DNA, 1093 bp, Cannabis indica
ttttttcttttttttttaacaaaatgaatttgaaatatttcaacaatagttagaaaaagacagaagttattaaggcaaagttacctgggagttgcaagggccattgagatcatcgaggaatagtaagtagaagaaatcctcgaggataagccccgtcgtttggtcttgaacgacgtcgtttttgcgtctactgaggacctggcgtacgattccctcggcgtcagagagagtaatttccgtttcaccctggtgctcagccatgaatcggcggagctgatcgggtctcatgcgagcctcaggagagccagcatagttggagaaagcttcctttacgtcagtgggtaaagccttatccttgatcttgaactttctactgaaatacttgaaaatcttgtagatgttgtaaccctctgttttactcgccattttcagatcaaaaagctcacaacaccacaaatttaacaatgtcactatccctctctctccctcttcctcctctaattatgggagacttttatagagagaaacccaagaagaaaaaaaagagagataacaaaaagaaagactgatatggttcctgcgaatttttcacaacaatgtgattgtaaatctgattgtaaaaagagtttatttttatatatttataagagtagtttcgaagctgaatcgttcgttagttggaccgtacctaaagtcctacttttttttttttttttttgaaactgtacatatctatttatctttcttattcgtaattattgttgaattatttttttttttaattatttttctaaaattgcgttacaaaaactgacacgaaaacagcttttgccttcctttatatgtttgcggtgctctttgtaattagcattaaaatccattattgagttattcatattcttttccaaagaacaaaaatattcttttttcttctttcttaagaaaattattgcacaattctaaatcttattcttgctttcctattggtgaaatgttttttttttttaattcttttttgttaatttgctctacaaaataccccaaaaaaatctttttccacttattatatatagtggagaacgactcttttcac

SEQ ID NO: 203684 - DNA, 920 bp, Cannabis indica
cgtgtgtgaggcatggctaattaaatattatatgcatgcatgattaatggaaatattatatttctattaagacaaaaatcatatgaatatatttatattttatttttgttaaaaaaaataagagtataatgctgaaaattatacagaatatatggaaaaatgatagagtgatgacatgtcttatatatgtattgtagtaattaattatatattgattatatatatatttagatatacgtactccaaaatgaataaataaatgatagatactacttaatgccattattgattatttttattttgttttttgtatatgaggagatgataatatgacgagatatatatatatatatatatatatatatatcaatgaagatttgattaaccattagcacagtcagcagaaagggacatatattattatttttcttacaaaatttgatttatatatgtttgtaaatttaaaagttaacaattatttgagaataaactaaagattttctatttgttgttttagtagaatagtttaaagactgaaaattatagacaaaaaaaaaggactgaaaattaaaatagtactaattacttacgcaagcgacaaactatatatatttaattaaatatatattcaatttcaataaaaaaaaaaaaatcaaatacatatccgatataatatttgatattattaattaaaatatttttttatattattattgttattttttcggtggcaatgataaagtgatatcattattagaaacacatgtagtactttaaggctacattttatagctgataaatattagtcacatcctaaataaaaaagaaagtacaaatcatggtaattataaaatcaagtggtcctttaatttggagataatatataactgataattagtacgtatagggtaattttataa

SEQ ID NO: 203685 - DNA, 763 bp, Cannabis indica
ttgttatttttcaacatgacttcactggtgaactttttttattattattgttattattaagaataatgcattgaactctcttgctagtagagatttgttgactctccatttcaatctttatgaactttttcgatgcttcgttcaagatccgagtagtctattgcactaaataaaatttatgtaggaaaaatattaaaagggtattaataatgcctagtagcattaataatagatcctacatattttaatttaataattattatgaataactattgaacaccaataatgtctaaggccatcaccaaagaaagcaacattataagttgttgtaggggacccacttaagataggtaaccaataataataataacaaaaaaaaaaaaaaataggcagtgttatcagatagcagccacagtgtcaccttaatcttacaaatttctcaacctctctcttccatctcacgcagccctttttttagtgtttttttagtttggtttattttaagctgtaacttatattttattgcctagttgttctttcgatgttttgttagctgattttgtcttctgacgttgttgttattttgattaatgaaccctaggaacagggaaaacagagggaacaacaaaaaaataaaacaaacaaagggacaaccacagtccaactgaaacaaaagaagaaagataactactaactgactaaacaaacaaaccagtaacttacaacaaagagagaatttgggtcagcctatctctgatggcac

SEQ ID NO: 203686 - DNA, 1099 bp, Cannabis indica
atcacatagagtttaaagtgaaagaacatagaagattgaaaaattaaagttgcgtttggttggaggtaatgaaatgaaatagaaagaatcggaatgtgattacaatggaactacattttcaccatcttagcggaatcaaatcattctagtacaagaaattattttcttttcatgcattttaaattaaatttctatttttgttcacattctcatttttgtattttaactcctcacaaccaaacctatcctaatatcttagcatcatctaatccttaaataagtaatcatcaacatatcaacatgagaaattcacaaatttttcctaatatttgtgataatattttatttataatattttcagaaatacccaaaattagaaaaatcataactccatttatattttagtggtgaaaagaactccattattaattttctagttgatgatgttgcctcaagaggcacagcaacgtaaattaatggtattggtgtaagtagttttcagacatactttgaaaatcacatacatcttaattaaaacaatttagccatacgacacctacttgtgatgatgtacaccataacttaagagacatgaaaatggagttaatggcatatggatggtaggtttcagaaaagagacaacttaattatatatttgtggaaaaaccttagtagggaagggatgcatcatgcatgtggtagtgaatgctcttatcttattatccccacatttgactcaatactaatcttcaacttcaacttcaacattaaatcaattcaaagatgactgattttttctgcatttggtcagccttgcaataagcagaagataattcagtgaggttaatattaggaaagtgtttggatgtagctcaccctgaaaaaattgacttgcattaccttattaatgaagtgcattgagtatataccaaagtgaactgtgcaaaccaaagtgagttgtacaattatcatttttatgacataatgtaaaactacacgagttgttgtcagctttagatttcagctgctctctgcagtttttattaagctcaagctaaaggttggccacatgcctcacttcctcatcgcttataatatc

SEQ ID NO: 203687 - DNA, 816 bp, Cannabis indica
gaatggctattccatttcaaaataagtggaaagaccattggatgcaagatgaaaaaaaattaatacttttttcatttatttttttatgtgcatgttaaatttaatttcagtccttttctatttctattctcattccccctacgttcctagttcctttcattactaaccttctcccagattgtccaagcaatttttctagcttcctccatcttcagaagcttcctcttttaggaatgacactattcttgacgcctcccctacttattccattatcatcataatttttcttatgttttgaaataccgccaccaacaactaaaataaattatttctgaattttcttttcagtttaatgtatcttttctttttactacagcttcaaggacttcagccatccacacaacaatgtccacggtgatcactagctcctagcctgagaatctaactgacgctacatgttctaccaaggacgacaaaaagactgttctattgttctatcctaaaactccaacactttctaaatctaactaatatataacttgaaaaatccaacatttggacacataacatgtgaaccacaattattagtcataagggcataatatactttgtgcaaaagtattaaaataaaaaatagagtaaaatttaaatgaaaagccccacaggttgttggtacaggatttatctcctcaaatagctattgggccaactataattggccccaagactttaaggaaccccaaacataagtttaaggagcgagcctagcataacccttgcttagaatattgaggtttcctcaaaaaaaaaaaaaaa

SEQ ID NO: 203688 - DNA, 1890 bp, Cannabis indica
ctgattacggttcaagatttgatgagacaaaaaatagtcatcatcgttggaggggatagttgtggacattgtgtcacataaaataaatggtagagaattgagcaacatgggctactccactcattgccaattggttttgagatggaaccccgtgattcttaagaaggcaacatgattaagcactttatttgtgcataatttgcatcattcagtatggctttaatactagcagcatgatttgcacttcatttgttcttaattgtacagaattattttctcaggttaacgcaccaattgcaagttgattggatgtgatgattttcttttttcattatagagaaagcataatagtattttgaattttaaagttgcatttaattgacctcattgtaatttactgacaatatgataatccatgtttccaatttgggacttatgcaattgtttcatatgataggtcaagttatggtgtgactgccctttttggcctgatgatggaatgtgtcgtctacgggactgtagtgtctgtgaatgcccagaaaatgaatttccagaaacttttaagaaaccctggaccaatgggctttcaccagatgatttagtgtgtcaagaaggaaaaccacaatcgactgtggatcgtactttagatagtagagctttcagagactggatagttgcagataacccatggacaaatgatgacgaaactgataatggtaattccgctatttttgtgtactagtcttagttgctaatctgttctaaaaatcgtgaatactaaaaaagctgccctgcaacaaatagagaggtttagatgaaagaagacaattcatgtttaatttcaaaagttgtagtactgaagagttttcatcaatagatgataggacaataagctaattcctgatccaggagcttgaattcactaatacatacgctaaagattgttgaggttaatggctacagcgtggtgattcattcctggtatgttagtattcccttacggattatatactatagtgtgctatagctatctttatcaaaaggattcaagagattaattgctcactgtttgatctgcaggtgagatgacctatgttaaccttcaactaaaccctgaacgtttcacgggctatactggaccatcagctagaaggatatgggatgcagtatattctgaaaattgcccaagatgtaagttgaaccagttgatatctgcaaaccacttgacagaattggacattttttaattttaacaaagtgaggattgcatagtagttaatgttttcactaatccaagcaagcattaatatatttattttgcataagaatatgcacgaatgtttgtataaaatatatcctgatctctctgcaattattatgccattaattttcctagtaatttttttatttttgctgttgtttgctgtaagcttgtaactcttgttgcataatatttttaaaccagaaattttacatttctaatatgtcaattgagacatagatggtatactttttgaaggaataaaatatgaaaattaaaaatgctggttttgatctagcgtatctttatcctaatgtgatatgtgaatgcacatgctgtgaaatgttgtctgttgttgttggtttaaccattagtgaatatcattcatgggtgggtggatggatgtcgtgtaccatttttatttgataaatacattggagaattcatatttttcttgttcttatttattaactttttggtaatttgactagattcatctggagaaatatgtccggaaaagaaagtactatacaattaatatctggtcttcatacttcaataacaatccacatagcttctgattatcttttggatgaaactaccaatcaggttctcctgctgcctcatat

SEQ ID NO: 203689 - DNA, 966 bp, Cannabis indica
gttgtcccattaacatttttttttattgagttttcaaaatacatagaacaagttttctccttacaaataggacatgatttgtacactatattctgatgatttctgaaagctagaaaatcattaatagtctacagtaatatggacttaagattgaattctcctttcctaaaggcatcgtatgcaggaacaccatcattcaacaattgactcaagtcatcaactagaggagctaaacaaacatcaatgtcattaccaggctgtgaagggcctgatatttacagtgtaagcatagtaaactttctcttcattaccaatcaaggcttcaagttatacatcacaagcaaaactagccagaaactatacttactactaagggcggtatgtggattgatttcgtctgcaaaaagaccaggatggatattcctagattcattgcaaaatttaggccacctagcatcaattgatttctaagcaggttagtcagctggatgtctcatcttaccacctaattttctatcactagcatgctagatcaaatttttagcatgattgacattttgaaagaaccaaactaaacgaggtattgggagtaagtattaataatacctttgcaagaacaccaacctttacctcgtcaatttttttttctattgccacctagactcaccacatgtgggagacgatattgtatccacaaacatgtgacgatataggatgcaatcgttaagatatgcatgtactttttcatattgcatgcctaaggaagaaagtgtcttttttgccttgtaaaaagatgaaggtaccacattaccttttggtaaataactctactagaaaaactagtaaatctgttaaagtcttttcactccacccgtgcttgtcttttatattgtataatctaataagcgtcaataatttagtaaacctatgacaattatagtaaataggcttctcgacatcctctac

SEQ ID NO: 203690 - DNA, 1773 bp, Cannabis indica
acaactaaactttcatatattgacttagaagacaaagccatgtgaacttcaaatgcttatgttttcttgcaaatttggcaaaccttatcaaatgtcttcagaaccacttatttagaagcctaaaatatgtatgcatttcaacactccattcatgtatataaaggtacttaaccacacaactcaatcatcaagttctcacattctctactaccaaatattttgtgaaatctaagaaaaacacacaaagaaagatcaacatggcatttggattaactagctttgttcaaggtaagaaggctctccgaagatcactttcaggcattaaagaagcaactttgaagtgttcaagcattccaaaaggctactttgcagtctatgttggagaagatcagaagaagcgtcatgtagtacctctttcgtacctgaatgagccttcatttcaagacttgcttagtatggctgaacaagaattcggatatgaccatccaatgggtggactcacaattccttgcagtgaagacatcttcattgatatcacatctcagttgaactgatgatgtaatttgtagtactgacatagctagattcacacaaaacaattttgtagattacatacttttaccctttttcttagaaaaaagaaagggaattttttgactagttgtgaaacttgttcatatttcatctgaattccattttccttgctgctatctcattttccaatcaatgtcactttttgccaacttcaaagctcattagcctatatttgagaagaattatctaaaacaataacattacttaatcaaaaacatcactattaacatttcttatacatatacatttataactgagattataagtgcttccaaaatgaagaaaaagtgataatcactttagagttaaattttcattgcaggtacttaactgatatgagaaaaagtgacatataataagccttaaaagaacatacaattacatctaaaactttataaacattaatattagatactaatccccttctttctgcagacttttttggttgtggaatgatattatgagttagaggttttctttcagagatgttaaatttttcggagcatctctttcctatgttcacatatggattggtttagcatgctctcaggatagacgatgagttttgatgtatggaagaaattaattaatactctaatctaatagactaatgagatatggtgtcgaaaatgagcttggaagaaatttatattaaagatgttataatgaatttggttcacattaaatttggtaaatgagaaacctttgatctgtttcaactaaaataagtatttaaagtgccaaattcacagttttgcagtactattttgctgatcaacaaaaaacagcaataaggataaggattctagattttaatatgaagagattaaatcttagttagaattggtaaccagcttggtatgtataaagagacaaggatttcagatcttaatataaagagattaaatcataaataaaacaattcattgaagaaaaagtttagtagtaattcatttgtatcattctcagagaacattttcatttcagtccccaagataaaaatatttacatggtgttggcatctttgccatacaaaattgtaacaattaatcatttttgttagcagttagcatcaatctatactcatcatcagacatttaagctagaaacaagattgataaaagcatcttcagtgcagggaattgttagagctcccattggatgatcaaatccgaattc

SEQ ID NO: 203691 - DNA, 1546 bp, Cannabis indica
acaacagtcagtgacttaaccatctaaaccatatcatatctgacaattgtaaatgtaccaaaattttggttccacacagacagaacaatcaactaaattcgccaggcataaaatgcagtcaacgagaaaaacacacacacaaacgaaaagcataaaagactaaacgaataaagattaaaagatctcaatatatacacaccttcttgctagtttcttgaagctctccagcaagaatgaactcatcaagtatgagatataccttcacattcacaggacaacaattaccattagatatattcatctacacattgaagttttagatgccatattttccagaacgagcacatgcactatcaaaacaacattcaatcatggaaacaaggaactaaccttgtgaaagttaaaaaccaaatcgagctcacaaacgttgctaaagaaatgatccaaaatctccacaaacaaatgaatgcactccagatatgctaattcattatctgtaatatcaacacacaacgagaaaaataatccagcataacgcctgtagattaccttgtgtgtacgaaactgcaagaattaagtctcatgagatattatcattcacaacccttaaaccaatcttcctaaaaccacttagttcaattatttaattatggggtttcaaaccctaaagccatcaatctaattatggatcgaaatgcgaaatcaaacgaaatatattaggggaaataaagagagaacccatcacctcaacgaagtttgtgaatttgggatctctgttgaccaccaaacgatgaacctaagcaagaaagaaagaaatcaaaatccaactcaaaatcattgtgtttctcaacaagaatcgtgtatgaacaagaatcgcatacctcatattcaaccttgtgtttctcagaatcctcgaggggaacgtagtactttgcaagacgagtcttgccttggcgattctgtaagagaatgaatcggatctgcaacatcgcatatcaatcaaacacaaatgattcaatcaccacaaaattgcatattatatgaaatagaaatatgagaatgataccatcgttttacaaattgaagagaagaagagtagaagcgattaagaaaggaaagagaagagtgggtttgaagtgagtggttatggtaataggccgatttccacttccatcaatctgtaattcgattcgatgtttctttggttatttctcctttacttattttgcttccattctgccatggtcaccatggacactactctgaccaagaaaagtcagctacataatttattttctcattattcatgtcacacccaagatttcataaaaattgaaattgtaaaaaaagtgaaatatattaaaactctttaactatattttttgagaattgataaaagataggttaattaatatttttacccccgaactttgacatgtattaaattatgctctgaatttttaaagttattaaaaatgctctcagaactattcagattgttgaatttaaatatttttgtttgatctaacatggatgaaagttaggg

SEQ ID NO: 203692 - DNA, 1282 bp, Cannabis indica
cgtgtcgtgcttaattacatactttccatgcggtgttgtgccaatttatagtattgtattgtgttgtacccaagtccatatttttcatgcctaattgtgcccgtgccttccgggcttgtaatgtgtcgaaagttctacccttatttacaacactaatctaaaatactaaccaactctggacgtccaaccatttgaattttattgacctttataaatgtctcccttttgaaaaaatatagtctaagcatccatgtccatggtgtccattttatattcctttcgacctcattaatctcttcttgttctcaatacactaaaatttgctttttgtcgtcactttatggatgttgtgttggaatgcatgcctttttattttcaatactttttgcttttaaatcagtcttagtgcaaatagctcaaacctttttacttagacatgaataagacctgacacgaacatgttagaggcatcaaaatcagaatcattgacgaagtatcccgagcattttctttgtatccataaaaaacgtggaatcaagtacttttggaatagaaacagatcaacctggagaccgaaactgggacctagcgaccaggttgacatattgtcaacctggcccatttccaacaatagttcagatgaaaatcttttgagcatattctccgttctcgtcaacaattaacattttggtgctttcgggaaacaaaaggagccatctaggaaccagaactgggacccaacgcccatgttgatctggtgcttagtctagtgcccaggttgacatattgtcaacttgagccatttctaaacattctcccgagaagtcttccaggcatattctctgttttcaccaataattgagatactagtgtttctaggaatcaaacgtaagcatatgatgggaaatattggaaccaagcgccaaggttaacattttgtgaaactgagccagttccaagtgttttcatcgaaagtgttccgagcatgttttttgttttaaaaaataacgaaaatacaagagatctcggggggcaaacaagattctttgagagccaaaatagggccccaccaccttggttgacatgggcactaggccctgcacccaagttgacatgcaacttggttcgcatgttttcggtcctcaaatacaaattctactatgggcattcttcttattttggtaaaaaatggggtaggagacctcatttgcaatctcaaatgccatataagtatcaaaacaagccccgagaaaccccccaaagagcacccagtgcctaggtt

SEQ ID NO: 203693 - DNA, 1156 bp, Cannabis indica
ttttcctgtctaggaatataagaaactctaacattcaccaaggacttacacagatcaagacagtagttaaacaaagcataggtattccaaccgaaaggaagctctctagcctcaaaagccaaagctgccgatttggagtcagtctcaatccacacctttggaaagttccttgagatagccaattgcagggcgcaagcgatacctaataactcagcttcaaagaccccctcaaccgaagcaaagtcaactgagactaacgaatccgagggcatcacttgctggagcacagccgcaaaaccagcctctttatcaaccactgaagcatccacttgaacacgacagaactcattgatgtcgaggggttgctgcatagttgggacagtgtccataaactccacctgatcttgccaaagcttcttatgcgaaaattctgttgttcttcggatgctgtctttgaaaaccatctccacattacattgactctcgttgaaaactatgtcatttctccatttccagatcatctcacacgcacaggccacaaacaattgaaattcggtgtcctaaagattgcaccaccaagaaccaaactccaggatattgttccattgaaacgagtcaagtctgataccttttcgaaaccacagacccctggtgaaagggcattgacagaaaagatacagagatgattcattcattgaattgcagaagcgacacaaaggattagaaacctggataaaacttgttctgcttgttgtgggaagaatatccgaaaataatctccaacaaaaagcttcaagcgagggtggatatcagtcttccaaagtttcatccaaatttttgattcatcctttagacgatgtttttggctgttccagtacgcacttttcactgaaaaatttcctgatttggaagcatttccaaaatagtatgtccgggccttcttgtaacggtttgatcttcagatctcattagcaatctcatcttcgaagcaatctctgatgaggtttttcattccacgatcgggttcctttggagacaaatctctgactttccatgagcctggttacgaacaaattgaagtgtccttgatatctgcaggattcgcctcggatccaggcctatcccataattcgcactctccttcagcattaaaact

SEQ ID NO: 203694 - DNA, 947 bp, Cannabis indica
tttgtggtgctccacttggattcttttcctgtcttgggatgactacatagctaccttcaatccaagagtccatgatcttcaaaaagttcttcttagctctccttttgattctcgagggttatgtactagaagatcattggctgataatcattagtaggtggactctgttagatgttcagtcggtttaaaaacctagtagtcttcacatttatttgatgtttgactattagtgacttaatttattaaaattaaaaaatagagaactttattaaatatgtgattaaaaaaaaaaaagaaaatacttttcccactatttttgtaaggaatgtcctagggtaatagtttttatttaattttaatattaaatatacaatgccaattttattctttaaaatatgtcttacaaaataattatcatatattatagtttaactgtaaaaaacaatttaatcaatttaagcattatacttattcttcataaagtaaataaaataatcattattattttattttcaaataattatgataaataacatattacaaatattaatttcgattattttttatttatttaattatgtttattcattaatttattctgactctaaatactttataatataattgccataagctcatcacttgaaaaattaatccttttgagatttcttctgaaaagaaaaaaatatctgcccttttgtcttcaacttaatgcttcaagatttctttataaatattctaaatttttaataaaaatatatcttccataaataccaataaacttatatgtttattttatatgttacagtgatgagagattttgcattagagacagcaatttaaaaatagtttatttaagctctcagaaaaaaaaaattagaaaaaatagaaataacaaattatgtcagtgcaaatttaaaaatttaaattcttacaaaaaatttaat

SEQ ID NO: 203695 - DNA, 1143 bp, Cannabis indica
agatataaaataggacatacatcaccatgctgtaggtatcttagggattaggtgaaagtaatctttatccttccttgattgatgtgattcttcataatggagctgtcactagacttgttgattatcgtgtaatcgccgtaaaagaggcttgcgccatctgtcaaatccttttatggggattctgatacgtttcccccatgccccattaaatgtgaaatgactgttcgaatgggcccttcttctctcagagatgcgttgttatatttctagctcccagagagtcaaggcatgctttatgctcctctctgggggctcactccctgagatacactttcctacccatacgtgacttagccaatttttgtgggtgaggtgttcttgaaatccacttgtcccacacagtggctgccacgtattttggaaaaaaattgaggcaacatttacccccaagtctcatttagtaaatggtaaatgaggcttgtacgcggcctctggtctctttataaatacagtggcacgtgccccaggcgcgtgggttgcatttatgaccgtcatcattgatatttatttctttttgtaggcaacaattcgcttctcgcctattgataggcctgcgcatttaatgctggtgttagagaggtgcttgaacgttttaaccatcctttctcttcgtttcacccattcaccccatccgttggatcatagaatgcgaattgatacaaattcccaccgtatgatggtgcctggtcacagatgccttgcaccctctctggcctataaaagccaacactttctctttgttgggttactttcaccactctcccctttcgaccgagataacacatttgaaaaaatttcagaaatcatcaacttcttactgctattcctctgtcgtagccagtccaagttttatcgtcagacgacatcaacttctcgcccatcaccattgtgtaagtttctgggtacactttattttattgttcatctgcatgttaaggtaaaacttagaacaacgtcttcgttttaattgaaatcgatttcttcgataagacggtcatggcgaagaccgttgtatgccgtagttttttatgtgcctattgtcgttttccttttggggttagaaaacgatttctttacttaggg

SEQ ID NO: 203696 - DNA, 1127 bp, Cannabis indica
atttgccaaagaagttgttactagctgtgtggattttgatgatgctggttgcatagatacaaggaggtcactcacaggctttgtgtttactgtgcttggtagttgtgtaagttgaaaatcgacactgcaaaaggttgtagctttatcttcaacagaagcagaatatatggctgccactgaagcaattaaagaggcactatggttgaagggattcactagtgaactcgagctcaaccctgatgacataacaatgcactgtgacaatcaaagtgaacttcatctcatgaaaaatcccacacatcatgagaggtctaaacacataaacataaagctgcatttcatcagagacataatcactagcaaccaggttcatgtcaagaaaattagtacaaccacaaccatgctgacatgcttactaagtgtgtcactttgttcaagtttaggcattgcctaaccttgctcaatattgaagaatcttaaacttctcaaacttcagttcacttgtgtctcaattaaggtggaaattgttataattaagacacatgtgaacagttagtttgccacatcattaccaactgtcctaaccaactaattcggttaccctctaatctgtcacaactaactactataaataggtaacttgctgacttgtaaggtcaggacttggattaatattttaatatagctaagagagtgcttgagaaactaaaaaccagagattgtgagagtgtttatggagggatgttaaagggagtgtccattcatgaaatggcttccctcatgtgaggattttatgtagtttattttgcattgtaactgaatttcatctctctagttctctctctctcccattgattgtaatgaaagctatttcaacaataaagattcttcttgttcatgctcataattcagttcaaaagtttcttagtgaattggatttcttactgctttaatttggttcattgttcttaatcattttgatctttattttgctctgttattgtgtgttgactgttgctacagcagtgttcttgcacaacacaaggaaatgtgaagtttggatccgaatctaaagatcacacaagcagccatgatagttatatataagtgtgtgaatcaattgtcat

SEQ ID NO: 203697 - DNA, 1543 bp, Cannabis indica
agtaaatggtgtggggatggtgtgtttgggtggtgcaatttggatggtttgtataagagaaaaataagataaagagttataagttgcagcactaaaaagtggacccagacctaccacccagccatacactgctttcacttctttaattgcttcattaattcattcattcattcattataatcattgttttttaacttcaattccacacaagaagaacaacataaaacgaaagtaattagttaatctactagtattctaataacccatatgcatgcaaatgaataattatttgcatggtgatgcatatatatatatatatatataataacagaattaattcataactattgcatggtgatgcattattctaatcaaaatggatcctcatgatcattatgtttgatgatgcatatatcttatttcttaaatagaattttaaaacaatatattgtactataaataagatttcaataaacaaaatgggtggattattctagaagggagggaggtcagcgtagtgtttgatgactcagattcattttttaactctgattttctcttctaccaaacagtattttcctttcctacatatatcttattcttagctaccaaacataaccttagagagaaatacatacatatgacctgcactagatgaatgctatggtctggtgtaggcaaatagaggaggggcccaccaaagcaatggtcaccaccactgtgaaactcaatcaataaaattattgggttcttctgggccctttgtcccaaggcatatgctaactcttgtcagcttcttacccgaatattcagcccttacttatgtcacaacatcatcaacatttttccattgcacctccattccaagggccattgagatgagagctttagataaatcaacattaataggatgaatatacaaaaagaatacgagctccccatctaactaaatgcaaaaccaacatgtcgttttatttttattttaaattaactacttattagtaagtttcatgtatatataagataagacttcagtaaggatatttatatttttggcatttcaataaattataaatcaaatttatatatatatatatggaaaatagtttatattatagttatagtaggcatcttatctgagtttaaaaaattataaattatttacgatattgaaaacagagttcaaaaattcacatgcaaacaacgaaatatttgaatcttgttttctaacactataaaagcatgtttggcattattttttattttcacaattgtgttttcagaaatgagaacaaaaattaatttttgaagctttctaaacacaacacctgtttggttaatgtttctaaaatcgattttcaatttttttgattttttcagcaaagacactttaataatttgagactcaaatatgaacctgaatccaatttgaccccaattattgactttgacccaaaccctagtcctaaccctagttttgtaaccctagacccaaccttggatctcagactcagccttgaagccgaacccgaactcgacctcg

SEQ ID NO: 203698 - DNA, 1626 bp, Cannabis indica
aagaattggttgataaacacaagtataattacatactcagcgtatgttggtatattgaattacattttgcataatattatattaaattaaattatatatcatattttacttttctctctctggaactctctagtaggtatgcgatacagtgattctcgtttgcttctggtcccgttcatggtggttgtcgtccaccctaacaggtatagtggtggtttgtattccctttctttctatctttcttcacttagaagcattttttcgtatctttgtattaatgagagcatttattactctgagtattactatcattaccaactatcccatctcatttatgaatgcacaattatctattcattttcctcttccatttctttgttcttcgtctatcatgctccccatttattatcctctgtgccattacttctgatttttcaacctctccaacatcattacacccttggagattgtaaaatggaggcggatatttggttttctgaggttaatagggctattttcatcattgttgctactccggtggaggctagggatgtgacctctgaattttcgagaaggcagatcaggggactctggtttttcctttatatagtgcgattgaggtattttttctctcatcccttcctttgctttctttctatttctgtgtgtgtttgctttgctgctgtattcaaaatggatgattttctcaacagtgtttcgaatgctttagttttcccttctgatgaaaataccatcttcacttatgatgctaatccctcttcttcctcctctgtcgttatcagcctactccttaaactccatactatccgaccttataatcgaccctctcttatgaaaaccctttctggaatttggtcatcacagtgtcgtttccctgtgaatgttactgaacatgcagatggtttatttctagtcacttttggttgtgagggagacaagggtagaattttggagggacagccatggcatttttcccaaagtgtcactgtctttgctgcacctgacagctcttttcctctcactcctgagaaccttcattatgtacccttttgggttcaagtttatggcataccttttatgtgtaagtcatatgacttagcccgttttattgcttctgaagtaggggacctcatagaggttgatagagatactgttaaggagggcacggggccttatttgaggatgaggattctgttggatgtgaaccttccaattcgtagaggtatgaatattaggttcattcgtatgggtagagagtttattaagtggattgattttaagtatgagaggcttccggacttctgttttttctgtggcaaacttgatcatactaagagatattgtcacttctatctccaaaagtgtgatgaaacacaatctgatcccccttgtccatataatattctgttaagagggaaggagaaaattgtggacaagtctatgcctttccagtaccctcatcctcctgctatgaccatcatggattatgctccaatcaatcttaatcaacctactcgaatttttttgggtgaggctatcaacttccttcttttttgctcctgcttctgggtctcaactgttaaatttccatcctcttccaatgtt

SEQ ID NO: 203699 - DNA, 1087 bp, Cannabis indica
tatcaatctaggaaaaaccagttatttttaaaatctaagcatgaatcaaagacattcagcattaatcttcacatatctttgaagcggaatatttaccttgcacttttttgcaagtatacacagccatactgtaccgttcatccacaatcaacctgtcacggagacgggcagacgactctttatcagcgatatcatctaacggacacagcaattccagagcctagaagactttgaagtagctctgaacgtcctagccaaatgtctgcctgtgataaaacttctgatagctcatctgttgattgactgcccatggtagaactacccgcatctgaagatgcatcatcagtatccctgtttctttcagaattacttgacaaatcactaactcccactgtctttctcaacaaggatttagcatattgaagaccctgaaaatgtcatgaaaagtatttcaatctgaattacaaaaagaaattacattgaaaacactagaacatttgatataaatgaaaaaagtaagtccttgcaataaaagaagaagtgattccttttcttgactgtgccatgatttcaattagcaacatacaccatcatacaaccctgtgattcgagaaaggaatacctgtacaaatatctcagtggcatagtaagcacgaccaataacttccattgatgcattctcgggcaattgccgagagcttaacacattcttcatctgattgacacacaagtccattgcattcttcgctgacacactatcatcagaacacaaagaaagaagggcctagaaggaaaaaagaaaaaaaactcagaagacttactagtttagagtattgtggatacatatagcaaaacaaaaatatgcaagaaaattgtttttctctactgatatacaaattttttctctgctgcaggatccgcgttaaaatttaatttccataagatggatattttatgtgttttttcagagacaaaaacaaacacagcaacaataaactccaactactaacaaaatcagaaaagagaaaactaaacacccttaaattccttcgtatctaaaaatcattcatagtatatttaatatgct

SEQ ID NO: 203700 - DNA, 1292 bp, Cannabis indica
cactaagcaagcaccaagcttcagcagattgacaacaatactgcaaaacgtattgaccccttggttacccaaggtaacgcgaaagacatctttcacatgccaccacctagtcagcaagtgaggatagtaagtcaagcatctggaaggatgttgcaagctctcaataatcatgggttctaggagcatgggggtaaatgttatctgaattccctaatgcctaatactggcaattacggaaggtgccacgtcagagcatgcacaattaacatgtaccttctgcccttctgcatcacgaaagatgttatattccatgagttacccgaggcttttcccaattagtaaggacagaaaagattctggggcacccgctattaatcgttattaaggaggatcagaagctatgagtattccaggagggtagcaggttagtctaatccgggaagactatagctagatggtcctggaacttatttggttatagcttacccgaagctcagggcaacgattacatatctttgacaccaaatcacatcttgtcccctgcatcagaccttggtagtgcgcccacgtgcctgtaaagttcctttttgtccacggcttgtctagacaacaactttgcaatgtgaaaactttaggtgaaacatgtcattagtcccacaaaaagccttggagcaaccgtacactacacgatgggaaggcttcctacctaccaatggtcatatcgacatgttgtagtaccagccattgtaacatgttgagtacgaaaccctatgtgggtggatggtatatataaatacccctattgttcatgtgcaaagggtgaacaaattgatacttacaaaatctttacaaaaattcctactagctttcttctttgagagagaaacaacatgaatacagagttaatatttatcctataaatatttgtatattcaaacactcgtcgacctcgtggattagggattattaacgcctgaactaggtaaaaattacttgtctattatttatcgttttatatctttcttaagctctaattagttatttttcaaaaatctcggtaaacaccatgaaaaataatgtaatagtataagaagataaattttcaaaactaagtaaaacaaattataatataaaaatatatttgaggagttgattgttttgcatattgcaatcaggtcattgttttgttatttttcgttgctttatatttatcttttgttgttttataagtatttttatgttgtttggtaagttgtttgagagttgtctttttaaatatagtatttttgtaa

SEQ ID NO: 203701 - DNA, 788 bp, Cannabis indica
cacttgcattcaaggacaaacggggcgtacatctaactcaaggggccttctctcctcattttctttaaacaaacatatatatagagaatgtatagtaaatatatatatggtatttccattaactaaaactaatatattatgtatggcataaatatcattaactaaaagattaaaaatgtggaacaatcctatgatatggcattttataatttgttagcaattcgttttaatttttattaaattaaaataaatagaaccccaattgttaacagaatataagtcttgtcttttgacatggttatctactctctcttagggtgtttttgtttattgttattttgttgaaaaagttcttttttgtcgtgtttggtagtttttttggagtctctattatggcctccagcagtcgtaatggcaaggtggaggaagatgacggatctaatatatggctagatgaagaattggatgctgttctggattatgatacaagggatcaaactgagaaagattatgatgatcgatggtgccttgttggaaggtttttgacagagagagtcgtagattttgatgctatgcaacaccttatgacttcgttgtggcaacttggaaaaggcatgtttgtgaaggaattggagacaaatcgattcttatttcaattttatcatgaaattgatattcaaagtgtcattgatcgtaatccgtggactttcaatagatgtttactggttttttcaagactgaaacagggggagaatcccaagctggtggagttgaatgaagtggatttt

SEQ ID NO: 203702 - DNA, 1241 bp, Cannabis indica
cttaggtaattcatgtgatgactccttctacttcttcttcaagtatataatttgatgatgacaacttcttacaaaaaatttatttatttcttttgtgactccggtgatgattcttccatcttcttcttcaaagtaatctattaattttgaactaaatccatgaataaacaacacaaaaaaattaatataaataactacacataataataaattaaaaaaaaataattttacaaacagaataaataagaattaaaaatatataattgtatacttaccgcggtggttttccgggatacaaagatcctacaacagaatgaatgataataattccatcatggccaaagattttaatttccttacaaccttttaactcgtcctctattaaagaatgacgatagtaattgaattgaattttttttttacgtagtgatgacgatgatgatgatgacgatagtgtctttgttgtaaaaattgtaggattaaacatgaaagttttttcacatcgagaagatatcggtattgttctcacatgaaattgtaacaccgtcatataatttggaaaacaatccataatgagcttactataaggtacatctatataaaaatgtgggtatatagttccaagtttttgaatatttttaaaattttcatacttgaaattattaacattattgtaaacatcatgaatatcatgttggttgccgttcacaatagtaagcatcacagtaatatgttcatatttattccttaaatgattagatattcgaatcattcttccttctttcattgtcgtccttctccttcctctctcactctctgtgtacataaatatatatataatcaatacagtatcttagaaaaataaataataataataataataatcgatttttaacacacataaataacccgaatgaaataaaacattatatatatagtggttgataaatttttcattcattattaatcatacgtaccttataagattattgaggatgggatgatcacaaatatgagagcaaaactaatataattaatgatgatagaaatacaatgtatttatttatagaaaattattatttaaaaaagatatttatcacactcttcggctaattagttgggtaagtcggcttttggttggattgatttgattgataaaacgttatgcggttttagactttagtggttgttagtatatatttgaagaaaataacacaaaatggattattattattattatt

SEQ ID NO: 203703 - DNA, 784 bp, Cannabis indica
atgactcaacattaaatggaaccttgaagccgtaatgggtgcaggttgacatatagtcaatctgggtacaccattgcaagggtttagatttttggggacatacttagaccccagttcctcaaacctaaaaggaaaaattcaaggacatgatattttatgaaaaacatcccgaatgagcccatctacaactatgggtgctcaggttgacattttaacctgggtaccaaatttgtttcaccaagttcttgttaaggtttatgccctaaagagcctataaagatatttctgattattaaataggagttgaacattttgatgtatgcacgaatgttaaattattaatattaattattgaataatttatatatattagaaaattccatattcagatatgagattttgacttgcagctctatagagaactaagatcacttagctatgaatgaaaaagtcagcaacctattaaagtttgggaatttttaatcaatggttgcagtacggttcactgatgcccgttcttcgatgcaagtaatattagtttacattactgatgtagtatgacgtctaagttaatgggttgcatataatatagattatatatcacaaggactgataggaataaagtggtattgatcaagcttaccatttattataaatacctaatttagatcataatgttgatcaatagtagattagcctaaatcctaagtaaccatgaactactgtgttaattctagaactagaaagtagtgcgcaaatttagatgggatcgaaagtatacttc

SEQ ID NO: 203704 - DNA, 741 bp, Cannabis indica
tgggctgggctgggctgggcttatctttaaattgggctgggtctgaaaagggcagtatggtactttcagtagtgaaatgttacgtaaaatgacggtggtattgctatatatataatagtctcacatgtctagttctgttcgtctctttctttcatattcatttgtttttaattttctagaagtttccctcgtcgccaccacaactctctccggtaaaccctttcttcttctttttccgatttttaaattcaccactcatatttccaatttgtaaacccaacaaaatattccctttaattttcgatgatcacccataactttgattacataaaatattgaaattgttatgaatttcagaacatagtacacggttaattcatgatgtctcactttgattttttcttgatgcttgttggtaatttgcgtaagatgatgtgatttggcttgattagtctttggtaataatctctgtagattatacctaaaatctctcgttgcatggttctggcacaaataaaaaggtggactttttttaaaggggaaatcttataggaaaaggaattgattgaacgattatgtttcatattttatgattttttgggctggaatgatcacaattcctcagttttagacagactaattaaagaatgttcttgatttttttactgtttttttattttagtaacttattgtcgaaatagattgatttagtttcgaaaatgtacacttacatacatggtg

SEQ ID NO: 203705 - DNA, 881 bp, Cannabis indica
cgaaatttggaatgcaaggaatgatgtacttggaacgagaggtaaagagcagctaatgagtttacggaagcaagatcttatcttaaccaatggttgtgtgctcaaaagaatagaatggaacctgttcttggttaaatgaccaggatgggatattgagcattggacgaaacctgatatggatacggttaaggttaatgttgacggagctatatttgcagcaaataactcttttggttttggtttcattgctagaggctatgatgggagaattattgaagctgtatcaagcagcagtgttggtaatgtttcccctgaaattgcagaagcatatggaatcaaggaagcccttagctggataaagggtaaagattggcatagagtcttgatcgaaaccgattgcttagttgccttacaaggcattgctagcaatattcaactaccttcagcttttggtagtattgtttgggattgtaagcaactcatcttggagttgggtaatgtctctttaaagtttgtaaagcgttctgctaacaaggccgcgcattatcttgcgcgtagtgcttgttataatccagttcgcattttttctcataatagctcacctctagagctgttaaacattgtaatggcagatttaatttaataaagtggccatatttccattcaaaaaaaaaaaaaaaaaaaaaaaaattaactataaagatcatagttggagacaacaaaattttttttatctatttctttaattaatagtaatttcagcacatgaactttcaaaaaatgtgttacccacttacaattacattcttaattcaaattaataactcgattaatgtattactcatggtttgtcatttctaaatgagtaatttgcggcaaaa

SEQ ID NO: 203706 - DNA, 1629 bp, Cannabis indica
gtgaaactagatcaatgagaatcatttacctaaaatgataatatataataagtaagaatatatttcctctttcgatttatctttaaatgatattgtatattttatgagttttgaatcttgttattgacattgtgctttgacccaatttcggtgctttcctatctaactcaattaattaagggttacagcaaagcatggcaattgccacgtgaagaaaatactgtgtccacataacatatatataacccattcatgcatattcactattgcaccacaaacttttgttttttatttgtaaaaataaattaatattttcaaatagcctaccttataaatcctactacaatattattattaatagcctatataccttcatcaattaaattttaatcatcatagaaatgagaggaaaccactttgttctggttcatggggcttgccatggtgcatggtgctggtacaagctcatgaaccagctcaaagtggatgcagagattgaaaaccgctctgtccacgtgacggcgttggaccttggagcctcggggatcgatcctaaggtgctcgaagaggtacccaatgttgatgattatgttgaaccactgatggagttcatggcttcactccctgaggaccaaagagtgattcttgtggggcatagctatgctggtctttgcatatctttggctatgcaaaaattcccacataagatttcatttgcagttttcttgactgcttacatgcccaatttcaactcatctcctgcacttctcatccaagaagtaagcatttttttttaaaaaaaatatgtatatatgtcgtgattaacttgtcatctccttatattttttattttatttaattatacatatacgagttgatgattttgtaaatccgtctgtgttgtgtcggtccaacctaaattatattgtgctttttaaaatatgaattgcacgtgtcataaaaaattatagatcgtgtcgtactaatattttaaagggtacgtctggcacggcccgtaagcctggtgtttttgtgccgtactcaaatttttatttgtgttaggccgtttttcttaaatgggccagaccattttcatatttaggctcaaatttatactgtacttctcacatttatttttacaattctaatgagtcaattactaaaatatatgtatatttaaaactttaattatattctgctggtgtgggtgtttggcgtggcctttggacttcaatggctggttgtgttggttatcaagtaaaagtataatcattcttgtagttgctgtccctgtttatatggtttggaagaatagaaatcattgtgtttataatgatagttattatactaagaaaattaaagacatagttcattacaggttgtatagcatgaggaatatgaaagttttgcttgctgaaaaaggcttgtttttgcgccttcttcagtatcagcttgggttcttttggctggctattggttggttgctgctgagttgttttgggggctatttgtagtggtcctttatttttttttttatttggttttgattaatgaagtttctactttaaaaaaaaaaaaaaaaaactttaattatatttatatatatataatttttaactaatatttact

SEQ ID NO: 203707 - DNA, 1068 bp, Cannabis indica
atatatatatacatacataatcaaccgcaccaagctacaagggttttcttctctactcacagttgggtttctaaagatccttatcttcttcttcttaggggttctagcttttcaatctttcttctcacagttgggtttcaaatataaagatccttttcttcttcctaggttttcaaaaactttcttacgatctgatcatacacggttagggtttcagttatcttctcaacctatagaaagagacaatgaagcctctaaccctagttaaaagaattcaaaacattaatgcgaaagagattagtttaaagatttctgaagaggcctcatggcacgccaactacaaagattccgcctatgtcttcgtcggaaacattcccttcgatcttaccgaaggcgatcttcttgccgtctttgctcagtaagtactactgttgctgtcttttcattttgttttcaaatttttgtattttattaatagatttttgttgtacaggtatggagaaattgtggacgtaaatcttgttagagacaagagtagtggaaaatcaaaagggtttggttttgttgcttacgagaatcaaagaagtacaaatcttgctgtaggttcgttatttgttttttttttttgaaaatttgtatgcattttgtgtgttctttgtttgtttgtggtgtctaataatggttttgaattttcagataatttaaatggagcaaagattttaggtcgaactattagggttgatcatgttactaagtacaaaaagaaagaagaagagactcatgagcaaaagaagagcaaatttaaaagactataattaagattgatatatgcaaatgactataacaacagattctcaatagaattattctctattaagcatttatatatatttctttagagaatatcataatgagattcaagatctttaattatattaattaggctaaaaaccagaccatgaatataaatgacaaatacattcaaattgaaataagactaacaatatgatctttaattatatataaggctgttcgaagcaacccaataaaccgaaggtttatgatagg

SEQ ID NO: 203708 - DNA, 1163 bp, Cannabis indica
aaataatataaaaaattattaaacactcctaatgtctcccatgagtatggtgttagacacaggcagtctaatagcattggtcatataataatgaatatgtttggtcacttcatgcacgtagatgccctcaaaaatctgacatagaaagcttaatttttgaagacattattttaagggcatctctataatttagtactgcttatatacacattcaagtaaatctgtaaaaaagtcattctaataatgattcggactactgtacaatattcggtcagtgtgttcgtatttatatgtctgaatcagaattcatatgtataagtactgtgtgcaattttatttatatgcggttagattaattattttgaggtctattgacagtgataaaataattacgatttcaactttgaggttaatacatataaataagtatatagtttatttatcgtataaatatgtgttaacatttggaatgagaggtgctaacacgaacgaagtttcattttaaaattaatttgtaatgaaaaaagtagcctgaagtgttattttaaaattaatttgcaatgaaaagaggagtccattcatcctatatatggtattttatttttataaattagtaatgtgagactaatttaaagtataggtataacgaacaacttttattttcaaaaaaaaaaaacaacttttaagagactacaggcagaacgtgacatttgaaagaatcgcacaagactagtttatttatagtataaatatctgttacaatttggaataaaaggtgctaagatgaatgaagtttcattttaaaattaatttgtagtgaaaagagtagcctggagtttcattttaaaattaatttacaataataaaaggagttcattcatcttatatatatatggtattttatttttataaattagtataatgtgagactaactcaaagtatacgtataatgaacaacttttaagagaccaaagaacaaaacgtgacatttgaaagaatcacacaaggcataatcgagaaatttagagattttaaacaagttaaaagatcccaacactgaaaactgacacacattgaccgaaaagtttggaaaaagatattaagagacacagcagaagttttcactttggctcctctttgtagactagcagcactttagatt

SEQ ID NO: 203709 - DNA, 1841 bp, Cannabis indica
atttaccttattggtaggtgaattattagtacacacttaaatcacgttctcattaaaaaaaaaaaaaaagaatcacgttggataattaatggtaggtgtgagttcaattatttgtgaactataagacattttatcatttattttatgcatagtaaatgacacgttttcctttttctttttcgaaattcatagtaaatagtgacacgtttaataaattaatgagtactatattgtagttttataaataaagaatattaaaataggtagagcaacagatataatataatagtttattggggtagatgatccatgcacttggacaaaacttaatatattatccatcttaataataaaaatgtgtatgttagagatttattacaagaatagaaatcaagaacaactaattataatatagcaatacaaagacaaatattaattaaataaatacaacacatttttataacatgtatgtagggccgtctcaagcttgtacaaagtttaagtgaaacttagaatacggctttaggtgaaaattaaattaaatatttttgataaaattattaattttatcaagatttattaaaatttttattttcagataaactacttttaaattcttacttttcaagatttttattttttatattaaatttatattattcttcacatatttattaataatcatcacactatgattaatctttttctcttcatgaatataaactttaattcatttttaaaaaaatttcataaaaaataaataaagcataaaaatgatcataattaataaaataagtataattatataaaaatattataatattatttatatttgttttatatataaaaatttttattaaaaaaatcatcaattattaatatattagctcaaattttcgtttaacaataaataaggtaccccaaaaaaaaaaaaaaaatatataaaaaaaaaaaatatatatatatatatataaaacactaattacgtagttttgtagttaaaatttacatactccacacgttattattatttatgagtatttttaggtattgtacttggattacaaatgaataactatgaatatttttactcaatctcacagggtctttctttcccaaaatgattgatccctttctctttaggttttgtcccatttatagggtttttattacgacatgaattattcttttcaatcttatctaggcaaccatttatgaaacgtggacaatcttcacatttcatgtttacaacatgtggataaaataaaataattgctaatagcttccttttgatcttgtgtggaagtagtcttttgtggttgacgtaacacgttccaagcatggcttgcatctttcaacaattttcaaggatagctagtcgcattttacgagatactagttaaaatatttattatcgctttagtttagcctttttagagtaactcttagacttagtcttctgagattttgaaataagttacactttacttattttctttaacatactcacgagtatgtaagaactcatttatctaccattttttagtgatataattttcgattttgttacacccgagaagacttctatcgttatcacttcgagatgttgcttatctagtgatctaactgctaatacgtaatgcgagactaacattgcctgtaatttaattatttttttgagacaatttatttattattgagtttttcacaattttcgtatttaactttccacatcataactatatttatgactcgaaatatgggcataaccaataattccaaagtcttagatttaaaattaattaatgttgacaattaaatattaatgttcaaattaattg

SEQ ID NO: 203710 - DNA, 1169 bp, Cannabis indica
ttaagcactccaaaatcttgcagcaacttgctggaatggagaggaaaagagggcaaaccctagctagtctaggggttcgaaaatgagagagaaagagagaaaggaaatgcaatttttgtctaactttgattttttaataaaatgagaaaagagttgatttatttgcttaataatcagcataaaacttaactaaaaaaaatcagattaataaactttaaataaaatccacaaaaggcaaaactcacttaggtaaaatgactattttacccttccaacactaaaagttataaaatggcactaaagggtagtttgggaaattctaaattcccgactaatctcgacattctcaatgtctaactataccgccccgctatactaaaatactaagatgtgattctactgagccatacattgcgttccaatgttgtcgggcactgaacatgcaaaattatgaaatttctatatatgacatataatatgcattctgaattcaaataaatcatcataaataattaatttaatattaataaataattttcataattaaaccctaatatctactaattttcaaatttcagctaagcggtctttacacctatcggcctctatcgggctttcatccttgtcaaccaactttgacagggcatcagaccaccattggacctacatcgaaccctatcggaccggaagaaaaaaattacaaaaactatgaaaaatgcagtattcacaaacaacaagtattttaacacacaaaacagtaaaataacagcaacaatccacatatcaaatatcaaaacaacattctaaactaaatataacaacaataaacaagatttcttgaaaaaaaaaataattatccattgcttgtatatgatgcttcgtgtatgacgctccgtccaaaaatgagagaagatatgtagtatagcttgtagtgtagtagattatagtgtagtgaagtgaagggaatgagtgaaaagaaaaaaaaattgtgttgattttgtagtaggggagctcggcagtagttaaatgaaagagagaagaaaaaggagggtgatgtaaatgaaagatattttagtgatattataaaatgtctataaaaaaaaaaattattacaagtttagccgaaagttttttaagtataagtatccgtttattaaatgtaagttaat

SEQ ID NO: 203711 - DNA, 1258 bp, Cannabis indica
aacctcatgtctctttacttgtccttgctttgtactaagggtttgtctagtttggtgaatcgtgattgtgagaatagtcttttgtttggttttccttgtgggagtggtgggccgatgatctcccatctcttatcttctgacgatagcctcttcttttttaaggcttcaaaagtgtgttgtatgagattcaaacaaattttgagttggtatgatgaagtttcggggtaactggttaactttgctaaataagtagtatgctcaccacaacgttgtgaaccttgatagagaaagattgatagccttattgggagttgttggagtagattgtcataagacttacctgggtcttccttgttttgtgggacacagcaaagctagtttgttcaactctatccaggatagaatttggaaaaaacttaatggctgaaaatctaaattgttcttcatggcggggagagaagttctgatcaaggttgttattcagtccatccctacacattgtgaacttgtttaaacttcctgaacattttattaagaatgttcataggatgtgtgcctatttttggtggggagggaatgatgtgaaaaaaaaaaaatgcactggcttacttgggacaaattgtgcctttataaagaagatggtggcatgggtttcagagacttgcatttgtttaaccaagctcttcttgcaaagcaagcggctaggatctacgatgttcccacctttttggctgcccgggtcctaaaaggtttgtattttagaaatcgggactttggtgatatttttttatctaagcaaggctcattcgtgtggaaaaatattttatggggtaaagagatttttgacgcgagcggtttggagggttggcaatgggtataatattgatatctactctgacttttggatcccctctgtatcaccctctttggtgttagcccctccttttcttgggaaaggtagcaaaggttctctgttacgtgaggcttcaagggactgggatttaggtttggttcgtggcctcttccttcctagtgaagcggatgctattttatctattcatttgccctcttttaataaggatgaaaaactcatttggaattttgaaaagtctagttggtactatgtcaagagcagttcctgattggcacttcataataagggtttggggcgtgcttctccttctagggagtactcgagtttgtggaaaaaaatttgatctttgaatttctctcttgagattgtttgcttgacaagcat

SEQ ID NO: 203712 - DNA, 771 bp, Cannabis indica
taaaaaccttagatggaggacgaagaggtcctatgggtgtggatttaggctgtagactcgaagatgaacgagtgactcttttggacacagacggagggggtgactacagagaagaactagcctttttagacatgggaggagccttaccttgaaacgtacgaggtttctgaatgactggcgatgaaggcgaagacggagtcgactcgtgactcgaatggcgagcaggagcaccgacctccgattggtaaggaactatgtcacgacagggattagacatatgagtctcgactatagggacgactgcaggatcaacagtagttgacactggtggaacgagcatggcaacaggggtcaccgccatgggagtggtattctccattttagagagagaactgtgaattctacaggacttaaggtttctgagagtaaagtgagagagtgagactaatcactttccttaggccttaagtataggcaccctgacaacggctgaccagccaaggaaaaaaataatgcttttttttttttaatttgatctttgccaaaaaaaatgtacacgcccaaaatgaataatttccaccacacattacggcacaaaaaacgaaacaaaccaaaagtcatcaggtaatgtgagcatagtgacctgaaaaattttaaatatgccagcaatatattcacatagcccatactttactagtcagataagaaatagacacttagagaccctcaaaattttagaaaaaaaaacaggtaacaactgatcaatgaaca

SEQ ID NO: 203713 - DNA, 625 bp, Cannabis indica
aatactaattacagcttcgaaaatatatgctagcatgactatttgggatacgctacgacgtgacagttatttacaattatcctcatatcacatatatttaattgtatataaaacataagtatttactcccactcaatgtaacttctcactaatattgattaatatgaatgacggccaaaattacaaaaatgtacctaactcataaacgagatcttaaatgcgataaatttcaaataatttcatataatcaattatataataatataattactcatttatttttaattaagattgttaatctattgattaatcccagaatattacataagctgttcaaaaaaagagtacgagcgatgtaatatcgcaatcttcttcttccttgggcactaatattgccatgttggatacttgggattcttaaaatccatggtgcattggttcgttttgagaagactgtaggtttttaagttttagttgtgaataagaaagtcagccgctcgcaaaccataaggcaagctcaccaagatctcgtgacgcctttggatgacaacagttgggattggtctttttgaaagagctaaaagaacaacaatgaaaaaaagttagtaaaattcaaacataaaat

SEQ ID NO: 203714 - DNA, 1456 bp, Cannabis indica
aaatactaatcactcacacggcattatatttatgtggtcttggccatcttaggctcataatcatcttcgttcaagaagtaaggagcatagcaagcattacaatcaaaatgatcattatcttattccaattccaccccacaaagaatctagctggatttatatttaaataaattattttaaagagaagcagttattatgtaaagattttttttcaaaggactaagaaatatgttataatgctttattaaaaaaatttattaattacataaataatttaatatggtataatgtctatagataacacaaaaatgtatgcaaggttcaacttcagaaaatgaagcccccactttagcgtcgacagctaatttggaataatcctttaatcggcgtacgctatacattaaatgtgaaaaatgtgttatcttttaaaattaaaaaaattatttaatttacacaaaaatgaaaaattcggcctacagccacaggtttttatttgcttacctaaccaactaatattgtttggattcgtttatttaatttattgaaaatttgaatctattagatttgaaatatcctacgattgtctatactagaaaaatcttgactgtaaaaatccattttggaaaaataaaagaagatccacagtaaaactttattcaattctaattctttaatcactaaagaataaaatagcgtaaaactagttatgtttcctcatgtataactaatttaatttacataattatacacatagaacacggatgaagtttttttagtattttcaaattattaatctatttgtatttatatttaatcttccaagcttttggtaggtaaaataaaactcttcaaatgattgaattattagtaaatttaaggtatcatttttttttttacagttaacttccaacatagactacttatgtgtacactcttgtacatgtagcacatttatattggtacacctaatattattatttaatatttataaaaaattatttcaaaatttacaatactttttaaatattttatttttttattttcataattttaagataaattttgaaataaaaatattaggtgcaccgatataaacataccgcatgttcaagagtgtacacataaatagtccatagtggtagttaatagtgaattatttttctctgaattttttcgtctctcttttctcctagaattctaactacttaagttttcatttatagggtgataaatgaatattgtgcaaatacgcttacaacaaattgcataaggaaaatttgcatccagaatattctaattagattaacaattattacactaatcggtaatgctagctcttattgactttcctaatcaaaaggcttagattggtatcgatcactgttcatatcactcaaatgttgtagtttatgcttacattgactatctacagggtatttcaaccctaatcaacgac

SEQ ID NO: 203715 - DNA, 809 bp, Cannabis indica
tcatatatattttctctagtcatttctctcttatgtctagggccggccctaggcataggcgggctaaacccgcgcctggtgctcacttattttaggggaccaaaattaaaaaaaaataacttttaaaaaaatatacatatattatttaataacttgttaaaaaatatcattttatcttttatagtaagtcccgtttttttttcctatagcccatttcaactcaggaccggcctgtctatgtcctagccaatcccaaacttctacgctatattcttttctgtaactgtaagtggtgtctttgttgtagttccaacaggtgtgcatgattatagattatggaatgaagaaattttatgtggttactgatttcactttgatgtttgcaaatgttcttaaaattatcagtattagaaattttttatttaataaaataaacaggtccctgttattatctctattatcgacggggattcttcaccccattctccgttggggaataatcaggaacggggcaggaacaagggaaataataaaaggcggggacatggactacattccctacaccgccccatccctatgtacatccctaaattggaggaaattacaatggttttttatattatttgtgcaattttttttttaaataaattattttgtagaaaaaattcaaaacgaaagtaccttagggtccatttgttacacatgattggactgaactggataagattgaattatcttgaaagtaatcttgtatttggtttaaaaatagattggactgttttatttatttccttttccaaaaaataaaa

SEQ ID NO: 203716 - DNA, 930 bp, Cannabis indica
aagaaaaatgtgatataggttagtgtgaaaattaattaaaaaattggataagagtaattaattaatgtattagtgatgaagattatgatgatgatggtagctatagctagctagctaggatatatctatatatatatagctgtacttaattatgtggtttaattgtctgctatgttatatatatatacatgtattatatatagaagctttacagcttagtaaagtgttataataattaaagtccgaacatatataatgtatgattatatgtgttttgggttgtagagtgagatcaataatcttgttaattcagttggtcagatgattaattaatcaaaagttagttcctttacaaactgtcctggtagtgcatatatatatatatatatatcatgtattattataatgtatatataaatatgaaggtgtgtaactatatataatggaattgaaatatctatatatgcgtacgtgcgtgggagttataattattgtgatgagtacttctgcttgtgttatcatcattatcattagttacttattccaaaaaaaaaaaatctccaattacataattattttgtaattatttgattaaacaaacaaactaacagtacttcaaattttataactactctaaattacatttaattttaattaccgattgccttttttcaaacaaactcactaattactcactagcagcacctaatatcaaatcagttatactattattctaataattaaatgcatatatatgtagaggttatatgtaactttttttcttttttcaaaatgtagtggttatgtaattaatatatataaaaattcctattataaattgggcattgatttgtttggtgcaagtaaagtttaatattggccaccaataaacagttggagaggcagatatacctttattatgtataatcc

SEQ ID NO: 203717 - DNA, 528 bp, Cannabis indica
ttatatatattagatttcaccatgatcactttttttatttcatcaaagtatattatgttgaaaagtattttatattgtattaaactaatctaattctcacaagttaaataacttaatttatattaaatatgccgttttgtttgactcaattagctatatatacacctactcttttttttaaaaaaataaaaatataaaattattgaccgtgtcaaatttagatttgtttaatacactattttttaacagagttactttcctttcttcccaagcagtgagtgtgtctcaaatattaagtaacatcaacaaataaaattataatggttatatttatttttgtgacatatatactataatacattactaacagataaaattttattcttaattacttaaattaattataaaaccaaaaaaaaaatctcagtataatttttttatgtttttatgcacatattactattctctttatatataaaatattgtttatattagatttataggactatgaaaaatagtattttaaat

SEQ ID NO: 203718 - DNA, 1414 bp, Cannabis indica
agtaattttttaaaaattatagctaacattaaatagctatacaacatacactatcactagaaaaaactcttctagaacatcctttaagagagtgaacatctctttgataataataattgatttaatgtaagtgctcttagaatatcttcaaaaaaaaatacaaataagtagatagaaagttaaaatataatttacttagcaaaaaatatattctagtgacacataacaaaccttgtgtcaaatctgacacaatatttccaaataaaattacttttttttatttatatttgtgtcattgtattattttattaatatatttaattaaaacattaaattataaaatatttatatatattttttattgttttataagtaaaataataataaaaatgataataaagttattagtctttatatttttaataaaaatattaattatattttaaattttacttcaagttttgtaattgtgtattgaagtacaatgttaaaaataatgtaaatatattacaaaatcaattttttttttcaaatatagtaaaatatttagggaaattattctatatgctatttttaattttttttttttaaatttacgggttaggttgctccagtagttactctggtaatttttatgtgaattttaattacgatttatgtaagttgttgtaaaatcgtaagagtaaatttaattataatataaacacaattattagcagatcttgatacataagagatccgtgctcgtaaaaaaaaagatcttactaacacaattagagtgatatgtattgtaatttttttataccttgaatagtaatacaaaatatgtgccacatttattacattctcataattgtataaaatgtagcacaaaatataatttagccaaatctttatcacaataatattatatttttatttattatcatatcactaataaatgtattttacaattttacaatgttttatttatttaataagttttttatatactttcaataaaaattaaataattttaaatttacactaaatacatatataatagactacattctaaaatttaaacaaaatataaaattaatatatttcttaatcaaatataacatgaatgagagatgctcttataggttctataaaatattttttaagaaaaaaagtttagttaactatataagtttttaatctaccttaaaaaaatcagaataattaacacaatcccattttaatcttaaaaaatatgtatataacatattatcgttgatattggctaaatctccgatcttattatctttcaactaacaaataaaattaaatcatttataaccttaatgatttcacaagattaacaattaatacataaaagcattattattagatattttatgtggtgtcctatcatatatatatatatata

SEQ ID NO: 203719 - DNA, 674 bp, Cannabis indica
tgatgatacattattattgaaaagctcatgattctttctatggttggtttctcctgattaattatatggtcatttacaaatgatcaagaagactgttctttcagtcaactcaactcattcaatgacagggagaataaaactcagtacagcaaaatatgtagaaagtaacttgtaaatgaaacctttcatagcatttaatttattaaaagcaaaagcaaaaaaagaaaactctggagtgaaaatgaagcctgctatttcagggtcatttgcagagccagctagtgaaaggtttgggttctcttgctgtactaattcaattcaactcttcattggattgattgtaaagtaatttttttacgccaacaataaagaagattatgccagctcttaaagttaaacatcaatggtggtcagtttcttagtcaaagtattattttaataaagttgtattaagtacacatttaagcatagtctgactaattatattctccaagagagacaagaattatgatatgcagatacattcacagaaaatatagctgtcttaattcttatctttataatataaataatattgaagaattattttagcacttggaaaacatcatttgacagcaaaccattcctccctgcagtggaaaggatattctatgtctctggtgaagaagcagaaa

SEQ ID NO: 203720 - DNA, 1106 bp, Cannabis indica
cgtgaaaaacgttggtcatagacattcattatacataaaaactatagggtgaaaattgtaaagtatacgtaagtagatttatattttggtccccaaaaaatggaacagagtgattaaatgcaattaattgaaccaaattgatgaaatggagtggagaatggagatggccgtagcggcggctgggtgtcggtcactctccccaatctcctatatttgctttactgcctggaaccagctaagaaggccggacaattttaatttaatttaatatataattttagtttaagtttaaaaaaataacaaaaaaaaaaaagaaaaaaaagaaaaaagggagatatatatcattttctaaaatagaaaacaacaaacacaaacttttttcctctaatacaatttccaccctcttgcacttccgctttactttggaaaatgatgttggattattatgtggaaagtcattatcaatacttacttatttgtattatttttcaaaagataacctattaattattattgtcatcattgattagtaatgtctatgtactattttctagatgtgttcacatctatttacaaaacgacttagcaaaataaatcgtccaaattattacggaaatactaacaaagaaaaaaaaaaatgtaattcaacaaaaattcaaactaaccatggtgggttagaatttataattagaatagattgatttataattttttttttatatttaaatagatgttgaagttaaattttaaaatttagagtacatcaatattttgtttctatctataaggatgaacatttggatattattttatcattgattcaattattattggtctcattttatttttttttagtttttaatattaatttagattatttattaaaaaacattaatttagattataatattgataaaattaaaatataaaataattttatttttctatctaaatatttgagcattacaaacaaaaaaaaataaagataagtttgatacaaattattagagaggggtaaaaaaatttattcttaatttgacggttataattatattttaacaatctattatttatacagtagtttctttatttaaaaatattttatt

SEQ ID NO: 203721 - DNA, 776 bp, Cannabis indica
atctagtttaggttgttcagtttttcatggttgttagttgttgaggatgacgatgaagacaaagacggttgtcatgacctcaatgaaagcttcatcatcggactcgattaaggagaggtacattgtgagcatcaaggagtccacatgttcaatctgtgttttccatcttctttctcattttatcggtaactaaacagattttgttattgtgtaaacttacattgtgtcttaaatgattagtattgtaaccatatacagagtgtttattcgatctagagaaatagattttgtagtactatccacagatatagattataacttgagtttaaatctagattttctatggatgttgtgttatgaataagttgaataacatctttagcttggaggctaaagagagagcactactacaaactgacattttagcgtcggctctaacattgaacaaatttaaaaacagacgcaattaaagagctgaaaaatttggcgttgttatacactgatgcaaggttaccgttggtttttatttgcattagttgtgaatcaatgctaactttgcttcagtttcatggttaattattagtgttggttgtgaactgacactaacttgtgtcagtgcaaaaccgacgaaacatctaattgaaaacacacacacacatacccgtaatgggcttcgatgcatttataaacaaaccctaatataaagcctaacatatctaataccctaattcatttcatcaccaaatacctctctctctctctctctctctctctct

SEQ ID NO: 203722 - DNA, 819 bp, Cannabis indica
accaattcccagaaaaattgaaacaaaataaaccaatttctgcaacagatttgtaaattacagaagagtatagtcaccttttgctttgaagacaaactgggttttgttagttcctccttataatctttaaactgaaatgataatgatgaattgatgattcattttttatagaattccacatttgtagcagtaaaacaagttagttttccacctatagagatgaggttttcattatttattatttattattattatttcgtaataacagagaacttcactcagctatagcctataaaataaaaacaattaatttatgcctattattccgaatattttatttgaccaaattaatcactcccatgaccaagggagagcctaaaaaaaattatataataataagagcattgttattattggacacggtgttgtccatcattttttataggtagtatttcacgattggttatcgatattttctaaaagttactactttaagttatattggaccaaccaatacttaattacatcaccggttgacaccgaagagagtgttgggcactaataatacttttagtaattctctaacaataataatcttatattggtataattacatcgtaagtcattgattgattcacaatatagatgtatgtcctaataattttgttgctacctgtgaaaaaattacaactaatgtgtagaattaaaacaactagaacttaatcaacaaacaattagtaatgacaagattgacaaatcacacacaataattaaagactaaaatatggatgaacagagtatataaaataaaaaataatt

SEQ ID NO: 203723 - DNA, 1067 bp, Cannabis indica
tttataccctttgataccacgtggatagccaagaaacacacatgttcttgctcttggttcgaatttggtcctgtgggaggttatagtcgaagcaaacgccaaacaaccaaaacacttgatatcagtataatcgggtttcttaccaaataatatttcataaggtgtccgtttttgtaggttcggtgtaggcgtgcgattaattaagaagacagccgttaacaagcactcagtccagtatttgataggaactttggactggaaaaaaagagatctagcaacattgaggaggtgttgatgttttcgctcagcaacggcgttttgttcgggagtttcaatacaagtaaaatcatgcaatatcccatgtttagcaaacaattctttgaaagtaagctcaggagcgttatcagacctgaatcgtttaaagatgcaattgtattgagtttgcaaataggaaagaaactccggtattattgaaatcacatcagatttttgtttgaggagataaacccaagtgaatcttgagtggtcatcaactaaagtcaaaaaatatctgtgattagtgtaagaagcaacattataaggaccccaaatatcacagtgtataagatcaaaacaatgagaagtaaagtttgcattattgggaaaggggagcctcctttgtttagccaaaggacagatgtaacaaggctctttattatgcaaattctttgtattacaatgtaaagtatcttgaagcaaatctaagtgtttatttgataaatggcccaagcgtttgtgccagacttcagcagtggtgaaagaattgatggaaacgatattggtatccaaaacatagagaccattatccaaatcacctttgctaatcatcttcttggtttgtgattcctgtatgtaaaatttatcagcatagaacttaataaaatgattgtcatcttcggttaacctgctgactgaaatgatattaaatttaaaggaagggacatacagaacatcacgaagtaccatatgtttaccaatacaaacattgccacatttatttaccatcaggtgttcattattaggcaaga

SEQ ID NO: 203724 - DNA, 1410 bp, Cannabis indica
tcatctcttcacttgatctgtactgcctcgagttttgtgctttgcaacggaattatttttcacgtaccagaaaaatccttttataaacatatatatcccatttttctttttgtaatgtaaaaaatatcgttttaatgattcttaattagtatgcaatgtctacatcaaatgaaaattctcattaatattgttttgtttatctatattttttaagataacactcttttttttttttttttaagttttgccatccaattccgagtgcaggaacaggataatattatttatttactttaattatttaacaagagtagaggggtgttgtgtgagtgagtatatggttgtaccttttcattcaactcaattggagtatatctaacaacatgtgtatgcatgtttgtttgttaaatttgtattaaagttcttattatttaattattagtttaaataataaaaataaaataaaatttaatctaatttaattatattttttaaatatataaaatttaatttaattttaaatttatttattaaaaattatatttaaccagttttattaaacaataaaataagcaattattttataaataaataaataagtttagatatgttattttttttttgtaatggagtttagatatgttaattaagaatgagtgtttgagagtatttaggggcggcctagtggaagaagtggtcctgctatctctcacttgtttgctaatgatagtttcttctttttgtatgtatctcctgacagttgtgccatattttgagtaatattgggatggaatgagtgtgcgttaggttagcttgttaatttgacaaagtcctccatgtgtttttctcctggtatttctaaaggagcggatgatgcttttacaaatgtttaaggaccagttcgaagaatttcatgtcatgagaagtatatgggtctcctctcctgtgtttttctagtcgttgtaaatcttgtttgtttcaatctatcaaagatcgggtttagaacaaattttttggttagaagttaaatggggctgaaacgtataaagggtcttatatatatttggaaaattattttttggggtaggaaactttttcagagggtggtcgatggcttatcggagaaggacattcatgaactttcactctcaggtatggattcctaaacaatctgcttctctctcgtactccttctagagctatcctagtgtgtctataattagtgatctaaagtttcccattgatgatcggaatattactcttattgataaactgattttgtcttatgaggctagatagattttggctatccccaaatctttacaacctttggatagactaatttggcattacaatgctttcggtgggtacacaatcaaaagcgggtgttgaaatgctattcgattatta

SEQ ID NO: 203725 - DNA, 1021 bp, Cannabis indica
caagtgaaaaatgactcatgaaacaaacactactagtactacactaattgcagattaatttaattaattaattaaaactctcacttcttggcctggtgggaatctagaggattaaactatactactacatttgaatctctctctgctccataaacaaccaactaaataataataataataatatattgtttatttgtatatgtgaaaagacaatattctcgtacaaacaaaacaaaaagattaaacttataaatttcattttgaattagacagatagacaactctttaaaaaattatacttgtcaataatattcattttccaatttattcacattttatattaatgaccaaactgaattattataaaagaggatttccatctcaaaaccaattggtaatgagtggagtagtctatattcttatacatagcttaatacttttatatttaatctatgtgggataatgttctccaatattacccctcaagatggtggttatttttgcgcgccaatcttgaatcaccttatcacaggccgtgccattttgctcgctttatttttattcagatcttaagtgtctttgcaccatatggatcttattttgttcggatctcaagcgtctttgcaccatctggatctcatgcggctggctaaccatctggatagatgtagatcaaaagcccgctaggaatatgactctgatactatattgagaatcatgggattccatctcaaaattaattggtgatgagtagagtagttcatgttcatatggatagctcaataatttttacatttaatccatgtgagacaatgttctccaatataaaagaagcataaatatatattaaaggagaaattttttataattaaaacgcaaatgctacaaagaccaacatccacaaaataaaattaaaaattcgttggtctctcttagagtgattcctcctatcaagtaataatctcgctttaagaacaactccaatcaaattattcacatagctttcaagaagctatgagaa

SEQ ID NO: 203726 - DNA, 2572 bp, Cannabis indica
gcaactacaacaacaagaacccaagtcggacaggtactctgtctgagttcttgaagacgatgaattcaaattcttcttcatttttctcaaacttaccataattacttttaattagtttaagtcacattttactgattttgtggcatagggtgaatacagtattttttgtaaaagaaataaaatgatatttcagccaaaaaaaaaaaaagaagatattataaattagatgcccagtggcatgaagtataaaagatgcaacaaataagtgaggaagcttctttaaatttttaaataaaattaataaaaaaaaaatacaaaatatatactgtgacaccccccatcatatataatgtgtgccacttctttaactaacaagaagtgtgtccacttctaagtgtccaccatagaaatactaaataaaactaaacaaattaaaataaacccaccaaaagtgcatgtaaactcactttttaaaatatatatactaaattatcacccatttaaccttaaaacgctctcaacataagtagtgaattcaatcacaggatgtcttttacctataatttgaatcgtcttactcttagagtcataccaacagatataacccgtcaaaaataaagtaactatcaaaatctcatcacttaaaaatcttattcgacaaaatttaccaagcttagttagaataagatcatttaaactaaaagacaaatattcgtaccaagaatcagaatcaccataattcttcataacccatacgtgaactattgtgacttcatccacatatatcatagaaagacacccaaaaattttagctatgtctccaccattattacctttctcaacttgaggtaactttacaagattaaatttctccttacttatatcaaaagcaattattcctgtaaaaatttccggatcatcttcatcatcacttgtattgccatttctatagaaaatataccaatgaatgaagttattaacattaatggacgtgctaatagatggtgtaaccctaatagatttaaattctggaaataagttagacattgtaattgctttccatgaattgcttctcatattataaatcgcaattttatgaccctttttaagttgagaggtaaaaaccaccacttttaaatcattggttaaggggtcatagccaagcccacgtaaacgataatattcatcttcaatcagatctaaaggaggaagttttttagactcattagtagttgggttccatatataatacaagggactcaatttattatccctactatcagaaattcctattatgcccttatcactgcctataaatgataaagaacacgattcatcatctgatgatgaatccatcgcagaatagggcaattgatttaaggaaatctcagaaaataatccattacccaaactacaaattgataaatcgtgactgttggatgcttctctatagttgataaaaataacacgaggtagttgttgactgttgaggtggagtttcatgaaatattgagtccttagtagagagagccaagatttacatacacactcacactttttcacagatttaacatcgagtctagaaagaatgttctctagtaaatcaaaagagatattattgcaaaccacacttttttcttcttcttcttcacgattagccattattggagactcagactctgaaattgacacaaaagagaattttgtttctaaagaagacattgagaattcgagatagtaagcagtgaatatgagaagtaagattctcaacagctacatatttatagtgtgaggttttctatttcaaatcaacatatatttttttattattacttttttttaaaatttaatttaaagttatgttttctcatttaattaaaaatatctatattttttttatacgagatttttatttaaaaaaaaaaagaaaagaaaagaaaaacaggacaaagtaaacaccattattttcttttccattataaatcccaatttaattaccatttttaaaattattacactattctcatcaagagatgagacttttacgactttgaaatctgtatagaacgatttcgtcccaactgaggagaaaggggcagttctttggacttcggattccatagctatcccatttaacatatcttttttttattattatttttttttttttaattaagtttatgtttttaattaaaaatatctatttttttttttttgaggaaagttcaaaaatatctattgtttaaatttagtatttgaaggaaggaatgtgatttcaaaaaaactaattagtcgttaaatttcttatttatttttataatgtaaagctattaatttattaattataataaaaattaattaagtttatgaaataagagtaattattattaatgtgatgaagataagagattttttttatacgagattttcactaaaaaaggaaaagaaaagaaaaacagaacaaagtaaatagaccgtctaaatctctaaatggttacactaatttgattatagtaatcaatacacactaattaaatgtaacatttttactttttgttgcaataactcccat

SEQ ID NO: 203727 - DNA, 954 bp, Cannabis indica
aattttatatcaaatactcttacctggattaatcatattggtttctttttgcatataatttttttcagttttaagtccaaaaagctagctaatattccaaggaattcatccttagaaaagcttctaaagcaggcaaccatttcttttaaaaaaaaatcttagctttcaagtggattattgttatatgcatacttagtttttcttatctctgttatttcattttatatgctgatttcattttctactatttttgttatctattgatatttatatgtgatttaactaagaaaaaaaaagaagcttagctactaggtctcctaatattaattttaattttttttaataattagtgggtggttattttgcagaaggataaagaagcagaatacctcatttcatattctttttaatgtagtaagtgatcatgaaatttcttattttttgtttatagtagtatagatcacttgaaactataattagagtattgttctctcttaaaatcttgtgtataactgtaattctctagagatcactaattgtccctccacaactaacttataaaaagaaacgagctcaagaaagtcttgtcatatctgtaaggtatggaaactgattttatgagatgctcagtagtgatgttacacactaaacatggtaggtattatttaactttaacatgttgctgttttaaatgcactgatacatttcattattaagatttctaatatccattttattattttttttttctttttggcaggaaatggtcaagttctatgttggtctccaatccaaagtgtcgtttagacttaagaaataaaaagcacaccaagaacactcgagcaccaagattattttaaaagttttgtgcgattaatgttctagttagttttaggttgtatactgtaagagatgtatattatcagtgtttgaatgttttttttgttaaaagga

SEQ ID NO: 203728 - DNA, 1465 bp, Cannabis indica
taaaagaaaaatcagttcacagtgaattctttccaaggattcttctaaacatgaagagaaagtggacacatacctatggttttgcacatcaaaaattcgaggatgatctagattcattctagttcgccggaccggctcagtgcccttggtaaacttttctgtgcattgccaaaagaatgaataggttcaacctatgattttgagatgatatttactttttgggcatctacattatttcattgagttgtaagaaaagggtaatgctaacctgtcttgctcttcttgattgtgcgggcctccctctcagtgaagctagtcctgtattcaacattacctcctgaaaggaaaacaaaaacaaaaaatcattaatccaccaattctatctcctaatataggtcaataaacatgaaatagaaaaatgccttaatttggttcattagtgaggagatttttgctgtaaaattagagaaaaggggaaatttaaatgttcaatcttttgttagtagctgagaattttgggatacaagaacagctaaagttcagaatttggcatttcacatacttggaattaaagaagaagaacaaagactaccataaaaataacctcccccattaaaatgggaagctcagaaaacaaattttactttcatgtttaattaattgatgacaaagaagagggaaaagagtaataagagctaaaagaaccacctccataaacatcatcagcctgaaactcctcattcttgctcttgatgttgaaccactttctgaccattttctttgaccatgagagctaaaccaaacaacaaacaaagaatcaatcatgaatttcccaaatctaagggaatcatgcaaagaaattgggaaaaattttaaattttaaatcttaataataatgataattataaaccttgcttttcttggaactcccatctctcattgtttctcttttacttcatacagctcaagaccaagtataatttgcaatatttgggcaactgggttctgcttcagaatcctccaaagaattccaacccttctccaatttcttggttcaccctctcaccactttgaaaagagcttcttcagaatgagaacaactctcacttctaagcacaacctttttctacttttagctgttgttatgactcaaaaacatggctccaaactctgaaagaagagcaaataagaaatgggggttgctctggtatttgggtttggtttgtggagtgttctctataggtagcttagctatagcttcggttaataatgagctaaagtgtttgcctaacagacccaaaccggaaaatatgaagcaacgatgactagaaagaaagagaaagagagacaatactttaatgcgtggaagtgagattagattctatatagaacaagaaaatgcggcagacatagagaaagagagaaagatagagagagagagagagagagagagagagagagagag

SEQ ID NO: 203729 - DNA, 2025 bp, Cannabis indica
gcccgacccgactgacattcctatatgggttgggtctacgcaaattgactaagtcctggtcaaacatgatataaatattcaactctattcatttgtcatgcgtctacattgtgacaatcaatcaactctctacattgctcaaactgctctcttaatttttctatttcatttttttatggtaaatattattttagaccttatgctttgtaaaagttattaattgaaccctctattttactaaatgacaaaatagaccctgtattttctaaaattgtacaaatagaatcctgagctcaattttcaacaattttttttttaatataaccaactttactacaatttttaatacgaatatatactaaaaatgtaaccagttccgtcataacatctctagattagattattattaagttttattttgataaaaaactagttcatggtcctatctgtacaattttgaaaaatacagggtttattttgtcaattaacaaaatagagggtctaattaataacttttgcaaaacatagggtctaaaatggtatttattttttattttttaaaaagttgacaatttctacaaaatataatgcaccccttaaaatggatgtattgatgtaccctctacttatttcggcatacaaaaaaaatttttagtctaatttttttcatattcatgtacgttatagctatttaagatatactacaaaattttaagaaacttgtaataatttacaatataaaaaataatgttcaaatagtctattttacacgtgtataaaataaaatagtcatgcatgcaacacactacttgaacgcaattttcagcgtgttaaactttttcaaatttcttaaaattttggaggatgtcttaaataagtataatttacaagatcatgagaaaaaatttaactaaaaaattatttcaaatactaaaacagatagaaatgtatctatatatctcttttaaggggaagcattacaaaatttccatatatttttaacacttagattaaggtcttaattttacattacaaagaattgaaatttcccgccacagcctaaacacattcacaaaactttggcgcattttatcaaacatcctataccaatcagctttatataaattcaatcaaatctaatccaacggtcacaaatccaaactgactccacacgcggatcgcaatctaatccaacggtcctgataacacaactcaacatctatacatagttccgaaacttcatttccattaacaacaactaaaactcattcaccactccacagagaaaagttgcagagaaaggaaggaaccaaaaatgtcaggaagaggcaaaggtggaaagggtttgggaaagggaggagccaagaggcatcgcaaggtcctcagagacaacatccagggcatcaccaagcccgccatccgccgtttggccagacgtggcggagtcaagcgtatcagcggtctcatctacgaggagactcgcggtgtactcaagatctttctagagaacgtcatccgtgacgccgttacttacaccgagcacgctcgccggaagaccgtcaccgccatggacgtcgtctatgctttaaagagacaaggccgtactctatacggattcggaggttgatgagtccgtagtctctgcaatctttctagggttaatgtgttattaggattataattattgtattgtgggttttcaatgtgaatgaagcttttggaaatgttctgattagaatcaagagttgttgtacattgattttatgggttatgagttgaaattgaaatacttcgattcggatttacaaagttggaaactgatcaatcaatatatttcatcttgtaaaactatagtttagtttgttaatcttcaattttctatcccatagttttttggtcaattcaaaaatcaaaatttagaatttaagttaaaggactttagatcaaatgggttgagttgtattcttctgattgttatatttaatactgatatgattgaatttacaatgtttaagcctaagaaat

SEQ ID NO: 203730 - DNA, 1722 bp, Cannabis indica
ttttatatagtttccttgttatttttataaacaccgtaaaaaatataaaaaaaaaaaatcttgaaatgtaaaaaatgtattatgtaaatttctcttctttttattatttatttcatttgcttataactccaaatagaatattatatctttttttatatggtaaatataaaaaaaaaaaaaaaaaaaacaattttcttggactagtgaggtggcccaaattcatgtatttggcccaatttaccaagttatccaaatccacgattgatttgtgcccattttaggatcattttttacaaaattaccctccaaactgaagatggtttaaattgaggccgaaaagattgatatttaaactatgttgtatttttgtttcatttttcatttctaaaaacgtgatgatgagttgtcttatttttctgttattattttttaacaaacattaacagcggatgatattactataggccttgttaaagttaacttattgtaaaaaagttttaagagagaaagctaaaattcattgaaatcccaacaaaagtcaaaagtcctttcacattttcataaacccaaaaataattaatcatatgtcactataaatacacattgaaatattagtaacttaaaataccttgtttgtaatgtaactagtaactcgtttataaccattaccaattccttcaaatcatattgtctgtaatgtaaaataaatatggacttttatttttgttggatttaaaaatttttgtctaattttacgtgtattttcaaaattcaatccttgataccgatacattaaataacacaatttaccattacactaaaccaatttattataatgttttatctatatatagtgatatttttttctacaattttttgagccttgggtgttcagaggtctgaggtgtaagtctagcttgcttactcttaagggcggccattttttacgtggatgaaactttaggagacacaatttgatacatgtttaagttcgaggaagacaatttagtagatatcaaagttaagaggcacgatttagtacataaataatcgttgattaagtagtattggccagaagtccttaaaggcatgatttggtacatgacaaaatttaagagacaaaatcataattagccttaaaacaaatttcaaataatttttgttttttttttttgttaaaataaccatatcaagttagaataaaaatatagccatacacaaaaagtaaaaaaatttcttctatcaaagaaagttatccgtgttccatcaaatttacaatattgatttttttttcaaagaaacattcattagataataaaagttaaacttcagagtcattacttaccatggtgaaaagtaattctaaagtagtgatcaattctatcaatgctatcgactccaagtaaaaaattgagagttaatccttatttggtcaaagaatcatttcctcctttgttagctatttattttgttatacttcaaaaacttatgagtttttatccgttactaatttaggtgattatctatttcgactattcctaaaaactaatgaccacgaagttaaattttttctttctaatgaatgctttttttaaaaaaaaaataataatttataatattgatgttgaagaacataatatattttctttattaagtgaaaaattgagctaatataaaatattaatacaattttccatttaataaattataaaagtaaagagc

SEQ ID NO: 203731 - DNA, 866 bp, Cannabis indica
tatagtttctgatgagatgatcccttccaaaatcacaagaatttttagttaaaatggaattccaactcagagtttttgagagtttgagaagggctactcgttggagaacacaatatgatgaaagttgtatgctaagttcgagaagaataattattgtctattgttggctatctttgtctaggtaaattttagattacttagaaaaagtgagtcacccgtttaattaggtacaagatatattcacatgttatgtaatgaccaaatttggaagtagttgtggataaattaagaaatatattaattttttcaatattattttgcaaaattatattttattataattacaaatagtactatttaagtttttccatgttgttgaataagtttgctagggtatctcaaatgtaattttataagtttgtcatgaagataatgtttgaacatagaaatttgaaagaagttaatctactatttaaatataattgaatcatcatgatcataaaaatgaattagttaacgttacatatatatatatatatatatatctatgatgagtttgtttttgaatagagaattaatatagagagccaaagtcatatcacaattaatttgttaggctagaaaaatgatggaaaactataacttatatatatacttatatagtggcgtggttgttattaattaagtgtgtttagactaaattagtgcataattataattagtagctgcagtagtggtggttggtggttgagtatagtgttgctaatgctttatatataatagcatacttgtttaattgagtaatggaaattggccatatagtttatgggtcaccaattgttgcactatatataaatatatatata

SEQ ID NO: 203732 - DNA, 547 bp, Cannabis indica
taaagtataaaaatgaaaaaaaatcctatgttttattcatgtctcataattatttgtagttatcgtccggaaacattactttctatttattagtatttaagatattatttattttttaaaagaatagataaaccaatgaaaagtaactatataaacggatgggttaaaatatatttattaaataaaaaataaatgatgtgttaaatttttgtcggatggttgacatgcatggtttaccattattaacaaaagatgttcatttcccgaaatggtatgagtgttctaaatatggttatagcgaatctttcatataagaaaaaaaaagaacaaattaagattgtagcaaaggaacaagctgagtcacttattatgataattattattgaggtacgtactgtatatattataggcaaagctaatatacagtacgtacatatcatacacgattgtacatatatgactattgactagtactcaaatatatataaatagataatgtctattcttgaacagaaattttgaggactccataagatgtttgtggatc

SEQ ID NO: 203733 - DNA, 729 bp, Cannabis indica
ttttttaaaacaaaaaaaattaatttctaatttctattacatattaggcaacgaaataaatatgacatcccgacttgtatggctaatattatttttttcaaacaaattcatatacaacagcttaacataacaaacaacaaataaaaaaatagttctttgcacgatcagttagagccatcaaatttttttggtgaaaagtacgatttccaaaaaaaaaaaatggtgaaaagtacagtttcaaaaaaatggcgaaaagtagtggaattcatttgtttttttgtttcactttcaagtattttcatttaaatacaagtaaataaaataagtctcaagtaataattaataattttattaaaaggttattttatggtaaactagtgattccttaaaagttttgaaatgggagattattgacttaacagcactacacaatgacgtaagcttatgaaaatgtgaaacaaactaaaaacaggttgaataatgttgacatggtcatatggagcacatgtgtctccctttccctatcatatattcaatttacttttttttttttgaatttacttttaagtattataacaaaattaataatatagttataaatattatattttattataaatatatattataatatttaaaacgtatttatatatatatatatatattttattttttaaaaggtattattctcttcgcttttatgtgagttcactcttgtgttcatcttat

SEQ ID NO: 203734 - DNA, 1293 bp, Cannabis indica
atcatgggtaatgttactggttttcacagcttttcgtttctagattatgatatcttatccattttgttttattttgaatttttttctgatttttgttggtggttgttttttttttttttggcatctgtttgcttacagggaaaatcaagatcggaatcaacggtaattttcatttctgtgtggattcattgatttatttacagatgttttgatctattcggtcgcagatctgatatttttttgaattttattttgattaaatattttaggatttggaagaatcggtaggttggtggctagggttgctttacagagggatgatgttgaactagttgctgttaacgatccattcatcaccactgattacatggtatttttatttcttttctttcatattgtgatgtagtgtcttgatttgagtcctttgtcctattttttgtttttagttaatgttaatatttgtgatatttgataaaacatactcttcttttgtctgattttattttttctttgtgaatacagacctacatgttcaagtatgacagtgttcacggtcagtggaagcattttgatcttaaagttaaggacgagaagacccttcttttcggcgataagcccgtcgctgtctttggcaacaggtatattaatgtatttttatcatacataaccatacacaagttttcttggtgttaaatataaatagtagatatttatggagagaacgtatgtggtataatttttaggaacccagaagagatcccatggggtcaggttggagctgatttcattgtggaatctactggagttttcactgacaaggacaaggctgctgcccatttgaaggtttgccattttcacttgatatatatttactgttcaattgaatatgcagcgttaagctcttgtgattgaaggtttgccattttcacttgatatatctaccgttcaattgaatatgcagcgttatacccttgtgattttgaacttgatgtagtgggttttgtgaactagggctccaaccaatttcccattctgctttaatataaatatgttccgtttatattccacatttttttagtgcattttctgcccatagtttcattctttttttccttactcttgagtgagatcgttttttttactcttagcatgagatgagggaatttcttacgtccgaaacatgtaggcaattgtcatcgatgtgtcgaagaaaaaagtagtatttgttctgtttggaaatacagtctcacgtgttttcccgtactgagcgcttgtatataattacattaaatt

SEQ ID NO: 203735 - DNA, 876 bp, Cannabis indica
ataaatgttatatgattttttagggtaaatactatttaggaccctgtgttttacaaaagttaccaattggacttttttttttatataaatgacataatagaccctgtattttttaaaatggtaaaaaaatgaccttgagctttaattttttttttttttttataactaacttgaagacaattcctaacacgaacagatataaaaaatgtaaatattttgtcataacacctttagatcggattattattaaattttattttgacgaaaaaatatttcagggtcctatttgtactattttagaaaatacaggattccttttatcatttaacaaaacagagagaaaatgtatttacttctttttttttttttttttaataaacgtcatatttttctttttaaaataaataatcttaatatcttgttttatttaaatttcttatttgaaattttatttaataaaaaattctcatcaaatgtttaaataactgatgtaatgtttgacttctacatttttttaaggggttaacattacacctttttaaggtagctgaaatattagggtaaaaaaattaaatgaacttaaaaaatctaaaatttcacaataaacaatgtaatcattgtgattatcttttctcccttcacagtaatcaatttcaacagccctaagagaatttgtaaatccagtcaaaaataaacaaaaaaaaaaaataacatcaacatcaacatgttataatagaagggaaatttgaaaaactatactttaaaaactctaatattttattcttaaaccaatacatttcaaactaaaaaatatatgtcacttttatcaaaaactcaaaaataactctcacataactcaaccccatttttcccaac

SEQ ID NO: 203736 - DNA, 662 bp, Cannabis indica
aaaattaataataatattataatcaattttgatacaaaatgttcatgcaagtaataataataattgatccataaataaaattaagaaaaaaaaccatattgagcatgtgaataaaataatttataagaaaaagagggatataatgtgctttcagaaactatcttaatataaaaaaaagaaaaaaaaatctattattatattatactttataatatttaaaaaataataacaaaaatataataaacatcaaaaccaaaagcaataaacaaaaccaaaagccataaacatcaaaattaaattaaaaaaagagtaatttgtggaatataatttgaaatcacagaaaagtttataaataacaacaaaagtgaaaaaacgacaaaacaaatgaaaaacgacaattaatgtcaaaatgacaacaaaaatgaaaaacggcagcaaaagtaaaaacgacaataaacgacaacaaaagtgaaaaacgacaataaacgacaacaaaagtgaaaaacgacaataaacgtaaaaaacgacaataaacgacaacaaaagtaaaaacgacaataaacataaaaaacgacaaaaaacgataacaaatgtaaaaacgacaacaaaagtgaaaaaactgaacaataaatgtagaaaaacgacaacaaaagtgaaaaacg

SEQ ID NO: 203737 - DNA, 1762 bp, Cannabis indica
aagaatgatacattttgtcgattagtttatcaataataacttaagtgagtacaaacaaagccaaacatgagtcgtcactgtttgaaattattatccaaaatgtttatggaagctgactagtaatttattacaggctggtaggtatcaaaatcctgaagagaatgccttctttcctgatcatttaccaccctcattggtgccaccatatgcctttccaccggtaaattatttattattattagttaataccttggtgagtcaattaatagtatataaaaaatattttggattcttataataaacttggaccgtaggtactgcatcgtgcaggggcttcaatcaatgtgaacaacaaaatttgggatatatatttcaagcaattgcttcctttgtttattatatcgggtgatgatggaaactatgcatcgactgcctctagtgacctcaattgcttacaggtaaggttgtttaacttttcctttttattgggcaaatacctatttttcatctgaatcatgattttatatctataaatatttataaccgaacagttttatgcaacaaaatttctttcacaatttaatgtgtcgtcgaaatatctcaattatacaaaatcatttcaaacatgtgatttagtatcattacctatacttttcttgctaaagaaaaacacatgcatagtaaagtcaattttttagaatattagttgtatatgcactcttagaactaatgttttgtttgtatatatatgcttagcatcaataaactcaattcagctaacttcaattagttaaataaataactatgtcagtatacccacattaacaaactgcttaaagaaaaagtgaacagcgagaggtaacataaaagacaaatttgcagtggtgctatatatagttcaaattgaagaatttggccataacaaaagtttgaggggaactttagtaaaaaacttataagacaaaactctacatgaatagttcatttaaatggatatattttgttttgtctttagctagaaaatgacaatgtaagatagtggttcttattactcgctgcaggctatctctagaaggattcattatggaaaatttgtagctgaggtgaaatacaaggatgccccacatgactatgaacccgcaattcgtgctaaggtacgtactttgaatctattataaattaactatagaccaagatatgcaattcattgtaggagtattttgactgtggttatagagaacaataatttagcattatcacatgattatacggcatgcatgtatctaattttaattaaattgaaaaataatccaggatagggatgcactgatgaaactgttaacatttaaagctgtggaagagacagtgaagaagagggttgagaagaaggcaatgatatttggggaagaggtaaccacaaacactacttgcacagaaagcaatgagggaaatcacaagattgatccaccattagtttctcgtctctatgatgaatggataatgcctcttactaaatttgttcaagttgagtaccttctacgtcgcctcgattagtgtataataagtttaacaataaatttaattacataaggtacttgtatcttcggtttttatataataaccgaatacataactccaccttcgatttcggtatttttaaacatatgttatcggctcaaatgacttcggttgcgaattttaataaaatccgaagaacaattggcctaaaaatcgaagataaaggccctttttctagttgtga

SEQ ID NO: 203738 - DNA, 1369 bp, Cannabis indica
ttagggtacctaggttaagggtcgaaagttggactccaagttcagtgggtcagggttagggtttgagatctgagaaggggcgaggccgagatccatggttcaacctaggagccatgagtcgaggtctggtcgaggtcgggtccaattgcagaatcgaggtccaaaatattaatgaaagagattaaaataaattatattaaaaaaatgttaaataaattttaaaactgtaatatttttttttttgttttttaaatttttcatttttattttaaaattgaaatagttttaccaaacatgtattttcaaaatatttttacttttctagtttaattaaaatatgatttcatactttacttttattaaaagtaatattcaaataattagttattatttattgcacgtgtttaaaattaaaaacaagtatatacacatagtatgatgttttatttattattatttatttacatttttgcttaatgcacaatttttttgcattcttaataattcaaaataatctgaaaaattttgtgtgaggtccaaaaaatactatgtggatcaacattatgaaaagaaaatacaacaatttgcaatatatatccatgtatatacacacatatataggccaataacatttcatatactctaaccaaatcttatttttttttaatcagttataagtcttcctatccaaacaacaataatggcgttgctgtggaaatgcacctgaaacattcagaaaattctcatgaaatgaacctgaaaatttcaaagaaggcttctgatgatgacaataataaaagtagtttaggatcaccaacctatgatggtaattaccttcatgaactattaagaaaagttcttatggaaaaacgtctgagcaatacactcacaaaaatggtcattcttacatatgatatctacaaactcttgcctgtggtcttctcctcttttgaggttagattcttaactctctctctctctcttttctccctctctttattattaattgctttaattttacatattgtaatactcatatttgttagaaatcaaatttaaaatacatatgaatcttaaactcatatcaaattattgagattactttataaattaataaaataaaaaacagattctatgatatttgatacaaaatgagattgtaagtatatagtcttccgcatattaatcttctctttatgagttcttactcaattaatgagaattaatatataacggagaagagtagttaagattagctcatttaattatattacttatttaatccaattcaaaatatatattagctcaaataattaatctgtaatcataaataatatatagaatttcacatatatatatgaatatatat

SEQ ID NO: 203739 - DNA, 1507 bp, Cannabis indica
taataataaatggagaaaataaagaaagcaacaccatgaaatatactggttcaagtcctatagatcgatgtgatctatggctctactccaattctggaacaccaccaaaatctttctttattgattgagcaataataggtacaatacagtcgaggtgagattctctgtagagttatcacaaagtgtttcaactttcatacttacacctaagaattttcatctatagaagattcttcttacaaaactcaatcccaatctatctcttttctctgcacctctctctctccctctcaatctttcgtgtcttcaaataactggacaatgtggtatttaaaggcttaggatcaagttcctaaagtcggtggctgcaagaagtgaagttgttaagtttgttagaaataactaacttaatcaactcctcttagagtaaagtctccacgtcagcttaagtatcagagtctacaggaaaatatatgagcatctggactcatggaccaaggatacttgttgatgacgctttcggataggatatggactactgaagttgactatccggatctaccattgcaggagtgacaactagccagctgaaactcctttttaaaggagggctagctgtcctgaagactgaacccagagtggacatgaaagtcatccaggaacatcctttcgtacttgactatcattccacaagactccttccgggataggcaaccgcaagtgaataactttctagaaatgacgtttgcgaagacctttttatttggaggaactataccacaaataccctaataactatttagctactcatcttcattgtaaacaatcgataaaaattaaagaagtgcataagaaggaaatagaagagaagaaattgttgaaaaattccgttaaaaagccttctaggtcactttttttctctgatttttgtactccctaattcgtctgttaaaaagtgttgaaaagaggcctttattttatatagctaaaaaaagattaaaaaaacctaatttttgcaatttaaaagaggcgtgccacgacactatcttgtagtgtcgtggcccttgaagcacgattgttggcagcgagcttcttgatacgttgactgataatgtttatgccataactcttttaatattgctcggaattagacgattcaagatgttttggaaagataaaagagagacttagaacttttactcacaatatttttccttaaagtgagcacaccatagtcaaaaaattactttaagctttagacttggtttttgatcacaaacggaacgtgttgagcatccaaaacttagaatttttcactaattatatcctagaactccaaattctatgataattcatcatattcatttcatttaacatatttcttctcattttcaattcaaattatgaattttatgatttaaacctgaaataaatagaaaacaaacgtaattttgcacaaaatgaatataatcaattgaaacacacctttaaaatactttattaaatg

SEQ ID NO: 203740 - DNA, 640 bp, Cannabis indica
atattatatgtttgacaaagattatattaattaacacccccttgtttgcttcaacaaacatacattataaattttaattgttaaattaattttagtcaaatttatttctaatattatagccaaattatctttaaaatgtctattataatatcaaaatttctaattcatcataacaattatacataaatatttctcaatgagaatgatataacattgtattagagttacttaattattaatataaataataataataattaaatctaataatacaattcaattattatatttataatttaattgatagttaattttttttttctatgaatctgttttcattactcctaaaaaattaattaatttacaaactacgagcatcttcagttaaagttcttaagtattctatataatactcttataaaaaatatatatttaactacttttattaaatattaaaataagtaaataaatttaaatattataaacaatataactaataaacttagctataaattataactaattatcttattattacttggtttatcattgaataaactaaaaaaaaaaaagttaagtgttcgtcttgtttttcttttttttctttttttttcttaattcctaatatattaaaactaaa

SEQ ID NO: 203741 - DNA, 1404 bp, Cannabis indica
attagctctgcctgactgcctataaataatatatataattatatattttttagttaaccaaaagttctatgtactttccttgtggattaatctatttatacatagtatgaaagacagcccaattgccactcgacaatactattcaaagattaagctagaggcttatattatttgccaaataagatccatgtattcttggtttaaaaattaaaatagtatacattgaaaactttaagtactatacatgcttttacttaattactcggggaaagaatttatttcctcgtaaatacattaataaagacagatcgattgatcattatttaaccgatccatatatataaatataatatatagattttaagaaacaggtaaatacaaagaaaattacacatgatatgtacgtatatatagacattaatttttttttttaaataagtagcattaataattaaatatatagagtgttgtgtaaaaatgggttttatgaaactgtttattagtaaaataatttttttaaaaaaaattatgagtaaaataaacttgtatggtcgcagaaaccattatatattacgttgtgcgattatcataattgcatagaataaattaagtgaaattatttttataaattttagtattttagattgttaatttaataaatttcacattttatataattatatatatatatatatacattgagtacactgcttctggatctaggtacgtagtacttaatataaatgtatttattgatagataaaatgttaaaagacaccagtagtgtttagtattatgtaggtgttttatattgctattagtatataattaagtatcgttcgcataatttaattcaataattgttaaagaatattgctaatcaattgcaaatgaacactgcaggttagacaccaatagtgctttgtttatagcaatgctattattaagaatatttttttgtgttagaatctaatgagaatattctagtcgtagatgaaatgaaatggatcgtataataaagtagaaatggagtagtcagtacttgtgctcatgatcattatatgatttttcttttcttattttgaatcgatgagaaatttccaaaaaataaaatatatagtcaaaaaaataaatatagcgtttattttaagctaaatataaaaagaaactttgatttcttttatatataatataactagctaagaacacgaaattcattgaaaataaaggatattacaactagttctaattaaaccagacaacagaacaaaagaaaatagaagaagaaaaaaaaaatataacattcagggaccgagagagcatttggaatataataaaggaaaccaatatataagtactttttttttagtcaggtgtgttgtgagtgattagtaattttttata

SEQ ID NO: 203742 - DNA, 787 bp, Cannabis indica
ttttctatccaagttgaccaaccagtacatgagaacagacagtgaagaaatccacctctcctcaagtgggtcttggggcacagaatgacacacttttcaaattcccctaaagaataatggcagccagcctccataatttctccctacgcagtcatgggctgcttagcctcatttgaattccccatatccatcaaaaggcatatcgaaaggaatggtcggggtagcagcctcctcattagcttgatttgggtggccttcaccctggtcctcaatctcttacactttgacatcaccaacatgcatagcgtcttcctcgtcggaccccttgacgtatggggcgtgaactaacgacattagctgggcaagataggggtcttcagatgaattttcctataaatttgcttagtctacgccactttcttccccttcggtggattcctggatgaaggaaaatgagcaacgttaatgactaaataagcctccacagcaggctaccttgaaggttttgaatcaccctcaataaaagaatttagaaaacatgctcacaccctgtacgtccaaaaagcaggaaaatattgttaaattcctcgattcgattcccaaatgaatcacccataaacttaaccgctgatacgatataggtattagtgatgttgcacagaaggtttggatggcttagatttgtgcttgtcacttcccactcatcaaagctggacgtcaaaccctcactaaatgacaacgaggatgcatggagtctgggctagtcctcgtgaagtatttgtaacaa

SEQ ID NO: 203743 - DNA, 714 bp, Cannabis indica
tgacattcttgtcgtccaggtatgtatatggggtctaattgatggattatattatataactgcatatctgtatcttgtttaactaaagttatattaaagtacaatattaatgtatagtttattttatatattaaaaggaaaaatgttgggtagctagtgaacaagttggcagatatcaacaagttgtagttataagattatatgtaatttaatgaaagaagattgagctccctttcacaaattttgaaaaatttaaaataatttaaaatagatgagtaagatgcaaaacttcaaataatttttaaatgattggcagctgataaaccttcttaactctcatttatttacatttaaccttctaaacttaaattctagtacgaaaacctactaaactcatgctttggttgcatttttaaagtgtcgtcttacaatttctgtttgtttatcattttatttatgtggctagtaacaaagatctaacatagcgggaacatgtacatatgtacacaaaagtacacatatcacatttatattaatgtatattattttaaaaataaaaaataaattaaaatcaaaaaatattttaatttttttattaactcttaataataataatcataataaacttaatttctctttctctctctctttctttgttttcaccataacaccatacccacccaccaccactaccaccacaataccaccattcct

SEQ ID NO: 203744 - DNA, 1164 bp, Cannabis indica
catatgaccttctctatgtaatattaatgctactatgctagtatcaaataccactttccttttttttttaagtaaaaaaaaatattaatattattacttactactttttttttaaaaaaaaaaaaaaaataggttttaattgtctctagttatgattttgcgtggtcatagacgtagacataatttagtgattctatattttttctcacaaaagagaatgtctcaaacttaaatttctcttctctaaagtcaaataaattatgatccttataaattcttgtctccttattttttcttttttgcttggagagcgagaaaatgaatctgacatgataacataacttatttacacaaattaaacgagtatgagggttttttttttttttaatttagataagtttgagttatttttgcattcatgatacatctaattgacctgttaataatttatttaaagtttttttttgaagaaaaatagaatttctattaataggtataaatcagacatagtctattacacgtagatataactcatcgagcattatcaacaaaaataggttaaccaaatcgtttacattaaatacaaaaactctaacaacaacttcaacataagctaccagctgtgaagcattaaataatgtaaagaatactaaatttccatcccgaatgaacatgtgacagatcacaccaatcaataacaatcaactaaagatattccaataaaaatagataaaaacacaccaattattcaactagagtaatagaaaataacatgacaacctctgttcaaaatttttgacattaaatatcgatgaaacataaaacaaagtgtaaaaaggtacgtaccaaaaaaaaaaaaccagaatagcatgtgcatcctaaccaaaaaggaatggagatcaaatagggatgtaaacacaccattattaaaataaaaaaaaaaatagtaaaatagacactctctcaaaaataaaaaataaaaataacaaaatcaaagattttggtacaccgtcacaatcattaagaacagaccattcaccaacaccaaccccacactaaatctggtcgattccaatctatcctctttgggagttattacttcataagttgctcaacatggatcacataatcttggtgatcatctctatctaatgaatggggagt

SEQ ID NO: 203745 - DNA, 1456 bp, Cannabis indica
cacacttgttaatatagaatatatatctgacaagagaaaggtgatactagctagacaaatgaacagattctcttgaaatggtttctatattcaagtgttttttggcttactattatgtggacggttacctctcaaacatgtgtatttggctattttgtaaccctttttatttcttaagtttttttttttagtatattttaattcatgtgcttttggtactttacattatcatgaataatcccgccccccacatggaaaaaatggtgaaaaaaagggatgtgatcagaagcaaatggaaataggaaatgattaaaaaaaaaaaaaattaattttgggacatcattataagaaaagacaacttttctggtattaatcctacctaaaccaaccaactttacaaataaattatggtataaataattaataatattatgaaagcatctaattctaaagcagtagttattggtaatctctctttggatcctcttcgtttgtctcaccattctgtcgtctctacaagaaaagaaaagaaaagaaaagaaaagaaagaaagagtgaaaccacgctgtacaggctccttctcttttctttctcaatcaatatttcattcaataatataccatatattatatatatatatatatcccaaacaaccaaaaccttgttgttggcttctcatcttacaatttttttgaggttttcaatgatttaatttgcatagtaatatgtacatctcaattaattaagctcctattaaccattgatatgatgtatatgcaattgtttgaatagtcgattttaaaactaaaatttttaaactctaacacaagtttaataacccttttattctttttttcccctacccattgcaaggttctccaaattggatatgtggtctgtgaatcttgaaagaatcgtgattcaaaagggtttaaaacatctccaataaaaatgcaaatataataataatattgtcaccactaaactagtattagtggcttaaactagagttttattcgaacccatgacctctctctttttcccatccctccctcaccactaaactagtattagtggcttaaaccaaaatatgacttatataataataatttattctaatagtatgttaaaatattatgtaaatttagcacatagcaaatattatgttaaatttgatataatattgtctacgatgcaaaatttgcacacatatatacttttttgtttactttttgttacccattttttagctaagtcacgtgacatgcaattaataagaagacacatcatcgtcgaaaaagtttgcaaggtacgctctgcaagaaaagaaaagaacgaggtccaaaaggcccccaagtgatacacctgggcgacatgtgcaaatgcatgatcgctaggtagtccttgggctgtaattcatcaatcctgagttacctctctagacaagtggtctgat

SEQ ID NO: 203746 - DNA, 620 bp, Cannabis indica
aacactggccactctcctacatctactaatttagtttatggttctgtgcatgttttcaacccaacaactcgaactgagcttccacatgaacacaccagaactgacccatgtgtatctgcattgccacatgtttcccttgtccctgctgtgcctaacacatcccctgcacctccaatcactagcctcccacccataccagaaatgaatcctgatcccacatcagcagtgaaccatgatcccacaccagaaaatcctccaatcaccactcctactgctgttacctcagctgctccaatccctcccattgccactaatgtcctcaccagatcacatcccatgaaaacaaggtctcaaaacaatattttcaaaccaaaatcttaccttgctaccaaatatcctctaccctctgcccttattccatctgaacccaaaaataatgcagctgccctcaagcatcctcagtggttaaactcgatgaatcacgagttttctactcttaaaaaagcaggtacttggacccttgtaccatatctcccagacatgactgttatagggaataaatggattcacaaagtcaagctcaatgcagatggcacgttggatagacttaaatccaggct

SEQ ID NO: 203747 - DNA, 741 bp, Cannabis indica
aaaaaaaaaaaactaatcataatcttacgtagatttattttatttagagacaatatgtagattttagtttaagaaaaggtattgattttttttttctttcaacaaaggtattgaatatcttaatttcactatgtcatatactgatttttttttttttagtaaaaaaaagttttttaatttttttatattttttacagaatacttgtaaattaatacacctttttcttagtatttgcatttttagaagtaattgtattaaatctagtaagtttttttccttttcttttcttttccatttattgtatatatatgagcattataacttgtaaatattataaaataaaaaaataacagatctgtaaataacagaagtgaaaattacttttacaaaggaaataacagaagtgtaatgtatgccaaagacaatagaaaaattctaaaaaacaaacaacacattgatgtaattttagtcatttatatgttagactaagatcacataattttctttaattactttgttttaaattaattacaaatcctttcaaaaaaattaatatattttaaaatataagctcttttttttttccatcacacaaacgtaacttattaatgttattatagttctcttccatattatttttaggaatttttattttaaagtgttgtaataataagtacctctaaatattattcaaataatattttattattatttgacatatattaaaaaaatttttacat

SEQ ID NO: 203748 - DNA, 553 bp, Cannabis indica
caattctgatggaaaattactgggctgtaaacccaaccacatcagattactcattccactcggcaacttagctctgctcgatttccgccactcattcccacttcacttcgccattgttatccagcaaaaaaaacaaaccaacaaaccacacaaaaatcacagtaataaacctaaattcagtactactgaaaaacccaataccagcctttggttcctcgccggtcgcctatggctttggtagcggcgtcgttgccggcgacgaccaatgttctgtgctcagcgagaagcaccaaagcggcgccgaaaagagagcggaaacagggacgggcttttggtgatttcgggcactttgcttcggtggttgggaaggacgtggagtttatcaagactggtattggtaaagggttgaaatgggctaacaaggcttttcgaattccggaagtttccaaagccgtagacgatgttgtatggcttaggcacttggaagatcctaatgcgtctcctcaaccggtcccttcttggcctcaaccttcctatccaggtcaaccttcat

SEQ ID NO: 203749 - DNA, 993 bp, Cannabis indica
tgtaattattcactatgttgagtgtgtttggtagactcatcattcattcattctcgatctaaattatattctcttctagtttcatttaagttcagtttttgatatgcgtaattagttctagtttaaattatgtttctttgatattattactattgtaatagcaagttttggggtgatctttcactaccacatttataattaagtctaccaaacacataatgatacatttattttttcttcattaaaagtttattttggtagaaatacatagaaatcatctaggaccagggcctccatatgtcatggaacgtcgaaagtcatcatttacaaatccccaatccctaactaaataaaagtcaatatcaatagaagaaatttctgtgtttttaacatctacttggttgtaggcctcatcaatagttgtcattactctacaatatgcgtcataatgagaattcccttttaaaaataaaccagaacccattggaggaccgatttgaccaagtggactatacgtttcgccaccccattcaacataagtagccaaatctttcaatccaccactaaatatacttgatggccaatatccagtttgagtaaggtcctttcccatctcaagccaccagtttccagtaatttgatcctattatagaatgtcaaacaatttcaaaataaatacagcccaaaaatgtggggtaatattaaatattatatttgttttatttacccgataaattttgattgggatttcccatgtaggtatatcaccagggtgagtttcccttagatacatatcaattaaaggttgaggatcaactaaaacgaatcctggacacactgtattgaaacaagataattgaccagcctggaaaaatattaatatatatgttacacataactacacaatgaatatgaaaaaaaatatgaaaaaaaaaaattaacataaaatttagataacctgaaaaatatacgaagatccgagtttattatccc

SEQ ID NO: 203750 - DNA, 1180 bp, Cannabis indica
aaaattaaaaccaataaagtaaaacggatatacaatggaatttcctttttaatatgagatattttgtaaagtacccccacaacaattacaccccaattgtttcatgcaaagcttttggtaaccattgtacacaattttcccagtctctgcaaagcatatcctcctttttcaattgagcttttagtcaagaaaagcaagaacgcgctaccatttttgacctagctttgatcctatgtaccgactacataaagaacaatttccattttaggcatcatcaacttctctagctgcttacgctattaatactcctttcttgtattctctagcaaagaagttgaccttgattgttgggagtgttaggagagttgaatcttcttgacattgttgttcaaaggatgaacacaaacactgaaagagaagactgaaaaacagagagaagaaaaagaagagagtaacacaaagattgaatgaaagagattaagtgttatcactattgaaaacagttagtacaatatatatacatcaaggatgtgtaacaacccaatcatcatcactccatgtaactttgaaacttttcttattcttttttagagtatttgcacattcaagctaaatatgaccaaaatctccacattttgcatcgaattccctttttgttagtcatagaagatttaaaaataatatttccttttgaaaatttgggtgaaatctttttattacacatcttttacatatatttctgaatgttcctggttaataaagcaatttcatcatcacatttatcataactttattttttagcaacttttaaaacaatacttttacctttattagctgtgaatttgggtttgtccttctgcttcatttgctgatttagttcaaaagtaagcaaggaacccatcaactcatccaccttcatcttgttaaagtcttttgcttcttaaatatttaagagtttagtgtcaaacctgtctcgaagaactctaataatttttctaacaagaacagattcatcaagcttttcaccaagagcaaaatatttattagttatatcaaacaatctttcataaaaatcagatatagtttcattttcagacattctaagatcatcaaatttgatctgaagcataataaacctagaacgcttaacagcataagttccttcaaactgaatttgaag

SEQ ID NO: 203751 - DNA, 1067 bp, Cannabis indica
ttcttcttcttcttcttctcatcggccctttcttcttcttcttctcatcgacccttttttcttcttcttcgacatctcaatattacctccaccatcaccaccataactactccaccaatgccaccataaccacaataattactacaaccaccatacccaccatcacaccattatcaccaccaccataacatcaaagagaaaattaccttaccacaccacaccacacacaccatcacaccaccatccccatttttctcaagtcaaatattcctttaaaaatttgaaaaattagggcaaaatactgaaaaataagtataaaactttgaaaaattaccaactattcaagtagattgagaagaaataagggagtgagaatcggggaaggggattctgaggtcagcggtgagagacccactgctggtgataactaaaaatggcagtggaaacagtggcggtctcctgggttcaagatcaacattgaagtgggttagaggaaaaaccaacaaaaaacatgcctgggtttgatgaagaacaaacctgtttgggttcaattatttgttgcagctgggttagggattagcaaaagagagaaagaagttaaagtagaagagaagaagaaggaaaaaaaatcaaaatagagaattattttttggtagtggttatggtggagtagtgatggtggaagaaggaggaggagtgggggttcggtgtaaaattaaagttttaattattttttttttgagtaatttgcggcataaatacctaagttttatgccgagtagcagataaatacctaagtcctatttttggcggtaaaaataccttccgtcactactctggaacttccgtaggtacctctccgttatgtgccaagttagtgtccacatggcacattgtgattggtccagatagatttatttttattttttattttaaataattatttaatattttaaaaattaatttttaaaaaataaaaaaaatatttttttccttttaactctctcttctctctctctctctcgtcttcttctccttcttcatctctgtgctctctctctctctca

SEQ ID NO: 203752 - DNA, 776 bp, Cannabis indica
gtattgcttgagtgaatcgtgaaattgtgttattatattgtgtaattacagcaatggtaacccatttctctgtttacattttattattcttatgaagaattagatttcataatttacaaaattttagtgagttgatacgtcatatgtgaactggatatattggctgacttgctattttaatcttatttctgaaattctactttaatttatacttttgccttttcaaactttacagtacataaaagatatattactctttactggagtggagagccaatgaatttacttttcatagtgctcttgcaaaactaagccatgaaattttcttatatggcagtagtctcttgcatttttacattgaaaatgtgcttgatgatatatctttaagattatagttttagtacctgtatatatggataatggagatagtgtatagagctaagtaaataatgatttcttttgtacgcagagaagttctttaacttagtattaaatgatgattcaagttttacaaatgaatatcgttccgtgtaataaaaagatactaatcttagtgtaagtctaagacgcctacagtccatgcacatttatgtttgctaacatgcatatttctactatatagctagggatacagtttaataaccatgctaattgttagtttcatttaagactgaattattttctgtattttaacttataaaagtggtatatgaagtagaatttggtttgaaaggagataacaggtaatcattgagttgatacttagtgaaagaaaa

SEQ ID NO: 203753 - DNA, 1000 bp, Cannabis indica
cgcacgatctcgcagaatgtttttcagtcctaaaaaaatacaaaatgaagttaaatccaaaaaagtgatcatttagagtttcttctaaaaaaattcttggcttcatgaatgttagaggaattgaatccaatccaaaaaagatatataaaatctctgctcgatgatcatgccttcactaaaaaatcataagaagtccaatcattgactaaaaaatagcaggactaaatagattcatttcaaaatcaacagataagtatctactattttttaacgtatgcaacaaaaaatttgaatggacagaaaagtgtgagaaggcatttcaagagattaaagaacacatcaaatccacccgtactttcaaagccagtgactagcgagatcctgtttttgtatttgtcagtattagaaagtgcaataagtagtgcaagaagaaggaaatgccaaattgccaatatattacgtatgtaattgtttactggggcccatatctagataaccacctcttgaaaaactcgcatttagtctaattaatgtctcaaggaagttaaggattttattttcaagcactctcaattcatgttttgactaatcatagggaccctacggagtcagttattttattataactgactctatagggtccatacatcattgattatttttaaccctatagtgtcacctagaacaacgtcggtagcaaattttgccaaaaccaacactgaaagactttaaaaattgcatctaaagcccaatcatataatagtagtatttcaatagtgtcttggcttaaaattgagaaattggatctcttaataagaatgaggctctttacatacattcagcaatttattctcgatcgattaacaataagttgttgatcaaaatgatgcaggtagattattctaaggctagacatatgagtactaattctttgtcaaagaaatgaccaaattaacatacttccaattttcattggacatagactcattgaccttatcag

SEQ ID NO: 203754 - DNA, 713 bp, Cannabis indica
  modified_base (88)..(88): a, c, t, g, unknown or other
agttgtgagaaattggtgagacagtaagttttcttgaatcgcttttcattcagttgggatttctttatgagtttctatcataatttanatcacaataaatgaatgaaaattcgctcatctgatctgatcattgaataaagaaaagaaaatttaaaaagaaaaaagaagcattaaatacctagcaacttccatttatttaccacaatgaattaagtggcagagagtttacttgatagatagttaaggcaaaaacaaaattcgttttggcaacattaattgttagaacaaaaatataaaataaaacataatgatgttaactttttatggggcaaaacacataccctttttgccttataatagaagccattgcgctataaataaatcctaagataaataaaagctaccccctttctctctttctctctcatcttttaggcttggaaggttggaaacctcattgattccccaacaactttcttaaaagtcatttcacttaaacagatataaacacatttaatagatcttccaacccccatttacttaaactgtgtttttcatttttttctttttcaaatcaattttcttggacaccaaacaggcatctccattatcgagatgggtactactaaatctaatacttctagggttatggactatggtcccttctttatatttgtacaaataagcaagaacaaagagacaaaagtatgcat

SEQ ID NO: 203755 - DNA, 1103 bp, Cannabis indica
ttaccttattttaaagtagggtggttaccttaatgggatatgttgtttaccttattttaagatagttgtttaccttttgctgataaacttattttggtgtatcttattcgaggtactgtgtttacctaaacaagacatgttgtttatcttttttaagacaaaaaacttgcttaataaaatgagtcatttaccttattttatggtagtgatttttatatttaataattattttagtttaccttatttaagcacgtagattacgtaaataaaacatgtcgtttactttattttacagtaataatttacttctttaatgataaattatactttagtttatcttatttgaggcacggtgtttgttcaatatggtgggtcgtttaccttatttaaggcatggagttttcctaaataagacatgttatttatcttattttaaggtagcagcttacctttttaaagataaattatgtgttattttaccttatttgagacatgtttcttacaaaataaggcgagtcatttactttattgaaagcaggaagtttgcctaataatgtatcgtttaccttattttaagcaaggtgtttaccttaataagatatgttgtttatcttattttaagatagggtgtttaccttaataaaaaaaaatgttgtttaccttattttaaagtagtggtttacctttttctgaaatttttttttttttgatgtaccttatttgaggcaatgtgtttacctaaataaagcctattgtttaccttatttaaggtcaaaagattgcctaataaaacaagttgtttaccttattttaaggtagtgattcatatttaatgattattttggtttattttatttaaggcatgtaagttacctgaataagacatatcgtttacattattttaatgtaatagtttacatttttaataataaatatattttaattaatcttatttgaggcacggtgtttatctaaataaaacatgtcctttacctttattttaaagaatagtttatctttttaatgataaattatatttattttactttatttgaggcacgacgtttacacaattattttatgatacgaagtttacctaataa

SEQ ID NO: 203756 - DNA, 1353 bp, Cannabis indica
agttaatggaacgagggagagatggaataggggtgtcgaaatatggtgtttggctgaaggaagacgatcctaccccaacatgttttgaagcgtatgcagtgtttctagtgagaagtaggacaaaagcaagaagggtggaattcatgactggatgtggagaaagaagtgaagtagaggtggaggtaatgagagaagcatcaggtaacagtaactggcaggagatagtccggcaagaagcagaaaaacaaggggaagttggggatgaaacagttattgaacatgggagttttgatgatgtggcataaggtagtgggcataagggtgatcatgtggggattaaagatattatgggttaggtgagaattgggcttaaggatgggggcccaaccattcaaaaatacaaacatgggataatagtagacaacccaatgatcatttaaatgggctgcaaaagggagactcctctccacaactgggcaacacaaattcaacaattggttcttctctaagttacaaagatgggtttctcattactgataataagaaggaatctcgaggcattggtgaaggtcgagagttgaccaagcaggtagttgaagacgatctaagtggagggcagtctgaaaaaaaggaaaaaattatgataattggaggagtgaaggagatgagaggggtaagtgcaatattaataaaagtaaagccatttttctgggttgtgagattcatgaagagcttggaaactttgcacagggagctaatgttgcgaaatcaccaggggagttggctaagcaaaagcagaggaagaaaatctcgattaaaaataaagtaagaaatgtggccaagaacgagtttttggggtctcacgttgcgagtggtcaaagggacgaaggaaggaaaattataatggggggtagatggaactttaaggccactagaagaaggtgaaatgttgtttggagttacggatgcaatggagaaaatggagtcaggaaaaataccaattttgaggtgagtatttctactaatatagatttctcatctctttctgaaactaattaagcggcgagccttaggattcaaggccgtcgagcacaatgaaaatggttagcttgaatgtccagggatttaagaatccctggatattacgggcattacaatcccatgtttgagatgtcggaccgagcattatttttctaacggagagtaaattgacgcgtactcaaggtgagagggtgagtagtgtgttgcattttgagaacctctagactgttgacagagtggggttgagatgtggtttgcttttgatgtggcgcgatgaggtgcaaatacattatccacgtgtattttcttatt

SEQ ID NO: 203757 - DNA, 637 bp, Cannabis indica
acccctttggaagtaagtcagtaaattattgttgtaatgtagtaaaggccttgatggaagaggaggaggtaggatgaggaggagggggggactgattgactgactctctccactgtgaggttttgcagtcaaacagggaactggatttcagctttcaaatgtggtcttctgcttctgtttctgtggtctaacatccggacttccaggttagttgtcttctgaaccaaccatattagtggcctgctttaggatttattgccaaaaagacaaatggaccacatagctctagaaaaaaaataaaaaaaataatcaaaatttgtttattattattgtatatatagtaactcttaataattgtatccttagtatagtacattgaataattggattatgtatatatagttagtacaaaccaaccaaccatagcttagccttgtttagacctatatatatgcagtattgttattcggcaccagtggtacttagtaccatttataggtggtgtcctatgattggttagcgatattcatacataggacccgatacttaatgatactaatgacgataaaacaactaggatggtgtgctttttagcatttctcatatacataatccatcatttgactctctctctctc

SEQ ID NO: 203758 - DNA, 1504 bp, Cannabis indica
atatatatataatattcaaatactttataacaaaatatttcccttactcattgtatcatctctggctattaataaattttcctgagcaaattaattaaaatattttgtatgagtaaataagagaagctaataatacagttgtatttccctttcaaacaaaaaaagaaactaataatatacaatacaactgtattttttcctcttctcttttgtaattagtttgttatatacatgtatgaatatttatatgatgatgttaatgtagggatatgattttgtcccgtattgtactttcacggattgtagtctgtgatgtacggcagctgtcagataagggagttatttgatctgacggttgagattgatctatgagtaattagggttaaaaagtagaaacgtaccctgacactcatttaatgtattctgagacccatctaatgtaccacagaatacattccgtgaaaacaaaatcatatccctattaatatatattgggatcctgtataataaatgaagtacatacatttaatatgtaaaatgaattatggtagttacatggttatctatttttaaaaaaaataaatagaataagaattgtacgttttggatttaataatatctatttataagtgtcaaaataaaagtaaaaaagtttaaagatcattgaaaaaataaaataacttattatttctagtactactaactcgcaccaaatttaataatgatacttttgaagataatttaagtcaatgcatgcaaaacctagttattgcaacatattttaaaatccactacattacatagcatcctctctctctctctatatatatatattaattatattttcgtatcttgcaagtatgaagatatataggatatatctttaaaaatgtcaaactcgcattctctggtcggctcattcgagctgcccatatgttggaagctggttgtgtgctcttgcacgcctacttgaaagtgtaagtaattgcataaatttgatgaaagttttactaagcatactaggggaacattacccatgagctacttcgagtttcttgagaagctcctttcaatcttcacctttaatttcttggaaggctccttgtacacaggttctcgttggagtctagcgtctttttggatcagtctgtgttctcgtagctttgctgtcgtacaaagaatgcaccaatcacaatctctaattggtagattacttagtacctttgcaatctccaaatgattcccagtgagttttgatcaagctggtctccctgcaagtataaagaaaaggtcaaaatcttcagaataaaaataatacaagtatgagagtatgcaatgtacgagggcatcggttaaaatctatcctaattccaggcaaagaggatgcataaaaccatttcaatttctagtctcccatgttggaaactgtgcctacaattcaattgacttctgagttggcccacttactgaaacagtagaagtcattatcgtggccaacattctt

SEQ ID NO: 203759 - DNA, 733 bp, Cannabis indica
ttgagctgtgtttgccttgtaaagggatctgaactagtgcagcctttgcaagaaaagaacatacaatttcttctttatatatacatataacaactctcttcaatcatatccattcataacttctaattaagtacaatttttcttttcaattctgaattttgcagtaactttctttctttctgtcttgtctgtctaagatcccataattttttgtttttacctttttctagtaaaaaaaaaaatcaaaattcagtccatacataaagtctactaaaatggcagctgggcaattgaaatctgttgcttctttacttttggtacttaatttctgcatgtatgttgtaattttgggcattggtggttgggctatgaatagagctattgatcatggcttcataattggtataaatataaataaatatcaaatttcatgtcataaattgaatttttatttttcatgatttaagagtgaatttttatttacaacaggtcctgattttagtctcccggctcatttctccccgatatacttcccgatgggaaatgcggcgacagggtttttcgtcacctttgcattgattgccggagttgttggggccgcctctattctggctggagtcaaccatattcggtcttggaccgttgagagcttaccagctgctgccacagctggtatcattgcttggactcttactgtccttgctatggggtacgtaacaactttattactatt

SEQ ID NO: 203760 - DNA, 742 bp, Cannabis indica
ccctacctcatcatataatctagcttaaatagtgtttaattctgtattttataaaaattattgattaaatttttattttgttgaataataaattaaactgtagttttcaaataaaataaaatatataatattttgaatttaattttcgtcaaaataaaacataataattaatagtcataccctgaaattttttgaatagatttgttatatctttgtcatttgcttgtgttagaaattaattttaatttagttatatattctttaaaataaaagacgaaaagtaagttaagtatactattttgtatcatttaaaaaataaaaaatttaaattgttatttaataaaataagtaactaatataggtaattttttataatataaaattcaaaataatatttaactagcaattatttattatatattattgatggtgtattacaaatttacaatatggtaaattattttaaaaattttaaaaatatataataatattattataattataatttacactatcaaataaaaaaattataattataatttactttttttatatacagaaaaattataactttaaatcaaccataataataataaaaaaaaacacttcctttaccaatcaagatctaagaataattatctttatcaacattcaacttagcaattatttttggtggctcctaaatggggaaagttaatggtgaattgtaatgttaatgaattttttttcttcttttaatttt

SEQ ID NO: 203761 - DNA, 734 bp, Cannabis indica
tttctcatcttttagtctactatttaaaaaaatttaaatttattttggctcgggtaaaatatttaaaaaagtttaaaaatttttaaaaaataatgttataactataacaaatatcatcatgatttttttttaaaaaaaatattttaatatgtattttcagacacaaaagattgactaaaagattgtaaaaaataattgacagtagaactcataaatattattttcttgtcttaattgttttgtaagaattatccatcaaatcttttattttattaaataaaaaattaaactttaagttggtatgaaaatgtgaacactcaatccacaccaatgaacaactgtctagttatggtggtgaacctgcaccagatgcaactctctacaaatttattttaggagctctccaatatgctaccattactagacctgatctctcttattgtgttaataaagtctgtgaatacatgcaagctcctctgttttctcactggactgctgtcaaaagaattttgaggtacatggtaggtactctagactatggtcttcatctcaaacctgctccagactttgccttagatgtattctgtgatgcagactgggcatcaaacttacatgatcgaaaatccactactgggtattgtgtatactttggatgtaatctcattgcgtggaagtcccaaaaataggttaccatatctggataatcaacataggctgagtttcgaagccttgga

SEQ ID NO: 203762 - DNA, 1089 bp, Cannabis indica
atcactaaagatggtctttttgtgatgtataggctcgacatgccctgcaagcatattgtgctcgaattcatttcatgctttaaatagaccaatctattttcttatataggctcatatccgtcctttatatttttatatttttattaaaattgatgagttaattactaaaatacatgtgtatatttatagttttaattacttttaaattctttttcaacaatagtacttacacacaatcatataatagataataataataattagaattttaatattactatcattttaattaataaataaatatttataattgttaatattattatgatcaaattatcagattttgtttattgtatcgtgtatgctttcgaacaaatcaaatcatgcttaagtgtcatacttttaagcttatcgtattgtgtcttgtctaagtccatattttttgtgtcgtatcgtactgtagaaaagtgagagactaatacatgcttttgagcttctctatgaagctcaggcattggcgcttagtgtgattctttactaagtattacctgtctaaggttattattgtaacatttaaagcgaagttgatttggtctccaccctatttttattcttaatggaatgttcttttgagtgttttcattagaaacctattatcttgcattccaactttgagatttctacatttattcttgattattaactttatgaattattgtatttttcttaaattttttatagaagtaatgtattttatgtagttgtgtaaatttgagctttaatgatgattttatagtaaatatgaagcataacaatgctaatgaagcaaagttccaaaaccgagaagtaaatgaggtcacgaatcaagctatttcaagaagcttttcttgtggtgccataatgctagatcaaagcaatagaagaagggcagacaaacttgtgggagagttagaaaacacatcactagacgctacaacgcttgatggtaggcactattgcgcctgttacgaagatttttaattgattgaaattttaaatgtcattttcaaagaactatagatagttacttatagcttcaattttagatga

SEQ ID NO: 203763 - DNA, 1745 bp, Cannabis indica
atcatataaatataataatatttgacacacactatttgtagaagtattagtggcatgcaaaatccaccgctaataagggtagtattggctacagaaataagattttgctgctaatgctacttgtattattattttttattaaaaaagtactattggcaggctccaccattattgcccgtcgctaataactaggcgggagttttcttgcttctttcattcaaattattattagcggtgagccccatcgccaataatactaaaaaaattaaaatcccatcaacgtactacgaatctaagaagagattgaagaaattagggttgagttacaagtctattcatgtctatcaatacaactgttacttattttacaattggaatacatctaaggaggcttgttaagtttgtagaagtagtcgatgggttacttctgagaacagtaacgaggaaaagttccttgcaaagtgatgcgatactttccgttgataccttaactcaaaagactatatagttcgaggattatatcgaagagcatgatatgacatcatactggcaaattaaaagatgatgggtgatgcgatattcggttgatggtcttgcttggaaagagtttgatgcaaagcatccggagttttcaagagatccaagaaatgctcaattgaggttaggtgctgatgaatttaatccattcggtaacatgagtcttccatacaatatgtggccggtggtattggctatctataacctaccaccttggtaaggtatgaaagataattattttatactaaccgttcttattcttggtgcaaaatctcaaggtaaagacatggatatatttttaagatcgttagtagacgagtgaaaggagttgtggagtaatggagtacccacgagagatattttaaccaacacgatgtttacaaagcgtgcaacgtttttgtggacagtgaatgattttcttgctcgtagtagcttgtctagatggagttgtcaatgtcacgaagcttgtcctacttgtaatgaagacacaacttctattcgagtaatcgggagagacctcttatatggccatagaaggtttttgccaagtaatcatgcaatgaaaagaaacactcgatttaatgaaaatgttgaaataagacctcctccgagacgatttacttgtgaggagatattagaacaagttaatgctctcaaactgtaaattctagaatatcatcaagattttagaggcatgaaaccagtggcggactcatgatttaaagtgagggagcatattttttttaggtaaggcaaggaaaaaaagaaaaagaaaaaaaaaatactattggtgaaaactcttgagttctatcttatatgttatccattttaaccattaaattaatattaatattatgcttataaatatcatcttttattacaaatatatgtcatagttaactaaaatgtacatacattttttttagaaaggacgactgtcccgcctcgcttctatgtgggtctgcctatgcgtgaaacatagaagagttgtggaagatggtgattggaggaaaaaattattttctacgagctggagtagtggagcacaaatattttaaagcacaatacagatgtcatgcatgttgagaagaatgtgtgtgatagtctccttggcatcatcttagataatgataaatctaaggataccaccaatgcaagacatgatttaaaaaaataggtgtcagggaatcattgtggatttatgaaga

SEQ ID NO: 203764 - DNA, 522 bp, Cannabis indica
aaccttgaaaaatcattcaacttgcagattcatagtatgtagacttataaaaaatagatctagagttcccgatcaatcaaatcatgtataatccaaaaaatatgtatcactacaatagttaatattttaagtgttgcattaacgttattttttaaaatttcaatcttggatttagtcaaatccaatcacgaaaaataaactaaatttgcattcatctcgcgacatggatctagccacgtttttttgaaatttttgtttctgttgttgcattatagttggccgtcagttttattgacactctattaattgatgaatcaataattacacactgatcaatctacattttttttaatcttatttgcaagtattttatatagacaatcaaatacagggatctcataaaaataattctaatatggtaagtttattcatattttaataatggttgagtctactttgatttacagtgttcttataattgtttcttcaaaaaatactatcaaactacaagtcgttgttcat

SEQ ID NO: 203765 - DNA, 1121 bp, Cannabis indica
aagcaaactaagtgtaaaagttgaatcggctggaagagcaagaatgcaagatgaccatctcgctacgaggaagctccctatagtccatccaactaacaggagcgaggctcataaccctggcaagtcagaagatttccatatacccgcaatagacgtaaaacatatcaagttgacatcaaaaagaaggatggttccagctcgccattggaatcacttcagtctagtttctgtcgagacatctctagattcaactattaaatacgtgtttaatacacgatattattgacccagtaaaagcaggaaagttacagctgtatgactttcgaaatcatgcaccgcgtttacatttagtaatatgtaatcagatcccacgatttaaaggataatagctgtaattacattttgatcaactttgtaattaactgacactatgcaattataaatggtggcagacaatctcaaaaaagggacgaaaaaagtcttatgcaagaggccttaaaaaaaaatatactcagaaatctgaataagattgaatcgtggactgtgcagaatttcaactataaaaccatgtaaaaaaactcggtgttcttatattatttttctataacttttattacttctgtgttgaatcataatcgtgaggctcaaatttggttaatgaaaatatgtgttaacagtttggttctttcattgagagcctctgtgaaaaaactcagaaaaagtctttctttctttcaaataaaaatcttctcctttacggctgaaaatccagagaatattaacaccccacatgaggaaactaaccgtcgttctcgaaaagagcctatcggctctagaagatcaactcatctgtcgtccagaaggaccaccccttctaagagggcccaacctgaggatggtcccagtgctcggaccacacgtcccaagagaactcaacccgacgttggccctagtacgcggacaacacgctcgaggagaactcagtgtgggaatggttagaatcccgaggcaagagatgaagagctcaaccgttgaggtgcccacactataagagaatgaacttatgaaacaaaaagtcgatgcttgagacaccgtcttgaagaggcgcagcgtcgaaatgc

SEQ ID NO: 203766 - DNA, 1444 bp, Cannabis indica
atgtgtgtttcagctcatatactagctcattataagagattcaataacagaatccataataaactaacaggagctaatagacttgtgcttaactaactctaacaaccctctaactatattaaatgtcttcaacacaatggaaaataaactaaccaaataaaaagatctaaacatggtataccatcaaacgaaaccactagttgcaagagatagaaagacacacatgtgtactgtcctcgagtcaaaacccattttctcccctttaagattacattctcctcaagcactcaagattagaaacactaatatagagtctaatggtatatcactgtgttgaataacaaaaaatgaatgaagaagaggggagggtggggggaatcatcacagagactattagtcacaataaattaaataattttagtatggtacatattacattttatttgagattttttttaaaaaaaattcttaaaaaaactaaatgttacttttgatttcaaatatcttatttggtgacgataaataaatatatgtttcacacatcttaaaatgatcaacttaaagagtaacttgcagtggtattattgtttaatcaaaacgattaatagtgtagttgttattcttttttaaaattataaaaatatgaaatagagataaatggaaaaaattataataaaaaaagattattcacacataaagaggaagaaaaaaaaaaataaaaatagcacttaagtctaacactaacgacaacaaaattgacatatcttttttgatatacgcgatagaatactaatgcttgtatacaaaaattaaaaaaatttaattagaaatttttaattaatgaacggtatattagttaattattttttaattacgtatataattataaaaatttctctatataatttgatatatataattttttttttggtaaaattataatttatatcaaacaattaagaaatgtttaaataaaaaatatataacttaacttttattacacatttatcttcataaggataagataactttataccctatattttgttttatttaccaatatatcacttccacacataattctcttaatgctgatatcattgtacttccatcacactcaaccaacctaacttttctacacagtttcagcatattatttaaatttcttcttcttcttattcttattcttcttcttctcattttcaactacacatttaaactatccctaaaattatttaaagaagaaatattttaaaaaaaaaaaagtgaaacctcaccatcttcagttgtcgttgaagaatcagcccatgttttttttctctttttttttctacaatattctttataaatggctataactcgttcttcatcttctctatctccttttgtgaaaaaagttccaattacaggtcctaacgcttcaaaaatagggttgaaatctgtc

SEQ ID NO: 203767 - DNA, 1751 bp, Cannabis indica
ctacattttcccatgaaactacgtataaaaagcagacataataaatttaaatttctatatataaatatagttaaagtgccaaaagaagtataatttgtagttgtttttttttaccattgcatgtgaatcatattatattattcactatcttgatttttttatatagtgatgatttcaagaagatgggccaaagaatttttgtattcattgttggtggtgcaactagatcagaggtaagattagtagattcttaaaattaagagtgtatcgaaaatgttatttttctataatgacacaaaaaaaatgtcttttttgccaacaatccttatactaatttatatggtcaatttttattttttattatttcttaatctgatcactactgaagtgttttgtgttattattctttctcagcttagggtttgccataaacttactaggaagctgaaaagggaagttgtcttaggctctacaagtcttgatgatcctttagaatttataatggtactttttcttttctttttgtttgatcattgattatctagcacatggtattttaaagagaattgctaaaatgtattattggtgtctaataccttgttagtgtcatactgctaagtattagtgtaattaaatagcgagtctcatataatctaagaaaataacgttaaggaaatattgttaactaatcgtaggataccacctatgaaagatgatgagcactgctggtgtccaatagtaatgatctattttaaatgtgaaaatgaatagaacattattattgggtgccggtgtgcccaatacattttagaggtgatgccctgtgattggttaattcaaccaataacaacataacacttagaaatgatgtcgtgtaatcagtaaacatttctcttatgaataatattaattattataaaaaataaagatgtaattaaatttgaatttaatgactaagatggtctttttgcaaaaataattagaataaatatagtttaatttttggtaaggagaattagaataaatattgggattatttcatatttatatatatacaaaagcaacaaaaaaattacaaaaatacggttgtatacaattttaaatattttatgatatgattttgtttacaaaaaataaggtctttggatatatttttatcttgtactcttgttaatttgttgtttatttttttttctaattatatgttattattatttttttatattgttcggatgttattttaatgttacttttatgtagttttttttgttgttttcataaaacaccgtaaaaatataaaaacaaaaattttgaacgtaaaaatataaactttttacaaaaaataatactttatgtatagtgcagatctgtattatttttcaaaacattattattagcattagtaacaaaactacgtgtcgtgtggcgtaatggtaaggattgcctttagtggcatcctttcttgcttgatcagtcaagaatttgaaatccacctaagcccctcttgaaagagattaaagaaaggcttggtccttgcgagtggtgtcatctatgtgatgaaaactcttgaggtgactactaataacttagtaaggtagactgaactataagacctctataactggcacggggtctctaaaattgtcaaaatgcaaaaaaaaaaaaacaaaaaaactaaaaaacaaatactacaccacgtgttattttttttttttttactttttatttacctatactaataaaatataata

SEQ ID NO: 203768 - DNA, 793 bp, Cannabis indica
taaatttctccaagataaaaaaaagtcacgctcaagcttatagagcaaacatttatttccccgctaaatagggccgtcaatgtcaattcattcggcaacgacgtcgtattaagacatcttcccgctaagctaaaagacgtaaggagtggcattagtagtaaatctcgtatcattatcacttttatcatcacactcgaagaaggcgaagaaaacggcagaattgagcccttagaaaatagctgagagatttcgaagaagaattgcatacaaacaacaatggagagtttttggaaacgagctaagggattggctgaagaagccgcgaaaacatctcagtcactgacaacctctgccaaaatctccgacttagtctccgaaaccgctaagagatccagggagttggccgccgaggcctccaagcgagccgatctcatcaaaactgccgcccttaagcaagccgatcagatcaagtctttctcctccgatatcattgtcaatcctcccactctttcctctctttccatcaccagctcattcccttcttcttcctcctcatccaccggcgaggtctcgcagtccgacctcctcaagtttggaatcaatgaagatctcactgactttgtcaaaggactcacttctactacattccaaagctttactattcaaggtttctgaattaactcttattccaatgctgaagttctgatctgatttttcgtaattttcctgtttttcatttttaaaataaatatttcgtttggttagatgaagcggagggatctgattcagaaac

SEQ ID NO: 203769 - DNA, 954 bp, Cannabis indica
caatttattcttaggagctatcatagaaatgtcgatgatggcttagtccaaatgccttcaaatcattaatcagtaataaagaaatcaaataatttgcgaagtgagctcaagaccaaatcaaaatcaagagaaagtagcaacataaacctttgttctgttgctaagaaaattaaagtgcattatgctttgaatttggtaatgaaactcagattgactaagttacaataatcacaataattctctatcttatacccccacacagatgtattactgcgatcgcttatgtactttacaaaggaaaacatacacacacacacgcgttctaaagtcaacaagaaacggatccgatcatcacacacagtatacaaatttcaacaaaatcagattcagaaaaccaaaaataagcaaaactcataaacttaacaattaagcgatcaaaaggagtacagtgtatgaattaacgtacgatccataaacgacgatgaagatcaaaatcaaaatcaaaatcaaatctcaaaatgacaaaatacaaaaccacaataacagtgtaaagtaaattaaagaccttcaaaagctttgcggagttgctcagcgtcctcaacaggagaaggaaccacagatggtacggtaagagtcgccattgtcacctcttttcactcactctcttcctctctctctacttaatttacggtctcttctttgttctgtcttatgtccgaggtgtagtcacctttagctaagcttatttatatagagagagttctaagggaatataccatgaattatatatgaaaatgtaacctatgatttaatgaaataaccaatggacctaccttttttttttacaaaattacctattttttttatatatacttttagtgtcaatttttatatatatatattcgataaaattaaactttcaaaattagtgtcataaattttaaaattagaaaa

SEQ ID NO: 203770 - DNA, 585 bp, Cannabis indica
aagttgttcaagtttgatatatatatatatatatatatgcatatataaaatttttcatgattttatagtcatctttccgttgcttttgcagggtcgtaatagtgactggttattccagtgactgtgaagcagattaattagttaggctcatcattctggtgatgaaaatcgaattttgtgatcaatggtgttgaaacttccaacacttgcatcaaaatcatcatgtcattccaacgtacttttattttgtgatcaatgttacttttattttgtattatttatatataattttctaattttgggaaaccttgtccttgcattggactttagaacagtttgtgtgtccaatttttcaagtatggtgtatcattgataactcataggaaacaatttttataactttagatgttttagcctttaattaaaaatctagtgaaaaatataagtacaacaacaacaattttttgagctagaatagtgtcattgtctattgtgagaaatgttcagttctgtaaataccattttcaaatatcttgaagaaagtttaaaatgacttttgtatgttgttagtgcgtgcaaaatgtc

SEQ ID NO: 203771 - DNA, 2352 bp, Cannabis indica
gcctttactaatccaaattacctaagcggtcattacatcaaaggcactcctggccagggactcatgttccattctaacagtcagctccaactccctgccgatcgattgtttcatcttcaggccttctctgatgcagactggggcacttgccctgacacacggcgatcaattacgggtttctgcatgttcataggtgaatctctcatatcctggaaatccaaaaagccatccacggtctccaaatcatcggctgaagctgagtaccggtcacttgccaacactacatgcgaaatcctatggctgcacaacattctctctgactttagcattcattctactcaaccaacaacagttcattgcgacaaccaagctgcaattcacatatctgaaaatgtcatttttcacgaacgcacaaaacatgttgacatagattgtcacattgtacgggagcaaatcaacaagaacaaaatcaaattttcctatgttccatctcggcataatgttgcagatataatgactaaggctttatttcctactcaattcaaatctttattgtccaagatgagggtatccaatctctacactccatcttgagagggagtcttaaacttagttttttatttggttgttcactctgtcaagttagttggtctggttttatataatagatttctgttatggttgttaagtcaaagtcagccctttccctttgtataaatactgtttcattcatttaataaaacaacttttacattgctttcactattaattagtgacggattttgagtttgtcgctaataataattaatagcggtggacattaacggtaggatcaccactaatatatatcttgtgtcagttttgattaacaaaactgacaaacactattagcgccgagctccgtcgatattgcccggccaccactaatatattaagttttaaaaaatacaaaaaataaattaaaattaaataataaattatataaaaattaaatatctaaatactaaattatataaaaatcaaatataatttaacaaatgtttttttttttttgaataataatttaacaaatgttaaatattataatttaaaaccaaaataaatacaatattcatattataatgtctcaaattaatctatataaataaaatatacttaatatttgtaatgtctgaattattaacatacttaaactaattactccataaattcatcattaaagtctcaggaaaaaagtcttgattcatattattatggttgggaggtactactagtgccaatgactgtaaggaacatatggttaatctaacgataagccaagcattagctctcctaattgagcttggttgagtattggggtagaataaaattattgcatatgcaaagaactccctaacctaccaaatattttgaagtcaggaaaatgtgaactgagcggaggacataggggtggcaattcgtgttcgcaggtcgtgttcgtgtcgtgtcgagacccatgtataacaggtacatgctttacccgaacacgacctgtttaataatcgtgtcaaaaaatgaaacccgaacacgacccatgtaacccgtttataagcatattttgtttaaacatgtcaaccaataacacgtttatgaagtatttaacacgtttataacccatttatgacacgttaaagtacttaaataactttaaatagatcattaacgggtcaatattgtgttagctgtgtcaacccgaacacgacccatttattaaatgggttatacgagtcaacccaaacacgacccgaacccatttaaggaaaacccaaacccgctaattctcgtgtaggttttgagtggtgtcatcgtgtctgacccgttttgccggtcctatgaggagattacaaagaggtccataaacatactgatttctctgttgcagagaagacatgtgttgctgctgcggagaagactggtgttactgctacagagaagactattgttgctactatggaggagcgacataactctgagaagatgaaccaccaggagtttgtgattgaccgtacgtttggataaagttatctaaaaattagttatataacttagcacattattcaggtgttagactacatgtgtcacgtatagtcgtaaacatatttgccacaatattgtatattttattaggggcaaaggatgcacaattgactgactttgactgtatatattttttttactttgcctttaatcttataaccaatgcctctttgataattaggtctttccccaagtacttttttaagtaccttgaatcagattcagtaccaaatgtatcactctgaaattgcctttcaagtcttttcctatcaagct

SEQ ID NO: 203772 - DNA, 538 bp, Cannabis indica
acaatctctcacgtttttttttttttttcaagtaaacaatctcttacttttatactatataagaatatatatctttcttatatttatatgctcaaccaaaatagccttataacttctcaaattcttaattgctaactcaagctttccctttcattatctcacacaaaagcaaggtcacaatcccaaagccaatcagaacactccttcgcccccagccaccaaatcatcccaacatcctcttcaaaaattatgtttgggtaggctcttttaatatttttttttttagtattttgaatagatctaatgatgtcatttttttttaagatctaagatttttgattttttttaggtctgagctcgactaccaaagcccaccaagagctcactattaaagtatgtcttaaggttaggggtgagttcgccaagagctcactaagctcactaggcactcgacaaaagagctcactaatgaagtatttcataggtttgggttccttaagagctcactgagctcgacatgagcttaccatgctcaaca

SEQ ID NO: 203773 - DNA, 664 bp, Cannabis indica
ctagtgagctcaatgctattagcgagcctgccctaatctattaaatactctatcgtgagctcttgttaagcttagtgagctcgacatgtgctcaccaggctcaacaagaactcactgaacttttgtcgagcctagtgagctcaatgctattagccagcccgccctaatctattaaatactctatcgtgaggtcttgtcaagcttagtgagctgggtaagctcttggtgaacccacccgtaacatatgtaatgtcctctatcgatgagattttggtaagcttgctcttgtcaagctcagtgagctcatgtaaaaaactaaaaatactacatttaattattttatgaaacccaaaaaaatacattaaggcatcattaaatctattcaaaacaacaacaaaattgtaaaaatataacttaaacatagattttgaagaggaagacttgttagaaatttatatatatgaaatgaagcatatatgatcatgtataaaatgcagaattaatcaaacatatactcactatgaataataatcgaaatacctccagccattgaatttttttgagcttcaatcccacacaaatgttgatttgcaaacgaaaaagaaactgattagtgtgggtaatcggacttctaagctctttctactctctttagatggattta

SEQ ID NO: 203774 - DNA, 1104 bp, Cannabis indica
aaaaaaaaaaaaaaaaacagttcctttaccaattaaaatctaagaataattatctttatcaacattcaactaagcaattatttttggtagctcctaaatgaggaaagttaatgatggattgtaatgttaatgaattctttttcttcttttaattttaatattaattttaattttttttgcttgtcctttacttctaatccaagaccttggtcaatttcattttcatctattggttaaaaatgcaatctttgaaattacacaaaataaagaaattaattatagattaattaggataaatttctttaccacatgttctaattatccattaacaaacataatattttttatatttctttttctacttgttcttttgtatttatttttttctttttggatggtgggaacatcttgaaatgattcatctatgtaaattttacttgcttagaattagtaaaaaaaattatctgtgattaaattggtgatttagacatttcaaccaagttataatcatgaaaaccgactttgtgtcgattaattgttggcttaatgcaattaagtaaataattaaaacatgggttttagaagataattcatgacaaaaagttggacttgtggaaaaaaagatgtaaaccccattgtacacattcactaaattctatttcataatgtaagttttgggtaattaactttagttttttttggcatttaggaaaattttgtagttttttttagtatcgagcaaaatttttatattctttttttttttagtatgatcatgtatgttgtaattttttaggattatttgtaaatttttaaaaaattataaatattttatactatcaaaaaataatgttaaaatattgtgttgcacttgtgtattattagtttttttttttatacaagtagtaagcaactatttaaattttattttctctaaattatttataattttttaaaaacttacaagttgctcttaaataagtataatatacacaattatgaaaataaaagaaaaatagattaaaatattctcaaaataccaaaacaggaatcgtctatggtgcggtggagaaaagtttggtttgggtcctttcgacggctggg

SEQ ID NO: 203775 - DNA, 914 bp, Cannabis indica
aaaaaaatgaaagttaatagcaaaattatgagtggtgacaaagcaaggcaaccaattatgaagttcttagtcagtaggcacttgagtcaaatcaataacactataaaagaaaaacagtgtctgtttctaacacaaattataatgaaacagaaagcactgaaaagggtcatatgggtgtgtgaaacttatgagcttataatgtcgacattttgtgaactcataatagaaactaacaagtactcttataacttttactgaaaaatgtactatccatgcaacattcttattcttttttccattattatattcttacttgttacaaaatcagacccccaaaggtttaaatacatgtaaaacttttcttcttcttcttcttcttcttcaattggtttttttcacaagtcttttgttgatttgctcttttgtttccatttgctataagagcaagtgaatatatgtgcacattttgtgtgaacatgtatcattactctttgctataattatattgacaagtgaatccactacagttttaaagattaaagcataagcataatgggataacaagtgctgatataatataaataatacaacatgtttttttttttgaagaaccttttgatagtgtagacatgacaagtggtcataaattttgttgcccattctttcaaattgaggtttaaagttctattgtgtgctccttaaccacctattatttatgttagtgtccttagcaataggcagaagcctagagtagtagtcaaaataacaatagaaatttacaaccatcatggtttttctttttcttcaccattgacataaaagtaaaaatgattgatgtcactctaggttaaattatgtccaataatgctaatgggaatggtgttggatactagggcggttctatttggattatt

SEQ ID NO: 203776 - DNA, 796 bp, Cannabis indica
tatcttcggtattagtactgttacttgttatcttcttactaaggattgttgttctaatctccttttgaagctttttcatggaaattggatgtcgtatgagctcagtcattgcccattctaacactgtgtacgttgtatccgttcccgctgcaaacatgtcctgtacacaaaggtatttttataaatgtataataccaatttgtttaatttatttagaaattttattattattaaaaatatttaattgtcatataaattttaaaataggaaataattttatataaaataatgtattattcaataaacataatatattaatatttattgtctaaagttaatggtatatatattagcaaatataaacacattaattacaccaataaatttagttagagtaatatgttagttttagttagtaaattatattatgaatttattgatacaattagtggtgaaaatattcatatatattataaataaattatatataaaagagtatcaatctaacacaatcatccttaaatgtctcttattaggaattaatgccaattgattaatataattaagagtgtttattggactacatctaaaatttttaagtttatttaaatccgatctaattatatattggtacgttgttagattttatcatccaacctgataatttcagtagatcgatctaacatccattaaatgttggattgggtcagttccatatccattagatgtatttcttatatattttttggattggttcattttaaccaatattttagatttattattattttttttt

SEQ ID NO: 203777 - DNA, 741 bp, Cannabis indica
ttcaatctcttaaacaatctttcgatagaagtttttttttcaacaaataatcattaaagtatcagaagtcttaccacaattagaatttgaagtattccttgtggcagtttggtatatttggggaaatgaaatcaattagtgcatgaccaccaatttcgttctcctgaatttatagtttcatatatttaactcctttctaatgaaatcaacaatatccaacataccgccaatttaaaagagaagactaattgtacattaacatcaaaatagattattccaccactaggtacctttaaattaaatgtggatacattcttagataataaaagtactacaatcagaattagagcaattattcgaaactcacaaggactactaatggcatgcatttcgaaatctttatatggtaatggtatccttaattaatgttttactaatttaggtaattttttaaggtggtttttcatgcttccaaataaaataaggatataaggtaaggtttagatgtttatgtggctattaaggatgaatggaggttttctttttgtccaagataggctcaatatttattattattattattattattattattattattattattatatttttgggtgaattttattatgttttgtgttggttttgaagggaatctcacagttatccatactgaagcagtagctcctttggtggcgttggattggtcacttgaaattggtatccctctttattgtattg

SEQ ID NO: 203778 - DNA, 1282 bp, Cannabis indica
atattttttatttttcctaattcaaacaaaatcatatcggcagccccacaaaataagcatttataatcttttttttataattaaatttgaatcaacagtcaaaaaaaaattatgatttattatacggtatgtatccaaaaatttgtacaagcaccctaaatcaataatttttttttacataaaatatatatcttttattatactatttttttttaatttatttcttccaatttacattcttaaaaaatatacatgattttaaaaaaaaaaattataaaaataaaataaaattaaatattaaaattaacacaaaataatgtgaaagaaaaataaataaaaatattaacactgttataaaatattatttatatggatattcaaatcaccaaaatcttttccattaattgtaattactatttccttcaaaaaaaaaattgtaattactattagttttcaatatgactcacatagttctaataaaatattgtatttaattatatgaatatgactaaagaatcattgaagtgattattattgatacaattttatagtaagttttgaataccaaaaaaattttaaaaaaatatattaaaacatcaaagtataagaataaaaatgtctcaatacaattttcttataattcttttagacattcaaaagtactctaccattcatctgtatcaataataaacattttaataaatctataaatacaatatttttccacaaatacaaaactaaaacatttactttagttaaatacatgctcaagaaaatcaaattaaaaattaattttatgaatagaataggtgtgtcgaccctcttaaataaacatacattcgttatatttgtataatttatctgctccagttgaatattaatataaatttataaaataaagtaatttgcgttataaatatttaagtttaactctaagtttaattattaacaataataatacctaagttatatttatgaaacttctataaatactagcagtagcaattaaatgtgaagtcattatatacatatcattttcttgttagtatatttaattaatttttaaataaaaataaaaaatttaataagttagacttattaaagtactgccacgtcacaattgaatacttacataattttaaaattataacttacttattaaaatttaagttgaaattttataatgtcaccctttaaaatagatatattgatgtactcttatctgttttaaaacccgtaaataattttttagttcaaatttttttctctatggtcatgtacg

SEQ ID NO: 203779 - DNA, 804 bp, Cannabis indica
ctccacaaatcaaataaggcaggaatcaagggtgggatttgggtcaactaggaatataaatatcatatctccaactaataaggagtgtaatacgttgactatcactgatttgaagagaagaagagtagagttgggcctagatgttgggccaactcaggatgacttaagtggaaatactgggccggttggtgaagagggagatattgagcaattggagcttatggaacatgattctcacgggccaaaaaatggattgggggtgggtcttgcttcgcaagcccacctagcattatgagtactataagttggaattgtcgtgggcttgggaacccacgggcctctcaattccttaaagacttagtgcttcaaaagaaacccaattttgtgtttgtttgtgaaactatttgtaagaaagatgtcattgagaggattagaaatcggttgggctttgaagcttgttttagtgtggatcctgttggtcggggggttggctttgttttggaaagtcaaagaggaggcttctctgttgggatactctaataatcacatagatgtggaaatttctcaagaaggaataacaaaatggaggctcactggtttgtatggagaacccaatcgttctcttcgttatcaaacttggactcttattcgcacccttcagaggaattcccaacttccttggtgtattattggggatattaataatattggaagccttgctgaacagaaaggtgggagaccatacccgaattctttaattaatggttttcaggagatgcttagtcaatgtggattggtggatat

SEQ ID NO: 203780 - DNA, 547 bp, Cannabis indica
aagcaactcgtgacttaccaagtcacatacgttgctatactatatacaagaatggattaaaacgttcttcatttactctttgaacatttacttcaattaaagttgttatttaatataaaaacggctcagaaaccaattaattatataaatctaaatgacatttgctttctatgtaaaagagtgatctaaatcaaataaaccaattaaaaatttttgtaacagtggactaagcaaaccaaactctgattgaactactataatcctcttatgttctttttattttatgcttttatttcatctgtttagtagccaattgagtacacacacatttttagttgagtgttcttatttgcattgaatactcacataaatttgatgttgtctaaattcttctgacaacatttggagccgtttatgagaaacgcatatatttgatgatttctagaggagaatcaacatagctacggatcagacaaatgtgaacaacaatattatatctttcgacattgagactcttaatgttcctatccatggtggaggagcagca

SEQ ID NO: 203781 - DNA, 1173 bp, Cannabis indica
taaagttcaggggcatgatttggtacatgtcaaagttcagggggcaaaaatcataattagcttttattttattatataaaaaaaattgataaagaaagtcttaagagtactatatattatattaggtagttttcatactcataattatttaatttttatttaaaagagtgtattgtatattatattaaaaaaaaatcaaaattacatcttaaacaaaaaaaaattaagaaaatttagtgataaattccttatttatttcgatatctataaaagttttttttttctaattatttttcatgatctaattaggtacgttatacttatttattagtaccaaatatttagaaaatttttaatagtttatattttgaaaaataaaatttaaaaaatgtttaccatatttataagaaaaaatagtcatacttgtaataaaatatttaaaccttattttcgataatttaaattattcgaaattttttaaaatttacaataatcttatataactataagataaaaaaaaaattagactaaaatactctcataaatatcgaagagtgtactgtagacttaccgaaaaaattgtgtgtgtacatagatgggcatatatacaattaaccttattaatatataatattgaaattatacttcattcatatataaaacaggttgtcgtgggtggtcctaagtcctaataatgaaagtgcatatatgctttctctatatatataaaatatatattattaatgaatagcaatagctttctcaaaatttagtgctccccaccaagcaattaaaaaagaattaaaattcttttttttattttgaaaataagcgtagttatatattaaaaagatattagactttatgctcattacacaaaatgttctccggtaaaaagttgatcggaatagaaccgtacatctgatagataaaagcccatttaatcatattataggccgcaaagttacaatacctactaatattcgaaaaattacaacatatgaaataagaagaagacttagtaaaaaagaattaaaattcattatataatgcatataacttttgagtgccaaacttagtaactctcatcatgtttcaaactctgaaaagaatgtaaatctatcctgtgtaatgattgagaggtctatttgctttgatctataaaacgcttta

SEQ ID NO: 203782 - DNA, 535 bp, Cannabis indica
aagtgaagaggcttgctctctcctaggtctgaaacagtgacccagaatcttctcttttaaaatatgaacatgtcttacataatcatctatgaccacctccatgagtttccaaaaatgaaaaactaaaagggaaaaaggtatatgactagagttaataacaaagtaataaaaagggaatgagaaggaaaagaaaaaagtgtgcaggaggcaaggagtatgtaaactatctcttggaagacggaagaaaatgtgcacttcaagtgaatgcaaatgtgcagatgtatggtaatatgtatgcatatattcattagaaacaggactccaaacctgaaataattttgaagcaggaaaatttcctatcatggtctgcaaggttgcctttgagaaattcaatagttgtggcaaactggaaactcctcttgtgcttaaggaatccgcaagttcaacattcatacatggcagcatccataaagaagaattttttctcaaaccataaacccttgaacaggaataaataatatgtatcaaggcagag

SEQ ID NO: 203783 - DNA, 574 bp, Cannabis indica
gccgactatctaggactcacttcaaggagggaacaattagccatccgaaacttccttctggaggaagattaactttcccgaagacttcttccaaatggacaagttagactttcgggaacgtctttcaagatgttatctaacttttcataaccaaaacaattatcagaaatctttatatttggaggaactatatcacaaacctattatcattaattaatgtatcaaaatagagtaaattgttactactatttggagtcaaaccactacaaatcctgctatcagtcatttaattttaactctttcatatatatactcagcagtcagcatcattgactaaatcttcactcaccaataattttgttcaaatttgtccagcattagagtaaaatggaagaagggcttcagatataaaaaaaaaaatggaagaagggcaataaaagttaccatgatttttttctcccaaaaaaaagtttccataatattttggtggaaatcctttcctgagtaatagtttgacattttcaaacaccacatgcattcacaatttatgttttcagccaatttagaaacaaaa

SEQ ID NO: 203784 - DNA, 735 bp, Cannabis indica
ttttttttaatttatcaaaatttagaaggtcacctaaaataaatgcaacctaagaaaaaaaatagactaaaatattattcacataccaaaaagttcgaaagagatatggatggatcaacatcctttttagagaatatcttcttaatatatatttaagttttttaaaatataatataataataaaaacaaagaactgtaatggcacagttacaatacactatatttagtatgtttgttttttataaaaaaaaatggtaaacaaaaaatatcattaataggtatatagatttggctcaaagagcataatcaacaattttaagctaatcaagtctaatattattagttgaaggtcatcacaaaattattgtttttttttttaaaaaaaaaaaaaaaactcttactctaaaagtatgtatttggcgagtttttcgaaaactggggttttaaaagaattgaaatagcaaaaaaatggaaatagtaaaaaaaagtaagaagagggacactaggtagacgaagaaaatgtaaataggaactatttattttaaatctgtaacttaaaaatagaaacaaaagtaaaaccaataaaataataaaaaaaattaaagaaaaactagtaacctttaagggattaagatttgagtttgtggatattataagtttgatgtatcttttattttgaaagaaaatataaatttgtttaagtaaatttactattttaatacattattgaatttt

SEQ ID NO: 203785 - DNA, 1502 bp, Cannabis indica
ataatattactaacttttgttttttagactctatcaaatttttcttttccttttgagagttgctttagccactagatcatcgttatataatttcttgtttgttacatgaaaatgaaaagaaatcaaaatggatgcttttgattaagctttattttattttttcaggattcttatgcactgtgccgagtcttcaagaagacaattcaaataccaaaatgtaacaaagatgaagaaaatccagacaataataacattaatgggagaaataatacagagaaggataatcaatcaacagctcttgtaataataaatgaatcaaatcttaagattcctcatcaaatttcaagaagagtagagaataataatgaagatgaatattatcccattaataataataaatttgtatcagaaacctcttcttcagatctcactcaaggcacaccaactgaaaatggtgtcatggacgatttccaggctccttttgcttctgataatgaagcaaatagttctgcagatttgtactctcttgctctaatcaattcttcctccaatcttgttcaggtatatatatatataaatattatattatattatatacagacgtacgtagatcaatctaataattatttattttggatattttcagtaagagtcaaaacaaattataatgatgattatttacgagaatcttcttctagggttattttttttttttacttttagggattaaaaatgaagacattatgtcattattacctcctttgctaattaacagtactacatatacatatgcattttcaatacaatatataagattctgctttatgtcactaacaaattaagagcttcgtgttcacacctctttagggttctttgtatatatattatatagcaaggatatagatgatgagtgatatgaccacgttcaaacacgcgaaaaatcatacaacatgattgattggtcaataggagttggaaaatgtggcccacaaaacaagtcctttgagttgtctttcggatcttaaagtgacaaaaagtttttgccatgagtaaatattgaagtcatgagtagtactagctagtctctttaatttccaaaagcttccccttcttattatataatacattactactactactgactcacatctctttcttcttcactctcttctataacttctttttgactgactactcacccccacctctttctcctcctgtttttcctcacataaatatgctcctctttatacacctcatttcatcacactcaagtcaccatcacttgataatcatcacattcattattaaattattctctctatttttagtattactattgggtactagtcactacaaaaaaactattatttttagtgacaacataaattttttgtcactaaatataatttttagtcgcaacaaaaaattatttgtgactaaaatacagtatttaaacacaagttatcactaatttagttttagtcacaacaagtattgtg

SEQ ID NO: 203786 - DNA, 1592 bp, Cannabis indica
ttttgagcccttccaaaaacaaccattgctcaaagaaatttctcaccatctgaaccacatcacgaccagcaattttccagaacctttgatagaatcccagagtcataaaattaaaatgaaaaataatatacatgatttaaaaaatgtaaaaataaaattaaaaattattgatattaagagaaaataatgtgaaaaagatttattttaaaaaaatattaaaactgaattttttaatattgagtgaacttataactaggggtgttcataaaatagtcaatctattccaatctgtacaatccaatctaattcagaaagtgtggatatccgcacttatgcagataagatcagattgtaaaatctcaaattcgcacttgcaaattaaatgttgattaatttgtaaaagtaatcaatccaatccaatccacacatatttgtataaaattttaaaaaaaaatatatacaattactatttcaatgtaaaaaattagtaattgaaaaatctaatacatataatacaaatatattttaaaactaaatagatcaaatacaatttttttctctacatgcactatgaataaaataatacaaatttaattagatgaaaaaccctacttataactttatgagaggcaaataaaactaccaatttcataaaaaaaaaaaactaattatgatttttgccccatgaactttgacatgtattaaatcatgcccatgaacttttaagatcgttaaaaatgtccctgaactattgagattgttagatttaaggacttttgtctaatttcattaaatcttactatttcaatgattgtttatgtactaaagcatgctcccagactttgatatataccaaatcatctctcgaactttgacatgtattaaattatgctcctgaaactttcatccatgtttgacttttttactaaaattagactaaagttcttaaatccaatcagctcaataattcaattagcatttttaatgaccttacaaatatacttacaaatataaaaatcctaattaagtttttttttttttttctttttaaatgaaaatcgtagtgattgtattgaaccgatcactcaaaacagtactttgttttcctcaccaccataaaacgtgttcaacctttttactacaaaaagaaaattcagaacacaagacagaaaggtccactctcagactccggcggacggaccccaaaaactcaaaacaccaacccataaacctggaaaatgtaattcggattgtccctcactttctaggcaacatcttcatatcctaattcccccaatacacttgttttatttccacaccatggatccagagcaaacttttattcgagtccaagagcgcttctcccagatacttaccccaaaagtcagagctgctttggagtatctctgcctattcatcgccatcaccttgttttgtgttcttgttgttatgcacgccaattacgttcaacaagtaagcttttacgatatattaatttctgtctttatgtatttttgcagtgtggaggggaatttatgcaagttgctttagggttccagttatcaatttctagaatttgacttaacttgcat

SEQ ID NO: 203787 - DNA, 1013 bp, Cannabis indica
ttgactattaggatgaagcctttaaatttccctatttaaattgtgactaacataaaaaattgatgccaccgaaagtttagaaaacaacacttagtgtcagaaaaactcttaattcatcagagtacatatatcagtactaaaactaacgacagtaatttcaaaaattaacttgatcatgaaaactaaaagtacaagctcaattaacccatctaaagagtcaaagctaatttcactaaaaaaattgaaagattacctgtagcacaaaatcaacttgaattagtgtccctttaaataaataaaaatatattacaaaaaattacaatttagaaccgactctatttattaatctaaacaatcagttaaaaatgaaaatattaaagtatttaactaaagggaagagagatatccttttggttacaatcttgaaattttattatagcttattgataatattctacatgctaaatattctactaaatcacaaccttaaatttattttagatagtcttcttgtatctaaaaaattttaattgaactttaaattataaaaccaaaataatcagctaccatatacagcacttccagccaccatacatggtacaaccaaccaccacacatagattcaattaaaaagaaaaaaattgaacaaatataatttaaaaactttagacactaaacagtgaatacactttaaaataaaagtaaaaattactattacaataaattctcagcaattattcaatatttgatttaacaccaactatctcattttcaaaaacaaaatcttactagaaaagtggataggggaaaaatagtgtcattaatgtttgaattggtttgtttttgtgtctatagctgtaccattaatatgatatataatagtttcaatcccatattatatataattaatgaagtgatcaatacacacagaaagagaacccttcaacttgctactaaataaatgaattttggcaacatgtcaattttgcgaagagtattgttattagtcatca

SEQ ID NO: 203788 - DNA, 1020 bp, Cannabis indica
tttgtgaatttttttgaaactttgcgcgctagaaataatagtaatgatcacaattacaaattttcatgttatttggaccaatttaagtgggtcaaaataagtttgccaacttgaatctaaaactgtccaaacttgagttttgggcatccatcataaaaagaataattacgaactcttaacactacttattattttattttttttttttaaaaaaagacaaaaaaaaaaagacactgccaaattctgctcttaaaatatactatttattaaaaaattttaaatataataattacataatcatgtccattctttaagttctgttactttaaccattaaatattaatatttttatcatctgaactttaattaatactaaattttgttcttttaataaaaaaaattaatttaaaaaattatcatttttattaaatctaaaacaaattaaaaaaagtcatttaaaaatataatattagattaacaaaaaaatattaagtttacttaaaaacttaaattattcctaaaaaaatattttcaaactttattttatttataaatacatatcttaacaaattaaactaaaattattaaaaatctaataaataatttaaaaataattagctaaggttttcttggttcgatttttctctcttccatggcgaagaagaaaagagcaactaagaagccagcacttcgattgatttcaccagatcctgtttcgaactctgatgtgagggaggaacaagatgcagatactgagatgaaggaattaggcaagaaaatgacaagtgcgatcaatgaaggagaagagaaggtggatcacgatatgatgcacgaagggaattgctctgaaattcaagatgaaggttatggtgatgcttgtgctactcagtcttgggcagaggaagtgtagcaggatttgtaagaatctgctcagagtcattggaggaaattctcagtaagtttctaatttctgatgctatactgaaatatgaggagccgataatcaaggaaggcaagaaa

SEQ ID NO: 203789 - DNA, 1132 bp, Cannabis indica
gaatgagttcaagaggttgagaaactcttttggaagatagagaaaagggcaatttatgacttttgccaagttgacaagagtgacaaaattttaggttcttaagggagtgtggtatattggctgttgataaaattttgcttaatatggctggtgctggatggcctaatttagaatgccataaattgatatctgtgtgcatagatgtgtttacggcagtaggagatgaacatgaaagatcacttttattaatagaacaatgattacaatctgtgtgcatagatgtattacatggtgtttgtggactacagattgtattacaacaggaatccaagacagatgtagcaagattacattgaagagaatggctagacaatttggagtgttcatctcctaacaggtacaagtcattcttgagaattcctttcaggaggacagtacccgattgtttgtccttgacaaaacagcaagatttgtgaaactcaaggaagacattgttatctttagttaatttggaaacacttactaaatttttagtaatagatggaacatgcaacacaaattgaagatgtaaaggttggaatttaaagaagggagagtagttttaccaacatgagagataagtaatttcttatcatctccaacagcaatagattcatgtccagtatagggagttgctgactcaagattatccatagtgaaagcaacatgatttgttgccccggtgtccacataccagccggaatcatcaccaaaatcagcgagattttgggtgacatgagtttgagaatcgaagttgccactttgttctgtcagatttatttgaggttgagatgagggctgcttgggagtgacccagtttttatcaaatctgtaatgacagattggtgaagtatggccatatttcatacacaattggcaaaggggtctgttggaagaagggggtcgaccaaaattgcgaggaggtaatcttgatgagctatcactggtgttcattctgcagaagcataaggatgcctataaggaccatttcttgagccaaaagtgagattggcagccattttggtggatatatccatcatggaattgtgtctttccaaccgagtttcatgtgacataaggagtgcttgaacct

SEQ ID NO: 203790 - DNA, 1273 bp, Cannabis indica
caaattggaattgaaataatatttaaaatcttggcaaactgtagtataattgcacaaaaacaaatgtttggtaactacttttaatctctctcaatgacaaaagcaagcacacaagaaaaagaaatgattcaaatgcattggagatatcaatacttccctggaaaaaccagttgatctctcaaagaatgaacaaagagaagtttcacacaatgtttgattttcttagacttctttcatatcccaatgaatttggaaaggcataagacttagtcaaaaactactatgtttagcaaaatgacaggcaggcacccattattgctttaactaccttttttattccaaaaataaagacactatgaaaaacaaaattgctgggatgggtttgttcaaatcaatttatcacaattgtcattactcgcttaatattatttatgtgatctccaatgaatatattgtgagttacaacaactaacatccagccttacccgaaaaaaaaaaagaaaaaaagagccaaattcacaaatttctgagccaatacttgtcccacaccaattaaaacataacacattcattaaaattgcaacctaaataattaaccgaaaatttatatttttccacactgtacgtgttcatttttttaatttatttttgtagttatttctaattaattaagaaagcacttttcgtggagcatttactaaattattatcagaatcaaattaaaaataaattaatgtagaaaatgtctgagaataaaaaaaatatatatacaaaatatagtacttgtatcatgttgtttactcaactaaattgaaaatgaaattgtttattaagattttcaaaaactaataaaatataataaagctaacaaaaataatattttatgaagaatgaaattagagtttttacgcggttagaaacgaacctagtccacgagttaatattattgctataagactagaaaagccttatgattttgttattccaaaatttgtccacttgacgtgactcctccacatggcaaaaagcacaaaatacgttgaagacaggtcagcactaacctgccaggattagtgccgagcagcctcttaacctttgagattctatgatgcacagtacacacaaaaaaaaagggatatatgaacctgccagcaagatcctggccggacctatagttcatcggccaagagtgacagctcctaagaactaggaagggctggctggccaaaggtgaagaagcacaccaacaattgtatttttctcacaagccttc

SEQ ID NO: 203791 - DNA, 550 bp, Cannabis indica
cattacaagtgactatatttacagtttaatttcttcagttgaatacaaattttaatgaaatgatgaccatcggcttttacactaaaacaaaaccttatatactaaatcttggttaaattttacactctggttcctgaaacaaagtatattatccctatttgagaatgacacatagaatcaatcagctaaaatgtgactcaaaccaatcaaggatttgttcaaaagccaaactagtcatttcatggaatgcaaaagcaagattcagttcctcctgaatgggatgcaacaaatgctcatctatcgaaatactttcatcttctttcactgctttcttccaacgcgttttacgtccatcatttctcatgtatccattttcatcaacaaaccctttgagcttgaagagttcaaacaatttagcagaaacagaatgatcaatacctgggattctgtcagccaaaaactgtggtgacaatgcgaactccatgcacttgacctctgcaacttcagcacctttatgccttataagctccatggttttatcaatctttcg

SEQ ID NO: 203792 - DNA, 581 bp, Cannabis indica
aattgaattcatatataactttatttcacaaactaaaattaaatatatagttatattactattgaaaacatatgcattgaatttaaatttacataatatacttattaaaaaataattaaataagtgcataattttaaaatatacaaataagatgctatagttttttttattttttttctgtaaaaatagttaagtgaatatttaaataattactgtgctaaaagttgtggttaaaattataaaaaaagaaaacacacactatatggccttttaggtttggttttttttgggtgtttagcttttttttttgacaaaatttggagtcgaaggcgtttcaggcgaagcgagaaggagtcaaaataaattgaaggcaaaaaggcctcctatggctttcgttattcggttatttggtaggactaacaaaagtcataaggtgcatatatgtggattctcaatccttataacttcggttattaacatataattgaaatcataggtcctttttttttttatgtattattcatttattttcagtccaataaaaaatgataactatatattttttcaaaaatatacataaa

SEQ ID NO: 203793 - DNA, 994 bp, Cannabis indica
gaggatagatgtattgactaggaaggttggatacgattgagttgtcaatactgtattttataattttgggtaattaattatgaattaattgtttgatctccattttatgtagtttccctttttaacttgatatgatcttttattcgagatttgaggagagctaattccttatttggtgcgcttaaatagaaaggaaaatcagacttgtcttccaggaacacacaatttggccctctgagctcgcggtactggagttgtttccggatgcgggctgtcattggcagaagcttatctggtcatggagcttaagtaccttcttggaaggtcttgtctaacttaggcttgacccaaattatcttctttaggcctactggtgggctttagatgctgacatgaaatccacgtgtctcccttgtcagaaacgcagataacaccaagcattgtagcataatgaacaagtggcaacagttaaaattttcctatcatacaaagtaataattaaaaggataagagactggaagtcattccactatttggctaacaagaaatctagtttcatattttgatttggagaatgcaaatcatacaatgatttgtgtagataggaaaggagacaatgtttctattgttacaaactgaaagcaacttgtaaatgatttagacaaagaaatcaaaacttcactaattggaagaaaatgatgggagaatgaaggaaaaggatgaggtactgcatcattgattagaaatggtcgaagaaaccgaggtggttattgtaagaacaagagaagaaactgattaaaaaatcagtacaaaaactaaaactgccacagagcactttagtgggaagacgctccttatttcagatctcattattaatacataattcagtttttagaaatacatttgtgtcttctttgattgtttctacagtaagaatatgtattgaaaaagtgaagcacatggtttgattggcgtagtctaatatggttttttt

SEQ ID NO: 203794 - DNA, 1476 bp, Cannabis indica
cgacagaaaggagtgagggttagatcattaaacggaaggagtcatattctgttatgctacacatttgaaagtattctatactctattcatgataatgattttataggcaattattaattatgttaaatattaaggcaccaaagaagggactcagtcaaaagtctaagggacagacccctattctagagattcccttgacgcccttccttcttaataaaacaggttcaaccagatgaaggtgaccaaactttgaacgaaaaaaagagccagttgatctttcgaaagtacgatatcggtacggaagaggttcatgcagctactagcctaatcaccgtgaggcaaagtaatgagcttgcaggcagagacctcgatgctccttccagccctaaagtagtggataggtctgccgccacggatggattttgaacaaagttaggtatcaacattgctttatttgtcctggacctctttgacgatgtatccacttctagaagccaactgaggctgaaaaggtgggttgtgcgcaaatgaagacgttgtgttcttgtctcaaagccaccaccactaggctatcaaggtaagtgcttcagacatgtatcctctatttttcattattaattgcatgtaagttttcactaagtatttttttttctattttctcatgaggctcttcttgttaagtgttgcactgaggcaactaccaaaatggccctggagctagaaagcattcaagttgaaattgatgttgtggaaatcatgaagatttcttccttagctaacctagagagagcaaaaatttgaaggagtttgaagagaccaaggcagagcttgaaagagtcaaggagatcaacggtaaatccattcacaaaaattatgccatgaagcagaaattccaagagacttcagaaaaaaaggttaaggctcgagttgaatgtgtagtccaaactatagtcgaatctgccaaaaaagagcttttagaggtgaatgcgaagctggccaaggaggcgagtgaattcaaaattagttacaaccaagcccattataaagtcaattcccttgagcacaagtgtaaagttacaaaggagaatctgaaaaactccaaaggagaagctaaaagatgtagaggatgaagcggcaacatccaagacgtaactcaagaagaggcaggagcaaatttagatcctagaggatgatctttggatggtcactacagatcgagaccaatgtttgaagacagaggataaattgaaacaaaatctagaggccgccaacaatgacaatgttgggatggaaaaggagagggttgaccaattaagggaggattttatgatctctgtttacactctttggcaggcggactaggacatatctctgaagacatttgatgccaaagaagaagaggttagtgcttcacttatcgctcgagagcaagaggatattacgatcaaggctcaaagggaagcataagagaagtcc

SEQ ID NO: 203795 - DNA, 1097 bp, Cannabis indica
attttttatttatcataggacaaaggtagaccactgcccaagtttggtgaatgggatgtcaatgacccggcatcggctgagggattcactgtaatctttaacaaggctaggaatgaaaaaaaaacaggtggaaaacctgaatcaccttcaaaggatgaccccacctttaagcatgaagcagttcttggaaaacctcaatctgtaagttgttgctatttccctatcaccttttgtttgataccctaccaacttgatgtctttaacatttataatttgggagagttaatttaaatgcacatatttttttttttttaaaatttctcttgaaaataaaaggatcattaatccaaaatcaggcttgaggcaacaaaaaacttcatttgaatttttaagtgtaatactttaggttattatttttttttttcaatttagccgttttagaagattttaatcctggcgtgccatatagttgagtttacgtaatttcaatgctatttgaaatgttcaaagtattattaagttcctgaataatctgagtttactttcattggtgccattttttgtttcaaaaaaattaaggcttgtcttggttttaactctaatttgatttttaaacatttattggtcttagtgtttgtacaacatgcttattttctcactttattttaaattttatcaaattgcatctatcattgtaatcttgatctgaattggtgtacttagaaacaacacacttcagttgctcagaaacttgagaacgttttttttttcttatatttatctgctttatgtaattatgtttcacttttgtcaagtcaacgtgaaagtgtatttaccttttgtttttgggatttacgttagaaaataatgttacaagtactcactcaaccaaagtaggcatttttgcaatttgtctttttgaccatctctccatgtttgtttggctgatgtttaagtactaaatcagccaaactatgtaaagtgttttatagctgttttcgttatgtcattatcacatgggatagcatcagtgttttgaggggattttctaggttggggagatggggggaataccttggtttgcgtgtgttgttgtc

SEQ ID NO: 203796 - DNA, 1639 bp, Cannabis indica
atttactttatctaatcgttttaacttgactaactgtcattgactaaaagtgaggtcaacaacccaaattaatccttgactaatattgtaataccttaaggttaagaaatcggattagcaaaccctaactagttaaatgtgtattaatatataattatattattatataatttaatatatggaattatattgattggtgacattttaagaccccattggtgagtcagggataataccgtatttatgaccagataagggtaaaactgtaattttaatgttatatcatgcttatggactatattattatatagtatatttgttctgtccatctacaggtattatttgacaagtcgacgctgtagagtcacaataaagtattttaggccgaactgggttcggggcccgaaaatatatttttgggattttattttggacatttatttgataaaggaataatctaaaaatattgtgtgtgtgtgtatataatttatgacaattatacccttgatgcatgtgtaagcttattttggccttggaggggactatggtcatttgaccattttaccatattttcaacaaaagtagattttattagaattgatatgtattttctcgtttcttcagccccataacggattctctctctttctctttactcatctttcttcaattttatcaatcttggaatttagcttgaattagagttggttttgtgtgagttggtcttagaagcttggaaattgtggtaagcttcttacctagttattccaatgttttaattcaaagtttaagggctgaatatattgaaatgttatatgtgttttgatgttcatttgtgatgtagatgcatgttggtgtgaattggagtaaaataatgatttcttggttgattgagtttgtagatacttgtgttttgcatatagactatctaggattttttaagagtgaagttgtgatttaatttctggaatttttatttgaagctataggtttgggttatgaatttttagagcttgatttttgagttctataccatggattttgagaacaacttgttggttgaattgtatatattgatgttgttaaagtttgattttttgcttttagttctctcatattgtgggttggaattattgaaatgtttatttgagttgagcatgctttggtaagagtttggtgtgttttgggcttgaaattcgagttgctgcattggcatttctgggtttttaacccaggcaccatggcccgctcgtgtgaattctgggtttttctacctagaagccgcgacgtgcttggtgagtgtcgcagcccgcctggatattttttgggcagattgcttgttaaactttggttgttcataacttttcaacccgaactccgttcaggatgttccatatatcgttggaaagctcgttccgagctctatatgtttatttgtatttgaatgccaattatatgattatgtgaaaatagatttagggattaaccctatttgtgaatctcaaaaactgtgactatgattaccggcacttgttcaggagcacccgcagatttagaatctccacgtacttgtaacatcaggtaagacagtagttagcatgtaaagttaagcgcgttggcgctcatgtttgatattatg

SEQ ID NO: 203797 - DNA, 793 bp, Cannabis indica
gtttggttaaaaaaaaaacactttgagtggagttgtcctgagttttactccgaggaacgcagattcgaacactactctacaaaagacaaaagactatggaagaggggtaaaggtactgttaggggttcgctgccagcgaattggctgcgacgctactttctccgaggacgataatcccgaaggttcttgtcaataccatgattcggtattctctcttcagtccataagttttttatttttctttattttctctattttatttcatcaaataatttcatgccttcaaaggctttttcttctctctttttcatacacccaattgaaatacatggttgtctttgatctcttatctattaaaattctaatctttgtattatacttgaacttaattgccatggcaaccccaatattttgctttaaagtttttttttttcggttatgcttcttcttcttcttcttctttcttttttttttttttttttatttttttttaattaaagttatcatatgttattatggccttttgcatgatgggatttctacacacttgcttggcctgggcatcaactaatttatttagggagtaagtcttacgccgatgtttacatcttttcgaattatattttctggtttttttttaatcacttaatttcttttgctttatttgttttattaatttccagtcctttatttcatgacggaatgaaagagtggagttgctgcaagaagagaagtcattgattttttcttatttttagaaattcctgggtaagcatttaatgttttctttttt

SEQ ID NO: 203798 - DNA, 1376 bp, Cannabis indica
atctcccttaacaaacatctcgaattcacactagacactctagaatagcgagcaagagtgtccgctatagagttgtcaacacgagggataaacgaaacaacacaaacatcaaataaagataccaagttacaacattcaaaaaatgctggatacgaaccccatgcaaacggcaaagcttttgtctccagagctttgaccgcaattagtgaatccgactccactagcacagtgctgctaaaacagtaaaatgtatttttgtaatgctatttactatctatgatacgaaacaaaaagggttttataatttattggttgcagtaggtatttattataattatttgtgactaattaactatttaattgggttttaaatagattaaatagtaaaaattgtgttcactgtttggggaaccttcaatataatgctagaatataattatagtgtttggaattaattatagagactatgttgtagggctgagcatcggtcggtttggtcagtttttttacaaataaaaatttgaatttcggttttcagtttggattggttcaattcgaaaaccgaccgaccaatccagaaacacttttaaaaccgaccaaagtgaactacggtttggtcgggtcaaaccgccaaaattaattttttttgtgtgttaaatatattcaaaatttattttataaacacattaatacaaactgtaaacacatcattctacattttctaagtgtaaccatacaaattataatgtctagttaaaagtccaaactttaaaatacaacataatacaacacaaattaaatataagtccaaaaaaatattattccaaaaccacacaagcattaaaacaataatagaaattggagtctaaatcccacaagcaaccatgatcacccatttgcatctcccactagcttattcattgcactgtatcacacaaaacaaaacaaaaaataaattgaagatatcactatgcaacattaactattataatttctcacacttcaggcctgtaccacaatgaaatgataaacatctaagagtttagttaccttgagcagttggtgaacatggctaggtatgtaatcagcaacgtatcattgtattcctattaagaaaaaaaaaggaaaaaaaacaagcataataaaggacaatgtgagcaataacaatgattatcaatttaatatggttcaatatattcatcactgtactttacaatgttaatttaaaattgaaaagaaaaattgcaacataatgaaactttgacctcttcgtttaatccaattcaaaccatgtaataatcatcacctcaccttatcctccaatgtaatctgtccaattattacaaagcaacgatcccccttccttaatcacactc

SEQ ID NO: 203799 - DNA, 682 bp, Cannabis indica
taaaaatatttttaaaaaatagatgttgaccggagtgctcgttgttaatattaatgaataaaccatttttataaactcatatacagtgtagagagagagagagagcaatggaagaagcgaaaggagtggtaaagcatgtgttgttagcaaagttcaaagagggaacttcagatgatcagattcaacaacttatcaagggctatgccaatctcctcaatctcattccatccatgaaatccttccactggtttgtgtttctcctctttctctctctgatccaaagttacttgcttaaagattgaaacttttttaatacccacatcctaaatcagctcatggaatagaaaaaagagttgaccaaattttgattttgatttttttgtgtggttttggttgactttacaggggaaaagatgtgagctttgagaatctgcatcaagggttcactcacatatttgaatcaacctttgagaacacagagggtgttgctgagtatgtagctcatcctgcccatgttgaatttgcaaatgttttcctttcaaatttagacaaagttgttgtttttgactacaaacccaccacagtacttcttccctaaacccccaaagaaaaagaaaaaaaccaaatcttgtggttgtattgatgatgtttgctcttattacttttgatattcaataatggg

SEQ ID NO: 203800 - DNA, 940 bp, Cannabis indica
ttggtggggttgagggtgtgtctggatgaagacgatgaagaaggtgaataagaaaaaaagaaaaagataaaaaaagataaaaaaattatttattttatgattttttaaataatatattttgtttttaaaatattttaattaaaatataatttggatcaataaaattacaacacatggcatttttaaatgagtaacgactcagttaaaaaaaagctaatggattcacgaaaaatgtcacctttttgccgctatttttcgactttgggaacttatccgtatcaaattgaattttttgaggacttttgcctcaaatttcccttataagtgttatatagtttgagaacttgcaaactggtaaggttccaaagttaggaaatagaaatcgacataataggattgaagtcaaagctgagatatgtaagtctacttaaagaattgataaactcaggaatttgagtaaaattattgttaccgaaatggaggtacctcaaatattgtaattcaagcaaagaaggaccaagttcaccacccagagaacccttatactcatcatcagaatgaagatcaagagtgatacctctccatgcacagcaatctcggctggatagaagattgttatgatcaacaaattactacttgtactaatactccatactagactactcatcatgactagcaacaacaaaagtataactttgatcatatatattgtagaaaggaatataatatattattaattatattatatggccatgtacactacgtaatatatttgtataggacgtactccaaatcaccactagaaaagactatcacaattcaatatagattttatatttaattaatgttttttttgttgtttttatttgcaatactacaagtagctagatgtcacatgcatgcacaattcaatattaaatttacatattttaatttaata

SEQ ID NO: 203801 - DNA, 832 bp, Cannabis indica
atgacatgactacttagtcagttgccacgtgtcgtcagttctacatatataattaatttaaaaaataattattttttaatttaattttacataatttttttaatcattaattattttttaatttaataatttttaaaaatacataattttatttttttataattttaaattatatacataaaactaattaaacagccatatcatcattcagttattttttttttagcgctcaacacaccaataaaactaattttaaactcttttatatgtagtaattaataacaaaatataacattatatttttaatatatatatatataacattattgcatcacaaattttacactccactccaaaagttgatgatctcattttttttcgagcatttaccagaattttcttacttcctttattgagattacgtttagattagaatgaccaatcttatcttttgttttttattattatttatttatttagtgaagtaaatatttgtgacattttagaccatatattatgcctttttccatgtatctcacaagaagagtaactatataataaagtgtcataagttacgtaattaagaaaaaaaaaaaattgaaccctttttagtcaatacacgcctcttttttaaaaaactaaataaactaaataaataaaaattaagtgacctaaaagataggtaggtccaccaccacattttcatttcattattattattattttatttttctaatttttttaatcatatttgaatgtaaaattattgctcctaaaaggagaatacaaaatttttaaatcattgttgataagtgttttcaaaaaataaaac

SEQ ID NO: 203802 - DNA, 674 bp, Cannabis indica
catttcttacagaaactgagattgagattaacttatctcaagaacagcaaaaacaaacgaaacacaaatcctagttgagaaatgggaagcaggagattgagattaccttatctcaagaagaaaatgcataggttttggatgctgattccgttgaaaatatcagatggaggtctctctgttctaaagcattggaaattagggttatgggggtttagggttctagtctaacccactacattggtgagggttgcagataccaatcgaggaagaagatgaaaagaacataggcttttaaaaaataattttttaaagaaaaaaaaaggaaaattataagatatagtattttagaagttttttacaaaaatattacatgattagtgtatctacaaaagtgtaaagattattaaaagtccataaaccaagtgaattaaaaatatataccataaaaaagtaaatttttaaaaatttctcgtaatttgtgtaatttctacttgttatattttttaactgtcctttactatagttatatgacattttataattagttaacgattttttatattattatttaattaaaatatataagagccaatagtaaattgtgcaattaatatgccatctcatggttcaacccattaacatctccttttttttttttttttttttttgtttta

SEQ ID NO: 203803 - DNA, 893 bp, Cannabis indica
tctccactttggcttgatcttgcgtttcaaaaaccggtgttgtttcttaaaaggtttcagtttgagaatgcttggagtagggagcctatgtgtagacagattgttcgtgacaattgggaaatgtataatgaagatcctctgcaccagaaaattaagtgttgtagtacttcccttgctaaatgggggaaagatataacaggtaattttaaggatcgtattactcgatgtaataagcagctgaaaaaattgaaggggcgcagagatgatacatcggttcagaaatataaggaaacacatgcacaactttttgagattctgacacagaaggaggtcttttggaggcaacgatcaaagcaactttggttgcaagcaggagaccagaatacgaaatatttccatgcctgtgcaaatacaaggaagaaaaacaaccagattgcttctctcaagaatgacaatggtgtgtgggttgattgggatagtggcttggccacggtgatggttgactattataaagagcttttttctgcttctgatacaaactgggaccgagtaacagagtgtgttcaaggaagagttaatgctgatatgaatcaaaaccttgtgactccgattgatagtgaggaagtaaaaagagctttgttccaaatgcatccggataaatccccaggacctgatggctttaatccggggttctatcagaagttctgggacatagtcggttcagatattgtgaagctggtgcaaaactttgttatgcttggtgagtttccgaacaacctatatgatacccatattgtccctattcccaaaaaatctaagcctgaatctatgagtgatcttcgtcctattgctctctgtaatgtgatttacaaagtagtctcgaaggtactagc

SEQ ID NO: 203804 - DNA, 962 bp, Cannabis indica
caaaaaaaaaaaaaacttccaataaagtgggtcatctgtccaaattaattaggttgttgcccaattgatgtagcatttaatttaccaaacaaataataatagtaccaaattgattttaagttgataactaaattctcttgtcagctgtcactcctttcttcgatcacaatttttcattagttagtttcttaaatctcattctaataaattcgcataggaagggtgacaaataagtttaattatttacttcaatttggtaaattactaatgatcaacatactatcagttccagaataattgaagaactatagacttggatttgtcctctaacgagatggtacaaaattatatacataaaattacaactctaacatgtaaatacaataaattttgtaattgagttcatactttatttattatatatcaatagctttggtacgagatacatctattatatttaaacgaacttaatataatcctttgagtaatttgtaccataatcttcttcagtggtcaaatttttgcaattaaccttcaattctaaaattttaataataaaataccctaactcatgctctgttagtagtttaacatttccatctatttttagctgttaactgtcatggtggaatgtctacgtggacacaatgtacacatgacacaattttataggctcacataaataaatattctctgctaagacaatggggacgagctggaactcgacatgtggaggtttaggttgccggagacgacgaccaaaactcgctggggaggtctttgttgacggcaagctcatagtgacggtactgaagggggagggcattgagaactcgaagcacggaggagatgggggagggcgttgagaactcggagcacggtctttcttcttcttcttccaggtggttgttggatctgggaaggacgtactcagatctggttgggattgggtcgtgctaaat

SEQ ID NO: 203805 - DNA, 1031 bp, Cannabis indica
tagatgtatacatacaattatttagtttaagaaattattagtaattaaaattaattttcagtatttcgtttttttttttttttttttgaaaaggtaaaaaattttcagattcagccgaaccaattatatattattgactattatattggatcaatcaaatattcactaaatcagtttacagattgggtgctgcatccgataaaaaccgtgacaaatggaagaaagtgtaggaggggaggcactggatggggattctggttcgacaagctcccaaactttgatctcaccaacaggccttgaacccattactaattttgctaagggcaatgatggtcagtacgagtcagaaccaccgattaacagagccgagattttgaaggctcttgaagttgtcgagagggattcaatagcgatttcagagagctttgcatctctattcgcctctcttcgtgtggctctctccggggtcagtcttcttcttttcttgatgctgttgtttttccttttcaaatttctgttttgattttgagaaaatggaaacacagcgaaattggacttgtgaaagtttttgtggaacaatgttttgtaggttactagtaactctgttgaccatatgcattgtttaagcgatgctgctggtcgtcttcaagaatccggtatgtttagatatatacatgaatatatatgtatatatattttgtaatataacacagtttctgatgttatgatttttatttatttatttatttataatcttacctaagattgcagaaagcagataatatatacataagtattacttacaacatctttgcaagatcaatgtggagaaaatatgtctattctgaagcaaatttattttcaattgcagtgcttgattctgcaacaaagggaaatcgatatatcaattcatgtttaaggtatttttttaaactatgaatatgaactatgattgttttgcaaaatttgctatatcacaggcatgaactgttagaatatttatatactatataatgaaaaatgctcttctt

SEQ ID NO: 203806 - DNA, 1671 bp, Cannabis indica
taatattcattttctttcttgtctttagggcactggttgtacaataatgtgaggactgaggagctgttggggtagtttttcgacttgtgtgacttttgatggtgctggtgtcgatgtctttggcctagtgtcgcgctgctccttcggttactatcttgttttctgatactgctggatgtcgtttgtatttgttgtgtaggatttgttaccagggtattcttccgccacaagtgaagttattcaataaattcgggaagagatcactcatagacatgtgatgctcttctcttcttattttactatatagcagttttttgaggtctaagctaataatactatgatcttctgctatatctgtactcactcaaatcactctgctcagtttcaacttttcaatacttgtgcttagtcatttccttatttatgttcaatgctgttataattacaaatttcattcataaatgattcagataaatacatacattcattaatgatcatataacttgttacaaaatgagataaatacaggtgctgtggcattagataagttgatacgctaatgttctagttcagattctttcttaggttaaaatcttctgttggctactatgtgcgcaattttgaggacctgtcatggtttttctccgccacaagtgaggtttttcaatatacttgaacgggctcaatttaagacaagtaacctctatctcttaaacttagaacataggcacttcgttgatatcaaagacaaagttacaaggtttccaaactcttccagacagtttggtttgaaatctctccataaagtattctactttcttttacacataagttctcactcatctagtaagataggactaattaacgtattgctattcagcactagtaatgctcaatatcttttataggtaacactatgattgtttagcgatattttttagaatctattttttaagttatataacacccgatacttaattacaccaaccgcggtatgacaccaagaatggtgctagacaccataatactttttagcatttctcctttttatatagactcagccactaattaataagcaataagtcccgtaatgttatagcttataggcctcagtgcattcattcagcattcgttcagattatgtacttattatatgcagttttcttttaaacatgtaataatagtctttctataagaagtttaattttttgtagtaataatatttaagttatatttttagaactctgtagctatttgaccgtaatgttaagtcattatccacatgtcattttctttttagttatttaaactattttttttttttgaaataaaaattgatgacttggaccaattagggattgtcacgcagtaatttatttaatacttaacatccaagtactacagagtttcagaattataactttaagtattattactgctaaaaattaaacttagacatttatttgtaactgagagttaaaacttaaatatttatgtcgtaaattactctatttattttcgtattttttaattttttttatatttttgccgatttgtaattttttagaaaaatatattgtgacaatattatttttatattgttacaatattatactatatttccacacgaccgcccttaggcataggagggctaggcccgtgcctagggcc

SEQ ID NO: 203807 - DNA, 1381 bp, Cannabis indica
ggcaaaattgaacataaataatgcctttttttaaatggagatcttgaagagaagtctacatgactcaacctcccggttttgttgacccccaattcccaaacaaagtatgcaagttaaagaaagctctctatgacctaaagcaagccccacgggcttggtttgccaaactttctaaagctttactacagtttggttttcagtcatccaaaactgacacttctctcttcatcaaagttactcaaagcattgtcatctacatattagtgtatgttgatgatattatcattgttggtaacaatgatagtcaagtaactaagcttatttcagatatcaactctacttttgcattaaaagatctaggagaacggagctattttcttggtattcaggtgacacatactgaaaatggcatacatttgtcacaaaagaagtatctccaagaccttctttgcagaaccaaatgcaaggtgccaaaaccagctccacccctatgacaagtggtctcaagctatcttagtttggcagtgatcaagtttcggatccctctctctacagatctattgttggggcactacagtatgcaacaataacaagacctgacattaccttttcagtcaacaaagtatcacagttcatgcaatctcctcttgagtctcattggattgctgtaaaaagaatcttacgatatcttgccggttctcttgatcatggaattcatctgaccaaatgcaacagtttttccattcaagctttctgtgacgctgactgggcttctgacccagatgatagacgatctacaagtggttattgtgttctccttggatctaacattgtggcctggaaatcaaagaaacaacagaccatatctcgatcttctattgaggccgaatttcgtagtctggctgctgttgtcacagaaataacttggctccaatccttactttctgaactttgcatatcctcctgccctgttcctaaggtttggtgtgataacctcagtacagtaatgatggctgccaatccaattctccatgctagaaccaagcacatcgaaatagacctctattatgtgcgtgacaaggttcttcaaggccacttacaagtgttacatgtcccagcacaggatcaactcgttgattgccttacaaaggctatttcaagctctagatttccaattctgtgtgacaaactaagtgtggtttgagcttcctcacttagtttgagggggctgttagatgagatattggttttataccgttagttagttattgtctgttaatcattcctgtaactactttatgttatctcctctccttttttgtgtgtatgtataagttgtttcttactctgtacgtaattgctaacactttgaatatcaaat

SEQ ID NO: 203808 - DNA, 745 bp, Cannabis indica
acaccaactcccatgtgccccaatacaaagctctctgccacaatgggcactcccatggacaacccacttttgaacgaagtgttgtgggtgcacttcagtatcttacattaacgagacctgacatctccttctctgtcaacaagttatctcagtttctcaaagctccaactaacgaacactgggctgcgtgtaaaaggcttctccggtatcttgttggcactattgattacggtcttcacttcaagcccgcatcaacactcaatctcactgcctataccgatgcagactgggctagttcgattgatgatagacgctccacctctggctattgtgtttacttaggcaacaatctcattatgtggagctcgaggaagcaaacggtggttgcccgttccagcactgagtctgaataccgtgctattgctcttgccacaactgagctcatttggattcagtctttcttcaatgagcttggactcaagctttcttcctgtcctgttctctggtgtgacaaccttggtgccacttctcttgcctccaatcctgtgttccatcaaagaactaaacacattgaagtggatttacactttgttcgggatagagttcttgctcaacaacttgacatcagacatgtttctgctgcacatcagattgctgacatcttaactaaaccactgccccaagttcaatttgatctgttcaaagacaagttaacacttactgaagctagtgtaacttgaggggg

SEQ ID NO: 203809 - DNA, 801 bp, Cannabis indica
tttaaatttgaatcacaatattagatatttttaggtatgtaaatagatttaaatttaaatcacaatgtttaaaaaataaaaaaaaatatatttattattatataatcacatttaatataatagagatataaaaaaataaaaataaaatgttccattaggttttctcttttcaacggctctagttataccttaaaattaatcatatatttataataacagtaattattacttccaaattattttcttctaattaattattttacatgggaccaaactaattgtattctcaatttctaatttagaggttataaatttcaaactttaattaagaagttataaataagtaggtagattacatttatacactcgggttggattttttagcacgccacgaaatgggtacgagcatgggatacgagtacgatacaatacgaaaaaatatgagcttaggcggttaggcctagcacgacacgaataaataaaggcccatgcacaacacgaaaatatgagcttgagcacgatacgacacaacaaacacgaaagcacaacacgagaatacgaattttatagcacgaaagcacgacacgcaagtacaaaataaaagacgaataaaaattcataaaataatttttttatttaataattcatctactctttcgtataaaaatgctttatttatatattttaagactatattttttaaaaaattaaattattttaatacatataatatatatttgttaaaatatcctttgtcaggcgaaagttttaaattatgttggcacattttataaatcagtg

SEQ ID NO: 203810 - DNA, 736 bp, Cannabis indica
ttgaatccacttggaaggcaaaagcccacgccaactccacctcaacgattgaagcccaccttgactctacctcaaatcaacaccaacagccttaagaccttcactagagccacttgcctaagaagacaatgaccttcgtcgctcgtgcaagcttaggtactgtttctgactcattctcatttgcaatctgcttctctctctctccttctctttgttgctagctctctctcttagcctctctattttcgtatgtggttggtggtgcgcggtttgagcaactatagttggtggcgacttctcaaaaaatgtttgatttgtgcattacacaatacatatatgataattttaatgtaatatatatatatatggtgtaatatttgtatttgatttgtatttacacgatatatttctaatttgtgctatttttcatttgatttgagattacaaaatgactagtttttatttgtataatatgtgagatttgtgtttatttttacttttgattgtgctcagatctgggttcatatgggttcggatgtgaggttttttttgtgattgtttagtgtgtctcttataaacagacaggataagtgtaagaattattttttataattgtttgtgagtgttgaaatccaacaaaaataattttaaatgacgactgataactaaagcaaatacaaacgttttttgcatctaaagtatacacgtcggtagggggaaccgatgaaaaaacttt

SEQ ID NO: 203811 - DNA, 615 bp, Cannabis indica
taatcccttttgacctctaatcttatgatgaaagtaaaataaagagcaaataaatcaaactggggtttaggtgtaaagtacaattttagtggggtcatttattattattttaatatggaatgtaaatcatagataattatcataaaatgaattttattcattagtatgtacatgacatgagacaaggaaaggagaaagaattggtcataaactttgaaatagctaaactttaaagggctgaacaacaacaacaaaggcaggtagctataaatgtttcattggaccttactggtgttggactttggtagttgctatcatgcccatatgcttgagatgtacatgacagtgtgacataactactattatcaggcacataaggacattatttacaaagtttgtaattccaaagtacacattttacaaagacatcctcaactgcatgtatctccatttcagctgctcaaagaaggtccaaagtacatgcatataggtggattgaccctcaatatagagaggattgcagatggaactgtccaaataccgtcgccacaaatcaaacccgatgcaactgcgcctgagtaatcctcagaactctttctattcactcgttcccac

SEQ ID NO: 203812 - DNA, 888 bp, Cannabis indica
attcgatcgaatacattattctttttcgttttttttttttttttcatttttatagggttaagagaattatgaagttgatgatcaaaggcatgcagccgctgttccacaaagaattacactatatgatgagaagtagattttgttggatttggggggtcattatcatcaacattaactcatatatatgagatcaaatttatgttggataagacatttaaggaggccatttcagcattatttatggtgatgaaatgatcccaccatatataaaagggtcactaacttatattatatcccaccaaattaacacaaagccagattcaccttaattttaatgagtcaagtcagagaagaacacattatttatacatgtacaaaattccctgattaacttttttatattatagtatttttgtgagtggtgcttcattggttgataatatcctctgcaactttttataaagggaaattactattttggtattttggttctctcattttaaattcattattttattttaaaatattcattacttattttataaagacaaattactatttcggttctcttattttattcattactactagctgttgctatatgtttaaatacacccaaaaaaaatttaagtactttcatatctgatttttcagtcctaattgaagtaaaaaaaaaatgtgcctacactttaaatttatggatatttttttttttttgtatatatggggaggaaggagttgaatttggaattccctgcttgtgagaagaagtgtggatgtctatgaacacaatttatcaattaattctagttttctttttataggtaaattaattaaaataaatacagtccaaaataaaaattatatttatttacttttatatatata

SEQ ID NO: 203813 - DNA, 1457 bp, Cannabis indica
aacaacccttcattgagaaaaatcgcttcagcaaattcaaatgtattgatctaggattggttggccattattctatcaatcttgtaaaatattctatcctccccttgctgcttatttgtccaagtgaagaagtttcccctagctagctttgacatcttcaaattggcagcaattgacacaattcaagaagtcagaataaggatgaaatttcaccctttgcccaattctctcatccttagctaatatgtcattaaagtctcccataagaaactaattttcaacaatatcaatttcacacaagctcttccaaagaagtctcctctcagttcgattattggaagcataaaccacaattagaaaactgtcaaatccatctactgttgtaatttttaaatgcataatttgacttgtgtacttaataatatcaacagtaaatctcaaggggttccaagaaataactattttccccccagcatgccaagctatattagaggtgaagcaccatcctgcaaacactttttagtacaaggtcccaagttttggggccttgacccttgtcttgagaagcccaacaaaataaccattttgagcattaataattgctttattaatttctgtttatgttgattgttagctcctcagacattccaacattagcttatccatttgaaagagggctctcccccctctctagtcttattccctgcatttacgatctctagaacatcttcccctgcttccatagtcatattattcaagtcaagagcttggaaagaattactcactacaatatctacaatttcttttcctttcccattagctttcctggattttgtcaccttaaagccctcctcataaaacctgagcttgctttctatggtctgtttttatgatccattcctgcttccctgtagtattttctcataatctgctggaacatgccctaggccaaagcaatgagtataggcaatgggtttccatgcgtattttatctcaacaatcgtgttcctaccatattcatcctcaaaatccaacatatttggaaattgttgatccatcaacacctctatcaatcttgaacaaggatctttgaccctagtactttagctctaggtcctccaatctgatctaaattggcacacatttcacatcttttttttttttttgaaaatttacatttcgatccaagggtttcattatgacaggcctcctattaaagaaaatgtaaccaccatttaggacctggtccctgttttttatcgaacaaaagcgaatgatgaagatgccataggaaagcatcttcgcaagatccactttgtccttccaaactctcttgacaaatcctttaaggatgtgcagtagaggattcaatcctaaaacatagcacataatcgaaggtttccagaacaagacttcattccatcataatcttcaccttattacttctttgctcagaa

SEQ ID NO: 203814 - DNA, 663 bp, Cannabis indica
ttattaagtacaaatacactaatttcaaaagatgacatttgtcactaatttataggaaaagtataaaagagagtacaaaagagagtcttcttagcactcctttatgttttaaaataaaaaatgttatctatataattataaccttaatcatttatttatgagaaaggtagataaggaaaaataattttaagttggtatggaatggcttttttattttatttagaaaaagtaattctttaatttacatatagtattacaattcttatggaatgagtttataataaacaaaccaaacagtggaaagatctttctttaagaatagtaattccatttctacattccttcatgtaaactagacactacctaagcagctaaagtgacacctaagcagctattatgcatttttttattaatatatattatgattgatattgatatattgattgatatgtgaaattaaataatgataaaatacgtaggagcaaaggaatatgagtagtcccctttcaaaacaaaaaagaaggaagtcagaaaactgtaaggtagttggggtgtgagccagtcttgaggaccataaataaacgtctttcacaacgctgcttcttcaagaagtggattttattcaaccgtacaacatatatgacatatggagtagtatataaa

SEQ ID NO: 203815 - DNA, 2671 bp, Cannabis indica
atttcatatttttattttaaagtattgcaattaaatattagtgatttgatgcttaatcttttttattaacagcatcttataattattagtaatatttttaaataactacttgagactagtttttttttttgaaacatacttgagactaatttaaataatcataaaaaaaataagtgtatgttaaaatttaaattataatatataaacgcttcaaaaaaaaaacccaaacattaatattaccttttaccaatttccctttttatttttattaagttcaaacctttctttgattttgatttgatatattcatatattttacagcctcagctcctcacccaagataaagtaaaatacaataagagacacacttgttcattacattcaaactgaagctttttctaatttattttaacattatgaatgaaaaacagagaactcatgtacaaaaacaaaagtttgtgtaatttaatttaaaatctaatctaaaagaagcatgaaggagaaagatttggaggaaaaatcactcctttgatctgcaaatttgggacttttcttcctctaactgaagaacaaccctcattccaaaaccattcccacttacccttttcttcttcttctttttccttccaaacaatcattccagactcaagatctctgtacaagtaaattgctccattactgctcacacactttgtactaacccaacttcctttttcccccaaaaacttctttttaagctcaaatgggaccttcccaaccaaaacccaggtatcaccctgacccaattcccacacggacgcacaatcaccacacgtgccacccacgagggtcaatttctcgtttctcaacacaatagacgcgaattcaagctcactagccattggaactctcaactccctccatgtgttcgatgaaatgtcaaaacccattaaactgtaagcacgagctgatgttatccagtacatcactccattacagtacacattatcatttggtgtccaaacagtgagtctcacagcaaattccattggtaaagacccaacaatctgccacgtgtcgtaatgggaatcgtacatttccaacgtggactcgtaagctgaacaaccactggttggcgagtctgacatcccacctgccacgtagaccttgaaactggggaaagaggaagagaaggagtgatcatcatcatcatcatcatcatcatcgtctagagctatgagacccacagctggattggttctggacatgtttagcttaggaagttgtttgtattcctttgtaaaagggttacaaaggagtaaatggggataagtattgaggcttgtggttctgaaaagaacaaggctttttacagacccaagtggcttaactcctccaactccaactccaggtaagaaatcaataggaattgagtaccaattctttgatatgggattgtgggcatagcagaattgagtgttgctccgatttggtaaggccataaaccaatctgggtagtgcttagagtgagataaaggtcgagtcttggcacagttttgccactgtcgacatgtggagcgcgcgcaggcaagtgaatcaggtgaaagaaagtaaaaatattggctaagagatcaaatggaaggtctctccacatggttgaaactttggtttgattctaatcttatctttgcttgtagaatttgtacatatatatatgtatgaaatttggtggctgatggagttcaataattggcggtgaattatataagattggattgttgtaggtgagtgatattggcatagggacgcgtgactaacatgctgagattgtgtgtgttgtggcgctatatgatctgacccacatgtgagtctgtcaatttgtataattttctttctttctttctttctttctttcttttgctgttacaaaatcataaagagtggttttcagatgaccccaaagggcaaatagatatggacaaataagttcctatcaagtgttttacattggtttggtctctctttaaaaccaacccttctttctttatgctaagatttttagctttgtaggtatgatgctttcatcataattatcttaaaactaatgaagctttttcaatatttttatttataggataaatgtagacccgttgaatatggaatatacttaggataaagctgaaagtttgaattatgatgttgaatgatatcatgttaaaaataatgggactttttgtaaccatttattatcattaaagtttgaactgatcatatttatttatgtttggtgaaaattaatatagttgttgttgttgttattgtcattattggttgaaatgaagaaatgaacgtctgaaagtgaaagttgacattgtttataacgtttgtaagtagaaataaaagaaatatttgcgaatctcccaaggattataataaggtttggctcaaagaaatttgtaactgatgtagtaaactcttaaaattgtaataaaataattattgcattggatccagttcattatcatttatgtatttaaataattaaatatatatatatatatttataaatacttgttttattacttgagttgtgtctgtcagctcagctagcttctatcaattttatttgtatttttgttgcaaatatctgagaaagtgtttgtccacgaattacgtttgttttattaaaaca

SEQ ID NO: 203816 - DNA, 1298 bp, Cannabis indica
aaaattttatttctccagttactcaacttattggatgtcatcatcgataaagctgaaaccaagaagagtctatctgttaaatctgatgcttcggtttccgaacatccctctggtccacaacttttgacttcagatagtgagatgaatcccgagtctggtggaacttctaatgttggtggtacatcatctaagattgttgatttttccagaccctcaacttctggtgcagatgatgaatatgacgctcaaactgtcctacttagcctgccacaagcagaacttcggcttctatgctccttgcttgctagagaagggtatgaaatagataatgctttataattttttacggagtagttactaattatccatgatgatttcttatgttgattatactggtgtcatttttattttatgacttgtgtaagttccataacacttttcctgtttttcttattatatctaggtgataaggcaatatgtatcttctcactccagtttgccatgtacatttggtgtttgatattttgtgtttacgttccaggttatccgataatgcatacactcttgtagctgaggtgataaaaaagttggtggcaattgctcctactcattgtaatctgttcattactgagcttgcagaagctgttcagaaattgactaaatctgctatggatgagttgcacttgtttggtgaagctgtgaaagcactcctcaatacaacatcttctgatggttctgcaattttaagagtcctgcaggcgttgagctcccttgtttcgtcactggccgagaaagataaggaggagaaagagaaagatttgcaggttgtgcatttgaatgctccccccctttctcaggtctgggacataaatgcagcgctggagcctttgtgggtggagttaagcacttgcataagcaaaatagagagctattcggattctaaccccgatgtctcaacttcatttaaagcttcttcatctacaccatctggcatagcatcttcactgcctgctggaactcataacattatgccgtacatagaatctttctttgtggtgtgtgaaaagttacatcctgcaatgcaaggtcctggtcatgacttcaatatttctgtggtatccgagattgatgatgcctgcacatctgccaaccagcagaaggcctcgagttctactttgaaagttgatgaaaaacacattgcttttgtgaagttttcagagaagcacaggaaactgcttaatgcttttgttcggcagaatcctggtttgcttgagaaatctttctccctgctgctgaag

SEQ ID NO: 203817 - DNA, 918 bp, Cannabis indica
gagttaaactatattatatgatagttatttgcaaggcatattttaaaggataaaattgtcattatatatttaataattaaaaaataaaataaaaataattaaaattcattacccttaatgacattccttacaaaattgatgcggaaagttctcattttcttttctcccttatttaattaagttttccctttcttaattttaataatgtaagggagtgattaccttaccattgatttctattacttattagtaaacatgctattaatgactaggtacttacgtaacttacaaaaatataacttaagtattgcatgtacagttaaaaatttaatttaagtatttatttgcaaccgaaaattaaacttaaacatatttataccgtaatttattatataatttctctaatttttgaaaataaaggcatcatatatcagtaaaatcaaatatagtactggtcgaatctagctattcctaaatatttatataatttttttttgtttgcttggtttaaatatgtaatttcaagtcattaatgatgatttactgaatctataataaatagtgcaacgtacttttcactcttaatttgaaatcaaattcaaattagttaggttatcgttatatgtacatattaattaatagtcgactatatatgaactatatatatagctttaaatttaagttgttcaatatttgatttgcttttgttatcttgatctaattattaattgatgatgaaaacatattagagttgaaactaattgaaagtgataaattatatatacatataaattagttataagaaagtgatatttatacagttaaaacatatataattataatatttagccgacattatattattgtgataaactattttagtatatatgtcaacatttttttttttttgaaaagggt

SEQ ID NO: 203818 - DNA, 617 bp, Cannabis indica
aatttaatttatataatatttttgccaacacctataaactgtcatctaatgtgatttatctcaacagttgtaaaccgtcatttaaagtgacttttccaagcaattatcgtcttttaaagttctgtatttttatgacactcacatatccaatgattttatgaactagtgggaaatagtataaaagacagttataatttgttgggaaagacagtgaatgtagatctgtaaaaaatagatctggagtttccgatcaatccaaaattggtataatccaaaaaaaatatatcaatatagtagctaatattttacccattgtattaatgttatttttcagatttttaatggtagatttatttatattaaatcacgaaggataaggtaaatttgtattcatctcgagccatcaagatggaaacattgttttcattttatgtttttgagtagttgcattaaagttggcttaatattttacaagtgatctgaaaactgacataataataattacaagctgataacgatataatgattttatgatatttcaagtatttcatatagaaaatccaactacaagactctctaaaaaaaccatttataatatagttagattttttcatata

SEQ ID NO: 203819 - DNA, 794 bp, Cannabis indica
atatataaggcaataaaatgagatccttgagaactttatatataattaattaaaaaatggtaattatagaatattcactttttgatatatattgtatttttgggtgacatattgaagaaatttcacacacatatatataaaaaatatataatgatacaattaaagtgtcattgtcaatatgatttgttcattgattctttacatatataattgtgtgtaatgaaaaaagtaaggattagaatgacacatcacctttataaatttattagtgaagactttcaaatatttaaaataaattaataaataaaatacttaaattggatcaaatatagacaattattttaaagtatatttggcaatttctcattaatttataatcataaaaattttgcatttggaatgttttgatttaaaaattcactaaaggaaactatattaaaaatacaaataaagaaaactaaataaaactatattaaaaattcactaaagaaaacaatattaaaaatacaaataagttaacaaatttgtctttttttctttttttttttttaaccaaagttgtctctatagagaaaaatcaggaaattgtctaaattggctttaaactagggtatattattaaccctccacaatcttataaatgaaatttattttataaaaaatatattttctaacctatacttacatatttattttttcatatctaaaataaaaatacacatttttatattttattatttagaccagaaaagggttttttaatacattatgaaaacaagattattatttttttt

SEQ ID NO: 203820 - DNA, 885 bp, Cannabis indica
cacacacaaacacaaattatatccaaatatagaaactgtgaataaattgagatgatttggtggttggttggttgaattagtattaaaaactgtattaactaatcaaattgaatcactaactaactaagcaaacagatatcaaaagtaaaaaaaaaaaactgagtctttattcaaaagaaaatctcaaaattatcaccgaaatcctaaaattaaccaacagaatttaaaataaaaaaacaaaaacaaaaacgaaatcaaccacttccattaatttccaaataaagagacaaaaacaagaactgacctgttggtttcatgggaagaaaagggcaatacagtaattccaagtctgagtcagatgaaaaaagttcaggaaggaacgatagtacaatgaaatcaataatgaaattaagccaataatgttatcagattcataccaaccaacgaatagaacaataatagatttgattaacaaattgactacaatattttttcaattaattatagagaaaaatgaggaaataagaaaaggttaagaaattcaaaataagaatgaaattagaatttgaattaaatcaaacaacaacaagaagaagacaatatacctgtgtagaagaagaagaagaaaaagggattaagaaaaaaaaaagtgcagaacgattatgacaatacagagatatgagagatagagatagatctagctagatctagaaatagaactaaccggagctcgatcgccggagaggccgtcggtcatgtgctcggacggagggtggaggtgctgggttggagataagagagagtgacttgtggctgtgaagtctaaaatggagggccggttttgttgttttattttctttatttacagtattaggcacgacagta

SEQ ID NO: 203821 - DNA, 774 bp, Cannabis indica
agaagaagaaattatgaagaaatgaaatgataatgagaagtcatttaaaaaaaagcaataaactagcctgaacacaagctaagtgatgcgtgatgtgagcgtgcgctcatggattaaagaaataggcctaaacaaattgaaatagactgtactttaaaaaatggcaaaaaaaatgagccaacatcaaataaacctaatgaaaaattgaccacctaatttttgaaaattaaatgaattacaaggtgttaggtgtaaatttccctttattaaacatgttagatagatcaacctaaaaataacttagcctatttaaagcaaacctaaacctgttaattttgtgtgagttttgatttgtgctatcatatgacttattttgttgccctcaattttaatagtaaaattaattagaagtgccacaattatgtaataattatatttagaaagaattttttttgataaaggtcatatattttagagcacacaatatagtagagttagaccatctctaatggttacattaatttgctgtaaaatttataccaatttgatgtagaatcttctatttttggtccaataattctaataatttacaccaaatatcacattaaatattctactaaataaatatattttatttaaaaattctcacattttttattgtttacattaataccctaaaatagctaatttatgacgtaattatatcatgactagtaagaatttaaaatcttaaaataatttagtatgaataaaatacatattaaatcaactaat

SEQ ID NO: 203822 - DNA, 538 bp, Cannabis indica
ctcgccctcgagtaagactaagtataaaactaaaacgaaaacttgattaactaagcagtcagacaattaactactgctgcctcatgtgaaatttccttcaattaaataaactagaattttaatttcaaaaactctaacaattgattcggatgctcatctcatgaaacaatatacaaatgcaaattaacttaagtattgaaacactatcataatcattttactcgttccaatcagtccataacccaatggctaatatgcttgcattcttacctctctccactaatattgacaacatttttcagaatcgaaatgactttttaagttagaatttgatggctttggtaagcggtagatgaaggacattttggctaaaatatatcataagcacactaaaaacccgcaaacttttccatcaattaaaattcttgaagtattctcacaaataacaatgattgcgacttttaacagtttttagttttcaacctcacttatttctcactttttatttccttgtttgaatttttttctttttcttttt

SEQ ID NO: 203823 - DNA, 538 bp, Cannabis indica
atatatattttttttaaaaaatagtcatttgagacttgttcaaatctagctagaagttaattcttataattgttcacattgggtgttattatttgcatttattctgcattgtgttgtataatctcatcttctaattccttatttccttttatgtatcatcaaatatactttgtaatatcttgtgttcacttttgattgattttaaaaattgattctttgagacagtttttggaaaagttaaaagtcacttttttaaaaaattgtgacaaaaacgtgtttggcaaacagttaaaaagcagcttattaaaaattttatgaaaaaattacagctaaaaattaaagctggtatacccaacttttagaaaaaaaactattttaattaaaagattctataataaattatttttcattaaaaatttatttaattatttgttatatattacaggaaataaaaatatttttttaaagaaaaaaatatttaaaataaataatatttaaatttctaactttctattttgttttaaaatatgttttatat

SEQ ID NO: 203824 - DNA, 1286 bp, Cannabis indica
atcagaattcattacgtggcactgtacatagacttgctgacgtcataatttgaaattcactattttttatcgtttttttttaaattttcttttggaagaaaaataagaatcaactgaaaaaactcgatccaatgcttactgaagctccgaaaatggaaacgacgtcgtcgaagagttcctcgtcgtcgtcggaggagaagaagaagttgttgaagaagaagactgaaactcagactcagacggagaagaaagctttgggatggatggaatggctgagaggttggttctatgtagtttacgagatgcttttccagagaataaccgctagtcacttacaaaaccctatgcctttacctcatctcaacgaactcacctgcattgtcaccggatccaccagtggaatcggccgcgaaatcgccaggttagttacttactcagttcttcaaatcttgaagattgttttctttttcttcttaattttatgattgaataggcaattagcggaagctggagctcatgtggttatggcggtgaggaatacgaaagcagcgcatgaattgattcagaaatggcagagcgagtggactgggatgggtttgcctctcaatattgaggtgagaaaactaattttttttgtttaaggataaacaaaataatctgttggttttttgatttgattttattgtttggttaggtgatggagcttgatcttttgtgtttggactctgtggcgaggtttgctgaagcttggaattctcgttctgggcctttgcatgttcttatcaataatgctggaatattttccattggaggttggtgtttattactgataatatgtacttaaacatagattcgtgaactgtgttattagtattgtattgtatagtattatatatcagatttttatacagtactacatgctggtattaatttgtatgggcatatatatatacatacaatattttgaaataattcagtactatataaaaatatgttataacacacaattcaatataatacaatacattgtgataccgtgaccatgtaagtattgcagtgttttactcttttagtctgattttactaattaaaattagtacattttttgaatataaatcaatggatattaactggaggttggtgtttattacagatatgtatatccaaacatggatttgtgttcatgtatagtattattgaattgtattatagatcagatttttttatagtactattgatttgtatgatatatacatacaattctttgatataaatcaaaatttaac

SEQ ID NO: 203825 - DNA, 688 bp, Cannabis indica
ccacctaatctgaatggtatcaaaattaatgtggatgtgacggtcaatcaggccactaaaactttggacactagagcacttattcaagaccataatgaggttatacttgctgctatttttcaaaccagtctaagattgttttcaatcagacaagatggaagcaaagactctttttcatagcatcaactgggcatgtcaactataaatctccataacaaatattgaaatagatattttaagagtctctactgcgctatctacaacatccttagatttatcttctttctaagatttaatttttgatattcgttatcttttatcctctttccctagagttattatctcccatatttggaaacatactaatcaaacaatatatagtttagcaaaatatgctctagagttggatgaaggtgtcttttggatgggcaaaattccccattctattttctctattgttgtaaatgactcctaatttataataatagtagaatttattctaaaaaaaagtataatttattatttcttttctttaattaattattaattcagctcattgcataataataataataatcataaacttataatttcagtgtcaaattttgaaaatagacatatgtcgatcatgaaactaaccaaatttactggtatggaaccaatacaaaatgatttgatggtatcataa

SEQ ID NO: 203826 - DNA, 689 bp, Cannabis indica
cctatggtgtacctagaatattacgagtagattgtagcacatactccaccatagtgctgtaaatacgaactaaggttttttgacacgacaagaaactgacacgagcacaactaaacataaaaaaaaaaatatgcgcttaggcacgacacgactcgatgctacaaattatcacgacatgacttgatgctacaaaattggcacgacatgacatggataatatgagattgagcacgacacgatgcgaaaaatatgagcttaagcatatcacgacacgctaagtctgaaaaatatgacatgtaagcactattctaaaagtgcaacatgttgaatatatttaataatatttttatgtgaaaatttgttgaaaaattatataaattaattgaaactataaaaaatacatgattttatttattttatgatcatttataaaaataaaatgtagaaaaatagtgtatgaatttaagcctgtataaaaaatgaaccagctcgagtaaaacataacacggcccatattttttcttggcacggtaccataaggcttatattatttttatgccacgatacgatacgacactgcttgtattgttttatggcaaaacacatcataacttttattttacttagggcaggacactagatatatatatttacaacagtactcgatccgccggtagtatatataatta

SEQ ID NO: 203827 - DNA, 1222 bp, Cannabis indica
tgttaataataaaaaatcagtcgttttacctaattattccttgatcaagggctcatcacaaaaagctttgaggattaatattaataatggtgatcatcatcatcatcagcaaagacctcccaaaccaccacaacttattatcaattcagttcctgataatgtattccaggtaatattgccgttatagttcttttttctttttattttttattatcacacacaatgtatgtcatatttattaagataagaaaccaaaaatcatatttatttgacacatacacacttggttctgtttttcctttactttttttggtactccatttatataaattaattccatccgttaaaaacattgatgataatatcgtgtatatatatcttacatttaactttgtacattatgtcagcagttttgaagtggtgatgccttgcaagctaaaacttagttttgcttttttcactttaatttggtcacttattaattattgtttgctcaaaccaattaatatgtttgctatgtgggcgttactgtgtagctattaatcagcaaaattttgtttatttttaataataaattttggctgctgcatatatatattgaaagaagcatatatttttatttaccaacattaatgattaataaattttaattttaagataatgtgtgcaattctaacttcacctcgtacttctaaaaaaatgattttaataataaataaatttaattatatgaatgtgtactatttcttttaattataggctaatgattacctagacattagtcatgtagtatgtcataataagagaattatgcatatatattgtaccatgctatgtatagtatatatatttatatttaataaaataattagcatttttattttcaattttttacacaattaaattgtactctttatagtatataacttgttaatattacttttaaaatataattttatagtaatgtattttaatttgaattcatttgttaatattattatttactaatttattcattttaccataaaatgtgatggaagaattatattattgtgaaaattatatttcaaaaattattattaacaaaccctatactataaaagtttagacaaaaatactaattattctatacaataatatacatatggtatgatagtattcataatgtggggccaaaaattaatgaacgtggcatgagtgtactatatattatatgtgacaa

SEQ ID NO: 203828 - DNA, 1216 bp, Cannabis indica
aaaaaaaaagtaacaaaatagtagaaatattaaccaaatttagaccaaaacaacaaaaaattatgtcaaaaagtagttgtggaatctcttttggacaatctttaaggaaaaaatcaaaattgagtcatttgatttttttttcttttttaccaaaatatggtattaaaaaaatatgcaaaaacatgattagtaaaaaaacttccttttagggaacatggcaaagaaattattatcaagtttttttttttaattatttatcttgagatcaattaaaaaaatagatgttaaaaagtattaatggtatctaataatttttccagtgtcatatcgctattaaggtaattaaatatcaagtcaaatataacatataatataagataataacttttaaaaaatattaataataaatcgtaaaatattacatttaagtgttactattatatgtgcctaatatcaattctcaatacatcataattaataataactaataatgttgtatagaatataaggagacattatatgtttgacatactttttaatccaaaatttaatatttttattttaaaaataacaataaacatgtataatgataattatcaaaagagtgatgaatagagataataattgagttttttatatttaaaaaataaaataaaataaagtaacattaataatgctacaatttcaacatgtgaacctcaattaccacaaaaaaaaaaaaaaaaaaaaaatgataataattatttagcttaaattttaatttacttgggttgttgtttcaaattgattatcttttttagtaaaaaaacatcataattaaaaaagagaggaaaaaaatagtaaaaacttgagaatggacaaaatacaaaaacaggggtaatttggggattttcttgtgtattaactctcaagccaaaaaagtatatattcaaaacttttttttattatttaaatgaaataattaaagaaataattagaaaaaaaaaaagaattaaattgacaggctgacacttgtaagcttggcacaacgtgtcagatcaataatgagtctcattttggggcccacttccacgtttatcccttcttttatttttcttttatttttttaagtaaataataataataataatatttgtcaaataataataataataataataataataataataatttatttttagtattttccatcaacatgggttgcttagactgt

SEQ ID NO: 203829 - DNA, 562 bp, Cannabis indica
agccatgtaacttcacaagttgcattagccatggcccgatatccaacttctacagatgaacaggatacaatgggttgtttctttgatttttaggagatgaaggagtcatcgaggaagatgcaatagcttgtgactgatctgcgagtgtccacacatgtaacccaatcagcattagagaaaactttgatggggcatttgttatgaggcttaaacttgatgggaatgacaatataaaaattaaattaaattttaaggacgaaggagtttgtattttcaagtagttcccactttttaaatgaaaatgatgatattgttaatcccttccaacacatgggatttcatattcttcaagtctactctctccaactcaaaatcacataacaaacaccccattaggtggcattttcttagatggaatgaaaatatagctagaataggaatgacattttaatactttaaaataaaagcaacaaatgaatggaataaaaattgcttcacttccattctattccatttcattacctccatccaaacgccacctgagggaaatattattgtcgag

SEQ ID NO: 203830 - DNA, 889 bp, Cannabis indica
gtgacataattttaaaaaaataaatcataaaaagaaatttttcatctttctccaatgtttctttctctcttccatttttttttttttcatcatcatcagtttaaaagataaatcataaaaccatcatcaccaccatccaccatagatgcccaccattaaatctgtcacagtactaagctatatttgcactgtgacagaagaaaaataaactgacagagaggcagattttggaagggttctgacggaagagtgtgtcaaaaactcagcctcttcttcttcttcaatggttaaagatgggagggaagaagggtttcactgaattggaggctgagcttaaaaagatggcaccacctaacggtagagctattttgatattcaggacaaggtgtggatgttctgttgatagagaaaaaaggtgcctttttttctcttttgaatcttctcttagaaaaatctttattgaaaattctgatttttactctttagtttgattcttctttatatatcttattcaaaaataaaaaatctcaaatcaaacaattgaatctgtcaaaagagtaagtagaatggagaaagaagctcactgatttcaggtgcaaaacaaccctcgccggcgttcgtgcaaaactcaaccccacatccgagaagaccagacaacggaattggggttagggttttttggggcgtggtatttgattccggggtcggtggggttggtcggagaaccgccagatgtggctgggcgatgatgaatagagggagaaagtgttgctgagagagagaagaaaagggatttagggttccaaaataagggtttttcatttaactttttaatttaatttcttttatttattaattaaaattttaattttcaagtattttttttatt

SEQ ID NO: 203831 - DNA, 2372 bp, Cannabis indica
aaagatatgctgttggttcctgatatagccaaaaatttgattagtatttctaaactaacaaatgacaacaacatactaatcgaattttatgctggtttttgtttggtgaaggacaaggtgtcaaagaaggtgctgcttcaaggggtgcttaaagatgggttatatcagctggtttcaccacagtctcagtcgtattttccttgttttctttccacaaagtctgatttacatcagacaagtccctgttatgctttaaatactgctataaaccagtgtgttaatcggtctaatgttagtagaaatcgtgtctctaaagttgatgtttggcataggcgtttaggccacccatcaactcgtgtgttgagtcaagttttagagtcaagtcatgtaagaatttctaagaatgaaatgaaaggcttctgtgatgcttgccagtacggcaaagcacactcccttccttataatctgtctaattctagagctaactctgttcttgatcttatacatactgacttatggggaccagcccccatctcttccaatgtaaatcacagattctacatacactttgtagacgactatagcagatttacatggttctatcctctcaagttcaaatctgatgccttaaatgccttccttgaattcaaagccttagttgaaaataaatttgacaagaaaatcaaaagtatcagatgtgactcaggaggagaatacaaagctttctctgactttgtcaaaactcatggcattgagtttcaacacccttgtcctcacacctcagcccaaaatggtcgtgctgagagaaagcatcgacacattgttgaaatgggcttgaccttacttgctcaagctaaaatgcccttaaaatattggtgtgatgctttcaccactgctgtctttctcataaataggctgccaacaccaaccttacaacacttgtcaccacatgaagtcctttttaaagtcaaacccgattataaattcctcaaggtgttcggttcagcatgttttccatgtattagaccgtatcagtcacacaaatttcaattccactccttgaagtgtgtcaaccttggttatagcacctctcacaaaggatacaaatgccttactccaactggaaaaatttacatctctagagatgtagttttcaatgaacttgaatttccctttgaaaatggttttctaaacaattttcaatcaccacaaccagttgtgattcacacatcatcctggtctctccttcccacttttgccacggataatgaaccctccattccagcagctgatactgccacacaagcactcagtgaagcacaccctcatgcacctctgtcaccatcacaacagtctcattcctctgtttccagtagtgcttcaggtttaggaagggaagctcattactctactgatgatgaaaatactggtatgaacatcgatcagttttatgtcacagatcctgaaccagaaagcattgattctccaccagcagaatctgtccagcagcaggaaaaaccaactgcaccagttactcaccacatggtgactcgaggcaaggctggaatatttaagcctcgaatcttcctaagtcaaagctcacattctctcgacaatactgaacctaatagtgttgctgctgctcttcaacatccaggatggtcgaaagctatggattgtgaagtcgtagcacttaaaaggaacaacacatgggtgctggtgccttattgcagctggatgaatttggtgggaaacaagtgggtttatcggattaaaagaaatgctgacaatacctttcaaaggtacaaagcaaggcttgtggcaaagggttttcatcaaaggccaggtgtggattatggagaaacatttagtccagtaataaaggctgctactgttcgaatcatactaactttggctgtatcaagaggatgggatataaggcaactagatgtcaataatgccttcttgaatggtgatcttgaagaagatgtgtacatggtacaacctcaaggtttcgaagaaaaaggaaaagagaattatgtgtgcaaattgaacaaatctctgtacggtttgaaacaagcacctcgagcatggtttgacaagctcaaaagtgcattgctgaagtggggattcaaaaactcaaagtcagacacttcattgttcttcttcgagtcaacaagcttcattctctttgtcctaatatacgtcgacgatatcattattacaggaagtgacactacaaaaatgacaagctttatttcagaactgaacaagcagtttgccttgaaggatttggggcctctacactattttcttggtattgaggtgtacagagatgaatcgggactttatctaactcaaacaaaatatat

SEQ ID NO: 203832 - DNA, 693 bp, Cannabis indica
aaagggattatgtttgaccattttcaatgctagcttattgtaggtgatgttatctgtgagatgagaaccctcgaagtagtagttactgacaacccaaataaaacagactgagatataagactcttataattgacacgtggtatccgggtaggggtagcaatttgtgttcgttggtcatattatgacacgtttatgagtaatttaacatgtttatattctttttaactaaaaaaaatatataatttacatacaataaatataataattttaaaagtgtatatccttacaaatgttattatcttgtcattttttggttaaacatgtcaacccaaaaaatgatcctaatccgtttatttcgtgcgggtttcgagtcatgttatcacatttgactcaaattgccacccctagtacccgtcaatgagtggagaaaaaaatttgtatcacgggatctccttttagttagcgaaaaaatgaaaacattcttgtgtctcctcttcaaagactacgaaactcatcagtaactatatgttttgcggtcggttgcgattacaggggacagtaattcttctattccaacccgcagagaacgcggtgtgggtgccaaggagatgataaaagaaggggacattagataaagtagaggccagtctttggcatacacatatcaaactgtcttccccacgggctttgctg

SEQ ID NO: 203833 - DNA, 1091 bp, Cannabis indica
ttttttttttctttttaattgaacaaattaataataatacatatggttgaaaatagtacaatatatgtaaaatattaaattagttatactagacttatttatttaatgtcattattttataaaaataaattattatttaatacataatattttgtaaaatagtcaataaaaaataattcaagtggttatcaatgcaaattcaaataaaatactatagctagttccataccccaaaaaaaggtactacatatagctggttatatagttatgatcaaaatttcaagtacatgtattaatgaattatatgttcatatgcagtgttccagtactcatcaacccacagtgtaagtgaagtgacaaaagaaaattatgagagttgcaatacgacaaacgttttgaaagcatactcagcaggaaacacaacaatcacattgaataaacctggagacatgttctttgtgtgtggtaacaagttacactgtcttggaggaatgaagattcaacttaacgttcatgagaataatcaagcttatgcaccaacctcagcttactcaccccaggccacccctactactacagacccatctgattatcccaacccttcttccaaggccaataataataataagaataaccttcctacttcatcagcttattctgccttttcacatcttatgctagcttcttttctagcacttcttgtttctatactatgaaaaattaattatacgatgagtgagtgagcttaatttttaatattatgtgattaaatgttttttttttggaattgattaattaatacacatctggtcttttaattcaattttgtattatatatattttctgtgacaattgtttaagttttacttctcaatcatattattacacagatatttattgtttaatttttatataagagattattatcatagttatagtagtattggattattcccaacactgaataagagtcatcaacaatgaaaatcggtataataggtaagcgaaagtttttcctccaatgaaaaaaaaccgttggaatagctattgctaacgaaagaaaatcgtggacaatactaaataaaaaaaaa

SEQ ID NO: 203834 - DNA, 1008 bp, Cannabis indica
gttatttgatgggtggtcctcctagtaaagttgtgtctgttaaggagcttgacattattaacagcgatcgatataatgagtatgtttggggtaaagagtgttatgaaatgaccattgagtctttcaagggcaagattaatgctgaacttaagaaatgtaaggatcgaaataaggatgacaggttgctaatttctatatgctattaaaatttagtttttttgagtgttgttcttatgttgttggcaaacgttcattgtactcaaacattgggattcctaagatttttaattggagtaaaatagaaaagttaaaggtttcacagttgaagatgcatagtattaacaagggtaaatagcggcataaatacctaatgtttcagattttatacacttaaataccttatctttattattggaggcaaaaatacctaatgttacacttctcttacacccgttactaccacttctgttaagtcatatttatggacacatgtaaggttaggatgcattacatttatttatttatttattttaaaacttaatatttttaatatcataaattaaattttaaaaacttaacagtattaataacctaaaattaaataataaaacccatttcttaaaaccaaaatcaaatgctactcttgtttcaaaaaaaaaacatcactcttgcttcgataccatcttctccattctttactcaaactgatttgtagaaaatccctgaaaaaatggtcacaagggaatacccaaactagtttaaagaaaatcctttgaaaaaatcattagaggggtaatgaaggttgaagaagaattacctggttgttgtcgtccagcgaaacctcgacacccaaaggttgaagacaaagtaattctccagctatcctccggagaaacccacaagctcaaacgatgagagatgcatattcagaatcatcttagaggaactcacttagtaattggcatagatctaactgtaaaagctgtcattgtaactccggtgacacat

SEQ ID NO: 203835 - DNA, 830 bp, Cannabis indica
gagaaatcaccatgcatttgtccagatcattcgcagtggagggattgagtgggttacaagatttgggtttcgatatccagaaaaattgggttgagcttgttttgaatgtgaataggagcagatgttggtgtgtattttaacttttttcttaaaaaaaattattattgagtttatgagtttgtggttttgtgagaatctgtgtgtggttggtggctttggttatggttgtttagtcaatctatttcacatggatttctcaagttttagacaacaaaaatcatatttgattttctttttcaactcttctcgaaaaaataaatttgtttttcttttcaattatttaatcaaaatcaaacctgaatttgttcttcatttatgagttggcatatgatttttggacaacgagttaaaaatgtttattcatttatttgtatatgaggtgatttttaatatattattattagttgattatacttttactttttacatgttgtgttattttgaaaagtcttcattgttagagaattgtattttgataacctcttaaataattatttatgtatatttttcttctttttatttattttttcaaataatattttgattactttttaaaataaaaatgagcatgacatgacatgtggtattggaattagtccaatcaacacttaataagttattagactagtagtaaagctactaaagaaaaaaaaaatagcgaacttacataaatagtgaaaaaatgagagaaagtttgcgaaaatagtgagacgtggagatttttatattttcactgtactaaatttttaaagttttaaaattacaaaaat

SEQ ID NO: 203836 - DNA, 917 bp, Cannabis indica
ggttgggagtgctcttaggatgttgcatatggaacactgctaaagaaagttcaaaatatattagatatgaaattatctatgacttttgcaagagggattgaaaataaggataaagtggtccaagtatgtcattgggcatatctaaagaaaatgatgagtttctcactatgattgattttatagatgatttaatttattgtacctaataaatatacttagtaagtaaaattttgtgatattgctgtaagtataactatgaaatgttatttgtgaaattaaaagccaaagtgatgatgaaagattatctttatgggcaatagtgaaacaactacagttaatgctataagaatattcaaactatggttaaagactagttattttttattttaaatactagttatttattggttttgaattttattttgaataaataggcattttaaaaaaaaatctaaatgaacaagaatggttctactagttttcttatttataaatttattgaaatttacctcatataaaaaaccttatatgtatagggatattagcggctacactatctgaactacatatttagttacacttaatcccataaacagttttttagtgctaaaattttccaaatctcacttttgttagctatttaccctattcgttcaaaaagctcttttaaatgtcaacgtgtactgttgatgtgtaaacaaatttacatgtagcagaatttaagaggtccacaactcattataattatttaaataatttaaaaaattataaaaataaataaatatttttttttcctcttctcttttttctttttttctttttctttctttttacccttagaacacaaaatatccacaatcccaacacccaaccccaaaatacatcgacgataattgttaagttgtttttagttatta

SEQ ID NO: 203837 - DNA, 737 bp, Cannabis indica
ggacaatgcataaactttgaaaaaaccgagatgtgtgtgggttgcaaagttagtgattctgtggcaactagcttagcctcaaacttgggtgttactttggtcaagcatcatacaaagtacttgggtatgccgacatttgttggaaaaaataagaaacaagtttttggcaagatcagatgaaaaattgaagcaaagctcaaaggttggaagatggggttattttctcaagctgggaaagagatcctaattaaagcagtcattcaagcccttccttgctatgtcatgagctgctttcgaattactaaaggaattctccatgaaatttaagggttaatagctcaattttggtggggatcaacaaagaacaaacacaagctacattggggtaactggaaaaaactttgcaacttaaaagagcatgggggaatgggattccgtgatttggaggattttaatcaatcacttctagctaaacaaggctggaaactcatacaaaatccagactgcttgcttgcaaaagtattaaaagctctctatttcccgtctgaaagtttttttgaagctacacaaggccattatgggtctacggtttggagaggcatcctttggggaagagaacttttacgaaagagtactaggtggtgtgttggcaatggaagtaagattcgaatcaatgaagatcaatggctccctagaagccaaccgtttactcttcggagcaaggttcaaatcccagc

SEQ ID NO: 203838 - DNA, 1197 bp, Cannabis indica
gaagaagaagaagaagaattagttgaaaggaaaatagaagaagaaaaagaagcagaagaagggtgttctagtgaggacatggatgagaaaaatataaaaatggagggcaaaatgggaatggaaaattatgaaaggaaaaataacttaagaagatgcaaagaaggtggtggtggtgaacatgagaagaacaaagcattaatgttaaattgggagccattttgggtggctacttcttaaaaagccttattttggattctatctttataaattttaatattatcaattccaaaatatttatatatattataattattgaatattgaaagaatttttgtaatagtttgtctttctctctttttttttcacttttttcttctataattttctcttgtttcctcaaatgtagtgtctagattttgagtttatggttggttggtagttattattgttgaagtcattttcaaattacaacttcaactagaaaaaaggagtaataatttaaccaaaattttaatttcacacatctctgcaaaattaataaaatggcccacattaacaggagagagaatttgaacttgtttactgatttttgaaagctagaaatatattaaaatatttagagcaagaaaagaaaaaaataaaggatttgagaccaatacttttaagtagttgggggcgttaatgaaatttagttcatgaatcattattattaggctcacaacttatataacaatggagttctaatcagctttggagagacctattccctcatgctactctctttcatctggggttttatggttctgatcatagagttttgaagatcttgcttcaagaccctaattttgccactcaaagatctaaccggtttcattttgaaaatcattggctgaaggatccctcgttttctaacctttttaattcttcctgggctaactctagggtttctgattctgcttcttctcccttgcaactctttcttgacaagcaatccagctgtgttactaccattaggaattggagtaaatctcaacaccctatcaaactccaaatctctcagacacaagctgctctcgataacctcctgaatgcttcccaccaaactcccaactctctctcccacattgcctctctccaatctagattggatggcctcctccttaagaacgaaatttactggaagcagcgttcaagagt

SEQ ID NO: 203839 - DNA, 1050 bp, Cannabis indica
aacaacaccgcgcaaagcgcggcaaatccaaataactttcactaaaaaagcaacatgactacattagaaagaattaaaccttattaataacaataaatatttaaaagcaatagatatacaaaaatcacaaaacaggagaacatttaaacgcattttaaacacgtaaaatgttgaacaaaaataaaaccataggtgtcacgtaattaattacatgaaaattataatgaaaaaagtaataaaaaattaaaaaaaaaaacaaaataaaatctatttaagtaacaataaaaaaaggaaacaaaaatttaaaaataaatttaataaatacagaacaataaaataaatataacaaatacaaaaaattaataaatataaattcaaaattaatttttcaattaaattacgttaatgaaaaaaacaagaatattttagcttttcacctaaatttctttatatataaagatattgattaatagattgatgattgatactcattactaattgcgtaattgtctatttttttattaaaataatatatataataatatttactttattataaatttaattaattattaaatttttatatttaattatgtggtctataaaaattaaacttaaagggctatcgcagttatttattcaaatttaattaatacgtgagtcactaatcatgaaatagattaatttttctaaaatatatatcaataaactttggaatccaaaaaatataattaatagagaaaaaaaaaaaagaaaagaagaagaaaggacacgtcggatcacgtgtggaaattattttttttaaagaagaagaaatcaactatttccgtaagtgtggtataataataatattcaaccaaaaaaaacctacaacaaaaaaaacttacattttataataatataaaaaattatacagtgcaccattctaaaaaaagtttaatcggtggacttttatttgttttagtatttaaagaaaaattagttaaatttttaatagtcacttatcttatagttatttagtatattttgtaaaatttaaaaaaatttaat

SEQ ID NO: 203840 - DNA, 662 bp, Cannabis indica
aaaatgaatataatcaactaaaacacccctctaaaaaatttcataaaatgaacctaaaagtaacctatcagtccccttgtctgagaactttagcaccttaaaattggccttggatcttctcattcattactaacaagtatataaagcctcgcacacaaactattatccaattaacaaaatgagttggtaaataaaaagctttgagtaagtgctctaagaatttccaatcaattatgtcatatgccttactcaaatcaattttcattaaacacccaggagataatgttttcttatgataacccttcaacagttcttgcaagatgagcacattatgagcaagaaatctattaaattaataaaagcacattgattatcacttaccaacttaggtaacacctctactaaccaggtgcaaagcatcttagagatacatttgtacattgtgtttcagtaggtcattggttggtaatcaacaaccctaaaaggattatccactttgggaatgagcatcgatagtgtttgttcagctgatcttgaataatactcttttgaaaaaatttaaggataggagtggccatttcatacatcccaaatctttccacatttaaaaattctagaccaaaaaattatctcttccaggactcttcaaacctaaaattgag

SEQ ID NO: 203841 - DNA, 1902 bp, Cannabis indica
ccaaataaagatcttttcagtagatttgaagaaattccaggaggatcagttctgttgggaaacaacaaggtttgtaaggtgcaaggcattggttttcttgtcattaggatgcatgcatgatggtgttgctaggacaattacaaatgtgagatttgtacctgatctaagaagaaacttgctgtcaattggagttctagattgagggtagccagatgaatgtttttaagggagcaatggttgtcatcaaaggtgagttcacaaatggcctttacattctcactggtaagtctgtggttgggacaacagccttagtttgaagtaagaaactgatctcactcagctatggcatcaaaggctagaccacattagtgagaggggaatcgcagaatttctgaaacaaggggttctcagtggcaagttagatttttacaaaaaatgcatttatgggaagcactagaggcttaaatttgtcaaaggcacacatacaacaacatcccattgggctacattcactttgatttatggggagcaaccaaggttccatccttaggtggagtaaattatttatgagcattattgatgattattcaagaaaagtttgggtaatgctcttgaaatccaaggatcaagccctagagagttccattaattagaaaactctcactgaaaaccaaattggtttgaaggtcaataagctaaggactgacaatgggcttgaattttgctccaaagaatttgacaggtattgcagcagtgttggaattgtcggacataacactgtgagaaaaacccctcagcaaaatggatttgctgagaggatgaacagaactctcctagagggagtgagatgcatgctaaagggtgcaaatcttggcagaaaattctggaaagaagctgtcacattagctagctatttgatcaatagatgtccctctgtggctttgaatttttatactccttaggaagcttagactgccaagaaaccaagctatgaagtttggctgcactgcatatgcccatattagacaagataagctcgagccaagagctatcaaatgtatgttcataggataaccaaatggtttaaagggatacaagttgtggtgcttagaagaaggttttaataggtgcatcatcagtagggatgtgatctttaaagaagatgagatgcctatgaagatcactaagaactctgacaatagttctaaacctaccacaactcaggtggaagttggcaaaggtgctagtgaccaactaccaaatgatgcaacaaaccaaactgaacttcctcaaccagatgaaattgaaaatgaactgagcagttaccagttagcaagagacatgaaaagaagggaaattaaagcacctaaaagattagggtatgcagatttcattgcatattctttgtctattgttgaagaagaaatcagttcagatccctaaactgtctaagaagctcttagcaaacctaaaagtaaagcatggaagagagcaatggatgatgagatggattccctgatgaagaataaaacatggattatggtaaagaaaccaaaccacgcaagagtaattggctgcaagtagattattgttgcgatattttgcacacgcaagtgtacgtatcgtttcatgtagtaaactcaccaggagtgaggtcgatcccacagggagtgcagttaagtacgttaaaattaaacatttacttctatttggttgaatgaaaattaagaaagaattaaaaataagaaaactagtaagaaacaattattcaagaaaattgaaagttaataaaaactagggctttgatttcaatcgtttctattgaatatggcctaatatgattatttttctaatgttaatctctatgcagtagcaggtttactaaggtaatttatagtcttc

SEQ ID NO: 203842 - DNA, 709 bp, Cannabis indica
ttattttcgacatgttaaatttatttaaatgtttcgaaattttgcaaaatatcttaaataactataatgtacacgactataaaaaaaataaactaaaaaagtctcagatgcagaaacatgtaaaaatacatcagtgcacaacaaatatcttacatcggagagccattcacacacatcaccaaatatgatggctccttggtgatactttaaagggcatgttaaattaatttatgagctgcaatattaacgttgcgattcacataaaaaagaatgctcacgaaaagttcaaaaataaaatagggacaaattttaaaaaagaaatgtttaaagaccaatataataataaagtaattaattatttagttatgctaagttattattcaaaataattaattatttttttttttgaatttttttggaggaataaattgattgtattgaatgcaataattttttttttattgagttactagtaatgaataatgtaaatgattattataaaaaaatatgtaaataattttttattacttagctaaacgtcggttgtttattacacgtggctgtattattatctattatgttacgtactataacaccgacaaattatgaaattggggattaaaaaaagaaaaatcactaaaatttaaaaaacaattgcaccatgattttttgttttacgctttaaatttatttgtttctaaaaatattt

SEQ ID NO: 203843 - DNA, 834 bp, Cannabis indica
gaaagaaataaacaaagaaacttagcacccctcgaatgaactaagaggggtcgatggccatctacagtcggagactggagggaaccaaaaacaagagagagaatcgaattggccaaactccaagttccgattcgcctcttgagccgcaaaatgggccacacgattgcaggatctcgggatccaacaagcttcccagaggttgagctgagtaacggtaaggtgaaacttacttacgatttcttggatgttatgatgcagcagctttatatcttggggactgaggaggatggcttcaatagcattagacgaatcgctttggaagataacattgttgaagccgagttttaccgccgcagcagcccctccgtacagagccgccacctcaccagcctaaagaatcacagtgttggcatttaaaagtgttaaattacttttgaattggccattgtgatcacgaaagatagcagctcctgcagaatgattggtgctaattgcgatgtctgtgttacaggtgagccagccaaccgggggagggagccactctcttagctggttagtaggattggaatgtgcattcagaagctcaacaattcggttgttgatgttggtcacggtagcaggaggtggggttgatttcttgtcatgtattagaacattcctggcgcgccaaatactttggaagatgatcgctgcccctcccaggaacaggtggtaattgacattagaaggtctatgagcgtccgtggcaaaccaattcaaccaagtctcccaatcatggatgtttagcacatcagttcgaacttgccagctacacccgaaccagactacacgagc

SEQ ID NO: 203844 - DNA, 789 bp, Cannabis indica
ggagaaaacatgcatgcacctagaatgaactagaataagtctgaagaaaacttcaaagagaagacaaacaaaatgcgaggagatttttttaatttgcacctgtaactttcataagaaaagaaagtacgtatgagttgacaatttttacgaaaaagatttatgtttaactcacacatatatgcatggcgttaatatcgcgtgataaaagaagcaaaattaaaattttatattttaaagtatttttttttgtattttataaaatataacaacccacatagcaattaataaagtaacttaaattacaaattcatataataatccaaataacaattaccagagcaatctaaactgtcaaaatgaaaaaaaaaaaaattaacaataatagtatataattaagacgcacacatattacatgtagaattatgtaagttataaattatttccatttataaatgagtattgttatgaagtatccatagtatcgaatattacgataaaatgtcgttttataattggctaataaatttttataatatttatattgtagtaaaataagcggaatttgatattcaattacaccaataacaatattaaaagttatactaggcaccatatcctttcacatttttctttataaacaaacctcttcataaacaaacacaatttatttattctctttctttgggaaaagttttcttaaagtacttattctaattccatgcctcccctgtaaaagcatctaagtaacaactacttttgaccgtgacaaagaagaatatattggcaata

SEQ ID NO: 203845 - DNA, 2527 bp, Cannabis indica
ggttaaatgaaaagaaaaaaaaaaggctagaatagaaaaagccagaccttgtggaaattatttgaggaatcatatcaattattaggtccgcgagagggaatcttaaagtgataaaactcagtgcttggaacgcaaagttgaagagttaacaaagctcacaaagaagatttcctgaaggcaggatggatccctgtctgatttagagaaagaagacacaaaaccatgtgtgaagagaattaaagatgcacatgtgtcagagcgcttcagattgtctcaaatggaattgtatgaaggcaggacaggccctagggaccacttgtccaaatacaatcgcatgatgcaggtcactaaggctagtgatgatgtaaagtgtctttgtttttcactaagtctttgttttatctgggagtgctatcagttggatctaaatatattatgagattatagattaaatgtttacattgaattaatggtacataagaaattcaagagataatttgaactacttatattgattatatcaatagactaatagaaagagttttgtacatataattctatattttcaaagagtacaattccatatctatagtgtagaaataatagaattaataaacttgattattttattgaagagttctatcagtggatgacatggagtcccctccaccaacatatgcggttgggaccccgtgctcctgtgggtggctttagtaccaaaagtgtgaggcttggctttatcctttgagtatgtcactcaacactttttgtttttcagccaccgttgtttctagcctttggttcttcaagtagagatcttttatctcctcttgtggtagcagttcaggagctggagctcattgagtacacttccttctcctttctaggtccacatcttgaagtgtcggggtcttatggcacaaatggtggagggtgccacattagagatggccttctcaatggttgaatgcttccaccgacgaggttatccatcgatgtcgtcatcaaaccatgttgtgctgggggctctttttgagcattggcttggtggttcacgctttgatttctatccctttggtcttctccgacgacgggaggtggaggttctcttatgatggtgaccagttggttgtcatttgatatactccattatcttggagatattgtgaacatttacgcatagtagttggttaatactcagggaaagacgtagctatggacttgaatttctgacaaatggcatctgttgatggcagtcatttaaactttagttagaaaattaaatgcaaaaggctagagattaaaagcttaagagaaactaagaacatagatggagtaaaaataatattatattgaatctctaagctcctttacaaatagttattttccaattcccttacaagtattcaaatgaggtttttatagttaagctctaatggctcaaagataaaagtggtcccaaaagctatgggttataactctgtcaatatcgattctgcgagtactagaattaagattacagaagccactaagtcaaggaagggccaccaattactgagtcagtcaagcttaccccgcctctttctaactttaggggactgagaatcagtcttttgatcctcttggagcctactctcgtctttcgaaggttgcttccaatttagttggtgcagacgctgaaggatcagctgacaccagtctctctacatttttggagtagagcatgcaaaatcgagcaatggatcttagaaaagtagtcagttgcttcccctgtagtcgtcagcacgtcacgagaggtttgtttgaagaccaacgacttgagcaagaacatattagctaagctaataaaaagtcttagtttccttcaatcaagtcaataagcttattgatgtttttgaaagcgccggtgtgatgatgtcaggatagggccacgtcaggcaaagatttacctccgtggaaaggaggattcatgtaacatgaagatcaacacgacagaggggtagtggagaagtggtggtcgggtgggtatcagtttgtaccttaagtgggataaatggtgtctccactacttgtacatgtcgtacccattgtacgtcctcctccctctaagaggcatgcttgctttgtcgaacttgtcctttatcatatattcatttggtatctctcccactacaactcaagctcataatatggaaatatcattagaaaatttaattaagtgttgggaccatgagacgtggtcttgttgtttagagttagtaggattttcctcctcaatctctttggtggtcactccattgtaacatatactttaagtgatattgctcccttatgtagagcaaggggcattagatggtgactatgggataaagtaagtgagtcagggaacaagggagagtgaggcgtgcgtggagcatggagctcaggttgagtggggagcgaggagcttgagctaagctgggagcctcgggcagagtagggagccccaatcatcctggagagggaggagctcaacccgtgccttggc

SEQ ID NO: 203846 - DNA, 702 bp, Cannabis indica
ctccaatttccattagcaagaggagcagttctaaaaaatattgtcaaagaatcaatcaccaaaaatcaccacccaccactacccatctctccttctctcccgcatacgccatccatatctcttggttatctggaaacataaaggaaaaaaaataaaaatcttcatctctctccaagatcaagatcgcgatcgcgatcccaatcttgatctcgatctcgatcacatctattttttttgcttaattggttcactactaaaaaaactcaaaattttcgaaggatttacaccgtcaggtaaagaattcctgacgatctatagaaccgtcgcctatgcgagcgtcgtgaatactgagtagagtagttgacatttacaaatatcaaggaaacaaatttttgatggttgaaaattgtcagctatagttaatactataggccaccatttaaaaccatcgactagccgatggtttaaaccgtggcctatagtatagttgacggttttaaaccgttgctatagtggattcccccccccccccaaatcatcaccttcatcctcctcgaaaccaagatggaagttttttttggccttaagacccctgaagagtcgagatctggaccacaaatctaccgaaaccacaatcccaagatctccgacaatctgtgaaatacaaaatatcaaaaatacataaatcccaaaataacaatc

SEQ ID NO: 203847 - DNA, 826 bp, Cannabis indica
cacgggactactgactgtcacgagacccctgccagagctgctgcggtctatctcaagggtgaagcttcagcattttaagaagcaaagttttgcgctgtggctagtttagttttccaaatttgggtaaatagaaatgattatttttggaaccgaaaaatgcaagcaattgtagtttgtgtacaggtggtaaagtttaatgtcaagcataaaattactagcatttttttttttgatgaatcagctaaaattatattgctccaaacaactatttttacaatttaatagcaccctcacaaatagaagagagcctaaaaaattgaaatctatacacgtatgtatttcattttaaatcaaagattggataagtaagaaagtatttcggatgatatcaaagttatgaaagttaggagtaggagaaccgaacacttatggaggataggcttgtttattgtaagtgcatagttttactaagttatgaagattgggcttgtatattgaaagtgttgttaaaaatatttcttatatatagagaacgtgatacttaattatgtcattagtaatataattaaatacctaaaattttaatggaggatatgcttaccttataattatgtcattagttttactaagttaagaaggttggacttgtatattgaaaggattgttagaaatatttcttatatatatagaagcggatacttacttatatcaatatatagtaatataattaaatgcctaaaattttaagtatgtaagcggcagcataaactcaatatatatttttagcggcataagcactgaacatttgtaaaactataattttcat

SEQ ID NO: 203848 - DNA, 1394 bp, Cannabis indica
gttgcgtttggcaaatgcataaatgtttaccaaacaagacccttgtactaaacttttatttaaggcttcagatgtaaaattgagatcaaaaaattttatcctacttttatttctttaagtgtaaaaactaggataaaatgttcattttgttgtagttatttaggagtacctataaatttttttaaaattttgaatagtttgcaatgttaaaaataagatgtatatattttataaaacgcaaaattatttatttattatacgcatagtaagtaactatttaactcttattttcgttataaattattcaaaaaattttgaaaatttataaataattttaaatagttacaacatactcctactataaaaaaaaaaaaaaatatatcatttaagaaacttttctaaataacaaaatatataaaggatatctactatcaaaaaatccaatgtatatgaattgatgttgtaaagggtacttgaagtatttttaaaaagcaaataattaataacaattatatatatttatgtgaattgtgatgaatactaatttttttatttaagcatttatatattacgcaatgtataatttaggactcgaatccaaaattttcaatacacacttactccctaagctacttaagctactttcaagtgattatgaacagtactattcctaaacaaaagattttattcctgtttaatttgacaatgtcaggacaagaaatcatgagctatttaggatcaatgatcttcctccataaatgatgtggactctcttttctctgttagaaaaaacaaaacctccctgcattatttatcactcatgattcccttctctctcctaaaaaaaaaggtgcacatggttataattcaaaaaaaactaaatgccattagaacattcccaaaactttttcaattttattttttaaaatacatcactaaattaccttaatttttttcaattttaaatcacaacatacaagtagtttctctattctttctttatattatttaaataatatttttgtatactttaatattctttatattatttaaataatatttaatataaaaaataattaaataaaaaaagaagaaaaagaaaatgaaaaaagcttctctaatataaaaaacaaattgaaggagctgttggaatgtatatttatgcatgaatatttaatttttaaaggaaaatgttcttttaaaggagttgttaagaatgctttagttttttaagatatttatttttttaattttacaaaattaattaattaattgaaaatatagaacttagaagattcaagttgtcactttgcggacaataaaacttgttaagtttaagctaatgtaaatcaaactcttcgaatatttttttagcactacaaataatatcgaat

SEQ ID NO: 203849 - DNA, 760 bp, Cannabis indica
ttttttaaatgtaaaatataaagatgtccctactataagtaccctctctcaatatatacatatattaatatatatatatatatatttatttatttatattatgaaagttatttcattttatcatgtgcatcaagcatacacatgaatcatcactagggtcccccacttctaaggtgatgcatataactaaaacaatattattcctccactaatacaattttataaatcaatgaggaaaagaaaattctccatttattatttattatttcaaacctaaaagtatcaagaatatttaaagtgataaaatgcaataattcccccattttgtgaatggatttttaatattttttttcagtcaactcttaaatattttggtatcttcatttttgggattctcttattggttgatcatggttttgtagttatgctatcatattatttttatgttctttatatttatttctttttcactttatttttaaattgaaaatttttataaacttgttgttgtgtttatattaagtactaatttagaggaaattcattcattttttaaaatgtagttattcatatcaatgaaaaattaatcaattttgtaaaaaatatatatttttgaatttaaaaataaccatatttgtaaaatcaaacattaaaaaaaattggctccatccaatattaatatttagaattacttgatataatttggatattcctttctctaattggatgacctttcccttttttattattttttttttca

SEQ ID NO: 203850 - DNA, 788 bp, Cannabis indica
atttttattacttttcaatttttattatatagtttcaaatttctgattttataattgttgtattttttttttaggatctagttatcaaagatgttaatgatgtaggtttggttactgaaaatgtgaaagattatcctattgtatgtttgtaattacttttatttcttaataacttattcatttctgcaatattaagtagttttattttatcttttttttttattattcagttttctcatctgtaattattggtttgtaacaggatcctattttaaatattgctgaaggtggtggtgtgttggttaatgaggagacactgttgtagaggttttgttcatgtttcttttatatgtgttatgttgttgttatgttgtttacagttttgtttttttaaaaaaaaaaaattgtgtgtatcttattttttttatttaaaagacttaatatgatttattatttattatgtttaattatttttatttatatcatatttattttcaattttttttattagggtgaaggtttacaagatgctggagatggtgatttggttaatgaaggtcacactgctttacatgtattgtttttgttttgttcatgtttcttttatatgtgttatgttatttacagcttggtttcttttcttaaaaattatgtttatcttattttttatttaaaagacttaatatgtttaattaaggtgatcgtttacaagatgttggagatggttgtttggttaatgaaggtcacgctgctttacaggtaatatttttgttttctatttgtttttg

SEQ ID NO: 203851 - DNA, 1670 bp, Cannabis indica
ccgagaaaggtatgatttgtttggtcaaaggcgtagacctttataagtcattaatgtgctgctattgcagcttgtaacccatgtgggagtactgagactaaccatttaacagctatatcatttttgcattataatcttaactacatcttaatcttgcaagtaaataacatccttaattctcaactcatatgtcaagtaaacgtgacaattttaattttataccccatacaatcttgaagcatcttgagattgagagttatagaggtccaatattctcaaactgggttagacaaatgcattctctcaaatatagacagagaagcatcacacttttcctctgtttggttgtttagaaaggttaaaaattgaaaatatgttgctgtggaaacaatggtcatttgttattcctcaagaatgtctaaaccttaatgttgggaaaccttgtttgttatctacctaccatacttacagcatctcactttctgtgattgtgaagaaatgaaggttttgcaactgtcctcatgtagtgttggagtcacctctatagatatgggaaacaatcaaaagagccttagtatatgggatctgcatagactctcagctaacatatctatagaagtgactaacattttctaaaacaaatatgcctacaaggatgactagattggcctaagattcaactcatgtcagaagtgagattggattatattcacccacattttcttgttttgacattttacctggcaatgtatgattcagttttaaaccttgccattcatattgaaactttgctgaagcctttcacttccagaagtgcacttaagaaaggctcatagtcatacataacaaaatgtatcacttacataaccatgaggatttaaccaaatgacaagcattagttaattgtgtaatgtaatgacctattaattatgattagggaaaggtgataaatgggaagtaaatctcaagtggatgtgccagagactcagttataaaaagcaaacttgatgatatatttaaaaccattttcagcagtaaaaatatcttaaagcttgatgattactgaaagttgaaagaaagaaagaaagatagaaataataataagaaaatatagctcaaaccagaagaattttatagctgttttgttagctgtaaatcataattgtttgattagaatgtggaattagtgggtattgaatgacaaaaaaaaaataaaaaattaaaaaattaaaactaaagttggaggggtgcgccaagtccatgcaatagtgcaaagcataggcgacacttaagagccccattagcaagctaatgtggtgaactcttccccttaaaatattaatttaatatcgtgtgagccattggcccacatatcagatattaaactgataagaacagatactacacttgatcttagccaaaaggccgagaaaggtatgatttgtatggtcaaaggcctagagctttataagtcatttatgtgctgctattgcatcttgtaacccatgtgggagtattaagactaaccatttatgagctatataacatccttctcaactcatatctcaagtaaaagtgacaattttaatgatgatagggacatattaagatatttggacttatcttttactgaaataaaggagctacaattttcagaattcaagagcaga

SEQ ID NO: 203852 - DNA, 1884 bp, Cannabis indica
atcaaatttcccatttaatttgtcatgggctcgtatattttgacggccgaccctgcgtcttataattaattagctatttattataatttttattaaattaaaataaataaaatccaacattaaattgtaccaacaataatattatactctataaaaattctagacatcatcagtatgtttagatgggattgggatgagatgcttatgagtacatatgggttttaattgcattatgaattatagaagaaagttagcaatagtattttgaaaaaagtaagcaaattatgagagccatatgggaagtgggaatatatatatcttttggtgtaagagattttagctttttttttctttttttttttaaagaagaggagaagcaaaggataaagaaaaagaaaatataccttccattatgatgaacgtcttttttgtaagttaaaaactaattcactacaaatataatattcttaccaaatcaattagttaatagaagagatttataatgtttttgagatgtcactaatacaatcaggaatgaaatcagaaataaaatttagatagaataattatgtatttttataataaaatactatgggcacttatggtgtcgaccactctagtgtcatttactattaagaaaaaattttctctcagataaaatagagatcaagctcaatatgtttagctcgagcatagagcaatggatttgtcgtgggaagaatcgtgctgagattattacaccagccaattggaggtcgaggcaaatggatgtgtaactcaataaagagataatttaactaagttctgtcacagtttgagcaaggctttgaaactcaacttcagtttagcttctggacactgtatgttgttttttgcattggcaagcaacaaagttagagccaaaaaaatatagcagaaccataagtagaactttcatcaaggtttgttgcccaatcagcatcacaaaatacagtgagctcatagttggatctagtttgtggaggtgaatgccatagtccatggtgccactaagatacccgagaattgttttgacaacttaccaatgagattgtaaggggttccccataaattgactgactttattgacactaaagaatatcttaggtctagtggctccaactatatggaccaatattgttgagggttgtcaacatgagaacttccataggctgaaagttaagaacacaacatggagtgtcaacaaccaactgattccaaacatttatcatttgtgattaatactatagcctatgaaagtacaaggtgagaatctaaattgtagcttgtgctcgttatatggttttatattggaaaagtaagtgtagccaaagattttaaggttggtatataattaggttgtaagtgatcaaacaggacctcaataggtgatttgtcctttgaataagcatattgcaaaacaactggaaggattttttaagagatgccctttaagccaattagctgaagttaatgtggtaattctctaacattgaatccaaacgtatcaggagattgtcctttatatgttaggctctgagagtgcacatactaccaaaaatatatattttttttgtcttatgaccactattctaacattacagtaaggtggcgcacgcacgacacctattgacctcaagtggtcccctactgtacggagcataacaaccccacaggttagatttcagtccgtgggcccaaagttagtgcattctatgtatttatcctattactgcacaaagtttacatgcaaaccctagtgggtcacaagtttatctcgtacccagatcttagcctataaataatgcattataccctcatgcaaatggttaaaaattcatattgtaaatactatagcaaaaaatt

SEQ ID NO: 203853 - DNA, 1657 bp, Cannabis indica
tgaggttatgtccccttcaatgacaaatttgtttgcattagtgatgttgcatagaacccctttcatccaacaaagcccgattcccccagagagccctacgggcgggacgtagtgattattttcgaatttcagacgcttactaactgcttgaaatctggttgcggttatgcgagcttctgataaaagaagcatctcgggttggtattgatgaacaagtgccgccaattgccgaactgtcgtggggttcctgagtccacgacagttccaggccaaaatcttcatggagactgtggagacttttgagggcaagtctccatagccccaaagcaaaaatccattccatcaagcccctgttgggattgttgaccacttgctttttcctctaggatttccgtgattctacatcctttgttaactatagagtctttttctataacaacaaagtgattatccaggttcactttaagatcgaaggagtttccttcccacaggcttgtgatcacggttcctacgcttttctttgacttagcagtattcctccatttgaaggttctgggagtcgtggaaagtcctttgtgatcctttggcggtcgacccctccgtttcggggtgtgactctcttcctgttctggtatactctgcctcttcggtctgcccctacgcctagtaggccttccttcagggctacttccagtggagaatatcgctggattaagagacatgagagggatatcctttgccgtaccacccttcgtcgtttgcttactttgatcctcagtgggtgaagaggccacacttgaagcataactttggtagtttttcatacttgtactgtatctatagatcttttagtttctgccttttgagaaagaaacccgcgaaaataggtttattgagatcaatggtggccctaaatcgcagggtactcattccaacaacatcttctacgccctgcggcaggtcaaaaactggggaggcctttgttgcaagttctttcacattagatagattccaatagaatggaggaatgctctccacattgacccagataggggttttatcaatcggacttccgccggagttagccaagctggccacggcataataaccagaagaggcccacaaacaaaccatgggcgtctagccagctcattcatggcatcatttctgtttgcaaatgtcaactgtagaagccaccctcaagctccttccacttccatcccttgatttcattccatgataatttaagagagccttgaatggctccttttccaagcatatacctgctgaatatcttcccaagtagaactttgttttcttcctgtggctcgtcaacttcccccggattgagggagaaagtaatgtcatcttgattgatttgaacaacgtcttcaaacacttcacaaatgtttgaaaggtccataatagtggcaactgtttgagtgtgttagctgtagtataagagggattgtgcatagattatgtcaatcctctatgagcttccttaaagcatggctccctgagagcaattcaccctaaatatattggagtagttaacttaattcccaatatagcacccaaatcaagccccttctctttagagatatctccaccaacacaattccaatttactttttagttcctaaactttttaaat

SEQ ID NO: 203854 - DNA, 1401 bp, Cannabis indica
ataataaagtgtcataagttacgtattaaagaaaaaaaaaaaattgaaccctttttagtcaatacacgcctcttttttaaaaataaataaataaataaataaaaattaagtgacctaaaagataggtaggtccaccaccacattttcatttcattattattattattttatttttctaatttttttaatcatatttgaatgtaaattattgctccaaaaggagaatcaaaatttttaatcattgttgataagtgttttcaaaaaataaaacaaaacataatttatatagaatatgttcttaaatggcttaaaaagttatatttaaaaagaaaaaaaaaagaatatatgcttcacaaaaataaagataaaagtaattttatttttattctttgtgaaagttataaagctcaaacttttactacaacataagataaagataccttgcaaatttcaaaacgaaaactttgtgtcattgtaaaattatggatatattttatttatttatttatttatttatttttataaaaagctaatgtttaggttaagggtattaaaattttcaaattttaatttttttttacattatctcattattacaacaaaaaatcatatattatgtacactcacttattataatgcactaaaaatggatatataataggaaaaatgttttaaaaatacatattttttttcttaatatagataaaaaaaaatcaatatttgaagtggagtgagaataatgtctttgttttatttaagggaaacataaagcaaatcattttttattttgctaatacatagattttaaatcctaataacattccctttcatccatttcaacatcaaaacatgaccaattacatcacatattatcttcttctttttaaaaaaataaatttatatgtaagtaatattccaactcaaataaaaagttcagattatttctcaaaaataacaacaaatagatcttaaaatttaattttctttttttttttaaactaaaacttaaaatacattgtaaataccaaaacatatatatagataaaaaaaactaattagattttttttttctctaaactttcacatatccctaaacttttttaacctttaaaaattatcttgaactattaattaaggacataatttgatacatataaaaatttgagggtgaaaatcctaattaatttaaaaaaaaatactaaaataagttgtttgagaatttttttccttaataactttttatttttaccataaaatttggtcaattagagtgtagctacctcccctgaaattaatgacataggtaacacatgttttaattttttaatcattccaaataaaaaataaaaaaaatctaacataacataaaaaaacaatcaaaattatcttttttttaaaaaa

SEQ ID NO: 203855 - DNA, 653 bp, Cannabis indica
aatattttattttgtattgataatgagttgggactaaaagaatattagtaacaataaaaaagtgttgatcaacaagtattagtgatcaattaattttgctgtgactaaagaaatattagtgacaatattttgttttgacaaaagaagtattagtcacaatattttgttaacaaaaaaaaagtattagttacaatttttgttgtgactaaagaaatattagtcacaattttatgttgcgacttaagaaattttagtgtgataataaaaattgtgattaatagtaagtggattgtggctaaaaacgttttagtgagaacttttgttgtcactaaagataaataagttgtaactaattgtagagacatctttacacctattattcacgaagattagttgggactaaaagtgatttttagtcacaatattatttttattgttactaaaacttttagccacgaattttttaattacaacctataatcaagtaaaaaatttgtgactaaaatttttagttacaatattttttaattttaatcacaatttctgttgtgattaaaaatcaaattttttgtagtgtgtagtaatttatcatccccaataaaccatacatatggaaaaatctaaccagttgttctcataagttttgatatata

SEQ ID NO: 203856 - DNA, 1185 bp, Cannabis indica
aaaagtttcgacagttgcgacggttgttctctcagcacattctaaccttagtcaatggaagtgcgctcaacaaaaaagaatggagcctctcctatagaccatgtatggaggaagagcgttggatcaaatctgttttcaatacgattaaagtaaatgttgatggagctattttccaaccttcgaatttttttggttgtggattcttagccaggaatagtgatggtactcttattgaagtctgaactttactcaattctggttgtgtctccacttaagtggctaaaatactgagtattaaggaggctctaagctagattaaatatcaaggatgacactcggttacagttgaaatggattgtctagagtctagttgcagtccaagcaatgcattatgtgtgtttattgtcctatttcgatctcctgaggtttcatattgcaagcaattgcttgtagatttgccttttgtttctttgaattttgttgtatgtactgctaataaggctgaacattttcttgcacgtagctcttgttcctcgtcagttcatatttttgatgtaaccaactcactatttgagttgttgaacattgtaatggttgttctctttaataaagttgccatttttccattcaaaaaatagtattataaatattagtatttaaaataatttgttgtattatacttaatcgcatcataagcactggtaaaaaaaaactaattggcatgcaacattaaggttaactactaattattatcaaaaaaaaaaaccaattactaactagtatctaaataattagtagttactagaaattgtcatatataaatatatataattatgttatattattttgaataataatatatgtatgtaataaaaaaataatatgtaatatataacaatatatattgagttgtcaatattttgtaatatatagtgaagttacttattactatatgtaacctccacaattatcacctatatcaagtgtgtaaaaaggtgttaaatatctttatttaaaattcttaacactataggagttattatgtgtgcatgagttacatctcttttactcatatttacacgcaatattaagtccataacattcatgggaggttatgagttagaattttaaatggaaatatcctaaacactatatataatggtctaaggtgctaatattgagtag

SEQ ID NO: 203857 - DNA, 642 bp, Cannabis indica
aggagcaaaagtgaagaacaacatttaaaagaatgaattgtcttccctatctttgaaccagatgattcttcttctgagtttgttgaagttgatccaactggcagatatggcagagtacatctctcctccatctctctatctatgtatccatttgtgtctcaggtttttttctttttttgttcttcctattgttaacattttttgagttttttgtcttttgtttttgcagtacaatgaaatcctcggaaaaggagcttcaaaaatagtgtatgaaatctcaagttctcacattttatctaaattccaagatgacccttttcagatttatccaaatttgagcttttggatagattcaatcaatggttggagtgattttttgtggttgattattgttacaggtacagagcatttgatgaatatgaagggatcgaggtagcttggaaccaggtcaagctttatgattttctacaaagccctgaagatcttgagaggctttattgtgagattcatcttcttaagacattgaaacacaagaacattatgaagttctacacttcctgggttgatactgccaataggaacatcaattttgtcaccgaaatgttcacttctgggactctcagacagtaagttatattctat

SEQ ID NO: 203858 - DNA, 1140 bp, Cannabis indica
aatataataaaaaaatataaaatctaaagcatgtgatattcatcctttgttttgtaataatatattataacataataaagtaccatggtagcttaattagtacaaaaaattactttataaccacttgtaattattagtaaatcactattttatatagtctcacttaattaattaaacctatgaaacaaagcatatatatattatattaataaaatagggaatttggggttattattatatttgttcctaggaagacttttttgactagcatattaaatttaatggtaaaaatgcatccatgcataataaaaacatgatagttatgattctatcataatttttttaaaacttaatatttttactagctgtaaattaaattaaagtttgcaaaacaaacatggggtactggttctcaaaatggggtttttatttatttttatatattttgaaattggtgtactaattttttgaatattattggatgcattggaaaataaactaagttacacaacaaagaaatctaaagactaataaggagagttcatatatttatgtatatatataatatataaatatatgtatacacttacagcttctaataattggggatcagtagtagtagtgttgttgttgttagaattatgaggaagacgaaactcatgcatcatccaatcagttttggtacctttaccagcacttcctcgatagtaaaccaaagtttttttaagaccaatatgattattattacgtacaattggcttatctattccagttgctttccaaaatccagatccagttactcgatttggtcttacactattcttgtattttctacctcttttacaaaaaaaataccactctttatctccacctgatgatgatccttctacatatacacatatcatcatgttaaaatacataaataattgaaaaataaaactgttttagttctagggaattttaaagaagaactatatatgtaatgtaatgtaataaaaaaagggtacaacttacttggaagatcccaaggatcatatttgtagatatcaatggatttgatgagatcaatggtgattggtttattattaacctttctcttaagataaaatccaactagttcttcatctgttggatgaaatc

SEQ ID NO: 203859 - DNA, 1662 bp, Cannabis indica
gccaaacaacaacaatctaggagaacaccaagatatttcaaatctaaagacaaaacacatagggagagactccacaaaacgatacacaaccaacactacaacactaaaattagagtatatcatttgtatacaatttttttttttcacaaaatttaagtaaagcttctaaattaatctcatgatgttattttgtattattattttttttttttaaaaaaatagagtttaaattatcatttaataaaatataagatataatcaataattttataaaataaaatattcaaaatgatatttatctataattataagtaggaaactaaaaaacattgccatacaaaaaatgtgtatttttgttctatagtagattagttttattatgagtcattgaatttgatcgtatagcttgatcctttgtcacgtcttttccatttttgctttagcctatgaaataattaatagtaagaaaacaatattctgattaaataaatctgatatgagtccattggaatctcattctcattcctaatgagttgtaagcaattttttatcacgcaatattaatagtaatattagtattaattaatcaattatcaaacgtggtcaaatatgatagtattattaccacttgctaaagtccctaataaactacttaataatagcatgacacatcacatgggaaggtttaatacacattttaccatttacattgatggacgattatgcaattggattcttcatttttaatagtataatttatgtctagaaattcatgtgtattttttcaattatactttatttttattatgtttagataataagtggtaattacatattgtatgattgataattattatatgctcatgattgaaaaatattataaaaagtagcaagggtatctaatttacttaaaaaaaatattaatatcgttattagtgtaattaagtattaaattttatataatttaattttataattattatagaatatcaataacctttataagacctttaattaatgttgttagacactactggtaccttataattatactcgtaataattacacaatgtaattacaccaaatatttattcaagttataaaaattagagagagtgtaattgtgacacttctgtttattctaagggtgagtgcagagcaaagaacagaaaatatataaaaaaaaatgtggtttattgaaaggggagttttatttgcaccccataaaataataaatacaccatattattaaaaaaaatataaacttaaataatttttaaaaattactcttaagattttttttcaaaaaattttctcatattattttatgttaatttcaatatttgttttgatttcattttcataattttttctaacttatctatatatttttttattcttttctaagaaaatttcatataattttttattctaattttttgtcataatatttaaaatataatgtatttttatttgataggtatattttttaagaatagaattggaagaaaaaagttaataaaacttagtacaattaaagatataaattttatataaaataaaaattattaaaattgggtgtctttaaaaatttttggagtgtaaataaaatttcccatattgaaaatcttaattacatggcttaatttttttttttttttt

SEQ ID NO: 203860 - DNA, 1747 bp, Cannabis indica
ttttttttatataaaaaaaaaaaagtcatatgtactaccattttttgggtatttactcaataagggcatcctcacctacccttcggctgagccttcatgcaattttcttttacaaattatttctgatttcttttctttgtctgggtccttaaagggtcagcttttttgaccattgaggcactttttaaagactgaaatttaattcacctatcttagaaagagaaatgttaaaagttagtattttttttacgtgtcaatattgttattggtttaaataaatatcgagtttcatatagtttaatataataatttttagagagtactgttaaccaattactacgtgacatatctaaaaatattaaatacgactgagtaatactcattttgaaataaaataacttcataaaataaaattattgcatttttttttctattcatattcaccaacttctcttaacttgaaaattgagccaaaatgaaaggttgttagggtctttgagttttgcaagttacaattattgcatttttgtttttgtttatttatttatttctttggggggaagggtttattttatcttgtaagcaaacccaatttgatttttgttatattagatttttaattaatatttttttttgcttaattaaaattatatattggtgggttgagacatgactttaataatttatttaattagtgattatacttaatattttgattagttagtaagttgttactaggtcaaaataaatttgttgaatagataatattttattttatggggttggaatttgcaattttattatttatgttaaaacatagaaatttattgaatattatggagttctagaattgactttcaaataaataatccattcatacttgtaataattaataaaaaaaatatagaaaccctttaatttatgtctcatgaaaaaaaaaggttagtgctattgttgtatatactttcaaataaataatccatttatacttgtaataaataataataataacccaaatctttattttatgtctattggaaaaattgttagtgctagctattgttgtattaatttataataacacttcaattaagtaaatactaaattctagtgtttcaaactaaatagtatggttgaaccacttggggctagctcaagtgaccataagtgggtgcgtgagtgttggaggtcctgagttcgagtcccaagtaaaacatgttgtaatatataaatacttaaataaaaaaaaaaaaactaataatatggtttttcaaatgttttaatttttctcatgagaaaataaaccaataacagcatattattattattattattattcaattttcaatataaattcatttcatatagctttttatgtcagaatacagagaaccataatgaatgtcaataaggcacatttttaaatattctataatatcttttgttaagaatatattccacaaaataatttaaattttgcttataatgttcaaaataaaaatatatagaaaattttatggtgtgcctttgtacgtatttttgatttatagatagttcacttttattttattttttataaaagagtgtacattatagttatataaaatattttataaatttttgagaaataaattgtttaaaattttactattgtaaattattttaaattttttaaaaatttacaaaatgtgttaaaataataaaaaaaaaatgaactgtcatataaaaaaattaaaaataataaaag

SEQ ID NO: 203861 - DNA, 807 bp, Cannabis indica
cttaatcttttgtaagcgactttatttgttctcctgttgcatatttctcttgctttgtttcttttcctgtttcatattccacttgctctataacttttagtgatctacacttgaatgcagtagttcagaagcaaaatctgttgctgctttttctctgcgaaggtgtctttttcatttcggcgtcccatgtaccatacgcttttactatccatcagcaacatttaaagtccttatacaaaagtggctaaatgtcacttgctcactactcagcttaagcgatcttttacttcctagacatgaggatgatgatgggaatgttgaacccttgaggcagcaaagagcacgtaatgtatcaatggttgccctaattgaaggtcagagtgcaggattacgtacttcaggatccgatgtttctgatgacaacaagggtgaagagggccaggaagctgactcccggtaactattaaactctactgtgatatgtctctgatacagttctacattgagttttaatctttatagttcaatttctttggtatgtcttaattctgataaatagtagcaacacatctcccatctttcttgctgctgctgatttgttttaattattgtgtactttcagatttcctcgtgcaaaaccattctcaattagttttattttagtatgttctgcaatagattgcacaggttgaagagtttttatttaatttttttctttcttaatgtatctaattataaaatgaatttccttttttctcaaggcatgtaagggcctatctgacagactattttaacgttctaaactat

SEQ ID NO: 203862 - DNA, 1811 bp, Cannabis indica
tgtagtttgtttgtatttaacgagttgattaatgaagtttttttctccttcatcaaaaaaatatatataccattaaaaaaaaatgaggtacaaacatattatatttaaaaatattaaatatttcaaccatattttactataaaaataatgacaaaaacttagtaataataaaataacactataaatatttgtcaaaataaaatttaataataacgagactgattatatttttttgcatttattcgtgttaaaaactgactttaagtgttggttatactaacaaaaaatcgagtctatgttacatacaaacttaaaactttaggtacttacattgtagatattttttttcttatcaatatgttgccaatattgacacttaaatgaggtggcccattatatttttttcaatgtatttttataatttttttgggagtttcacgttttagtactaaggaaagaaagaggaacatacattgtatactcactttactttacttgttttaatttttacctctattttcatattctttataagatatacccacttttatgactgatgtctccattaattaatgtaaattatatgctagacttaagtagagagtaaaaatatattggacaacctaataaaaaaataagtatattttaataaaatataatataaagatatttttgactaatagataaaaaaaaaaaaaaacattttttaacttatttcgaaaagaaaaaggtcatattatttttcactaacttagtaaaaagtcttacattatttaaaaatacttttaagtattattaatattgacacctactagccagttagataataattaattttttaatttaatttatactaacaaatattataaatatatatacatttatgttggtaggtaagacattattggaaagtcttatcaaaacaacacatctcaactatattggtatttttaatattttcgatatgtaaatgaataagttgcaacttaatttaatttataaaacaataacttagaatgtccaaattagaatttaaattgctttttgcacacatctatcaaaataagcaaggtgcatacaacaaagtatttgaattaattgtaattttggtattataaattatttaaaattttgtgaaatgttttttttcaattatattatacaatgtcataaaaattgcatcatgtataataagagactgaatacaaagaggatagccagacctccaaaacaggtgccgacaaaaagcatacttaaccaaagtgtaagctgctatgttaacaattttaagacaatacacaagattcgctatattaaaatatctaaatgacaaactaaaataagtcctaattaagactccaataaaatatggttattaaatttagacaccaaattaagataatcagactaaaaaataaacattataaaagctaagtaaataacattattgtgaggcagcattccttagagccaaagcttatttctggcggcttcccattatcaccgttattataagtaatacaactaaaagaggagtaaactattatcattattgtaaagtcgaacctttataaatctctatgttcttatttgcttaattattcattattcattattattaactattatctatttatttcaatcatttaattgactcaacgtcgttgactaaaagtgagatgttaacaaaatgtatcctaaatctatcattttctctacaactctagtttcagtaatagcaaaacggtcaaagtagatcaacacgaatacgacacatttttttacgagtcgagttagagttgagaaaatta

SEQ ID NO: 203863 - DNA, 880 bp, Cannabis indica
cttatgccgttaaaaataaacatcgagattatcctacttacaaacttaaaactttaagtacttataccgctatttaactttcaatttattagttgttataaaatttcactaaccatttataagatatcacgttaaaatagtgttagacaccaccatagttacttaataacaatactccttttgtttagaactctaataaggtgtctagatgtctagaaggttaaaaaatatatcactttattttgcgaattttacactttgatgttgttagttttgcaaattcatctcatacttttctaacatgtatatttgagtatgcatatctaagtatttttgttttaattaaggtacgagaagcctgttaagggaagaaagataaactggatgaaaggtggaatacttgaatcagacagagttgtaactgtgagtccttactatgcaaaagaactcatttcaggagaagacagaggttgtgaattagataacatacttcgaaacactggtattactggtattgtaaatggtatggatgatcaagaatggaatccctccactgataaatacctcgcaatcaaatacgatgtcaatactgtaagatcctaagatttatttttacttaagttattatgtttgtagtacttaaatatctaagttatgtttttttagcatagaaagtacttaaattattatgtttataacacttaagcgtctaaattgttttgttaacgggccaaagtactcaaattgatcagatacttaacgctgctttaaaaataatttggatactatagtgtcacaaacatatttggggcttgcgtcctaggtttggggtctaagtctgggtgtgaatttcaaagcggggtaagttgaaaaatgcctc

SEQ ID NO: 203864 - DNA, 1853 bp, Cannabis indica
attttgatgaaatttttgatatgattttcagaaaaaatcgttctcaagtttgtctcttgtagaattgaaaaacactgcttgatattattaaatgagcttattactggttagtagttacttctgtacttttgctttgaaaatgaatcacgttccctccccctcaagttaaaataaataaatggaagcataattggctaaggaaatttaataaaacaagggaagttatgtatatttgcactcccaaaataatgtaaaagttgctcatttctagctgtcgaagacagtactaattgtgttgagatatagagaaatttatataatagattaaaaatttgaaaaaaaaaattatcaaaataagtaaatatggaaaaaaatttatttttattctttgaaattttttgtttgcaaaaatatttctatattaaaaataataaattggtttttggttgttttataatttatttgtataatagttgttatgagtattttttttttttggtttgtttataatttatttacggttatcgtgagattgaattattgtttgtttttttttttatttgaacaaattgtatttttatagtttaaaactttataaacgtatttattttataaaatataagggtattttaagaatgatacataagaacacaagaaggccatatcaacaagaaatgttgagaaggcaactcgaggataacctccttctcagaaataagaagccttaacatttaaggcttgctttgctagacaatgagccactatattacaagttctaggaataaaatataaacccttactgttaggattaagcaacttattttgaattttcaaaataaaaaattccaaatctcctccgttcatcaatgacatattaactctattgatagcatttaaacaatctgaataaatagagaacttcaaaaggtgcaacctgttgcccaaagaaggccctcttgatcgccgaagttcagctaaaagagggttcactgtatgagacaaaaaggtgtagaatgaatgtataacactgtccaagtgatctcaaattacacctcctgagttgttggttttcatttgatcatctcatgcatcacccacgttgatcactagattacccacttcgggtggtttccaccggattggaccagtatgatctttaatcatcttgttcccttgttgttcattgtagctttgatactcatccaacaatgttgttgatagcaaaggaagtcctcttcgagacaagacaagtctccaagctagactgtctaattcatttcataataataaaaaaaagaaatacatgagaattgtttatatatttttttcaaaaaaccaccagaaataaaatagcaaaataactacatttagctgatccttagccaaacttcagcgccgctccatcattacgaaatcccgaagccatcttggcttcatacgaaatcggctcacccgctcaggaccctctcaaacgacttctgcgacagcagctccttcgttggttgaaaagcttggttggttcgaacctttctcctgggctgaattctctatggcactcttgatgctttgtttccaaactccaatatcaatagctagtgggctttttagttgggcctcactatcactactcccttcctcgaaaataaccttgtcctcaaggttaggaatgttatagagctggatgaaggactcaaaatcttcccacgtggcgtcctccggagtacttaaagaccactgcaccagaatttgtctaaccactttgtcattgagcatccgaagtcttgtagtttagattgccaaaggaaccgtcagcggtttgttggctacgcatgactccggtaatggatagcatt

SEQ ID NO: 203865 - DNA, 692 bp, Cannabis indica
ttttttattctaatctatgataagttcatcaagaaattaacttttctatcaaacaattagttttaattatataaaagtaaaatttatatgagtttttaaatttttatgatattttttttttatctataatgatttatcttatattcttaaacttttttataaaaaaatatcataatcaaatttacatgacatatatatcaaattttttttatatatttttgtaaatagcccttaaatctattattgaattatttttccaataaatttcattttatggcaacaaattaatgatcacaatgtcgttcacctgttcctccatgctatcttaaattattaaaaagaacacggtctctataaaagagatcaacctttttgggtgtgtgtgagatatatgacaaaagggtcatttgctcttcatgtttgtgtcaagtttaggttattttttatgcaatgaattgtcgagcacctttgaaagttagatatgaaattaatgggtttcacaattattccaaccaacaagacattattaaccacatttatttgtttaaccaacttagagttgtgaaagtgaaactgaaaaccataatatatttcataagtacttttagtttattcagcaagaaaaagtactttaagttggtatttttcataattggaagtgcactacacgttattttacgtattaaaatatt

SEQ ID NO: 203866 - DNA, 802 bp, Cannabis indica
tccttcaaaatgctgtgactgaaatatgtatatgtgtacgaacattgcagggagatgaatacaccattgggttcggcacctgctcagggaagattgttcctccattgccttgatgatgctatcaagtgttggattggattcttcaaaatggcttcattttatcatttaagtgtcttgtcatcattagatttaggtattgtttttctacatgactctgccgaatgaactgttgcctaatcgataaattcgataaaagtttggtagcgtagtttctatctaccaaggatgaaaagtctatatttgatttttacgtactagtggtaactaacatcatggacaaatttgaatatattcccgaacaaagtgagtcctgcgtacgtatatatgactattacaattagatgtaatgatatatctgaccgtcaaatacatgctggggaacacgttagagttcatatattcgcgacagtttatttacagtactgaatcatatgactccaatattaattttagattgaacaacaatcaattgattaatttattagtttaaagtgagagagaaaggttgctatataggaattattataagattgaggtctttcaagccaaacatggtctaatattgacatggtttaactttaaattttaaagaaactgaagcgggattctcttgctccttttctttataattataatataaatatcagacccaaaaagagaggtattttttagcgtgtgccaaaagcagatcttacatgctggttcatactaaacaaaacggtgcacacgccagccatgtcta

SEQ ID NO: 203867 - DNA, 844 bp, Cannabis indica
aatagaatatgatggaaagattactataaatttatatttcgaggggtattattaacgagtcgtgtattataagagcaccacttaataatgtaaaaagttcatagacaaaaatattatatataaacatataaattgttgttagaatgaatatattcatttatttataataatgtatacatttaaattggttattatcatgcttaatttggaaatgatccaaactcgtttaaagaaaattcaaacttatttatttcgtatggatccaagtcttattatcgtatctgatctattttgccactctcaatttataatgcttagtactaatattattatgagttatacaatgttatcgatacaatttaatatcatattttttaacaaacattttatatattttgatttaaattaataagtattgtaaaaagttactaactaattataggagattgcctcaaagatcatgtagtgcttaagaattagttggcttcaattgatttggccttgtataattatttaatgcttttaataaattcttttgacatgaaaatattttagattcaatactattggaacatgtggatagtatgacaaaattttagattgtccaacaccgacaatatataatattgttaatataatttaatttaatagtgaaatttatatttttttaattaaataaatataacaaaattattaataattgagaaaatataagatgacattgtaatattgaacaccttaaaattgtgtaagtggcaaatatttgttagtaaactggtatggtagttaagactaatttttgtttaggaataaaaaatgaatatataatttagaaatgtgcact

SEQ ID NO: 203868 - DNA, 1618 bp, Cannabis indica
caaaattatgaacaactctaataaagtctatatgaatcatgtaaattctatcattaaacaacaaagcaatatctcaataaacttccaagaacaaaatcttatccttccaactcgaaactctcctagacacaatacctttcactaaggtgaggcaatcaaaaaagaaaataagattcaaccaattatgagataattctctcaaagacaaagtgacaaaccatgggcaagaactaaaatcatgacaactaaagtatgcaaggataaattccttaaatagatttcttatcattgtttacataaacgatatagaataattattcaaagaaatggatatatatatatatatatataaacttgtcttattaaaacaaaatggcaaaaggtgtattactagaacttaattaaaatttgaagaaatgattatcatactgtccaataacattgttatcattttgttgtgatcgtgtgaagctgttgaggttagaatattcttcttgaaaatggggttcttgtataatctcagcataatcactaaaattaggattaggattagaagaacaagaagaagttgaagaaaacaaagcaatctcagctcttgtcatagccaattcagtctcaacatgctgtatttgttgttgtaactgagaaataatcccgacacatccataaactcgattctctattctacatgtcgcctcgaaatgcatagtatctgctgcttcaccacgcagttctaccggtaatcgctacaagaaaaaaaaacttattatttttgtcattataagttaacaacaatgaaaccgaaaacttaatagttatagtaagtaccttgagcattttcccgacattgctggccccgaaaactttatgaacgaaagaaaatcgttgaggattgttggaaggaaaatatggagagaaaatgcaatctgaagggcaactctttctcaaatacttacaagcagcacaacgagtatgatgtgatgatgatgataatgaactcatatttataaacaaatctatgctaagatataatatgttattgtagccaaaatctttttttgaaaaaaatctaatgaaagatttgagaatctacttggtttgatttgatttacaagatatagtttatatatagattataaacctcctaagtgtaagtctaacggctagtagtaaaaatggaatttgactaaaattgctctgtttaaaaaggaaactttagataatgaatgtaaatggaaaaataattagcaaaaaaacatgagatgtcatttttgtttcaaatgacagcaaataatcttaaaagggtttgaagttggaacacttgttttctttgtccaataatcatatttctaaataaataaaattttgaagggaaaaaaaaacaaagtcagagattaaagacaaaagactaataaaatttcatttggtcatatattgattggaaatcaaggaaatcaaaatagcaagtaaatataactttgcaactatgaacataaatattattttgtttgcaaactgattttgaaacaaatatgtaaccccaataagtaaatcaattcaatttttaacatagttttgaacaatattttttaagtattaaactaaacaacttatctaa

SEQ ID NO: 203869 - DNA, 998 bp, Cannabis indica
caacgcacccatgtcatcataatatatatatatatatcacttttatcgagttaaggggttgatggcaactgatgataataccacctctaattttttatcctcacctttatttctatatatgttactatttcatcatgaaatacatgcatactcatcatcatccacatgcatgatcatgcatatgtattaagaatagtacttctcatattaattaaattaaattaaacttcctctctgtggtatatatatacctatatatattatatgtagcatataaattataattgcttaaataatattcccaggggaaagaacaatccaattttgcaatttcaataacatatgataaaataaaataaaacaaacacacataaagatgttttttcattggtaatataattactttcttcctatacggtcaaaccttttttcataactcaccaaaatccttcaatttccaatgaataaataaaaaaaaaatgtaccgtattttcagttcttccacttcaaattccaaagagaacctcattgtctaaaaaatctgactaaatctctttacctcattatcccaatgagttcaaattattaataattaataaacaaatgaagaaacactctgcaatgcatatctggtaatccaaaatcaaatcactagaccaaaccaaacaatgagacacatttcctgtctctagaagtaaataaataaatctactgttacattagcatatgggctatgaaacaaggtaggctgacatatactattcttaacggtaaaaaaataaaatataatattttagtataaaatgagtgggttactttggtctggttggtgtggggtggcgtgggctcagaaacaacagacacggtcagagattcccaatggtagaaatcagatatatattatgagcagccagccaaaacaatctccacacatattatttatttctcttttggtattttatttttttatttttcactattcaaataataataataaa

SEQ ID NO: 203870 - DNA, 1335 bp, Cannabis indica
tttatgactaatatttttagtcatggactttttagccacaatataagaatgatgatttataattagtcacaatttttttagttttagtcacaaattttgttgtgattaaaaatgaaattttgtgtagtgaataaatgcaataattcagcttaaacagatctacaacaacaacaacaacaaaaattaaacaggagatgagattggttataaatagaatcaaaatatttaacatggttttgaatgcatcatgaatatcgcaaatgtcctggggcttggcatccctgaaaaaaataagatcgagaaagagaatgagtaagaaagagaacgagaacatactaggactaggcttgctggttcaggggcgggggtcgggcattgtccgacattgaagaagacagtaggagaggaagagagagggactttagtgcggcccctctcacagatctcacccatgggtggagcttgtaacggattgcatcgatcgttacttactcgattcattttgaatgtaacacaatattgcaccatttgaattatgagggacttgatttcaaagttatttgcctctacaacatgtggacgaatacatgaattaatgaacccccgtgatagcggggagtagtctctcgaaggaatattagtttgagtcgtgttttcatcattggcgacgttagacacaagttattctatttttgattttgcctacaaatttttttaatttcaggatcaccaggcactagtgactccatctatcaaaaaaaagaaaaaagattaaacttgaatttaattgtacttgttattttgtttaggggcaagatttatttaagattagaatatgacttttaaaatgtttgagacggtctttggcgcctgcctcaatatactgaatattagagatcgatcacttgaagcatttaggtatcacattgattcatttctaatagtagctacctattgtgtgactgagactcttgaacacaatttggttcagataatgctttagtgattgttgtattactcacatcaaagcttggttgagttagaaaatgctaaagttgataacgtgcttcagctcgtgaaatgggtgtctagaagcaagttgcccaagttcataaaggtagtgtattttgttgctcttatggccacggtttatgaggtttgggaaagtaaataatgttgtttttttgagtatgaagtcattagaagagacatcaatattgttaataatttaaagtggatatatagttcacaaaagggttagtcaattcattccttatttaattccaaaactaaaattatagatataacttgtttttggtccttgaatattgttta

SEQ ID NO: 203871 - DNA, 1802 bp, Cannabis indica
ataataaacgtttacaaattattaagaagcatatatatacattaacattagttttttaacaatatcaattaatactaagtttttaaaactaaaaggtttatcgtagaaatttaaagtttaaatatatattctatatatagatgtaattatatatagatataaattttattttaaatatatatataataaaattaattttttatataaatatctacgtaatttttatttttaaatatatatatataataatattgtaaaaaaattaatattaaacctaaaaatattgttaaacctaaaatttccttacataatatattaatattatatatttgaaataaataaattaatatattataatttgaaaaaagtggatttttggtaatgtattttaaagaagtcaatgtatggggtaatataaaagtgtgttgtaaattagaaaaaatagaattttagtaggatagcactttaaaaaatctcaatctctctaatcatcgtgttttttactttatcgtttaaaagtaatacatcacttaaatcttatttttctattttacctcaagtttttttttatattatactatacatcaatttttaatcaaaatacatcaccaaaattatactttttcaaaatttaatatacttcaacaaaattaattcacttgtattcattattgacaaatctatgaagcagccataacgaataatgtagatacacatttaaattgcacacttacgtatgaaaagcataactatttggcaatcgtggtatctatcactttttcgaggtgacaaccttttattggttagcgatattttctaaaaattattatattaaattatatgaaactcaatacttaattacactaataatagtccatcactgatgctagataccactggtaggagtgacaattcgtgttcgcgagtcgtattcgtgtcgtgtcgaaactcatgtataacatgcatatactcgacccgaacacgacccatttaataataatgtcagaaaataaaatccgaacacgacccatttataaatcggttgacataacacggcccgtgtaactagtttataagcatattttgtttaaacatgtcaaccaaatatgcatttatgatcggttaaagtgctaaaataactttatataggtcattaacatgtcagttttgtgttagccatgtcaactcgaagactactcgtttattgaacaggttagacgagtcaacccgaactcgacccaaactcatttaaagcaaaacacaaactttcatacgaatttcaaatcgtattatcgtgtttgactcgttttgctggcacacgccattaccattggtgccctttttctatgcaagtgtatgccattcatcaattatcttatttaataaatttataattcatcgatgttttttaatgaacataattcatcaaatttaacattaaaattttcaataaatttgtaaagaaataaagaccgctcctttatttgtgtggttggtttgcttcaatgatcatagaaacaaatgggtgaccaagtcagagattggtctcttctccccgacgaaatctgggcaatcgtcggccgatacatccacaactccatcgaccttctccgattccgaagtgtctgcacttcatggcgaaatctcatccctccatcccacaattccactcctcttctccgtttcaactttcctttccctccttacccatcactcgtcgaaaccttcgtctccgaaaccacagtctaccgcatcaacctccccactctccacaacccatcaacttcttcttcttcttcttc

SEQ ID NO: 203872 - DNA, 1216 bp, Cannabis indica
cgtactcgtgtataagagtcagttattccgtgagtgtaacgacccaatggaggcttgaagcgggaacgttacacgggcctcatggttggtatgagttgacccgacatgaccaatatttaagacaacccttacctattaataaaatcttcccctaaaaaattgagaaattatgtataatttaaactttaaagactttgtatatatgttatagtgcaataaaatatttaaatcctattttttatagcttaaactattaatgaaattaaaatagattgcatgtatttatttatttaaaaaaaactataattattatgaaaaaaataatggagatgccattaaatagtataagatttttaataataatttttatttttattaaaataatacaacaatattttttttacaaaaacataataataataaaggataagtctataatatattttttattttttatacgaatagtaagtagctgtttaaattttagtattgatactctaaattatttttatttttaaaaatattataaataattataattacaatgtaccttatcactaaaaataattttaatttcaataataataataatattctttttttctttttaatgttaattattaaaaatttaaagaagaatattcgagaatgaataaattattattagtaaagaataaagataaacgcgcttggatacccttccacgaagcgagaatcggttctttctaacacgtgtcaccacctcaagctatcaaaccaccttcagccgacctgcgcgtgtcttcacgctcacactggagcgtagcctaaatcaaatactcccttaactcaataatccacgactcttcaaatctcatccgtccattacttcccaatcggacggtctacaccgttcgctcacgctacatttataattcccacgcgccactctcccaaatctcaaacacttcaattcgtcaattttcttttttttttttttaaaaaaaaaatatagaaacctagagagagaaagtagagagagaaaaagggggaagaagaaaaggcagaagcaattggcacagatttttgaacgaaagcttagtagatctctattatctcagtttgggcaagcaaaaggttagattttgttgatgtcgatttcaactttcttgtttagatttttttattttttcaacattaattgatttaggtttcttgttaattgtatttggaataa

SEQ ID NO: 203873 - DNA, 1196 bp, Cannabis indica
acgaacaacatatgtgtcaccagcagagcattgcgagcaacacgacacccatggagtcaaccctttgactcatacttgtgaatcaaccctgacaatccctcagtacagacaataaacaagtaaggagagagtggatccccttggcggattccacaagaaggggtaataggacctagctctttaccattattaacaatggtatagcaaactgactgcacacactcagctaccaaggaagtccacctattatcaaagcccatcccacgcaatactgcttctaaaaatggccattctattctttcataagctttgctcatatcgagctccagagccatggaaccttccttgctaactcttcgcaagtgtcttttgaattctatagacacttattagtcgtttggaaggtgaattttaaggtcaacgtcctgactaacatcaaacaaggaccatttgataccttaagactcagtttggctagtgagattgggactagaattagtataaataatcacaatcttatgtttaatgataatagttgactaaataaataatttttttgactgaaaataatccaactcttatagaataagcagtccaaatagaaaacgtaggattaagatggataaattttatatgatactttttttagtctaacatataaataaatgcatgtaaattatgtaagtaaatttatttaatatactaattattttttttctagaaatataataaaatgttatcatttagataatacaaaaaaataaatatgagatgatatattcattttaaagtgatgatatatatttttattatgttaattgtatgattcaattagtttaataaaataaattatagctcaaattttttaatgtttaatttgttatttcttttaaaaaatatttttatcagtaaaatataaattttatttaattaaattttttgaaattatttttttagtaaaaaaatagtcaaattcaactcataatcaaacccattattagattcagcataatactatccagtccaatataattcaatcatttctaatccaattaaaaacacgttttaacaaagaagttgcccaaatgaaaaaggtcaataaggggcaacaattaatggctctcaaggtacaattaagccagaacttttttgtgggataacctttaatgtagagggtgttataggttggacaattt

SEQ ID NO: 203874 - DNA, 1031 bp, Cannabis indica
tggaggtgccctacggagggtctatttcattatggccataaatacgaagtaaatgagggacctgcgcggttgtcacctcccttattcaacacttggtgctacctagatggaagaaacaaggggaggtgagtaacctaacaaagctacaaacacattcaagtcaacaattacccaatggtaccttccaggtaaaacacaatgtacaaggtcaatcaccaaccaagtaccgtattaagtacacttactaagacgtatagtaagtcctaagttctatagttaactataatggactcactacctagccttatacatagtttccaagagaaaccacgcataaggcaacagttgtatatgcctccaaggccatcacaggaccctagtcgaggtcaaagagggagaaaaattgattgcccacttggagccttggccttggttggctaggattttatgccttagtggttggtcaaaccccaagacccagtctagtggtcggccaggaaccctaattccaggcatagactagccagtctaggggtacagccccttggccgggcagtgcccttgatagccttctttggccagtcaaccctcaaacaaggcctccttgggcagacaggatctgcatggatcagaacttgtgtgttttcaagaactcaaacatgatcttcatgttcttcatgactcaaagagccaacgatcaaaacaaaagtcaaattcagatttttttcgtctagaaatcacacattatgtatcctaaggctatcatgcagatcaaaataccgaaatgataacaatctaatgtgagaatcaaagcattttcaaagcaaggaatagtgttcatgaatccattgcaaaatcaaccaaatcaagtgaaatatcagcaatggaaagcttatccactacaagatgttgtgaagaagaaggtgggaagctcgaattgtcgaaatggcgcaaaaattccagtaagatgacacttatgggttcggccctctggagagaaggatgagttttttctaatgcaaatttctagt

SEQ ID NO: 203875 - DNA, 891 bp, Cannabis indica
aacaaagatcttgcatcagctttcctgctgttttcatgtagtttgagataaataacacaatctgtttgatttgttttcaaatgaataaatatgattattttcaccacctttttcataataataatctaaattaacctttaggcatttggtttgggggggcttctttgttagtgacttgtctgttaagtgagtaggccaactctttcattgatgatattttccacataactgtcattaagtgtattaaagtatgtatttttaatatataaatagtatgtatgctatgagtgttatattaatttatatacattttatttttcaaataattaagatgttcttctaaatactactaaaaaaaataactagtggcagttgtgccatttattttattttaataaatattagtaaatttatattatttttaaatttattataaataaatataagaattagcaatacaattactaaaattatttttttaactaacaaaacttcattattattattattattattattattattattattatgccactacgaaaatattgtatacctaaataatttattcacacaaaatataatttaaaaaaaagaaaaaggaaagtgataggaattcaaactaaaatcaaatactatttatttaacaaaaattaacatttaaaatagtgattttgcaaaaaaaaaaaattatacaaaaaaaaatatgtgtaaataaattgtcagtagaagacaataataaaaataaatattttaaatttgaaaattaatacaaagttatcatgataattattattaattaattgatttttagacagagacagtcatatagtgcaccctattatttataaatttatttacggataaatatcattttggattttcttttgt

SEQ ID NO: 203876 - DNA, 1214 bp, Cannabis indica
acttctttttaagtatttgaattatagtcctaatcctaatcctattggttgagatctaggatgacttctatactatatgtatatagggtttatgagaatagaaatttgatgtacacaacacttttccactctctctctaactcccaacctctcaatacttctagttttctccaagaaatttcattaagaatttgaattatagcttaggactagatatgtgatatttataccatgaagtttgtttaccttataagatcattggtctaaacttttttatcatcccaggtcttgtgataagttagcttattgctgactgttttgtgggattgtaatttcccaaattggcttgaggatagtccttttgtttgtttggaataaacgtttctttttagtatttatttaaacatcgttttagatttgtagaataatatttgaatactaaacagtgccacttagatagatctttctgttttttcttgtttaaatttgaatttgaatttgaatttgaattaggatttatttcgtattaaataaatatacatttagtattttttatttaaacatcgttttagatttgtagaataatatttgaatactaaactgttccacttagaatgatctttctgtttttttttggtttaaatttgaatttgaattaggatttattttgtattaaataaatatacatttgttttttatttaaaagttatgtgaattttatttaaattactgttattttttatttgttgttttgaagcagctggatatttttagttaggcttataaatatcaccatgaattaaggaagaagtgttaattgtacaagcttttctaggcattcttttctcttggacttgcctctttcagttgacacaagtaaacttctgttatttgtatcaggtaagtctgcacctggagacgatgaagccaagtcattaggacacctacaagcagaagacgattttgaagaaaggttccatgctgatatgaaaaaggctaagcgccaaagccttggtaaaatttctgtaaaataattaagtttatctattaattataatctgtatgttatgtgattgaagctgtcatttaaaatggactttacttctttttaagtatttgaattatagtcctaatcctaatcctattggttgagatctaggatgacttctatactatatgtatatagggtttatgagaatagaaatttgatgtac

SEQ ID NO: 203877 - DNA, 1611 bp, Cannabis indica
tatatttattatatataaattttatgcgaaagatgtacataaatgacatattcgaacaaaaataaataacatagtgataaaatatatagaaatgtttattttaattaataaaaaatacaataaaatttaatatttactaattaatcaatatatttctttaataaataattattatttttttatatataattaacattaaatagatataataaaaaaatatttttattattattttttaaaataatatataagattcctgaacctaaccaaacgtaatttaattaataggaatatgattacatattacactacacagccaaacacagtttacacatttttctataatcatattcttcatcataatattccatcaaattattttgaacacctcgtactcactttaaaatgctctattttttttttaatcctttttgtattttgttaggataacttttttagcatttggtataacgtcattgaaatatttgcatatatattgtgttatatttttcaatgtaaactttttagaatttacttctcttcaatgaatagaaagacaaaaaaagacatttcgaagagtaatcagacaagttcttcccacaatcatttatcaaaatactttggtacacaaaatatcaatataaatttatacatacaaagataacaaagttgagatgaagtgacacacaaaaataaatatatatttataatgaaattgaacttcattgcaagattaattgtaacattaccatcaaataagtgtttaagcaaaatactacatcagaacgaaatacatacttgagttctttcgagcttcatgcaacaaacatttgtcccctcggctacaacaacattattcctagcttgaatgaaccataatagaagaagactgtctctcctcctactacagactctgaaaacaacatcagaaccacaattacagatataccaatggcttattcactaacctgatcggattcatcagatgtcacctcagattcttcttcttcttcttcctctgcaatcttgggggctctactggcagtaatcttcgatagtgccgcggtcttacttgccctctcaaaccgcctgtttactggaacaattgagaggtgacctttcttcttcttcttcttctgatgaagaagatgtctcttgctgcctcacttgtctcttgccccgtttcggtttagttgaacgaggaattggtgactgaatagttttatctgaaactgtgggatccaaactgaagtctacttctaacctcccaaatataagattagcttggtcttgtgccgggagttgctcatcatccacatttctatcaacttcactaagatgatcaaccattcgttttaactccttaataaggtccctatctgtggttgatacagacgtagtaacagtacctaaaatcctcctcattaacttaattgcgtcttgttcagatgagcggaaatgaagcagaacaagtattttagaaatagctgatatatatgcagaggtctttttattggggaagtttgacacctttattgctatgcgtattgcgagcccttcctcgccccactcgagtggaggttccacgctatcttcgtaaagaggagcctg

SEQ ID NO: 203878 - DNA, 507 bp, Cannabis indica
atatagaaaaattataaactaattttgttttatagtatgcatcctataatttacgatgttgaaaataaaattcaaataataaattgtatttattatttgaattttatttttcacactgtaaacgaacatttgtaatttaaaaatatcttatcttacgattttgttgcagttgattattttttaactgttaagtgtcagctcagaaacacggggtgacattattagaatgcctaataaaatatattgtcacatgtttctgagttgatacttgatggtcaaaaaggggtactgtaataaaatcttaaagataaagtatttttgtcttgggtatcaccccaaatattataattttttgaaaattgacaggaaacgttatattgtcgaaaatagaaaacgcccctactataggggcaaaacttataccctcacctaaaacactctctatatttatgcattttttggttatttgatataattttcttacatatatatttatttttattttac

SEQ ID NO: 203879 - DNA, 464 bp, Cannabis indica
catattatcaatatcttaagagagatttgcagatatccaaagtatatgaaagaaatattttactgtggttttttagtttttaattttcaaaattgtgtttttaaaaataaaaatagaaaacagttttttgtcattttaaaaatttgtggttcgtaaaattgtaaaaaaaaaatatattattaaaaaattgtttttaaaaataaaaaataaaattcttaacaaaacgaagacagagtaccacttcctgtcttgatctcgtgtgctaggttgtatataattaatttcatatatttaattagtattgatgtgttttatttcactcacaataattttaaaaagataaattttattacaattttcccttttaaattttttactatatttacttgatttgatgtttatttttttttcttttatatatgttagggacaaaaacatatctcaaaaatttcttttataatatt

SEQ ID NO: 203880 - DNA, 688 bp, Cannabis indica
gagagagagagagtgagtgagtgctgatggtaaatggaaaaaaatgttatttatattatatatatttattattatatatacatataaccttttgactcagtcaaaaccgagtcttcataatatataaatatatattagagtatcatttatgaaatgagaaataaatattcatattaattaaataatcttaaatattataattacctgagatttttcagtgatttaaacaagataagatgtggatcaaatcgcttattccaaaatcaaacataattattcatgtgatctaataaatttattaattattataattaattgaattaattaggtgtgactaatagaaagttctagattagtcaatttcaaaatatcagattttgaataaaataaatatttaatattttagaatattaaacgattaatcaagaagatgaacctaaaggaaataaaagaataaataagtaaaatatatgggaatcaaattctgtatatttagttaatgatgatgttgtggtctccaggatctggaactacactatgtggagagtctcgttcgtaggacttagcctgaatagttgaatgagaaatagcaactataaacgttatagactatcttgcacatactttagtgcaagtgagagattattgagatttgtgctctaaatgtaagtatttaatgaataatata

SEQ ID NO: 203881 - DNA, 660 bp, Cannabis indica
acgcctaataaacagttcttttaacaaacctttcattgacatctagaacttgtaaacatatagtttgaaactgaaactgaaaagagaatcagtttatcaataattatcctgctcttgctattgagaattgagttgatcggttgtaaattagagaaataaaggtgcatctctttacaactcccaattaattccactttcaatgtattgcagtctctgctgttgagcagctccaagtaatggcttcaaagagacagtacaaggaggcagctgcacaattagaggttttatttatttatgtataataatgattgtgattattcaattgaaatttttaatttgttatacatcatatattgagtcatttctcagtaggttaactgttgctataccattgatatatttcatgtatttttttggtctttatcttggtaattatagcttaaattttatctttctctattcatttgtcaagcactgatttctcaccccgcccacacacacacacacacacccaccactccaattccttaagtatctctcttgtcctgtcaaccataatctggtattgtgtgcttagataattaagctacattttacaacacaattttagcacaatttatttttttaagggtttaccctttgctgatatagatagacata

SEQ ID NO: 203882 - DNA, 1036 bp, Cannabis indica
gcattagacactacgatttaacatactaaagcatgcatcaaaaattccatagtttatatgcaattgagtttggactatgccccatatcatacctcaatcacgtcataagaattagcctaatcaacaattccatagtttatacgcaactgagctggactatgcccataatctgcaattttaatggaggttccttgaaaagatatgtgacaaatggtgtcgttaaagtcgaaacctttgaacttcatccacaaatcttaagggtgaatacaacaattcattatgtctttgaaaaaaaactatggccaccatggctatacaaacacgagtataaatgacttatgcatcatcctccggttgctcgcctgacaaagagattaatctcaaattgtattgttgagtcacatatagacctcaaaattaaattatttattattttgaaaaaaattatatttttagaaagtaagctacaagggggaattgagaggagatctctaaggaaggagcccaaatgtgtgtacaactgagaaaatgaaagaaaaaatcacatacccaaaaattcaaataagaaaaaaatcactattataaaagaatgatatatacctgaaaaagataaatacgaatgtgtttttctcttttactgttaaccttttgaacttcttatcattcttttgcttgttcatcctcttcgatttcttccttttcaaataagttccatattaagtatcagctaccttatgcattgcagaaattagaaatttgtatttatattcttttttttagtaatggacagcttgtgttcattaaaaattccaaaccaatagcttaggaaatttcttttaacagagtgtcaatcctcataatcctttacatacctggccgtacatcctcgatatcatcgagattgattagcttcccttgctgctacagatttacaagcaaattgttgcttagtctccttatgggtcaccaggtaagtaatcccaaactgtccggacatcctccatcggtcgtaattctgcattttggaaagaaaaaa

SEQ ID NO: 203883 - DNA, 890 bp, Cannabis indica
tggtggtcatacagtgagttgatgtaggttgcactgttgaaatggctgcaggcaaatcattagtaataacatgcataataggaacattgataacagtattagagttaggaatagcttgagaaaatttgactgagacatcaataagattttttgtggcaactatatttgatggactaggaggagaagtgagagccatagatcgagttgcaaattctgggacaagagcatttgggaaggtttaagttggaacaacatgaggtgtttataagagaggagggcgaatgagtggtgttgttggaggttaaacattgttgacttgaagcagggaagacaagggaggaacaccaatcagagatgaagatgaaaactcagtggaaataccctaagcaatagagttattagcatggggaaaggtgttttcatcaaatactacatctcaagagatgtaaaatcttttggatggacatttgaaccctttgtgagctatactatatccaagaaagacaggggtataaatctgtattaaagtttttgttttgtttttttgtttttgttttttttattgtatggtatgagattaggatagcaaacacatccaaagactttaagactagtgtaatctggtgtggtatggaacaaaacctcaaggggtgtagagttcttaagagtaggaataggcagttctgaaaaactcatcccaatatttgagaggaagtgaagcttgggaaggtagagttgatccattttcaactacatgcctatgcttcctttcaacaaccccatttttttcaggggtacgagggagggctaacctatggacaattccagaactctcaagtaaactaatgaaagctctatactcactccccaatcaaactgtaaagttttga

SEQ ID NO: 203884 - DNA, 1090 bp, Cannabis indica
tgaaagtaaatacacaatttaaaggccattgaaaggaaataggactgtctacttgctaccttttgtagatgacatgtttgtttgagaagacagaagtagacaaagtgaagtcaatgctaaacataaaatatcatgctgaaggtccatctaaaaagattcttgaaatggagatacttaaagatagaaaacataagagattaccggttactcaaagggattacataagaggtttagttttgacaataccaaactagttgcaactccaattgctcaacattttaaattttcaatcactcaaagcccaaagatagctaaagatatggaatatatgaagaacattccatattgtggtgtagtgggaagtatcatgcacattatgatttacaacaaaacctgatctgttccatggaatgagtttaatcagcaggtacatgagtgataattttattatatagagttatttatttggtttttaaatttaatttctgaaaaatagtgatgattcgaggttttaattctttatttttaaagttaatgtgtatctttgtagctagaattttaagtgttttagacgctaattgaaagcaaatgattattttgtgctagatttatgcgtaaaaaaaggaatcaaaagtgatccatgggaaggttataaaaggaaactaggaagccaaaaatgaaagaaaaagctgaaataattggtagatgctaaaaaaaacaggaccatgtatcattcttgaggataatttgatgacgtggaagaaaggccagcatgttttatttttttgcttgattcggcgcctatgtggcaggaagtattaattgacgcccaactggacgttttaggcagaaatgtagtccattttagtggaccaaagtgaaggaaaatagatttggactttctaattttggaaggaattctttttcttaccttagttggcatattaaagaaagtactagccaccatttgataaaaggggcgctgccattgttggagaaaagttgcagaaattatcaaaggagcatgaaaaagaagaaaacacaagaaattgaaagggaaagatgagtacaagaagattcacaacatcat

SEQ ID NO: 203885 - DNA, 1127 bp, Cannabis indica
aggctgaggtggtgggactaagtggaatgatgaagaggagatttcttattaagtaatatacccattatcacaatgacaagttatatgtatatttttttaaaattttgattggctaaaatggtagaatgggtcaatcaatctgacttctgacataataacttattgcaaaaactatcatgtcaaatcgtgttgctacattgtgagtgagtacaagacctattttatggcaacaacattgtgagttatttgctaaaaaggaaaggaaatacattagaaagaagatgaaacttgataatatatgctttgctattccaatatcttagggagagaaaggaacaagtggaaaaacaaaattgaaaaattacatgtaataatctactgccaagatcagatttgatttgagcctataaaaatacaaaaaccaacttgagaggaaatagtacaatcatatgtcacagcataaaatgaagcctcaaaaggccatgcctgcctgcagtcttacatgaaaagtgaaagagagaaaaatcgatgacttttcgaggcgttctattcggaagacagaatcaatatttactttcctgcaaaccactattcttcaagaacatttaaattgttctattttttttgttctatgttgtaagttttcacttgtagaaaatcatacacctaaagtaattgtgagaacagaagcctacttgatgtcatatagagatggtacaacccaattccttggccgcgacatcaagaaactgtgtagacctaccggttgcgagtcggctatgagcttcccatcttaggcatttttcaatatcagctagccagttaatgtcatctggattaaaatacttgttataagaggggtctcgagaagaaccgtttacttctactggtttagaattagttttgattgaaccagtttgcataatatcacgaagaactgatgtgctcaatgcacggacgtgtgcacttggatgagaaaggcaccgaatggtggctgaaagacgacactgcatgcaccaaaccacacaaatcacaaaacaaatgtttagcatttgcacgaaaaacataacttgctttcctttaggttcatcctctgtaattattgaatttaacgcttatcaaacaca

SEQ ID NO: 203886 - DNA, 1223 bp, Cannabis indica
atattctagctagtttgattattaggtaaatttaaaaagtattttacatcgttttcaaaggaggcataatattccaattcttattggcacccaatattaatgcttagtgaaagagacgagggatagcaacatataagtgatggaacatccaaattgcatagttttgaaaaatagtcttattatagtaaacaataataaatcaacaaagaataaactaacatatgtttcaacataatgcttatatataacaattcaatgccattacatatgaaaaaaaattgttgaataatgattgtttttaaggcatttttttatgtgcaactaaatttattatattacaatgtaaaaaaattcttatttacataatttaatacaatgaataaatgaataaatacataataatacacctaattaataaatattgaaaaaaaagttaattaaattaaagtaaatgcgaggagagattatatatgaaaataaataaaataagaagttaattaaaagacataaaataaaaaattaattaaattacaaaaataagagaagagagattaacaaaacaaactcatataggttcccaagtcatcttgattagcaagatgattatatagatatatagataggtaggatacataattagcgtgttgtgtctattaatataattaagagaaatgttaaagggcatcagtagtgcctagcaccctcttatgtgtcaatatcgctattggtccaattaagtatcgggtcccatataatttaatataataacttttaggtagtatcgctagccaatcgcaacgcgacatgtcgagaaggtgctaggcaccactggtgcctaatagcaatgctctataattaattatgtgttttacaaaagttataaattaaaccctctgttttgttaaatgacaaaatagatcctgtatttttaaaatagtacaaataggatcatgtgctcaatttttgacaatttttttaatataactaacttgaagataattcttaacacgaacagatgtagaaaatttaaccattttgtcataacacctctaggtttgattattattaagtttcattttgacaaaaaattagttttgtaccgttttgaaaaatactaggtctattttgtcatttaacaaacaaaaaattttgtaaactttacaaaatagaaaggttcaaaaatgatatttaccctataatatattcaaaaagaaaaaaacata

SEQ ID NO: 203887 - DNA, 842 bp, Cannabis indica
gctagataatgtctcatttaaagaagtacaatcatgtcagttcttggcctaaagtcatccattatgatgcgtgatcattcagagattaccattacagttttcttatagattctcaaacaatgtaaaatgaagaaaatttgaaaattttccacttagaaataaactaaaacagcacacaaatgataaaactaccgaaatataactctctcttatatagtaatgtaagcaaaagcactgagagtacttgttatgagagttaaggtaaataaaatcaccttcaaatgctgataagtctcagagcccatttgcaatgcctcttcaaacctgattgctccgatggggagaatcatgatttcctacagtgcagtttaattaaaatgtaagtctcatagtaaaatagaatttaacattacaaaataaatagagaaaactgctgcagcaagaataaaacgtactcattgtcatagaaggatgaaaaaaaaaaatctgaaactcatgcagatacaaattaagacaaagactataattcagaggcagcaaagcattcacaatctttgaattcataaaagttgaaaataaaaatcacaagttttgtagagaacacactaacttttaaggcttaaaacagcatacctgaattgctaaactgttcccagcatgtttccctccactaataacagtgaaagcagggacaggaagagtcaaattggtttttccagaaagatcagcaatgtgtttgtagagtggaacctgaaatttgtcatttcttagaatgtcttatgcaaagtatacagcttgtagacaacaaactctgatatgattttgcagggagagagagagag

SEQ ID NO: 203888 - DNA, 956 bp, Cannabis indica
aaatggtatctatgttcttaatgccaaggtagtgttgggaacagcaaatgttgctgtgaatgaaaaaggcggtgataaaaccagaatgtggcatttgagattaagccatgttagtgaaagaggtctaattgagctagagaagcagggcatgttaagaaacaagttgaatggtaagaatgtgtactaggcaagagttgtagggtaaaattcccttctgttatacatgtcaccaaggagccactcaattatgtgcattcagatttatagggtctctcaaggacacaaactcttggaggtgctaactacttcatgagtattattgatgatttagcaagaaagtttggattttcatgttgagaaaacaagaatcaggctctagaaaccttcaacaattggaggaagctcatggaaaacaaacaggaagaaagctaaaggtgttgagaaccgataatagactagaatattgttcagatgaattcaaggaatattgtgccaaaactgggatcaaaaggcacaaatcagttttcaagacacttcaacagaatggattggatgagagaatgaacagaaccattcttgaaaggattaggtgtatgcggaagggttaggatagatatgtatatatgtatctgtgtcccatgatcctaattgaatcacctaatctaataatcccaagccaaactgaaaaattgttctagctggcaactagctaagatgatactgaaatagtaatttgtaaccatttaccacatcccttgtattatccaatatcttatataaatatcataacttttctatattttaaaaaaataccactatataactatacatagaaaatactaaattccaaagcgtatgcaatcaacttatatattcaaacttaaataacacaaaaataatataacacataatataatcaaaatgagattgtggcattacattattattattattat

SEQ ID NO: 203889 - DNA, 770 bp, Cannabis indica
aaaaaaaaaaaaaaagtagatatttaagtatacaaaattaaaaacatttgatacttaaacgtaaatttccctatatataatgtgtgagagggagagagttacaataatattgcattaattctttttttttcttttcatttattgtaaaaattacaatgatgaaagtatactaagatgtattgccaaaagataagaggcaaaagatcatattttcaagaggttgtatgcaggcaaatctttcacactagcgacatcttcaagggcaagctcacgctctaactggtttctggtggacttgagcacctcctgtaaaatataaataaaaacagagatatataaggaaagattttaattcccattcccgcttcattcccactaattcctcattggggacggtacagaaaattccttaatgggacaggaacaaggcggggaatcttctattataaaaataaaatttattttaaaactttaaaagtataaaattattaaattacataaaagataaaatattacacatttactattcaatataataattattataaaaaatataatttcaaaaattgtaaaaataatattaatacactaaaaaaatataaatgcatatataaaatataaaatattaacaaaaaataattaataaattaaacgggtctccatcgggacggggagtgtcgtccccatcccgtttaacattcggggacaaaaattcatcctcgtccctaaacaggcaactctaacattcatacttgttttttttttttttt

SEQ ID NO: 203890 - DNA, 1431 bp, Cannabis indica
tggatggtttactctgatcttttgtataacgaacttgatgatgaaataagaagctaggtggattatggagtattggtaactagacagcatttgttaagaagaagacatgatgatataatgaattcgttgaatgacatggtaaattttgattacgactggtactgagatccatcactttagggttggagtcaccaataccctccttattgcttaaattcaccccaaccaattgagaaagaggagtgtaagccatcacttgcagaaaaaattaattgcttggcgaacatagtaagatctctatgtaataattttgtaatgcctatagattagacacataatcgtgattttaatttattgtgcacatctttacaaatcaaagggtttattgaaaagtgtgaataaataaaattttaataattaaactttaattttaactacataaatactttacataatttgagattccattttaaagttacaaccattttacaaaatacttaactacaaaagttatcccctagcgactaataaaataaagcctactgtgtcccaaaaatcgaacactccaagtctaactgtcccgatatgtacaatcttcatttactcaacctcactattattcagcattagccatgcctttatctatacatataaacaatatatgtgagtcgacagccgattcagtaagaaaagcataatcataacataaacataaattggtttataacttggcgcccatacacccaatcacaactctatatcgcgcccaacgcatactaagtctagaacgtttgtacggtaataccgattaaccataatatcagcctatactcggtactctagtcgtatcgatgtgataacgtcaattcgtactttgcaaaacatatatctgttggtattcaatttgactcgacgtatactaataccgctcttactgatatgttatataacacgcacgttaaaaatgtaatcacatatacaattatcatactaattttaccttgattttgaatttaggtgtggtcaacctgagtggaactgctactagacgatttactagtccgtaagtcacaacatatgtaaaattggcaagtgatatgataaatacttttcggggacttaaactcaaaactgaaagttttcctatcgataaatagtgtggcaataccctaagtatcaagaaaatactaaaaaatgagattttggaaaaaatataccccaaaaacggtaggttgtttcttaaaaacggcaggtcttttttcaaggttctgcttgctaaaaatgattgactaatttttgaaaaaacaccatgctatttttaaatatatcgttatattccatttttcgtagaagttttagcagtattaatgagacaacaaattcatcttataatgttttaagaacaagactaatctatatctatatatatat

SEQ ID NO: 203891 - DNA, 1120 bp, Cannabis indica
ccatgattccatccaatccaacaatatggcctaagaaggatactggtgataaccaaaactcgcatttcttgaatttagcatacaacttaatgatctctaagtcgtttcaaaaccatccagagatgttgctcatgctctgcttctatctgagagtatacaaggatgtcatcgataaacactatgacataattatcaagaaaatccttgaacaccttgtccacaagatccacaaaatttgtcggagcatttataaacccaaatgatatcaccaaaaactcatagtagccatatctagtccgaaaggcagtctttgaaatgtcgtcctccctaattcttaactgaaagttctccaaatctgactctaatacctcaaatatgtttgtggtatgtctaattcatgtcccaatgcaaagtttgacctatttgcactaagacggtctcaaaaactgaaaccctagttgaggatgtcaacctgggcggtgggtgaaacccacgttgccaaggttgactttcaaggtgttaatttgtgtattttcagctcccagggcatggatttggttgctacatgtcttcatggtacagaatactgaaagatggtgagttggaaaaaaacttggtggaatcaaacaccatttccgaagttcccaaagtcaacttgggtgcagggctagggacccctcccaggtcgacttgctatgattcgagactactcaactttgagatattttctttcttgtcacatgtcaaacattaatgtccacgccaccaggctactttcggtgtaaacaaatacacttttaatttcaaaaccctttgattagaggtttagcaccataattacaaaacatgtaacgtgtcttagatattagggtattacatctatgttgatgacattataattctaggtgtattatgtatgtcatatataaaattttatgttttttatattttatgcccaataacagtaaaatgtgacgctttggctattagagtcacttagatacaatagagtatcttagaattagcaagataatatagttaagacatttagaatatcagaatttaattggggctaggatcttggaccactttacccttaagtggttaggttacttcttag

SEQ ID NO: 203892 - DNA, 1347 bp, Cannabis indica
acccaagccgaacaaaaaaaggcgagtttgtattgatttccttgacctcaacaaagcctgccccaaagactattttccacttccaagaatcgatcaacttatggacacaacggtagggcacgaaatattgagcttcatggatgcctattcagggtacaaccaattcaaaatgcatccaccagaccaagaatatacaaggttctgaacagatatgggtcgatattgctctaaagtcatgccatttggtctaaaaaatgctggagtgacataccaaagattggtgaacaaaatgtttaaagaccagatcagacgaaacatggaactgtacgtggatgacatgctcgtcaaatccaggtaggctggggggcacttagatgacctggacgaatgcttcaaagtcctcaagaaatataacatgaaactcaatcccttaaagtgctcctttggagtcagctcgggtaagtttctaggcttcattgtcaatgcccaaggaattgaagccaatctagagaagattcaagccctcctagttatgaaatcgccaacaagaaccaaggaagttcaaagtttgactagtcggatcgccgcagtcagtagatttatttcaaaatcaacagataagtttgttctgttcttcaacatcctgcgaggaaataagcaattttagtggatggaggaatgtgaaaatcttttcaagagctaaaaatgcaactcacaaaacctcctatactctcgaaacctctggacggagaagaactttggatatatttagctgtcatggagcatgctgtaagtgtcgtactgatcagagaggaaaacaacattcaacatccggtctattacttagtaaaagactcattgaggctgaaggccaacacccactaatagagaaactcacttactcaagaaagctaaggccaatacccactaatagagaaactcagtacgaaattacctccaaccccaaacagcaattaaaggccaagccttagaagattttgtagtagaatgcacatgcaaggaagaaagtgtatcagaaaacaaccccaagctagaacaaatatctcagcctagtaacaatgaagacaagccgacttggaaactacatgtggataggtcagctacagatcaactatttggtgtaggaatttcccttgttacacctgaggggcagcacctgcacactgcggtcaagtttggatttaaagcatccaataatgaggccgaatatgaagctttgatcgccggtctaaaactagtctgggaaatgaaggttgaacaaattgaaatctgtagtgattcgcagctggtggtgaaccatgtatttggaaaatacgaggctcgggg

SEQ ID NO: 203893 - DNA, 963 bp, Cannabis indica
cacactcggttgaaaatcatcatggcagcccaaaaattaaaataatggaaaggtttcaagcctatcaactctgttacagtagcagaaaccacacaagaacaacgattcaatattatttcccaagtgaaacaagatgaagtattagggaattcatcatgacaatcttcattcacaaaattatgatctatcttggaatagattcgcttgttaccatcttgattgttggtccaagtaaagaaagaatcattactttggagcttatcaacatgagcatgattcaaccaaagattggagtcttccaatttcattttgagtgaaacgggttcccactatttatcactcaacattgaaaatcgagttaaaatctccaagaataacccaaggcttaacaagaaatttgagttgcctacaaattatgccaaagaccttttctatcatccattgtgttatagccatacacaaaagtaacacaaaaggctttggattggccagccattttaaccacacaatgaacatgttgagcagattcaactattacaatagccctcactaaatcgcttctccaaataatcaataaacgaccctcaatagtggcactagtgaagcaatccagctgctaaatttatcagccatagtctcctggactttatccctttcagtttagtttctaataaattgcagacacctaatttattcctattgcaaaactctataatgtagtcttgcttctctttattgttcattcctcgcacattccagctaccaatgttgtaactaatcatgattaattgcagtttagatcagggccctcttcctctccttccccttctatttgctcctcccaatctgttgcttcttgtaaaccactaaaggtgttactcaatctttgttcaatatcaggatctatattcataagatacgctggttttggctctttcatagatttgtttgctgatttcctaa

SEQ ID NO: 203894 - DNA, 1095 bp, Cannabis indica
atttaaaacttaatgatcaagtacttataaaattttaacaaaatataatttaagtattattatttttaaaaattaaacttaattatttatatgtaattaaataataaaatatttacttcacaaattattttttaatttgtcaaaaatatgatggagtgcatctattcacttcattttgaagagagcatcacaactattactttataagatatgaccaatatttatatatataatttagaaaaataaaaatgtatcgaaacattttcttcgtacttttattattattattatttttatttttatttattttttttaattatttattatttttttatatttttaataattaaaaaaataaaattcaacaaaggtacatttttgaaaggtatatattgatatatttttatttgtttagtcatctaagaaatttttttatggttatgtatactatatttatttaaaatattttttaaaactttgaaaattttaaaaattaacctgtttaaaataaagttcaaataatttattgtacgcatgttaaattgtttaagagtgtcttttatattgtacataatttcaaatttcttaaaataaatacctaatattttcatatgtttttatggattaaaaaataataccaaatattacttttttattacttctgtcactattagcagttcttttaagtgcaagctaaattactttaaaaataaaaacataacctatttataccataaatatttctaacatacctaaaaaaaattaaattaaaaaattttctttattgaaataaataaaatattaaatatagatgggtgtattgtaaaacaacctaaaatttaattagtctcatgtcaaacgaacaatattattattttgtgtcttgttttttttttttttgtagaggaatattttgtgtcttgttttaacatataaaaaattgtaaacctaaatttgaaaaacaccttaacagtacacactctcctctcctctcttctcctgtcatctccagactatgctaatcatcaccatccaatataaatccgtatttaaggtttgttattctttatctttctatctcatcattttttattg

SEQ ID NO: 203895 - DNA, 834 bp, Cannabis indica
gttatgtaaggatcattgtatctatggtatatatgtgttctatgaagtttggaatgattcagataggttttgggagtgttttgatgagtgcaaaatttaagattttcgtgtttcaccgtttttggaaattcttagaagatcaaaaactgtatttttgtcataacttttcactcgagtgtttgttttggacattctacatactgttttgaagcttgcgacgagatctaccatatggtatatgttttagagccaaaatataagttttattttagtgtatttgtactatgggatttagtaggaaaccctagggtttcctttgcaactattaagcattattttgggataaacacttattggtttaccgttgttgtgacgtagggccaagatcatcagaggtatttctccacttaggttggccaacatacatgaatctggattaaaggtaagaaaagtatattgtaaagcataacatgttatatcacaatacaattaatattattgtgaattgatcgatattgagattcagatatggttattattgtcatataatgaaaagatggcttggttatgtaatgataatgtgatgataccatggatgtgatatacggacccacctgattaggtgatacaatatacctggcggcgtaccttagtaggtacgggcgatagtgatatgagaatgccaggctatagcatagattgaaaccgttgttgggtttcttcctagtggcgtaccatattaggtacaggcagcaatgacatgtgagtaccaggctatggtactgttgtgaccaaaagtggtacctactaaggagattgtgaagaacaaggtcg

SEQ ID NO: 203896 - DNA, 1169 bp, Cannabis indica
tcctaagcctataaatactaccattgcttatcattttgagacacaacgaccagattaattgatatatatatatatagagagagagagagggagaagattgagaggtagagagaaaggtacccataaaatagagaaattgggttagggttttgtttaaaaaatcttctgtagatgaagaagattcttgagtaaaagtgtgagagttgaaacacttttagagaattcattacagaatcgatctcgactgtattgtgcatgttcttactcaatcaataaagagaatttggtggtgtggtgaactggagtagagccacagatcatatcgatctatcggacttgaactagtatatcttggtgttaatattgttttattactttaattgttctttgccttatttttaaattagaaaagctttcactaacaactcttttaattccataaagctacattcttggcacccaaacatcttattgtttttcttcttaccagttttcttcaatacattctttccttttactcttcttctaccgaacatacccttaaggtctctattctctgtagcactgatcaacttagactctcgtagatattttagtccttttgtattttaaaaatcccactctgtacatttcttccaaagaatcttctaattgctcatttcttctacattattattaattttgttagacaaaaataacactaaaataattgaatgctgtaacctatagactaaaacaagtatatattttcactcataaaaaacaaaaaaaaaggttattaaaatgacctaaagatctagtgtatagggatagggtggttgaagggtgcgagaataacgttttgaattgataaatctaatgtgcataaaaaggcactagtggtgtcatatcactattgatataattaagaatatagtgtgagacaatttaaattaataacaaatatgaaatatcactaatcatttgcaagataccatctgaaagttgtgcaaaatatatagcaatgctcatctattagttatagatagtttatagatttttaaatatggctactttatagctcaatatatagttcccagttgccctaaccaaaacgttattaacaaccattttttaaagaacactcttcatttacttatttgaaagggaaataaaactttttttttttt

SEQ ID NO: 203897 - DNA, 585 bp, Cannabis indica
atatatatatataatatatcattctattctcattaaacggtgatttttctttctttaaaatcttcccattggattgatattatttacatataaacattacgtatatatatatatatacacatatagcatgcttcatctattaactttattatctattttttcttaccatgggtgttttctcttttgaccaaacttttactatataaccttattaagagttgaaaatatatataacttgatatatagccatatatatattatacatcaagctctaagaaataagtcttatcattaacgtgtaccactcgaaatagaaatagatatataatcaatataaatgcatgtgagtactcaaaaagtttgtatggtgcttatatattactacattaacatatataaatatacatggtcacaataataccaacttatatataaggttgttatatataatataaatgtatctcctaaagtgggtactatcaataatcatatatcatcgctggttattaaagtagcaacattacatattagatttggtttcactatccaaatatatagagcttaattatcttattagggaagaaa

SEQ ID NO: 203898 - DNA, 789 bp, Cannabis indica
aataagttaattaggatttttatatataatcccatatctagattttaggtatcaattttttttttttcattattgaaaatattaaaattgtaattaattgggtgggttattggataattttgtagtataatttgttttggtataattttttttatctattttggtattttaagagatttatttagttttttttatgattgtgtatgttatatttatttagagaatctgtagtttttcggaaaattttaagattttatttagaaattaaattttaatggggaaaagaaaaagataaaaaaaaaatcgtcggaaaataaaaaaaaaaaaatcaatttttcatcttccatgtgaaaattataatttttaggaaaattttaaggttatatttggaaattagattttaatcgggaaagaaaaagataaaaaaaattgtaggaaataaaaataaaaaatcagtttttcatgttccatatgaaaattattgtgtgtattataaatgtttagaaaatctgtaacttttagaaaattttaaagtaatatttgtaaattagattctataatggggaaagaaaatgaataaaaaaaaaattaataaaaaaaaatcagctttacatgtttcagtaagaaaattatattgaatcaattttctatacaatttattacatgctaattattttgaaattgattttttttttatatttttcctattttttctttttttgtcaaaacttaatttttaaatatagcctaaataatttacggtgtaaaaaataaaataattatttttct

SEQ ID NO: 203899 - DNA, 836 bp, Cannabis indica
atggttctttaccttcctttgtagcctgaattctttgtacttagttgttatttaataaaggtttaggttttctcaaaaaaaaaaaaaaattagttgacatattatattttgtttaagttatttgttaattctttttcgttaacaaattataaaataaactataaaattacttttaatttcaaacattttacgttattaaaattggtatattagatttttttttatgtcaaagtttgattgcttattttttaaaaaaagtgaatagaaaagaaattaaaatgttatataccctgaagtactttttcaggtgtatttagaatactatatgaataacaaaatatattttactaacatattaaaattaattagcatatttactcttgttgattttaaaatttgattaattaaataggaaaagaaaaaaaaaaactaacaaagttattgttatttcggtcatctttattagtcttggcgaaaaaatatattttttgcatatcaaaataattatctttaaaagtagattacaattagtataatttttgaactcaaataattattaatgaaatcagaaaaactttataaagtttttaaaaaataaaataaaattaaaattaagaaaatgagagagacatgtaaatgttattttattgtgaaaaaataaaatgtaaataaatagaaaagcaagtcaaatagtgttaataaacaattgagtaagagggtttaaaaaaaaaatagaagaagaagagagtcagtgactctcagtggttagaaaataaataatttaaaaaatgtgtatactgagctaattttctctaaaattaatatgatattttact

SEQ ID NO: 203900 - DNA, 2622 bp, Cannabis indica
ttcatcttttctggtccaactggggttggaaaatctgagcttgcaaaagcattggctacttactactttggttcagaggaggccatgattaggcttgatatgagtgaattcatggaaagacatactgtttccaagctaatcggttctccccctggttatgttggttacactgagggtggtcagctgactgaggcagttcgacgccgtccttataccgttgtactttttgatgagattgaaaaggctcatcctgatgtcttcaacatgatgcttcaaattcttgaagatggaagattgaccgatagcaagggaagaacggtagacttcaagaatacacttttgataatgacatcaaatgttggaagcagtgtaattgagaaaggaggccgcaggatcggatttgacctcgattacgatgagaaggatagcagttacaaccgaattaagagcttagtgacagaggaactcaagcaatatttcaagcccgagttcttgaataggttggacgaaatgatcgtcttccgacagctcaccaagctggaggttaaggatatagcagatataatgttgaaggaggtgttcgaaaggctgaagaccaaagaaattgaacttcaagtgacagaaaggttcagggatagagtggtggacgaaggttacaacccgagctatggtgctcggcctttaagaagagccataatgagacttttggaggacagcatggccgagaagatgctttcccgggaaatcaaggagggtgactcagttattgtggatgttgatgctgacggtaatgtcactgtgctgaacggcagcagtggctcgcctgaatcgctaccagaggcaatccctgtgtagaaagaaaatcatctcagcctcttgcattgagttaacctttttatcagtatctcgtttgatttgtttttctatgttggttggaactcttgccatagatttagttcttctaccatggctctcatttgcttcaacttctactttcacgaaagactacagagttaaaaaagaaaagaaaaaaagaagaaaaaatagagaaagaaagaaagcttatttaaaagttcaaatgtgagtacaaacaagagctctgaactccgtccacttagaagacgactgttctggcaggctgtgttgggcctcgttctttgttctttcttcttaagtcttctttgatttttaatttaggtctttatatgtaaacatattaatttttaattcaactattaaaaatttccaaatgataaatgtattataaaatcagttttattaagctcaactttatgtatttacctaaaaaaattctaatttgataagttttttccttttgttttgacaatgaacaattttatgaaaaaaaggtaaatatttgtggtatacatatactaagattgttatggtattgtctttatttgttttagtgaatatttttgttaaaaataaaatttatttttaccatgcatatataaaaaaatatagtgacgcctgaaataaaatacttaaatattatttttcacgtgtgagctatttaaaatttggaatgaaattcatttggatattgaaagagaagatgtatcataataacttttttggaatgtagtatcaaattttgtaatatgtaatatatatatgtctcttatttagtttgggaaacacttgttgcttaatgcttagaagttagaatccaacaaaatttacacattatttttaaatgttaatatttattttagaacaaatttatctaatttatatttactttagaataaatttatctaatttttctttcaagtttgagaaagttttaatttaacttttaagtctaccttttgaagtttgtttggggtaaggaccaccttagacttgggcttagtgtgtcaataaccagagcctgtggtaaggtaacgactaatgagacagtgcatgaaaaataattttttttaagccaaacactttataatttttttatttgacgtggtgatcaaaatcacacatgattaacaaagcagcaattcacaatcggcggcgacacctcctcaaaccaggatagctcaccgtctaacaaaaaggcttgttttgccaaaccatgtgttgcagaattcgcatcccgagccacatgtgacaaaactgttcccgaaagtttagacaataaagctatgacatcctcaagttgcacatccagctcattaaagaagatctttcctttgttaatagctgtgactagagacaacgaattaaaataaacctctttaattgggatttcacatgaaaaagcccaattaagtccaaccaaaacacaataaaacttgaaaacaccacaataacaagatataagtagaaactatagacagaacacaacaatgaaaaacgaaacccaaattaaagatgaaaccaaaaaaaacaaagaaaagatagaaaaaacaaagaaaaaactagccgtggctaatgaaagaaaccataaacactcaatacaaaatatttttctcaaaaggagaacagtataaggcttgacacatcaaagcctaatacaaatgcgctcaaaactatattatcaatggctaattaatctttctaaaaacgcctatccacattatataaaacaacaccaaatactac

SEQ ID NO: 203901 - DNA, 751 bp, Cannabis indica
aataacttcttttcacctgaagtaaaacatgccaatttttttagtattagcacgaccttaaatttataacaagttttttttccttctaaaaaaattaccaacgaattatttaattttttaattaatttttgacaatttaacctcttaattttgttcgtagatttaaaatatattcttaatcatcaattacacggtattcttcttaaaaaatacattaatttaattgttgatatttttacatctctctttgcaagtataatactaaactgtcttaaaatattaccataattttttttgaagaaaataattataataataataataacaaacaaaaaatccaagattattttgcacgttccttcctcttatacattagttgaaattttcagtcaaacatttgattaaaaagggaaagagatgtccatattattccatttatatatatatatatatatatatgcttttaagctaaaagcttaaaagaattaaaatactgaacacacaaatgacagatccataccttaaaagacaaaaagtgtaaaggatacctttgttcccttttccaatgaacaaccaagtttatgcatagttagctggaaaagacaatgcaataaaatgaatagaaaatatatttgtataaatgcatacatacacacacaaaagaaaatgaaatccaacaattttttcacttaataaccttccaactaccaaacaaaatcttcagaaatataggaagaattctattttgaaa

SEQ ID NO: 203902 - DNA, 2322 bp, Cannabis indica
atttcttcaaaaataatgagttttaatttcaagttattcgatctttattgttggtcttacaagattattatttttaaagggatctcgtggcacgtgacatccccctaaagaaatgtcatccgttagacataacatcgtaagatctcgaaagataagtatattcatggattcaatttctagtagattcatcccgaaagatgactactttaaacttgatttataagtataaaataatggtagaaactcataaaataagaatgaccttgacactcgcctaaacggaacaacatcgaattcatatatttgatctaataaaaggtttctaaaatagtgttcattttagatgagttgactactatacattcaactgatgatgtctttgactcttgcctaaatgggacactgtatatcacctagttggaaaattttagaaaatatttgaggtatgtttgttttgtatttttccatatcttcattacttgctaatatttacaaatttccaaaaattgtgtatgaatttatattgaacttgcattgttttctgttattcattatatagtatcaattttgaactccattgttgatctaacttagttgattatttttaatgggacctcgttacgcttgacgtccccctaaagaatggtcattcgttagacaatctaatagtattagatcttgacagataaggatttgtgaatataaaatctaaatcatcctaacgatgacaagttagactattgtttacaatattaaaataatggagaactgataaaataagaataacttgactctcgcctaaatgggacatcgttggattcttattttaatcgaaattgctctttagttttcctttagtattttcgttaagaaatttcgtaagatagtatatcattggacaataaagtttataaaacgtttactataatgtcactctattttctttaatgcaaataagtggcacagatgatcatattccagatattctattctataacaatcctccatcttagaaaatctcatacttatatatgctttctaaagataacttaaacttataattgaattagtattttagtggtggtccaagttagaataattactcattaaatatttggtataaatttatgtctttgactttaaattttagatttcaaatagaaatttaattttagtttctagatacattgaacaatatggtataatcttcacaagttgttaatatctattttcaatcaagggatcaaaactgtatgttaaatgtagggattatcatgaattttatattctgtgaccagaatccacttaaactgttctaagaactctttgttgtaactaaacctaagaatcatcaaaagaccacaaccacaatcatacatatatggcatttacatcttgttcatagttatttttaacaagattattctctacaaagagaaaacataccaatatccacttggaagtgtgtccatatgtattcgaacatatggatgcacattcaggggtggatatgagttattattaaattcttaaatgatcactctagatatttacattatgcaaagaattttgaaatgtttgagaaatttcatgaatttctagcaatgaatagaattaggatgtggatgtaatataacgaaatagagccactttgaggtttcctatgaaatgatgcatggaacggagccacgaagaaattctgagagttacaaaggaaacttcaagctcatatgggtcatgggtcttcttacaaccacaactcatgtcgtatttgcaagtcttgctaatcaattctttctttctctgtattctttgatgtcccatcaatacttagaagagtacctagtaaattatcactcacatttttctcgatgtgcattacatcgagattatgtcctttgatcattcatttcgagaaaacgtctatgaccaatatatctaattttattgtttaggacaatagaaggagtgtattcattgcaagtggggcaccccatgtaccctttcgtgctccaactagacattagagcataagtaaagaaatcatttattgtccacaacacaaccgcatgcatgaaaaatataattccattgtatgcatctggggtttgaacatctttctcccataactgattcaagtatatgaaaattcttatttaaacaccacatgcaagggcattcagataatccaatatgatttatgccgttcctaacaactgtaacaaactcgttagcttcactttgaaactcaactaagtgtcggttcgtagtcatctaacttctatcagtcacatcttcttctataaagtaattaacaaaaaa

SEQ ID NO: 203903 - DNA, 1378 bp, Cannabis indica
tcaaaaaggaaagaagatagtataaattaaaaataggaattttttattcttacactttaaaagtatttttttatatatatatatatagttttatggaaattcacataacaacctacatagcaatcaacagagaaacttaaatcgtaactaaaatttatattgcaacccacataaaaaatactgagcaacctaaactgtaaaatttaaaaaaaaaaattaaaaactagtatatagaataatttcgcttaaaaaatatgtgttgtatacaatagtaaaaaataataaaatagagaatacctttataattttatttttattacaaattacaaatagaattctgcatattcaatccattcatatattttctatcctatcttgtttccttctataggtagtatataggattactcaatattttttgtttttctcgaaaagataaaataaggtcatgagactttgaaagtatattaaaataataaaaattgggatagagaatttggatccacaatttctagaccacaaaatttaataattagctagattatattcgaggatataccataaaaaattgaaaatgttattcaccacatatatcattagttaaaaaataaaacaaaagaaaattacatttctttgtagtttttgtcaaaatttaaataaattaaaataaaaaatttcttacatacttggagggttgttatcatgatcattgtcatcgccagaatgataatttcctgtgtttcataacaagtcttgtgttagtttataatttagtaaaacaaaaataattgtaaaaataaataaaactacataattaagcaagatacatgaaaatcattaaaaaaaatcaaagcaatttaattaaatatctatattattattacttgatacttttgtagagaagatgattttttccacagtggcatgaacaacaacttttaagttcttcaaatttcctttattaagaagctccacagcaccatgtcttctcccaacttcatcaaaagttgagccagaaattttagtaccaagtttgtgattcaaatcgaattcattatcaggacccacaccaatttctaacaaagcatctctaaaggaagattgccaaaggggcaacttaggccgaaacactatactctcttcaacccactcatacgccttctctactctatccatctcccattttactccagatttcgagtagaaaccctcgtctcctcgcgaaaagaagccagcattaatcatgctcgtccctcccaaaaccctcctctcgcattctcaaccccgtcctcagaagtgaacctctgggccgggtaacctatttctcttctcttgcatgagattggcaaaaaatccgtgtaggtgcaagacgttcggg

SEQ ID NO: 203904 - DNA, 859 bp, Cannabis indica
acataatttgatacatgttaaagattaagagaaaaaaattctaattaattagcctttatttaattaattaattatatcatcaactagaagctagctataggaaaagtacaaaaccctaccctaaatttctaaaagatttacaactagacatgccactgcatagtatcgatcatcaattctaatttataattaattagcataatctagtcatatatatatcaaccctagataatggcctaattaattagtataattataaatctatgtcgaagaatttacatacttattttgagccttgcccagaagttgtctacactaatcccatcatgtattagatttttttttgaaaaaaaaaagtgtgtacattttggccatataataattgaatgaagaagctcttaaaatatttatattacaaagaaaagaaataataaaacataatattttttttattattatgtgtttggtgaaatggtgatgagggagaggctgacaattgagctgtgttttgtatgggttcactgtaaggatcttaatttgtgaaggtgtatggttcagtgcaccacccaaaaatattgtacagcaataattaaagtgacctatcatgaagttgcttatttagactagttaacaatggtttatcttgtttgaaatttaatacttatagtgggaatttgatatgtattttacatgcaataatatgggtgatatatgtcaattaccttccttatgaggatacatgatatacagtacatttatatatatatatatatatatatgtatgattgatcagacaaagtgggatttggacccatgattagattagtacttaccaaaatattactgggaaagtttatag

SEQ ID NO: 203905 - DNA, 473 bp, Cannabis indica
gataattatgatgaacttaatactatagaagctggttgggtagtaagtagttcttgtacattaattaatcacattatctttatgtacagtttaaataaatttgggaattctttttgcagattggtactggtgatccaagaacacgattctttatttattggacagtaagttatctagctatacatacgatctgttacctgtatataaatttatgcatcatgtatattatatatattgaacaattaattaataacccacttgagctagcatataaagggttgatgatttgtctttaattatcagagtgatggctatagaagcacaggttgtaaaaattttgattgtcccggttttgtacaagtaagcagaatggctgctataggttctgtattggagcctatttccaattatgacgggaagcaaatctttataaatgttacaatagaccaggtatttacatatatatatatata

SEQ ID NO: 203906 - DNA, 1164 bp, Cannabis indica
taatagttatccaaacgttaaaaatgagttaaaacttctacttatcttatacttctagctaataaaaaaaaaaaataaaaacttggccaaacgaggcctttattgtacaatatattccaaatggttgtgttcttgagccttttatttaaactgtatcgttttaaagactttgtggaactacttgtcgttcctttcccttttgtattgtcgttgggcttatggtatctataccatatttattactcaatgaaagggttagtggatattatacagaagaggttatatcagtttgtctctattcttcgagctctcagcagctcccttcgatccaaaccagtcctacatcatttggtatgagacgccttagttttcttggacaccatggcgtgacttctcactaaagctgaaggataaggtcttatgcttgccttgcttttggagtggaaacataggtgaggtggccctaacatgagatctgctaagtgaagtctctctctaaggttatggagtgcttccctcaataaaaggtaagtaggctcgagttgttttaattgacttgtagggttcttgtctcgtgacatgccccttccatgctgaccttttggaggtgatattagtggatgacatgaagtcatattcaccaacatacgcggttgagacccttttctcctgtcagtggcttttgtattgaaagtgtgaggcttgaattttgcctttgagcatgctactcaatattttttgcatgtcaaccatagtaatttctagcatttggttcttccagcagaggtcatttatttcctcttcatagtggcgagttagaggcttgagctcaacgagtacacccgcctctcctttctgggtccacatcttgaaatgtcggggtcttgtggcagagatgatagagagtgttgtatcgaagatggccttcttgatggttgagtaattctatcgacgaggttaaccatcaatgtcattatcaagtcatgttgtgctaggagctcttcttgagcaatagcttagtggttcccactttggttattctctctttggtcttctccgacaacaggaggcagaggttctcttatgatggcgaagaactggtcctcatatgagtaaactatgtcttggagatgttgtgaatgtctatgcatggtggttggttaa

SEQ ID NO: 203907 - DNA, 1474 bp, Cannabis indica
aaaactatatattcttaaaaataatataaaattaactatcaatatttatgcctaagattgttcctaaatattaacatttaataacaaaaataaaaatattctatttttttttaaacaataaaaatattctattaaatatatatataaagaaaattaagtggtttggtttagtttgaaggtagataaaaatttaaataccatgaccaaaacattatagacggtttagattaatcaaattattaacactagatttatttggttcagtctcaaataatttagtccaaattaattaaaattttgaacttttggaactaaaattacaaattatatgaacaattcttttagcgcattataaataattattagtttttttatattattaattatatcaaatgcattaaaaatgatatcaaataattacgtgcattaccaaaattttgtgtttgtctttaatgaaaataaccaataaaatgtaattatttgccactacaacttgtctttgtttcattaagcatttgtatctttgctctcaaccaacgaagatgacaatttttcctttttcaatgctaattgcattgattcttgtgcagggtcggctctcgtgtgcaaattaggctattatatattcatggttcaaataaataaagagcttaatatgttttttccttaatgttatttagttattttttaatgaaactaactttttaaggagttaacaatttgtcattggtcatttttataccaatttccaaagtatattttcaattctattactgtttttaaagcaaaaaaaaaaaaattattattgttatttattatttttttaaaatctttcatatttttttcctatcatttttttgttgtattgcaatcaataacaattttaataaaataattggagttttttggtgttttaaaatatataatcgtatgataatatttaaaaatattatttataaattacacctttttttgtaggagcccaatttttaaaattagagcaggacctctaaaatgtttaagacagccctgctcttgccgatgccgtctgatggccgtccgatgggtacccgatggcatgtgggtatcaggcctgatgtgggcctgatgccatctgacgggtattcgatggctttgtgtttatattgaatatgggtgtcgggctcgatgtcgtccaatggtcgttcgatgggtacccaatggctttgtgtttatattgaatatgggtgtcgggcccgatgccgtccgatggggggtgcccaatggcatgcgttttgagtttaatatgagtttttttggttagggtccgatgtgggcccgatgcccgtccgatgtggtgccgccggtgatttgctgccacaccggttgggtctttgatcagttggtaggtcggtgggtgggtgggtgatgatggtttagggttgggggcggttttttggtggggtgaagagatgccgagagagagagagagaga

SEQ ID NO: 203908 - DNA, 1123 bp, Cannabis indica
gtttttctttctctaatcttaaaatcaattcttttctttcattcagatcctccaaattaatcatcatcctcaggtataagttactacaatcttctttatatattttctcgcagtttctgtttggttggtgagaaaaataaaaagaaaaacttatagatctgtaatttttttaacaatttttttttctgcagatcgatcgcttttctcgattacgacatcaaatataatatggcggaggaacacagatgtcaagcaccggagggtcaccgcctctgcgtgaacaactgtggcttctttggaagtccaggcaccatgaatctctgttccaaatgttacagagatctttatctgaaggaacaacaagaagcctcgatcaaaaccaccgtcgaaaactctctctccgccgctgcagcttctgcttccacgtcatcatcatcgtctttgccttctccgcgttcggctccgtcttcgccgccggtgtttcagatcgaagctctctcgccgcctgtgccggagttgaagttaccggagatggcgactgaggcggtggtttcgcaaccgaatcgttgtttggtttgtaaaaaacgggtcgggttgaccgggttcaagtgcaggtgtgggaccacgttctgtggggtccacaggtacccggaaaagcacgggtgcagtttcgatttcaagagggttgggagagaagagatagcgagagcgaatccacttgtcaaagctgagaagctagacaagatatgatgattcaatctggaccgttgatgatgatatttggtgaagtgggtttctagagaaatcgattaggttgatggacggcgttgatcgtaagcgattattccatcgtggggttatgatcacgtatcgagatggtggaagataatgatcatatatattataaaaaatatatattaaatttgtctctgtctgtctgtctggcttttttttttaatttaaaaaaattaactttgagaataagtacggttatttcagtgggctttgcattttgtataaatttaaaaaagaaaaagaaaaaaaaatagtgtcaattccgtgtagattcttctatttgagtttgaagcttttttttttttttatttattattattattaatta

SEQ ID NO: 203909 - DNA, 891 bp, Cannabis indica
actcagcgatctgaaagtatgaatgctttctttgacaaatacattcacaaaaagattactttgaaagagtttgtgaagcaatatggggcaattctacaaaataggtacgaagaggaagaaattgcggattttgatacattgcacaaacaaccggcattgaaatccccttccccatgggagaaacaaatgtcgacaatttatactcacgctgtttttaagaaattccaatttgaggttttgggtgtggttggctgccagccaaaaaaggaaagcgaagatgaaaccactagtacatttagagttcaagactgtgaaaaggatgaatatttttttgtgacgtggaatgaaacaaagtcagatgtttcttgttcctgtcatttgtttgaatacaagggtttcctttgtagacatgcactaattgttcttcaaatgtgtggactctctagcattccacctcaatacattttaaaaaggtggacaaaagacgctaaaggcaggcaatcaacagctgaaggaacagaacaaatacagactagggtgcaacgctacaatgaattatgtaagtgggctattgaactaagtgaagaaggatcattatctgaagacatctacaatattgctgttcgtgcgctagtggaggctttgaagaactgtgttaatgtgaataattccatcagttctgctgcagaatctagcggcaattttcttactacttgtgaaacggaagaagagaaccaaggaatccttgcaactaaaacagttaggaagaggaatacaaataggaaaagaaaggttcgtgttaaaattggtaattgttgtcggccttttatgtttggctctatatgttgctaaatccctaatttatgtactataaatataattcaggtacaa

SEQ ID NO: 203910 - DNA, 1303 bp, Cannabis indica
attttttgcatcaaacaataaatttttataatttttaaacaataaataatgaaagatgtgaaagtaaaaatattggtgagactacatagtcaagataaatcaaagtaagagagtgtctatgtttaacaggatgagaagaaactcaaattttttctataatttaaggattttgaaaatcatcaaaaattagttttaataattttttaacaccataattatcattaaattaataaaatatttaacagagtaaacaaattaattaaaattaccaaaaattagaatttaaattctaataactctgaaaaacataaaaaacagagtctggaaactaccacacgctccctcactctctgacagccacaagtgggcttcgttccagcaacccttcttcaatctctagcagctcaaaaaatgggtcggacgacccaattcagatccggcaggtcgaatgggattttccggccaaaaataggcaatttcgaatggaatttgagggattttggttgggatatgatttttaatcaatctatgggatcaatttagagaaaaattactaaagaaaggtagatctaattgaaaccaatctgaaaacataagaccgaagaaggaacccaattcttctatgtatctcatacaatttgaaaattaaatcatgtttatacattttagattagttggtaatgagatttccacaatcaattttagtccataattaatataataaaaaatccaaatttgatttcataattgaaatatgtgaactctaaaagtgtaaccatataattctcctaatttattcaacaatttaagtcatataagatatcaataaagaattttatgataaataaaactcctaaacttttaagattaaaaaataaaaaaattcaacataaaataataacgaaattacaatataattgataaaaattaacataaatatattaaatttttacacaaattatatgtcttaataatatataattggcaatttaatactacattttagaaaaaataaataactcaagatgctaatttgtatatgatatcgaacacagtaataatttttaataattaggtatacatagctgattcatccataataattacaataatttgatagtgcaatattatgaacaaagtttttctccttaggtttctaaatgagaaagtagttttatttatctgattattaaaagagtatgcaattgtaatgagacaatatgtatttatagagttaaagaggagacttagctacataaccctagttgtacttgacctgttcatcaaagacttcagttaatta

SEQ ID NO: 203911 - DNA, 848 bp, Cannabis indica
taagaaatatggaccgacacgagtaaagtagaacaccaatctaaacacgagatgaaaatactgagtttacaggccgtgctaggtttactctttaaaaatattgtcacggtacaatacgatttatatttttttgtggtacggtacgatacgatttattttttaaaaaaacatagataaatatgaatcgggctaacatgaaacacacaaacttagagcactactaccagttgtagctagtgacatgaggataaaagaagagtaaatatgactttcttgaattcgtaaaaataattaccgtgctggtcatggagttataaatggtattctcaatatgctggcccgtacaataaatgaacatataaaaacacaaaaggtattcacaatatgctgacccattccatttttctcatccatctcatgttgctgcacctacatatatttgaaaaatacaatggtattattctcaatatgttgttgtacatataccaatattggctaggaaaggaatgtagggacgtgatatgatatttgtataatgttaattaaattctttccgtggtggttgaatttttttccctgtaatgaatggtaaccaaccactccaatagacatagtaaatcttatcctggcgaataagctctcaagtctcaatccatacttcttttgccgaaaggcatatttataaacaagattaatcttttcattaaatcaaccatgattttacctagctagatagctgtacgtacacgtaacactgtttatcatgtcacccacaattacttacttttcattatctaaaaaaaaaaaaacttatatatagcacataataattatatcaaatcatatgt

SEQ ID NO: 203912 - DNA, 925 bp, Cannabis indica
tgatgatgaaaaagtacttttgaaaaaaaaaatcgttgacatttggtgtggccgacctatgcccctcatttgtgcacaaagatggcacacgtaggttagctaggtatttaagtgaaaaataatttctttcattcgtgttgtactccttggtgttgagggaaaatttttagacaagtcttctttggtgttttgagagtagagacctgtatcatctttttatgcaaaaatatggcacaacagacatgctggaatggcctctttgtgaaatcttgacattatgttaaaattctagctattttatgcttaaataagtcaagtcgttgttaatttcgttattaaattgtggtatatagggtgaaaatggtgaaacccttgtggatgacaataaaccatagctaggttgggtacacttaggtgtgggtcctggtacaaaatagttggttaatgtttttatgagtttcctagaggtatcatgagcctccatttaaaatgtcttaacttattttgtctttccgagtcttggtcaaagctgcatgattgatttttttgacttttcgaaaatcgggtataaaaaaaaatgacgtttgtatatttttaataaaatgatgatcaataataattatatttttttacatctttaaattggagtacaattacatgtaatgggctaaatatagcataaatttattttgccaaacttagcagaaattttacattgtacgttagagatgatctaataacttttgtaaaatattggtttaaaatagtatttaatgaaaagagagtgtgcagtgaaaaaaagttgttgtgaagatagaaaatagtagcacctagtttgtggtaacaaacaatgtggatatatatatatttcataataaatgtgactatctcaagaaaattgttcgtttaataattcttttttttt

SEQ ID NO: 203913 - DNA, 861 bp, Cannabis indica
gatccaagaagaacgaaagaaaggaattctatcttatcattgaaatgaatgagaattacagtatttatataatgatacatcaagctaatcaagaattaaaccaaaacaagtaacagactcctaactaaccaaaaccagttaactaacttgacaactcgatcagctatcttagcttcactaacacataaccacttctctaaaatagaaaaactttaaaatatttaaagaaccgtactaaaaatacactacaatagatgctttaaactctttcttcattttaaagtttctttaaaatttactatttaattatgctctacatttatagaatactattaattgctctaagcacattttattaattattttagcaagaaaatacgtgtttatattaaaattatatatttgaagtgaataaaatatattaaaaattttaaaaagtaggattttgttgatgtatattaaagaagttgatatatgtaatagggctgccatcgggtgggtttaccaagtttcgggttggcgagtttcgggttcaaaaaaatgaaaccaaacccggattcgaataaggcacaagttgactggttggcgggtcacgggttggcgagtttcggttgcccggattgcccgggttggcgggttaaaaatatacggtaccgaatctattcttttgataaaaaacaggataacaaatgagtgtattccctactatttcttatatacatttttcataatagtttttataatatgtataatccttttgttctactttttatctcaattgacttggtttgaaagtacattcaaatacatttttgtagctatgaaattgattccccacttttcaaatttcaatgctcaaaa

SEQ ID NO: 203914 - DNA, 420 bp, Cannabis indica
tttatattttagcatcgaaaaaaatttaatctaatttgtttaatgatcgtatatgttgtaattatttggagccacttgttaattttaaaaaaaaattctaaatagaaaccaaaaataatatttaaacaatcgtttatataataaattgtataaatcttattttccagaaggtaaattacttgaaatttacaagtctaaaaagctcttctatatttcgtaatagatagaataccaatacactctttaagtaagagtgtaatgtaaacttaccctcatatttttatatacatgtcttattcctcactattctctctctacctcaattttcaactatatctaaaaggttgaaaagcacttacaatgctaatgctaattgtttgtaacttgatcattcaattcatcatcttagaaaaaaatatc

SEQ ID NO: 203915 - DNA, 1159 bp, Cannabis indica
gaactatcgagttatttgctatagtttctgtatccaagattgtaggtgttcaacgggaggataagtgttaaaaaaattgtaaaataccacatataatgatattagttcaatgtaattaatcatcatgcttcagtcaaaaatttcatcaactgtttatatgcctacaaaaagcatataagtctacactctgctttcttttatttttatttcattattaaaattatttaattcggagttttaaaggttaagcctcaacagatgagaatgtgcacatgaaagaaaattttacagcaatcggacctgcagaagctcgagagacaagattcgagtcttggatgtgacttcatcactatcttccttcatgcccatctgcaagtaatatatttttcaagtcagagaaaattaaataccagggaaaaaatttggagaggttattaaaaaacatcaggatttttttgttcaagtcatctaccttgcacagggtgcggaataccagcaaagcatcacgttggactatgcccatgctttcaagatcaatcccactttaatagatttagggcaaacaaacatcagtatattttttcctcattactagaaacaagcatcagtgctatagaaataagcagtaatcaaagagtataaaatcatattcttaccgtgttatctttttaccatcttcaatatgcacagctttgtcaaggacagcctctaaaccctagaaaagattttgagggccaaaggtaacttcattataacaaaagaaaactggtaatgtatgaatgttaagcaccagtaatgtgtaaaagctcttaatataaattttgtggtgaagaatataaatgatagcacaagggatataaatactgtaaactacaagtatcaggcaccttgatgtcggcgccaccagcaagattatgtagttcctccacagatgcaagagatgtctctttagcttggttaagtgcatcacctaaagttatttctttgtcattttcctcccccagtgaagtttcttccatggtatttgaactctgagcttctgtatgtccaacagaaccagatgttacctgaactccctgtcaaacattgtaattggtatgcaaggaattattctttgttctttatattgggaaacccaaacctcacaatatacatataa

SEQ ID NO: 203916 - DNA, 880 bp, Cannabis indica
tttaatatataaagatatgtataggttattaattagatacctcttctatttatatatataatataaataatatttattgttaagctatatattggatttgagagtggtcattgaaccacttaattaagttgacattattgttacattacatattaattaacctaaatgaaaagataaggtcgcatttagttggaggtaatgaaatggaatgaaatagatatgaaataatcttcattttatttttttgtttaattatattttaaagtattagaatatcattttaataaaatgtcatttttaccatttttatagaataactattttattttaaaatagaagaaagtaccatttttaaaaatttaatgattttttttaattaattttttttttaatatacattttaaattttattctattccattcttagtcctaattttattcttaattccatttctatgtaaatgccacctaataggatttatatattatatttttatgtattcctatcattactagaaaaaaaaatgaaatatttacataaaaaaaatataaaaataaaaaaacattacccctatactcttacaacaagactactcctatatttttacctttcttattgttttttttttttttgatgaatgagctgagaaattcattactaaacatgtttaatataatctatgtgcaccttcagatgaaagaccaaagtatctatacagaagtataataaatcaattacatctattataaaccatcaaaccaatctcgatccctccttataatgttctttggcaatacacaagtaattcggttcttaactaactattttgtctgttgcacagtagttgctgcatgtttgttagaaaatgacattattata

SEQ ID NO: 203917 - DNA, 2700 bp, Cannabis indica
atttatataaagtgaaacgtaatttatatggggataagttgagaattaccctttttattacaccttaataaaatataactccaaaataattttaattcataaatactctcttttgtaatcaaagtatcaaatataacctcacataatttatcgaaattagagtcactaacacacataatgggaatatgacctataaaattgagtataaattaaataataataaaggtaaaaattaaaatagaaaataaaaagtgggtgtacagtataattgcttcatttatatcatcacttttttcataatcattctactcaattttatcatttaaggataattgttgtaaaagttcccaaaaatataaagctgatacagattagtctctaacctcgaaaaatttagcgttaatagtttctaagatcacattttctgtaaatctgttggtccctctttttaatagattcgttaaacctaaataaaataccacgtgtcaattttttattggttcaaataatagtttaattaaaaataaataaattaaattaaattaaattaaaaaataatattttaaaatcataaatttatttctttttttaaaaaaaaacacaaattaattaatcaatttattttttttttcttttttcttttttcattcttagtcgacccttgctcttctctctccttctcgttttcttcattctttgccaaaacctctatagacaccatggtctaaagctccgaccaattttcatcatttccactcgttatcctatctctcttgaaccccaatctcaccagccccacaccatcgtgtcaccctaaaatccacatctttgttcttaggttctaccgacctttccctttaactccgcgtcatccctgtttgtacaatgccctgtcatccccatgctttcctttcatactccgtccttctcgctacttaaaatctaaatttttttgagcataataggtttctagcaagaagtctaaaaatgtctcgttgtcgaagcctcaccctgttatggtttcgatctaggaatttttgaagttcgatgagtcaatctctaatattagattttgaatcgatggtggtggaaagcggagaaagagacaagatgttgaacaaagagcttgcaaaaataataataataaaaaacaaaagtggtcgttaagcatatcaggaggggcagtgaggttgttcattggcctccccatcaatagagtttccatggccatggatggtctatccacgaagaataagaagaagataaaggagagagaaaaaaaatatatctctctttagatccaattggttccctcccttatttattcttatgtgtgtatatatatacatattagtttatatatgttcgagaacagaggttcttaattactatgtcaagatcatagaacgagttttggtcaggtgggtctagttcatgtatccccttgagtagcttaactccaattatttaattactttgattaaattaggtttggactaaattctaatatattacagtgaagaagatgctcaaatgtgtatataggatgtttcttaggacaccttttctagattttgttgtgacattaatgaagagacttctctacgctcgtatgtttctaatccttaatttcttctaatatatttttgctttagattagtgagtggacattagaagttgatgaggtgaagctaaaataattagttttgtttgcaggtgcccatgatttggttcgtgggtgcagtataagagattttgttttattttctgatggccttcaacgttaatggtagatgaagacggagactatggctgagaatggggtgggatgagagttgtggctggggatgggtgaagaagacgaagaaaaaaaagaaaacaaaaaaaaatgaaaaaatagttttatgattttaaaataatttttaagtttttttattggaaaatttacatcccagtacatttatttcattcattttataaaaatgtgatggtttcaatttcataccaaagtgtaccgtttttaatttaattcaatttttttaaaaaaaaaaattagaaaaagctgactgagacgtgtgtgatgtatcctgacgtcatcatatcacgtccatcacgtcttctttgttgcaggtttcaactgttcacgcgtccaatttttgcagctataattcaaattgcagtcggtttttaaaggtttatattccatattttcttttatttttatatattaattatcaattttatgggttttaggtgtttgtgtaaataggtaaagtttctttataaataaacattttcagtttttatttgctctattttccttttttcagagtatatgggtatgggttagggtttcatcttctttggtggtttatctcgtgtttattgtaagttttagtgtattttttcttattaggagtgttttgagtgcatccttttcgtttatcgttctttggtgttgtgtttctgtttgattgttgagggttcttatcatctgtaagcctaaaaaaatagttaaatctcgttctttaatttctctttctcattctataaagttagctgttgataagaaaaaaaatagaaaatgtatctgatgatgaagatcgtgatgattatgattgttctggtggatctggtggatcatctgatggtagtcgttgctctacattgcaaaccaaagaggaaaagagttgttgagaa

SEQ ID NO: 203918 - DNA, 1492 bp, Cannabis indica
aggaatattaaataacttacttacaatctctaagttaattcctacgctcaaaattatatgtctctatattctttttcataataattttcgttatatataagtacaatattattttggtaaatttttaaaaaattgatattctagtctactagctacacgtgttagaaaaaatttcaaacatattttcaacaccatcaactatatgattttttaaaaaaaaaaaattatagagatgatatgttgtaactataagaacaccgttgtgaaagagaatatttcgacacgtgcttttagcatagttgaccctaaaataatatactgggtcatagaaaaaaattgcaataacactcttgattaaaagaaaaagcttcgtagttatcaacgaaagtgcattgcacaaaatattgattaaaagaaaatgttataaatagatatatattgtttagttatagcaataaaaaatgtgctattataaatatctatataagtcataaaataaattattttagtagtaattaaacatgatcatatttattagttataaaatacttttgttgtgttatatataataatacatataaattaatggtttttggtgtgtgtttgtgatatgtgggtcaaattatttgatcgacatcaattattgtaggaaaatttgaattaagatcaagtatattataatgcatgcatgcatgacccgtaccctgtaaatgtgcatgcgccctactttggaattattatctattaatttttccattgcgctcttatatatattatttttcttttatttttaagaaaaaattgaatagaaaaatcatatatataaaatggtaggaatattaattgtaaaagatctatatatctatatatagtgatgaagaaaaagaagaaagacagtagtcttccgtatttgattatataaaaaataatatggtagatatctgattctatatcatcaagtcaagtcgatctgctataatgagaaagtgcaacatattattgagacacaaaattaatttttaatatggctgtacacaacttagatagctagctaattctaataataaatatcctttttataacaaaacagtttttttttacgtatccctcgaactatatagcacttgtttaacttttttgtccagaaaaaaaaataaataaataaacagtttgctaatggtatttttttcttattaattaattattatgttaccaatttaaataagaacataaattattctaatcgttaccaatttattttgagtcatgccatttgtcccacattgattattttatattttttttaaaaaaaaaaattaaagttaattagaattattttaaacaaaaaattaataaaacttaattttaaatttttaaaattaataataaaaaaacaatattaacatagaactgttttttttttaaagtttaaaacaactaataatcaacgttaaaactaacatacaaatctataacaagtatattatacttg

SEQ ID NO: 203919 - DNA, 1226 bp, Cannabis indica
catgtcccaatcccagatccagaataggaggaggaggagcaagtgagttgtgttgtcgtacaattccattgacaacgttgtcatatgcttctttcttctgcttctctgccccagaatttcggttatggagtttgaagccttctctctctcccttcattattcccaaggaaaatatgagatgggctggcttgaagggcctaggaaaacatatattctcttctcactccaatttgaatattgggaatagcgacacattgtgttgtactaattttgaagaaaattatcaattttattaattgcaattattcatgattacatgaagcaattcactagaaatatcattacttgtaagagtacgatcagcaacaaaatagaatgtcttcgcaaagtagtgagcaacactattagcaaaccatctaataaaattaatgaaaacattacctaattgttctaataacaatttacaattagatataatacttccaaaatagaataacaatagaagattattacgaattgtttgaattaccgagagacaatccgacttcaccacttccaaaataggataacattgtgttgtactattactacaattatcttaggttatcttttggagaatgattaatttaaggagtaaatatttaaagtttaatttttgttactaatatttaaatttaattttttgttgtaataatactgagttatatttttgaaatttttgaagatatctgacggttagatgtgaagttatttgtgagttattattcatatgttattttgttgttgatatatttaaattaatttttaaatgaaaaataaaaatttaatgagctggagcaatcaaggatgactattgacttgacattcaacgatacttaagtattattatagataaaaataaattttaagtatttatttataattatgagtttaacttaagtatttatgtcgcaaattattttttggtgaaatgttattcactaattaaagtttctctaagagaataattcttataacttttgttttgaaaataataatgtggacggatgagaacttgatttacaatatgaaatcttgactttccaacaaaaaaaaatgaaatcttgactttattaacgaatcgagttcttaagtattaattttagaactaaaagttatgtataaatttagaaagaaaaaccattttgtgaagtaagtgtaatttaatatcgagttcaatttatttt

SEQ ID NO: 203920 - DNA, 1009 bp, Cannabis indica
tgcaaaaacacggtttttcagtccataaattacgaattcatattcatatttttcttatgttacaaaatgtgtatttgcgtattatttttgatataaatacatattattcacacattaatatgtaacacataccgcattttatataacatgtcacatatatcacatttattataatctaatattatattacgtggtaaagaacaaataatataacaatatatacattcttgtacatcaatctaatttttaaaaagatccttaatttcagtgcttttctcaataccagctgcttgaaaaaatggcggagtatgctcaccaattatcatccttaatatagatgctatggacccatttcacctatattttagcccatatacatatttccctattacagctttgtttcatgcaatactagtattcctaaacctgagtcccccaaccttctttgatgtacaaacctgctcccaagcatctgcactaggccccaaactatctgccttaccccaaaaaggcacgacaaagacaaatggcattgatttcctttagcactttcctttaacatgacagataacatttctttaaagttcttctattatactataatggacaccattgtttaacaaattacagttatagcttttcatgtacgcactgagaacaaggatacatctacatggacattttcaaattaatttgttaagtgatgtgatctattttttagtcttgataaaagagagaaattgatgagcctgagatttgcttgttgtgatgaggaacagtgtagaactgggaaaaaaatcacctgtcccaaatatgctgtctccaccctgtcctaccaattaattacagccacctcattaatttaatttaattattcaataaaaaattatgttaaccttaacaactaaactaacagaattggtattctctctccacattaattgctaacttttttctttccaagaatataaaaagttttttttttgaaaacaaagtcttttattaatta

SEQ ID NO: 203921 - DNA, 2016 bp, Cannabis indica
gtttctaaagttggtaacatttttatcttataattttttgtattgtattttgttcattacgttattgatgaatttaatttttttctactgcttttaataaaataataagtttcttttaaagttgatgaaacttgtttttaaacttggtatggtttttagattataatttctcacattgtgtttttttttcattatgttgttgatgaaactgattttattttttattatttaagagtctggaaactggttttatttttttaaaacttgattaattatatatttgttgtcatggttgttatattattcactacaaaattagggtctgtaatgaggacaaatgttctcgttacaagttgaaaaatcctcgggaaaatcttttctcgaggacatgttctcgttataaagtctttgttagaagctcgtcgttagaaataactttttaccaaggacaacattgatattcttggtaaaggctataccaaaaacaagtgttgtcagtaaaagttcgatatgttctcagtggttgcctaatattttgacccagttggctcgtttataccaaaaatattattcttggtagaaccttttaccaagaataatttttttacaagcaattttttaagttcaatgtaaattttcataataaatacatcatacacatttttattttggtattaatatttctcaataaatgataaaagtaaaattcattaataaaaatatcataaattaactttttatatatttttaaggttataagtttaattacctaaatactaaacatgctaataaaagagctcctgaaagaaataaataatacatatgaatataattgctgactcggtcctccattagcgggatgattagattgttgaggcgaattctgcgattccagagtgacacaatttgtcctaattaacaagttactccaactgtctaatttgcttctacatataagttatgacatcagctccaacatatacaccagcttgaggtggaggaagttgggtaaatgaaggtggtactgccatctctcttgtgtaattagacacccgtaacttttttggtgcccacgatgtcttccaaaaaatagtttgaacaagtgatagatcttcgtctcttgcattaataacattgctttgctcctcttcttcacagagtcaggttcttgtgcccaacttatgtagtctggatttgtgtactatcgtacgagcattcctaactctctcaaaaaatctaaagtgtacatgacatgggcccagggaactctaaacaatccatttattattgatattttgtgttaattttaaaatcttatattgtaggtgagaaaattgacaaataattataattgtttcactgaatactgcgtcgttttaaaacctacactaaaaactcaaaaaaaaaaccttaagggttggttataaagcacagcaaaaaggaaaataaaaatccataaaaagcctgacactaagaccccaaaaaatttaaaactcaatagtgtcggttttaaaccgacactaaaagaaaaaaaatatatatgtatactttaagtgtctgttttaaaacgacaccaaaagtcaatagtctcggtttataactgacaccaaaagtttgagtttttgtgactgtggaataggtgtcagttctatgaactgacactaaaagtataagtgtcagtttaaaactgacaccaaaagtacattttgtagtagtggacctatctccttgtaagtttttcctttgatgccccactcgataggcagtggaagtttaaggttttctcacttttctcgtgtgcttatcccttatggggcccacattttttttagaggagctgctgtcatgcttaaatattcatgagttagtatattcaaataaatattaataacataagttaaatatttttaaattacataacctcgcacacaatcagctctaatatttctcgcaccaagaggaggataacttcctccatcacccccatgagaacgagcaacatctatcatatatgat

SEQ ID NO: 203922 - DNA, 605 bp, Cannabis indica
ttccttcaaagaaaaagttacaaaggaaccctaattcccgtaaaataataagattttcacaagagagattaacctcaatccaagtagtattagctttgttagtaaaaacataattaactaaaatatgtactactccgttagtttctcaatatacaaaggaaatttcattaacattttcatacaataacatatttcgtatatattgatatttttattattatgaaatctaggagttgtattgaagtaattggatagttactagtaattattctattttaaaatgtaaaagtgtgtatggattgtatatgaaattttattttcatatttagcaaatgagttaataattatacggtttaataatattaattaactaaaaatagtaatattttgtaattatacactcataataattagagagtgtaatttaaacctgtcagatattttaaattacatgattattatgtaatcatttatctgagaagttacttcaaattttataattacttcaaattacactcaattttatttacataataaatttttatactcgcccttatgttatagttaatttaaatacgattgtgtgataattataatatcaaaat

SEQ ID NO: 203923 - DNA, 674 bp, Cannabis indica
gaaaaagaaaaagcgttataatttgtctatagtattcatgtcaatcattcttgtatcggatcgagcaaatatattatcggccaagaatgaaattgaattgtttaattttgtgtataaaatactaaactaaatacttaagcttggctttttaactactatttttttttcacggtctaaaagcattaatgcttttggattttcaactcttcggggcaaatttggttatgtgcttttcagcttgattttatgtgtttaggtatactttgtgtttagttttatgtaactatcctttgattggaaacctattcaaatacatttattttgaacttaagtacataaaataaagcatgaagtatctatattctatacaactgaaatcaacaattatagaatagatttaagtattatgatgaaaagggccattttggagttgaaggaaatgagtttcattatgttagatttgtgtcagagtgagatttcctagtgtggtgtattgtgcatagtgggtggcgaatatgttaggtgatgttgattggaggacagtaatactaggtatagtagcagtttggttatgcactgaaacaattgtacgtatataaaatatgatatcagtatctctctgtttttcttcaattaataaaagaaaattcatttcatgtcttgttcatctacat

SEQ ID NO: 203924 - DNA, 574 bp, Cannabis indica
aggtgttgttcaagttgattagactacacttggtagaaaatttgttgctacccagccctttgaagaaaaatgttgacagcaggcatattgatatggtagataacttcagagtgtttgatgattatcattggggaagattatcctttcaagaaacttttgaaagtctaaagaatgcccaacaaagaacactgaaaattcaaatctatttttgggaggatgtccatatgcccttcaagtttttgcttttgagatcattggaaaattgagtctttatgtagataaggtaggacataagctgcctaggattacaaattggatatgtaaaaaacaacaagagtcctccgaaaaagaaaaaagggatcactttttatgatattaagaccgatgtatttgatgatctcgatgtaagtaataccaaacatagcacttttatatattaactttattataattctatattacttgtgtgaaatataatttgtgagtaattaccttgtattttattattttaaggttcttttgcgaacaatgataccaacaaaggcagaattgaagcaacactacatggttgaat

SEQ ID NO: 203925 - DNA, 651 bp, Cannabis indica
ttttttttttttgaaacggattcttgcatttataaacaacgttatacaggattcggcacatcaagtaaaataagcttgatgagcacaaggagatataatccgaatccatatggcactagccttcaattctaatcattaaaattaatcattttcgtacatcggctgttgtctgaaaaaaaaaatatactttgggaaaaatagagatttgttagtaatatattatttgattaggaaaagaaaaataattagggaatgaaaagcccaataaagcccatattcgtttagacagactgtcttgttggcctcgtggggtggggttgggttccgtggtggtggccatttgtgctctctttcactcatatgaaatttcaccatacacacttcctactactacaccatactacaactgctacttctctccatctctctttctagattgtaccgcattcttttcttttgtttattttttttttttgtttttctcttcactcgcagatcaacttcttctacccttcaacgctctttcatggcttcgatcatcgaatctgcctggcaggtattattattcccttctcttcttcttatccgttttttctttaatggttttcattatatgctcaaacttccatttcttttttcttctttggtttt

SEQ ID NO: 203926 - DNA, 840 bp, Cannabis indica
ctctttaataatagagagaatacaataatcttatatatatatataaaaaaatcaatagtttcaaatctatcaattacaatattttgaatagttggaatgtaaattttaacaatcaaaataaaagcaaactaataaggacctccattttaatactcttaatcttgtcttttcttttctttttattttttttggtcaatactctttaattttacttttgtttgcaaattgaggagccagttaaatctaatttaaataccaactagattagtactgtatacacttgtgtagactgtagacgtaacatgttttccttagtttcaaagttttaatgtcacatgtatacatacacaaaaacaatcccaacattcaacagcagaattcaactagttccttaaattagcaaacaaaaataaaattaagggggtactaaaaaaaaagcaagggattaagtgtctaaacattaaaacacaagggtcctatataaacaatttcatcacactttgcaaagcctctctaaaatgactcttattagattctttacaatgattcttatttctctcactcttctcatcacttgcagagcccaaatcaacaatgtatcatgttcaccttcctcttgtggcaaaatccaaaacataagctacccttttcggctaaattcagatccaagcaactgcggacacaagaactacattctctcttgccacaaaaatgtaacaatactaaaactctttcatggaaaatacacagttgaagcaatcaattacactaaagaaacaataagaatagttgattcaggccttcagaagggaaattgctccactctcccacattattctc

SEQ ID NO: 203927 - DNA, 1577 bp, Cannabis indica
ccatgtattaaatatttctcgctgtgcacacatcctaattctacatattattgtttaatttatttaggtaataattaatttaggtagctctaggtgcggagatcgagatagaggatatagcagtttttatatttcgtcattgcatggctaccgaacgttctttagagattaaattaataataaggattatatttcataattactatatgagcaccagcagaactcagccttttctacaggtgacaccctacaattagctactgttattttttcccaattctcttactatatatatgtgatataaaattcattgctgtgtccttaatatttagttttataaacgatatatataaatatatttatatatgtctgcgaaactagatacagcagtctaggttgcctgctcagcttcttaattccatacccaatgtataaaatttacatttttaatggatcaaaagctttggtattatatactgagtctagattccttggtgtactattacgtaatttttaatgtatttggtaatgtttgctaaatcagtagcaaaacacaccatgttcatcgctaaataatatttaatgatccaattgtataaagtttccaaattattgtagtatatttaatataaatttattatctttgtgtacttgtagaatgggaaaagaaccctacatacgttggcttataaaggtctaagagctagtagtaaagattctttgtctcaaataataatatctcaggccaaatgaatgtaatttcttttatttctcatttattttacgaattcaaagcacgagtatgtaaactgtaattttgtggtttatgttcgacaacctgtagacaaaatctgaagggttttgacaatgttggacaaaacccatatcagttttgatttgagtcagcagaataataagttggtcaaattgctgactttctcaaattggtaattactgtacatttgccccaaattagggaaacccatgtatgtggctctttcactctccctctaaattatagacagtaaatattattaatatactaacccaattatttacaatataatcataattggtatgtgtgttttggtcctatgaacagtacaaatcttgagacaatatgcatctcaaacgttcaacaatgttattgaaaatggcactcaataatgtttatattaccggctcaagatcgtgtgatttgtaagacatttcattcaaggagccgtgtacttgcattttaagtaaaataccaagttagacaaggcaataggacatgggttttttcacagtttgagattaggatttccgacaaacaaacaaatcttcttaaatgtatatgcagatttttactcgtttagattaattagtaatctaaagtgtaatttaagatttatggatcaaaagtgggaatggtaagactttcttgttgggaaattgatatcatgttacttttcatcgtttatttaaccaaagaagggcggagatgcctttcaaaaaaaaaaaaactggagatgttaattaatgaaatatatgattcactacaacaaaggctctcaaaggttaaaaatctaaatgtc

SEQ ID NO: 203928 - DNA, 1449 bp, Cannabis indica
ttttacacacacattacatgctctgttacttttttcaagatttgaccaaaattatcttagcttttataagtttgtaaatgtaaattagtaaaattaaaaaaaaattaagagagagactcacctagattttaggtcgaatataggaggagattatttttaagattttaccctaaaaagaatatagtaaaaatatgtcttaaaatttgggaaaaaaatgtaaaatgttatatttagtcaccaatttttttattgtgctccgaatctagataaaaaattgaacataaaaatataaattattattaatgataagtaataacttaaatatacattattaaaaataattataataagtgtttcaataaaataatataatattataatttattaaaaagtggtcatagacataatttggtttcacacttagcttcccatgacaatattataaataaaaaatatatattaattttgtgtcaaatttaataaaatgatatatcttcacttttagcttgtgaaaaattctacagaaatttagcatagcattagagaaacatttttaacaaaaatactaaaatataattttacacatcttatttaacatctctatattgaaaatgctttatgaggtaacaactaacaacttccattactacaaataacaactaccattaaaaaaattaatgcaaacaactaaaccttaacacattattgtgttagttttaattattagaatatttgtttactaatcatatattagtatcaaacataataaagatctgaaatcatacaaaaagtttgctgatctaacttactccaattcatttaaagatcattgacttctagggttgtttttattggctagatttattaattatcctctctcttttaaaaaactaattcatttatcatccccttattgtcaaatagttcctaaaataaacactgcgaaaatgatattaatactaaactatccacttgaagaagaataaataaatcataaactaaattcttttgatctaaactcatctctcaacatcattcttattcttcttaacaaaaaaaaaagagttttcttaagagttcttctttctttttaagatgacgtggcaagggacaagaatatttgagaattgaataagatagatgtattgttataagtcatcggtaatacacaaaaatactttgaggtggtatttgcaattagttaacaatattttttaaaagttattatgttaagaaacaccttatatcatactattatttgtataatttaatatcaaatcttacatattttaatttaataaataatataaaaaaatactataaccacttaaaaatacggtgttaggcaagcttgaatgcttttaatatttcttatagagaaatgttaaaaggcacctatacttttgtaatgcacatggagcgggggattggttgggagtgctgtgctcc

SEQ ID NO: 203929 - DNA, 896 bp, Cannabis indica
attttaataaattaattgttaatcattaaaaaagaatctatatagttaagattaaaaatgataaaatggatcatactttttaaatacatttttattattttttagaaactttttttatgatctaactttgtaaaaaattcatatttagaaaatattgtagttttttatatttaaactataaatattttatttgtccaataattttttaatattttactaatttaacattcattaaaaacgaaatttttttaataatgtatatagtttagaattatttaagatcgtgcaccgcgctgtttttgtttcgtaattataatataattgggtataaagtagagtattgtctttatgttttaaatttttttttaacttaatttataatgcaacatacttttcaacttttgtcggctcaatagagaggatagtgaataattcattgatgtagctacgagccacatgtatagctacgagccacatgtatagtattaaagtttattttactagcctaaattagttgaaattaaatataatgactttaaacatttaaaaatgaactctaaaattagatacaaaatccaaattaatttaattattaaagcactatttgtgtaattattttccacctagacacttaaattagagtataaattagctctagattggattaattttacatcaggaaaatataataaacataaacgaaatgaaaccattagaaagtagaattattttttatagtttgaaggaagtttttttataaaaaataattcagaagacaaaattcgatgagcaccatatttaggaggataaatatgttatgtatatatttttaattaattactttaaataagggtgttcacgtttagtctgaattttctatagtttttgtaactaaa

SEQ ID NO: 203930 - DNA, 2275 bp, Cannabis indica
gtaaaaatagatacaattataaggcccactgccttgtgaatgtagagtcatatagcattaactagagaatcagacaccttctaatcggtttctactctaccacttagccataccatttctatgaacttgtaaggagttttttcttctatttataaaattaggaataagaaatgaaagcataaaatatataaaattgggaaaagtcaggtgaaataaatgagaaaagagtcacagcaaataaagtgagtgtgagtgtgagaaggtttcttttccatttcccacctaacttctcatcttccctagccacacctttcagtccagtccagtccagaccatttcttttttatcagaccgaattacggtccaatctaatcacgctgttgctcgctcgcggccctgtacaattttgttgagaattacttactctttttttttttaattttttttcttaattcaaaagatactcgtttttttttttaatttaaagattgttacaaagtcatatgacttcctttcctttccattaattaaaatatactgacgtgggtatatataaatctattactcaaacatgattaactacatggaaacgtatactacgttacagcccttaatttatttgcttacatttatgggtctttatatgttgttagtgcttcaacttttaataagtgaattactaacgagaataccaaagtattactgctgatgaaatataaacaatcttagactacctaattattattattttctaataaataaaaaattatcttatttgtgttaattaatatttgatgtagtgtacgtagttataacttataatatatctatcaataattttatttatttttgagtatacaaactacaaagtgaaattttcattagtgactgaaggaccaaatatccaatacaaattttgataagccaaaatggcaaatcaatatcacaaatgacaaataggatcaatatacataaatcaaatttatcttcaatagtaaagttataccatccgagatagcatgttaaaaatatatatatgtatatatatagagtgtccacatggataataaataagatagctagcctacaatattttaggtcagcaatatgttgtttatataaataaatattagaataaaaaaaaagctatattagctagagtggatgaatatgtagctagttcatgtaaatgagtgatcagtaattcagtattttgaaatggtggtatatatgttcttataaagattgatatatactacaaacaactttgtcttaacttcctttgtcttaacttcctttattcccaaaaaaaaaaaagtattcccgtatctaattgcatgcataggcagctatcaaatcagagctttggaatggttgatttaatcatattcatgcaaaattatacaattacgaattggcacgcaactaaactaacaactttttgttacattattggaactggaataaaaaagattcaagacagtaaattaggtataaataataattggtaggtaacaatggttaagattgtttttgctctaactaatgcgtaaattattatttaatacaaaaagagaatataaacagtctaattcgtgtttttttatttttttgagaaataagtctaattcttggttgacaagtaattttaattaattgttaagatctcattaaatacacctatgtgtctctatctgatttcctcattggaaaagtcttcttttatttggaaattaataatggtggttaattattagggtggaagtgtaattatgggctgggataaatgaaaactttgtaattttggtacgaagtcaaagtttgactgacaggactgtgacgaatgacatttgcaacgtgtgcaaaggcaaaagctacaggatctggtcgtcacgtgcccttaactcgacaattagaagaagcaactacaataacattcacttgatatttactctttaaatcttttgacaaaatattttttaaaaaaatatactatatttaagtgtaatgaaattcctttcaaaaaaaaaaggaaaaaaaatggtaatgaaatggaaattagagtgattggagcgtggaagccctgccagctttcttgggacccaaacatcatcgaatggcacacaattaatccgtacggacacgcgtcaaaatcgaatgcctaaaccaagatgcggcgattcgtaaggaatcgttggtctaagccggtatctacgggtaacatcaaacttaaaatctttttaaacctcctaatgctaaaacaaaaccacgtaat

SEQ ID NO: 203931 - DNA, 1214 bp, Cannabis indica
ttttcttcttcttcttatttggtatgtgtggtgtattgttgaggggttatgttattgctttgacatgagtgaatgtttcatccttgaaccttactctgcgagctttgtcttatgataggaaaatcaagaacatggagcggataatagtttgattggtcaatttggtgttggattctattctgcttttcttgttgctgacaaggtgcagtatcatttaacatttttatttgaaaagtgttcttgttgaaacttcatgctcttcctatgtagtcaataaccataattttccaatcaggttgttgtctctacaaaaagcccaagatcagataagcagtatatatgggaatcagcagctgagagcagctcttatgtgattaaggaagaaactgaccctgaaaaaatgttaaatcgtggaacccagatcactctctatttaagggtatatcatttatactttgttgctagtatcctcacaagcaaagttaccgtatgctgatcttgcatcagtgtttttttatttagcagttgctggaatgagtggagtatataagtgtaattgctaaaaaaatcactttcatttgtcacgtggcagcataatacttcaattctaaataattaaggatgtcatcttgtcagcaaacttccagactttcctgattagctgatgttctttctccttctcctttatttatttatttatttatttatgtatttccattgcagcctgatgacaaatatgaattctcagagccagccaagattcaaagtttggtgaagaattactcacagtttgtatctttccctatttacacatggacagaaaaatcaaggactgttgaggtgagaacaccctttgattgtgcaaaaaatacttcccatatatttggcagcctgagctgctagaaagagagataaaactgtattattgtgtatctattgtgtttgtgggtaacactgcagcctcctgctatttattccttgccttatattttgtaattgatttatagattagtatttagaggtgactctcaaatgatttataaaacgaaataattaaaaggccattctcgtacctgtttttcttcatgcttactgaatgtttttatgacacaggtagaagaggaggaagagcagaaagaaggagaggagaaggcagaggtaccttgtaaaggagttttgttttgggggcttataattcagctttttcttagttt

SEQ ID NO: 203932 - DNA, 1421 bp, Cannabis indica
aaaaaaaaaaatactaagaaaagttataataataaaatcattatgatgatgataaaatctagctagaatttaatcaagtggataaatattctaaataattaatattatgaaaattataaaaaacattaaattaaagaaaaattaagtgtgtagcaagagtaaatcaaaattaataactgaaaataaaaataaatagaaataaaaacctgaagtaaacacatgtgacataaaggagaacttctcttggaccagccatggcttctcgaggtgaagcgtaaccaggcccagccttacaacacgacgtttcactgctctgcatcttctttgacatgcttgccattttttttcgcagctcttcgtttcgatccctagactctaacaaagaagatgatctaaaaagaaaatattgtgagaaagtttgtaagcatatattgtgaataaggctaggtctctatatataagatgaatttgcttatgtagcaaaatcattataacattaatttgaatttcccacttgattggttttcttgtgagaaatgagaattgttcatgcatgggaatgaatgtataatttcacaagctaacttcatacgagaaatttgactttttaggctcatttcgtataaattgtataatattgtattgtattatattaaatttgattatatataatattttaaaataatgctatgttatattttaatttagactaaaatattatatattataataaaacgtaataaacaaacccttaatacattaattaatactaaaattagaataagactaatatttggacaccatttcaaatatacatgttcttattttggtataattaccaaaaatactcccttaataatttttaaccccactctctttttctttttcttttcttttttccttttcttcaatctaccatttctctcttctctatggatgttatacataaattactacatataagagtttgatgatttagaacttcaactcatcttaaatatcagttatagcattaatatatgtatttcgaattgttttgtacaagtattttttgggtatttttggaatttttttcgctaattttttttagatttgaacggaaaaatttgcaaaaattccatagaattcaatgggaactcgatgtccaatccaacaaggtctcaaaaatcaagtttttatttaaaaagtaattttgctcgatgaaatttgatagttgttcaatagtactctagtgtctgtttgaggtatttttttattttttttcttaaatttgagtattttttttaagatctacactttggtgatgtatgtatacatatttaagaaatttacacttcaaaatatgtcaaactttaatacaatatacatgttttgggttgattttaagctttacacttctcaaaaaaaaaaaaaaaaaaacc

SEQ ID NO: 203933 - DNA, 508 bp, Cannabis indica
agttgttgctgaaaacaaaaaggtaatattttaatttgtgctttttttctctgaatttggatgtatgatatgtgaaattgatgtttatttctgaatttggagcaaaagagtatttgtaatagaatgtcaattcactttcttgaaaaaaattctaggcttagacaacaacttaggtggcgtttggtcggagagaatgaaatagaatagaaaggaaacaactttaattctattcgtattagaatgtcattctattctagttatgtttatgtgaatttgagttggagagaataaaattggaaggagtaggcttagacaacaacttaagtggcgtttggttagaaggaatgaaatagaatggaaaggaaacaactttaattctattcatattagaatgttattctattcaatttatgtgaatttgagttggaaagaataaaattaaagggagtaggctttgaggaaatatgaaacccatgcttttgagggaattaacattacatcattttaa

SEQ ID NO: 203934 - DNA, 1133 bp, Cannabis indica
tgtattgagtcaactcttctccaacacatctcgagcaagaattcttcaactcacaggcatgcttcaatcaacaaagaaaggctctacacctgtcgacgagtacattcttaagatgagatgccttgctgatgctttaatggcagcaggacaacaaatttctgatgatgaactcatcctctacattcttacaggattaggtaatgaatatgactctgttattattactctcacttcaaaagatgtcattaccttgcaggatattcaattcttgcttcaaactcaagatctttgacttgagcaacaacagtcccctactgtcttggatcttcacaatctaacaaccaactatgcctctaagaaaagcacatctgcatctgtcaattctggaaataaaaattgaggtcgaggtgctcatcgtggtagaggtggtaggacaccaaataataatcgaggaggaaactgatcaatatgtcaagtctgtggtagatctagccacactgcaatcaaatgctatcaaagatttgatctgagttatcaaggagaaggcaattcaaacccaaccgaacctgcttcagatgatcctcaagctcttcttgcatctgcaacaattgctactgatccccaatggtacctggatagtggagcatcgtaccatgttgtggctgatgcagctaaactaaatgaggcaatcaattacaaaggcaaaggagaattggtagtaggtaatagtgcttcctttcccattcttgctattggttcttgttctatatccacacctaaaccattatatctacacaaagtgttacatgttccttccatacataaaaatctcattagtgtctcacaattcactcttgataatgatatccatatcttgtttgactttaatcattgttttgtcttggataaggtcacgaggaaggttcttcttcaaggaacacttagccacggtccttatcaactgtcattaccatcttttagttcttatactttgtcttttccttctgtgcatttagctataaataacactgatgtactttcccattcagaccagtcttgtaatgtttcaaaatgtaatatcaattttgccttttgtaaggagtccagtcaaattgctgcactttggcacaatc

SEQ ID NO: 203935 - DNA, 2237 bp, Cannabis indica
atttttaaatccttgagaaaattttgagtttaggatattaggatggaatggtttagtctcttcatctaaatcatacctggtagtttttcgtactctctatcttggaatttcctaaatttatctttcaattgtattactcgtaactgaatgggatccataggttgttgatctactttttaattaagtttgttatgtagattggtgcattttgatttaaatgtccagataggtctcgctgccttagatttaatcgttcacggaggttaggttcacgacgtctctaatcgtaattactcatggatctagtcctggagtgacttttagattggtaactacgtgagttagtcatactttcttaatctgtaaaataatgttgttattattcccgtctagcatttgtctatttgtcccagttgacctactgtgcatgtgagatcgcgactcccttgtacttgaactagcttcacgtgactcatctcgcattggccttcttctctgaaagagattagacatatgtcccctactcaagtatgtgtgtgtattctctctgtctgtgcaagaaggtctttgaggatgcctcgggggacgacctgacctagaatgatttccatgattcctcccaacattacgaggaattttttagtttcccgatcatgactatcttgcatctgcattcatgcgagatgatttggtatttcaggttgttcatttcccattcatcgaaagttcctggaacatcacgtcaatgcttctcatttcttgtattgcccgtattgggttgattttctctatgcattgggatatccttcgtatttctaggttgttctacctgagcattggtgggattattttctttcctcctagtcttaaaaccttaaggtcttcctcgtggcctccttacatatggatcaggttgagtttgaggagtggttccctgtgtagcctggctatcgcagcctcttattccaacttagtatttcttctatttgattcggccaggcgctgtcgaagttgcctattttctaattccaccaatgggacgtatctggtgggatcataggcatcttcactttgcctctctaggatctgttctcaagttgaattgaaatttccatcgttcctcccaaaacggggtttcagttggttagttctttgtgatccctgaggttcttatccatggcgatgagtagtctcctctggatagcttccttcgtgaggggtattatctgccataaatataggtttgtaattgtgtttataaagagggtattttttgagtttttattactagggctctcaatgaaagtaccaaactgttaacacagatttttgttaactaaatatataaatattttatgtaataaatataatacataattgatgacaacaataatgaacaccagatattttttacgtaattttgtagtgaaaatctacatactccatgagtccatattattaaggataataatctaaatatagattataattctctcaataaatgtaaaagatagtcttttctctcaaatatgtcatcccgtttactttaaactctgccactatttataggtgtatagagtggtagttattttgtttgggatctaatcatttacaagtgctcatgaaatatggacattccccatgtttcaattttatgcacatgggataaaccactcaaccactcttttaattttatccttaaacggctatgctgactatgaaggttatttctcgctgagtacgagttgtccctttttactgtcgttgtaggaaaaaaaggctaagtatagacatacttgtcctcgcaataccctttaactttgatcctattaacgaggtggttacttcaacgtataaatagcgagatgaatgaatgtagttattatctccatgtacacttatgtggattaatgagctgtaagctcttattcccaagtatgtgggtcaatgagctacaatctcttcaatatctcgccttaaacacttctgttatgtactttgtcaatcccaagatggacacgttgtctcgttaattatacctattaatagttattagtcttatctcacatatgcttatgtggcagcgagtttgaatatttttatcaattgtaatttattgagaaaaattatttaagtcccatttaataatgcaatctaatattataatcattgagttgattcttatttctcctgaagtacacgtgacaacttttagttgatagctgaattttaggtat

SEQ ID NO: 203936 - DNA, 710 bp, Cannabis indica
aaaaaaaaaaaaaagacaaacaacataggaaagtgtggcctcttgctcaccaaatacaagaattggattagataatactgaacaaatttgttaagccaaatcataaaccagataatagatataaatctattgaatggaactttagttcccatgtcaatgattatgacatatggataatatccatctatgcagatgtgattcagatagtacttttgtcatttatttttatgctgtgttaaaaaatttctttcatttatgatgaacctacattgaaaataagttcaatgcagatgccaatatcattataactatacaacaactcatgtcaaaaccttccataaaacaacattctcaaatgaacagtcactgctagtgacacaaaaaagccaatttattatattcacaaagttttttcacaaaatacattatagtcttaagttaagcaactttgagcaaagttatcaattatcatgtaagtgatatagtgaatgtagtacccctagttcttcatgctcatcattgtcctcttcttcctcttgtgactcttctctcttctgcttttctttagctttacttgatcccgaagccttctcatctttgggttcactgttagtaaagaagaaattgtggtcaggacgcatcggccatcctatttggaaacaatcaggagacctgcaaaagcatcagaagatgttacaacttcattttaa

SEQ ID NO: 203937 - DNA, 2178 bp, Cannabis indica
aggtttctcatacctttcatgtgcttattttcatccttttagaaattcataaataccctcaacttgagtataaacttgagcaactaatcttgcctagttttgaatgataatgcaaaactcatcactcttgtttttgaaaagccactttgttcctatcataattacaattggcagtctttaaatcaaggtccactccatatttcgagtgagttaatgaaattcttctagcattgcacaaagccatgcttcatccatcaaggcttctatccctgttttgcgctctaaagaagaaaaaaacacaaaaattaaatcacattagcaaactttcttctagtaactatgctttcatctatgcttcagagaatgaaatcagttagatgattctttttaaatttggaagatggttctctctgaactagatcagtgatcaagtatggtggttgctcattttctttcttggagtttctggaaaatcatcagctgtagcttcagaatcttaacgtgtaactttagaatcaaagtctgttattgtagctgaatcatctgccagtgccaatgcagtggaattttttagcaactcttcaatctcttcatctatagaatactcagagaaatcttttagattatcaacaacaacattagtagattccatcacagtttgggtattcatattataaacacaataatccctactgttaataaaatatcatatgaacacactaacatcactttttgcattaaatttaccagtatgatcgtgatgtcttaaaatatatcaagcactaataaacacataaaagtggcttacatttagtttcttacctttctagatctcatcaggggtcttaagagcacctggacgcaaaaagacttgagatatgaaaataatttgtgttgttagcttgagctcaaagacacttgtgagtgtcttgttgtttaacattacactagcaatctctgtcagtgtttggttctttcttttaaccactcaattttgttgaggaatttagaagcaaaaaattcatgagaaataccgttagatttaaaaaactcatcataaataatattttcaaattctttttcatgatcactcctaatctgaacaatttttccaacattataatctatttgaaaacacaatttcaaacaaagagacgtaaaagcattaaaaatatcatcttttcctctcaacaaatctacctatgaaaactgagaaaaatcatcaacatacacaaaaatatatcttttacaattcaaactttcaatctgaattggacccatcagatccatgtgaagaagcctcaaggaattttgaagtatatattcaagtcttgaacatttctatgggaaatttttaatctcttaccaagttgacatgatttgcatttttcccatagattctttacccagtttggataaccctcgaacaattcatgcatttttcattttttttcaaacatttgggaagaatgtgtcaaagtttttcgtgccataaattaacggtgttacctatggcagagtgacaagtaacaacataagtgagagtataataataatcaacagatctaaaccctaacaaaatacattaatttttacgattatgaacatactagtgattaatatcaaaattaattgtgtatccttgatcacaaatttgagtactcggtcaactagcatgacatttttcagcttaagtagaccttcaatatcaattccaatgacattactagatagaccattcccaaaaataactcccccacattgcattggtctaatattgacaagaaaatatttatcacctgtcatgtgtctggaaccactattaaaatacaacatttgagaagaaaagaatattacagcatgaagtgcaaataaaacaatagttttgaaaacctatttttgttattgacaaacatgattattttgatatactttaaaatttctacaatatttagacttaaacatgttttgcaaagtaaaatatctaggtcgaatatgatcttttattccacaaaaataacaagaaagaataaatctattcttttttttttctttagaattgtcaaacatacctaactgcttttttcttttagaaacaaaacatccggcaaaagaacaaggaccctacaaaggagagtcagaacatctagaaagaaatttttcaaatttgacaaattt

SEQ ID NO: 203938 - DNA, 268 bp, Cannabis indica
ttttatggtagtaattactaaaccaccatcctaataatttcctaaaaaaaaccaactatctccctaaaaggaaacaacaagataaaataccaacacccaaaaaggaaaaaataaggagcacccaaaatccaccattaaaattaaagtataattatatcatttcatgtataggaggagtatcctaaacatatcatatcctacttgttattatcatttaataaaagagagaatacatacagtaaattgagtcaattcttaaacggtcaat

SEQ ID NO: 203939 - DNA, 990 bp, Cannabis indica
caaaaaaaacatcatagattttacaatcatctcagtaccaagaaagtaaataaagatccataataacacacaactagtaaatagtaataaaactgctacaacacatgcatgcatctaaaataagataaaacataatatagttcagttgtttctaataatattaattaatttctcaatcttcataaaacttagggtcactcaagaaagcaaagttattcccaagatcattgagtatcttttgtttctcattgaaccaattacttatagtgttagattcctccttgagaagctttatctcattcttcaactctttacaacccaaagggtcagccttcaatccactaaccatttccttctcatcattcttattattattattgttcataatactcattctcaacattgaacttctactctccaacaacttggctctcttcaacattacctatatatacattgaattaaataaataagttttaattaataacctaaaatcatttaatacatattgtgtaagtacttcatcacctcgtattctttgctaaaatcattaaaaatcttagttgccatcattgcattcaaatttccaatagctaactccatgtactctgcacttcatatacacatatatataagattatttcaaacaagcaatatatgaaagtagtttacatatatttataatgctaaccttcaaattttccttgacattccggacacattttcttagaagcaaaagtatatctccctaaaatgtaagagaaaaaaatagagctaataagaccattttattacattttatcaagtatgttatatttctactttagctagagccaaacaccataaaattacatcacaaaaagagtgttgatatataaaatggagacaaaattggcttaccttaatgctatagctagtgaaagtttaagagagagagatgatagaaatgatggtgtggttgtttggtgatatagatcacagattttatag

SEQ ID NO: 203940 - DNA, 693 bp, Cannabis indica
taaaaataatttaatatcaaatcttatattactctaatttaaattaaaatgtgtgacaaaaaatatataataatgtcataattaaattgtggggacactacataaacatatcacatgctccaagtttaatcacgaaattagagactggccaaaagagaaatgtaattaatgatgtatactatttatcactatttaagaatattattggtataagttaattaatatagaatcaaatatattttaatttaccttaaaaaatatatatattaatttaaaattttgtaataacaaaaaaaaaaaaaccagcaaatgctcaaaataaaatgacttactccatgtttatatcataagagaattaagattcctgttaaaacgtgatgctcatacatcatactttattaaactaattaaatttaaatacacattaattattaactacttatgttaattcaatcaaaaatttaaatttttaataaataaaaaattaattaatgtgtcaaatttaatatgaaatactactttttaataagagaaatactaaatcagtggtaccaaacaccctcatacgtgtcagtattgctatttatttaatttagtatcgggtctcatataatttaatataataacttttaaagagtatcgctagtcaattgtaaagcaacaccgatacagaataacaatgctcttttaata

SEQ ID NO: 203941 - DNA, 1546 bp, Cannabis indica
caaattggaagactcattgacacactaaatttgatcccaccaacataagcaaatttggttaagtttggagttgacttaattacaacactcatttcatcatcaaaagggttatctacatagagttgtttcagctgctgattcgagatttcaacttgttttaacttcataggcttaggcccgttgtaaaaagccaaattctcaaggagaggaaggctagaaatgagatattcgaatgatgatgactcttccataccccaacaacaagttaaggagagaaatctaattgccttacatgcatagagttttatcttgtgaaaggaaacacccactaggatcaaagactcaagatttatgagttcgattcgttctaccaaatccttagagagtataatttccaaaaacttgaggcttaaactatgttgtatgttgatgctgagctgaggatcactagacaaacaaaaaaaatgcaactgcaacctctcaagggaaggggaacccatcaatagattatctactacaccattatctccaagcctaacataagctaatgacaatgttttcaaagatggaaaactaaacaagtatctagaatccaactcaaccgaatccaagttcaatatagtcaaatatcttgagttgactgctagtgttttaggcaaggggtagtagtgaatatcaccatttatagttattgtactgttcacgcaaagatctatttccttgactttcttctcaactatgaaagctaaccatttatctagatggccagcatagattgatttataagaataattcatttgaagcttaaaactagttatgggtgaatgggggataaaatacatggcttcctttcggtgttccaaataattatcaacataactgtaaaacatttttgggtgaactttcaaattagaatccgaaaaagagagtttggggacacaataccacatgagcttccaacgttttgaaactaagcaagtggaaatggcatccttagttgaaagaaacgacagaatacgaatgatgagtgtatcgggtagtttcgaaattctgtctttcttttcaccaaacatcaatgtcgtcttagctcttttcttagccataactactaacaccacagagaaagaaaagaaaaagaacagagaacttgtgagttaagtttctttaaagagaaagaatcactcataaaatatgcaatgaagagtgaaagaaggtaaagaatgtgcaaatttcttgtgaaatcaattgaatacgattacaggaaacaaattctataaaattaagacaaaatagaattagtaattattgaagaaatcaagaaagttttgtttgttttttgtaatcaacatgaaaagaaaaatgtacatattaccggtattgatgaatgaatggattaaagaaatgcatttcatttgtaattaaaagaataataattaagaatgaaaaaggttagaatggtcgatacttacttgttagaaacaataatggaattggaagcgaaagagtgagaatgattgaatgaggagttgtttgagtattgtgtaat

SEQ ID NO: 203942 - DNA, 853 bp, Cannabis indica
aaaaaaaaaaactaaactaactaacaaggcaactaacttaactaacacacttgtaagcatacctagtgagactataaccaactaattggctggtttttcaatcacaaaccatcacagatacactaaaatgttttaaccactttgacactctatcatcaagtcaagttgtcctaatccatataattcctctcttaacagttgctttgtcatttttggaaagtaacttggcaattgttttgttatttagactttacttggccaatcttggtcaactttcttttgaattgcggatggatttggccttagggttctccttcagtcgaggtggtgaggttttgttgcaatgatgctcttccaattacgtacatacccttcttttgttgtcttattttcaatttgtttagtttgtttgaacaaagtttgttttgtttgtttggtttactctttgtttggattcatgtttaggcttatttttatttatttgtttagcaccttggactctgccctttagtttgtgttttgtttggtctattcctagctatgtatccactcgtgtagtgtcgtcgagacagttcaaagcttcactgcttatttgtaagatttttcaaaggcacaaattgagtttgtgtggtttgttgatgaggtcatgaccctaatgtgattcttgtgttactcctttattgtaatggtgtggtttgtcatttgtttatttgtgagatttgtacgatttcgtttttgtctaatataagtataacaattgaataaattttctttcattcaaaaaaacaacgaacatttatgtacattatttagcttatttttgttttgtaagtgttgaccgagtttttcggca

SEQ ID NO: 203943 - DNA, 974 bp, Cannabis indica
tgggcgttgggtgcctgggcacttggtgctcaaaaatgcacttgcttcgaatttgattctaatgccacaagtttgtgagtggtatgtctagttcatgtcccaaaaattgaaaccctagttgggaatgtcaacttgggcaccgggtgaaaccctaggagcccaggttagcttctggggtgcaggtttgtgtaattttagctgtcggggcctgaatatgattgctccatgtcttcatggtacaatatatattgaaagatagtgaattggaaatgatttattgaagtccaaacttctatcacggagttcccgaagtcaacatgggtacagggctacgaacccatccctagccaaattgctatgactcaggactaatcagctctgagctatcatctttcttgccatgtgtcaaacattgatgtccacgtcatcatggctactcttagtgttaacaaatatgaaattaaagagattagggttctctactacaaaaatacttttcccatcaattcacaaaactaatgggtgtgggtgccataatttggggtttttagttgttgattgtcaattgatggaaacaaaacatttcccctcagttatgcaccgacgcaaaagcaaaataaataaataaataaactacagatttaagaccgtgtctttcctcagccgtggctctatcctaccagtcgtggctttcctcgatccaaaacaaatcttgaaaaccaccctacaccattagagctgatgacaacaaacctgaaaaaaagtgagatcgattgagagtgagagatgtgcgcacgatagagagagaaatagataagaggcttaccggtcgtggctttccttggtttgacgagtgggctctcttcgtctagtggccgccgtgagtttagagagagggagaagtagagggggcatgactttgaaaaggagagagattcaggcctttgacggggcgggcaaaaatgggtcataat

SEQ ID NO: 203944 - DNA, 1687 bp, Cannabis indica
ttttttttttttctatttttggtggctttaattttttgatcaattcctttttttaagatgagatagttgttagaagtatttttttttttattgttctaacgccatattagaattgtaagttgcatacattttatctcaaaattaattagcaataagagaagtaactcatggatcttatatattttattatcttttcacatattagtaatgtaacactctctaacataaccttataatttttataatactaggtgaggctggcacgtgcatttgcacgtgcctagctcttttgctccatttttatttattattttttttttgttttatatttattttcataaataattgtatgaaaaatttctataatttaatttttatatcttaattataatgcatattaaaaaatatattttattaatatattaaagatacaagagtaaggacaaactctaagagtgggcattatagattgtttaaacaccactttttatactgttaattattctaaatttatcaaaattttgtaaaatgttttaaataactacaacatacgcaccataaaaaaatagactaaaaagttcttctaatttcaaaatagtagaaggtgcatcggtgcaccctttttagaggtgcactataaaattttcctacgatatatgctactatcaaattttcaacctgtaatcacttcaaaaaaaaaaaacaatattaagcaaaattcaaaacttagagaaaatttttagtacatctcttgaaagagtgtcacagtaaatcttcttatatattttagcatccatgaattttttagtccaataatagtgagcactccttatagatgagctaaaatagctcaatcttcaaattataaagattactattcattgagccaaaaaatattttattattatttaacatttttatatatgtgtgttatactattgtatttttcttttataaaaataaatgaaatatattaaaaattaatatttaaatgatgtaaagaaaaaagtaaagaagttgatgtatgtcgtattgtaaaagtgtgatgtaaaataaaaaaagttaagtttcagtgaggtattttgaagaatagagtagagaaattgatgggagtgctcatgtcaacatgtaatggctggtgttaactctattcataaatttatttatttatttaaaaagaacttaactatttaattaattcattttaaaaaaatatatttaattaattacgcacataaaatatcacatgagcaacagataatgatgaccacatcatattttcattagagaaatgctaaaagatattgttggtgcctagcactctcttaggtgtcatatcgctattagtgtaattaagtattgtgtctaatataatttaatgtaatagcttttagagaatattgttaaccaatcataggatgtgatctctaaaaggtgttgagcaccaccggttctcaataaaaatgatcttttttttttttaatgtagagtattgtcattggtcaccagtagtacccatcaccttctagacgtctcattttacaattagttagcgatactttctaaaacttattacattaaattatatggaactcaatacttaattatactaatagtgatattaatacgtagtaggatgaaccactcatttctctttagtgtatttttatgactgagataaaaaaaa

SEQ ID NO: 203945 - DNA, 549 bp, Cannabis indica
acaagaaaatcactttttgccggtgagtttgttcgccgggaaaaactacgtgtaagtcgtcggcatagcttttcctttgcctttgctcgccagaaaaagctactggcaatagcttgtcggcatatcatcttttactggtaaggttaatagatgcgtcggtaaaagtatttacactggcgcagttgtttgctggcacaaagacaccgccggtaatggtctgccggctgatgtgcctctacgacattttgccgaggagttaagatgccgacagaacttttggtgggaatttagcaccaaataccaatttggcgcctactatttgttggcgaatttttgcactggcaaaactaaattaaaaaataaaaaattaattgaaaatacgtttgccagcgagtactgcgctgacaaaacgtaataaaaaatataaaaaatagaaaaaaatacttttgcaagcgcacacaaaaaaaaatatacaatataaaaataatacttttgccagcgcatttcaagcgccggtaaaagtattcacaaatttttgtaaaaaaatta

SEQ ID NO: 203946 - DNA, 837 bp, Cannabis indica
tgttctttaattttatactaacttgagtgcattcaataacaagtaatcaatgaacagttgactaagattcttgaattgcatcacaaacagggtctccttaagagaaatgctaaaacgaagctgtagtgtctaacaaccacttatgtattaatattgttattggtttaactaagtattgagtttcatctaatttaatataataacttttaaggagtatcgctagccaattataaggcggtatgtctagaagtgttagacaccactagtttccaatagtaatatatactcaaatcttgataaaataataatagatgcaatttttccaccgaattatgatttttgctcttgattttttttttttttttgaaaaaaattcctccccactatcaaatcgttgcaattattcttgttatattatgttcattctgttaaataatttgctctgtagtactagtctaattataaattttaaaaacatatatctaacagttgtatagttcaagccaattttgtttttgtgggcaaaataacaatatcacaattcataatgagggatatttgttctaattttttatttggctaattagtgttttctctaaacgtttctggctattaaaacttttctctaaatttaaatttaaagacttttgtccaatttcatttaattttataaatttagtgattattcatgaactaaattatactccataaattttaatatctactaaatcattcaggaaattttttgaaaggaacgatttgatatatgtcaaaattaacttttttttttgtgtgtgttttttcaacagctggtgtcataataacacaaagaagtta

SEQ ID NO: 203947 - DNA, 1154 bp, Cannabis indica
ttacactaaaaattattatgaatactaaaataagtaacaagtgcatcagtacatcattttgaaaagtgtgcattagagaggatcacccaatatctttttttctgtcctttactataattatgataattgatgatagcgtatctcgaaatcaattaaaattttcttattaaaaaaataatattttcaagttgtgaattgaaaaaaaaaaataataatttgtgttgcaaatcatcaaaacattttcaaattacgaattgaaataaaattaaatcatgctgcaacttacagttgtaaagttctttctcaaatacctattttaaaaaataaaaatgaaaagatacagctgtgttattttgtcattttcttttgcatgtggtttgcacatttttcttgtgggctctcaatcattgtttttatcttctaaaatattctaaagctgaatcataaagcaacttcccaacaagtgtgctttttttcttcttttctttttatttccgtgtaacattatttcataatttgaataaataattttacttatagtaggtcgtacaaacaattatgatgctcaaaagttacacattagtgttatattattttataatataagtatagattaaaatacaataaatatattattatgtgaataatatatattaagtgtatgggtaaataaatgtgtaaacctataattttataacatacacttttataacctacgtgttgtaacttggagaggaattacaattggttgtcatttataactcttgtgttgatcacacactattagtgtaataaaagggttgttactcaatttggtttaagaaatttaaaattatgatgatatagttgttgcaaaatggattaatactaatttataggagagaaatgaggtggtgtgtttgaattctaagtgtgatcacctaaacactataaaaaaaagtctttggtgctcatttgggatgatcaaattttctatcaagaaagcactttgctagaaaactctaaaaggcttgataatttctaaagctatttctatgagagtttccttagtgcttagagataagggaaataagtttttggataaaggtgtaataccttgttcaagtcatggtgatccccactattgtacacttaaggttgtgagtgagtgtata

SEQ ID NO: 203948 - DNA, 1016 bp, Cannabis indica
cacccaacaagatttacacacaacgtcttaattcatgttaaggcttgagacataaattggtcagcttgctactgttgtagctgaaagggagaaaggaaaacttcctagtcaacctgttgccctggtatttttccaatatacctagcaatcccactatgagacacgtggcaggtcaggctctcagactcagagataattaaggaagagtcattacataggccaatcccctcgagatagctcaataactactccgggggccaggccccgatctggagaggtcctgtctgacttcatctttgggagctggatggcgtctagctcctccaaatgtggggtactggagatgaactgtcagctagcatttagtgcaggatggagaaagcttctatgaacgcatatgataagacgtctcatacgccataaactcgtccttcagcaattatgcgataatcaaggctataagtgacgactccattatcaacaatcacatcaatcaaggaaggatgagggcttatctcacctaaaccctacgcaacctactacataggttgcgcatgccctactttgtagatttgggaacttgtatatggccaaggcaggaacttaggacaattgagacctttcttcttcttgtcaactgctataaataccccttaacaaaatcaatgagaaggtattaaaaaaaaaggcacaacattctctgtaagaaacacccacttattaatatcaaagactcgtagactaaggctcattaatgctccaaccacgtaaaaatattttcctttactcttcttaagccatctttattattttaatgatttacttgcctaaaatctcggtcaatattttggtgctttcattagagttgtagaaagctttactcacaaaatgacacgagaagacccagagtaaactggtggagactaaaaaccacacgagtcaaccttgtcccccccaagatccccagagtacaggggacgaagagctggcattgcgagtaaacgtagatatagaag

SEQ ID NO: 203949 - DNA, 1110 bp, Cannabis indica
tctttgtaccatcttcactcccttaagcaatctcaaatacctttcctcagagattcccaacaagatgttcttcagctctggtatttcactcacagacacttgaacagagaacgtctcccaatccaaaacatcgctgaaaggcagcacataacgctgagagattaacacagggacgcattccgcatagattgcctccactattctcggactcgccacctcgtgcccactggggcatatgcagtacctgctcttcttcaacttttcctcgtaagaaatgccttgaggcagagactcgtacacttgcaactcttcgtctttgtctttccaatgctgcagcaatgccggtcttattcggccatggcgcctaccagcgaaaaatccaaggattttgcgctctgagagtgggaggccacctgtgaggcctctgatttctcctgttttgaggttgatttcagggaatgatgcatcttttttcgggttgaaatgctcggaggtgttggcattgcaaagtactcgaattgcattgtagtatagctctggaacataccaagttgctcttggcccctgcaatgaagccacgttagttcttaagtagtgttctctcctaagacttacaaactgtcgataatgattagttaacagagattttctcatttataaataatagctctctgtctctgcttctcattgaagctttaaaccatttcattagtgtacctctaatttatcacagcctttgatcattatcttctcctaaattctctgtttcacaaacttttataatacaatgtcctcattaatcatcttaataatataatacagtgtcctaattgacaatattgcatttaatattatgaatttcatatgattggatgtgcaatgtacaactagaaaaaagaaaaattccaattgaccataattaatggctaagttcaagtgtaacaaccaactaagaatggatttatctgaaaggaatgaaaatataaaaataaaaatagaattaaatttaaaatgtataaaaatcattataaaaaatttaatatcttatattagaatgatatgtttttctatttcagaagagaataataattctatcaaaatagtaaaaaa

SEQ ID NO: 203950 - DNA, 732 bp, Cannabis indica
cttttattattttgaccttttttattttttgtttgcttagcctaatataagaaaggaaattaggaatgatttttgggagtcattaattttgcatatataggattaacacaaacgagtctagctcttttaatttttctttttttttttttccttattgttatttttttacaactttctaaaataaaacaaccacaagaagttaattgaattttcttttgtttttatttatgtataaattataaaatgtaatcatatgacatatatcatgttggtcaactccataactactttgaagaaaaagaaaaaattcaagtacgagaattttatgtattgtttttgtctttttgatattattgctcgagtagttatcctatatttttgggagatagaggcctcactttattcaaccacaaatgttatttttagttaatttttatattcgaaatcaaatataattttttaagtttgaattatttaaagtatcgaaaatagaatttatgatcattaaatttattatgtatgttcaaaaaattttaacctatttttgtcaccctaaattatttaaaaattttcaaaattgtataaagataatattgtaactataacgagcactctcacaaaaaaaaaaaaaaataatattccaacattagtttttgagtataaaaaagttcactataaaattttcttattcaattacattttgtagactgttttttccttctttttttcttt

SEQ ID NO: 203951 - DNA, 1847 bp, Cannabis indica
attagggctcagacaatagaagatagcaagaaacacagaagagaaaccagaacgatcaagaacgataatggtgtgcgacaagtgtaagtctctattttctttcgttatatcttcctctccgcttcatgaatctccaaattctcaattctgttttttgctttctctaatttctgcaaatttatgatgatttccgtattatttatttctatggaacttttcaggtgagaagaagcttgcgaaggtgatagtgccagacaaatggaaggagggcgccagcaataccacagaaggcggtggccgcaagatcaacgagaacaagcttctctccaaaaagaaaaggtttctttttttcttttttctttttaaatccttttatatttacacgaattctctacatttttttatacgaatggaatagttcgtgggttttcttcctgtaacttatttagtatgcctgtattgatctatatacatatttctaactggtgaacaaaattgggatttttcttatttaattttttttctttttcattagcagtaccctttttgtaaaatgttatgagatgccaatttggagagactacaatcaaacaatgctagctctaccttgtttctgggcttatagtgagcggttatagtgtttactgcaaattttagattgtttttggttgaagttgttgagttaaatcttaaaagatttttaggcttaataccaagtataggtggagttattgtcattatattatacaaactatttctaatgcttacagaaaaccctagcaaattgccccgcaggtctcgatgaccatgaggaattgaacccggatctcataagagcagaacattagcctctggcagtctgaccatataataattgaaaactttttatttttatctactgaggtatatagatttttgacccaagaccaagaggagtaaagctcaatcggtctggtcaggtctgttgtttgttcctcccacaaaatataaggttctacgcatgtactgtacatagcaaaagcaaatttgagagattttttggcataaaagtaataataagctatataggtctttcaaggatttgttcgtagttggttagttcagactaatgattgagttacttttactcattctgaacttgaataattttcttctttcctgtttgaaaatttacctccaaaatgttgttgagacatctttttccttacaggtggagtccttacggaaataccaagtgcattatatgcaagcaacaagtacaccaggatggtaaatactgccacacatgtgcttacagcaaaggtaaaaaatcaataataccatcatttgtgtctaactcatcttttggcttaatgccacaaaatcttatgtggattatgctgtgtacaggggtttgtgccatgtgcggtaaacaagtgcttgacacaaagttgtacaaacaaagcaatgcataactcaaaccacatgtgggcgggttcacattatctgatacatccggtaaagcttcatgaccttgtggtttttgtatcattggtccttgtctataagcacgagaacttattatgcctgattgaaattcagctgtgaacaaatttgtgtagtcaattgttgttataatgatctaatggtaattaaatcctcggctgatatatccgttgttgtacaatagttttatttgactttgaaggtctttattgaggtttagttgagcttaacaattaattctcttctgcacaagtgaagtgacaagtcatcctgcgattttgctggcagcgaccacatgagtggttgccatttcttatcaattgacacggtcccgactccccacagaattacacgatctcaca

SEQ ID NO: 203952 - DNA, 635 bp, Cannabis indica
ttaatttacaaaaaaaaacaaaaaaaaacaaaaaaaaaacaaaaacaaaagacacagaaaaaaaaaaaagcatagacgatgaagtagtcattttcataagttttactgatgaaattaatttaagtaaacaagggtagagtcgtaatttcaaataatattgcatagtactcgttttcttttttatgggtaaagaaaattcatagtatatttaatgagatctgatgacacgctcaaaacaaaaaccattaccggtcccaactgagcatggagcaacctctattcgccgaagacgactccaccagcacaacctcctcctcctccaccgcaattgcctcactaaccgaagatcagggacaacagcgtggaggcacgcgccacccagtctaccgcggcgtccggaagaggcggtgggggaaatgggtctcagaaatacgagaaccgcggaagaaatcccgcatttggcttggatcgttccccgtgcccgaaatggcagccaaggcttatgacgtggcagcctactgcctcaaaggccgaaaagcgctcctgaatttccccgaagacgtggatcatctccccaaaccgtccacgtgtacggccagagatattcaagccgcggcggccaaggcagcccaact

SEQ ID NO: 203953 - DNA, 1412 bp, Cannabis indica
ggctcgagaagaaccatctctgaatgagaaccaaagaacttcacttgttgcattgacccagtgggttgttcattggcactcaccacagctaggacctccttctctagagattttgctggctggatggtgagttggcctgatgatttcttcttgttggttgtggttttggccctcttgggtttcatagtagaacccgaagcctcaacaacttgggcaactctcttcttagacttcttgtcgactgggggaggactcttgaacatgttctccaaatctagatccatatttgcgaggtgagacaagtacattagtacataagaaaaataaataagggaaaatggggagtaaactcccacttgagaaagttaccgtaatttttaaaaggtgacgagggaggactataatattcactaaattccctagatcttgtgatcataaatatgtcgtaagggtttagaggacctaaatcccaacttgaatctatatgactcgatctatccaacatagtcccatattgctcggcaatcccatagtaggaactagtacagctaatttgaacgtggaattccgggtaccaactatcgaacctatgtgttatgcgatctatgagaaaaggattccatgtgtaaaaattgtattgactatctcggaaagatactagggtatcacgtttggccctaagcactgtaggtgaccacccacattgattacctcgggatgcgccttcttcagcttctcgaggggcagttctctagagataatgtgcgcgagccacgtagtccacgctctctttgtcggctggaattgggaccttttaccacgaagaatacttgagtactttgtagtcacaagtaaattcatccgaggcaagaaggcaacattcttcagattaatctcgttacataagaagtctgccgatctcaaaccaaacagaagattcaacaagattctgtgacgctcggctatctcaggagtaggaactggtctttgaggaaccactgtaaacagataaaagtttaataagcgacctcaaaaatgcaaaataatatatttcaaggttaagtttctatgaaagagaacttacatataatgtgaaatgcggttgtatttattagagggagactcgtcttccaaaagaagtattctttaaactctatcttatttggtaacctaactatgatcatgtgctcattcgtgtgggtgtcgagatagtaaaagcctgtagctcgattacttgtaggaaccgtcttaactgagtaaaaatagactatctccaatggagtagggcactcccatcctaaaatattgtataggaccttcaagctcgcgaggatcctaaatgagatgggggtcagctggatgagggcagccctgagatagttccagatttccttaaagtaatccctaaggga

SEQ ID NO: 203954 - DNA, 424 bp, Cannabis indica
tttaggattttttttctttctattttgaactatttaccattatcaaatattatccctaaattatttttattcactaaatatgactattattattaattattggtattcgccactttctataagtagtactttattagcgatatttattaaaaaaaaccttaaattatatggtattctttacataattacactaataacgatattatatcacgaaaaatactaaacaataatttttagcaattttcattaattattcctcttgtattattcacaatatacaagaattttattaaattttagatgtaacatgtataatttaaacaaaaaaattagtttaaatttttaagaaattcttttccaattaacaattataaaaaaaaattactttcaagaaaaacgactaataaaaaattaaaaaatattt

SEQ ID NO: 203955 - DNA, 687 bp, Cannabis indica
tttgtacgtggcatgtgtgtggtgtgtgtgatcatcaatatatattatatgatactccatgaaatatagatagtcatattttttattttaatatcgttttagtttgtttggtatgtaatattacatcgtattaaacagtacgaatatatttatgtaaatttatatatggtattgactgcatatttataatatttagtatatataaattaaaatttaatataatattatataaaaatatgatatatataatttaaattataatatattacaatacaataccacatagctaatacaatatatcaacgggccaataattatattattttcaactcttacttgttatactatatatttgaaaatatacacgtagatttctgcgtacattttttataaatatatattttatatattcattcatggggctgctggtttttggagattatttaaggcatggaatattcctttcaaacaatccataagtggaacaattatttaattaactaataataattcacgtgtacatgaagagaaaaaaaaataggaatattttgctgactctttgtccacctatatatagctttgagatgaataatgaattaaaaaatctaatttagctaaaataataaataaaatacttatacctagacgtacctaataaatgttgttctatatatatatatatatagt

SEQ ID NO: 203956 - DNA, 1752 bp, Cannabis indica
taaaatcccacttccaaacatagggtaaaggtttctctatctgattgtatgtctgtcttgtcttctttttctttaaagtggatcaaagatcttctcgacgtttattggctttcttaaaagcaaagaccccaacgatggaactgagcaagcgttacttgatgagctaagttctttcaatgattatctcaaagaaaatgtgagatctcttctctctctctcaatcaccactacattctgactgctgccttttatttattaattgagtttattttctttttcaagggtccttttatcaatgggaaagatgtgtctgctgctgacttggctctttcacccaagctctatcatctagaaattgctctgggacattataaaaattggtctgttccagattcccttccatttgtgaagtcttacatgaaggtatgtttctataggagagtattagaactttaataattgatgtgtacccttatttgtagaatgttttgttagcttttgttaaataactgtattctagaatgcactacttgatttcctcctcttttctacatattttaacaagtaaatttaccgtttctattttcttccaagtaattgctttggttgtaactttttaagttaggaattcatcattgtacaattaatattttaagttagagaatgaaagataaatttggagaaatatgttactgatgcccaggaatttcaaaacctggttctttccttgttgcaaagctctcaatataaataacagctggaatattgttaaaatctcccaattgatctgacacgcattacatgctctaactttccagctatataaagccataatattctttcaaaaaatataaagctgtataattagtacaatgctgcatttggtatcctttctgaagcttcgattcatgacgaaaatgtgtttgaaatccttcacatacttactaccataactcataagtattgaaatggttgcattttcagatgagctacttctcatctttttcctaagatgcaatgtatttatcctttcagttttctataaacgtttaggtcaatcacttttctgtctttttgaattttgagctgaactagtgtcaagctaaatgtaagtagtttacatatatgtggcgatgtatgtttgtacaatgtagtgtgacattgagtttatttcatgcagaatattttctcaaaggattcatttatgaaaacacgtgcactgccggaggatgttattgcgggttggcgtccaaaggtcatgagttaaattcgtctaaaagtgagagaactaaagtctacttatttgaaatggtattgtagccttgaaatggagcttctaaatgctttgtttgcattcattgttaatttgtatttcacacttgtgcaatacaaaatcgatctagtgacatgaacatatactaaatccataaattccaaattattgataaatttttgtatttttttagtgtcttaaaattatacaaataatcatttcgctctgcatccttttagttatgtagttagtcatgtaattatatgcaaattttaaaatatttttgaggtcacattgcagcgtccattagttattgttttcttcaaaccaaacggtatagaagtggctactaatagtactacatctaagagacgatcagtattaattgagaagtgccaaagagtaactaggggccttaaatttaaattaattttaaattgaaataaattggactcactactaaattgtagtagtgacga

SEQ ID NO: 203957 - DNA, 908 bp, Cannabis indica
agtagaagtttggaaggtttgggagactagaaactaaaggtaataaccctagtgttcttttgtgaagttttgaaagttttaaccatgtaagttagaaatttaggttctgttggttatggtttttgtttggggatgttttctatagcttagtagtgatattttatgcttgttttagttggttttgttgattgattctaaagtggagcaagtttgagttcaagagctcaaacttggctcaacaatggtattttaaaatttttgtatgttttgagattctattgcttgaaaatggtctattatgatgttgtttggtgatttggagcctagtatggagtttgggattattttgagtcgatttggagactttgtttttctgcagtgaaaaacggcaaaacttttttgcaaaaacggtctaccgtttttactaatacagaaccagaaaaatgacttgccatttttacagaaacggcctgccatttttaggaagtttttcgtaatatcgttttttttttatgttttctcgatatttagggtattgtagtgctatttatcaatatgaaaactcatagtttgattttaggtccccagaaagatcttagaaagttgtttacctattttacacaattgtgtcatagggcctctgttcagcgtgtaattttccattcaagtcgaccaacacacttgaattcagaaagaaggcaagactagcatagaatatatgtatgtatatgtgtatgtgtattatatgcatgttgattatgtaatttatatgctaccaacgctagtacggtaccgatactgagtggattggtacagtatatgatgttcaaaggatacgatctagtgtaaccaacactagtactgtaatgttctaatctataggatcgccacgtgtgtgattttataaa

SEQ ID NO: 203958 - DNA, 801 bp, Cannabis indica
cgtcaagtattagataaaaaaaatggcacgcctcttgcattgcaataagtaagcaaaacaaaacaaatgatctctatttgtagagtttacacttcattaaatttgaaacttatccacctaactaatctatcatcatattcaaatgaatatgtaacacttttttacaagagtgtttatgccaaaattacaaatattataaagaataaatttgtaactgcaatagatgttacatttgacaatatgattttgttaaactcttcttatctgtcacaaattatcaataaaaaacattatattattaaaataacatgacaaagggcttcccctccactcctgcgtggtcaaagcattagaaagtctttgttcaaaaacatatttagcaaatataaacacataagttcaaagtatgaaaggctgttttggtgaattaatagtcaaagtttgttacttttggagtgattttacagctcccaactctcttcattacttttatcttcaactcatgcatgcatgctacatcttctccagtttcttctttccatctcttctactcaatttcggagagtgagatgcttttattatttcattttatttttcacttctgtatttcattattataaatttttatctcacatcaaaagaataaacaaaaattgcaatataagtgttccacctactctactaatataaaatcttttgagacggtgtcgaaaataaaaactggaaggacttaagatagcaggcagaaattataatgcaaaatatggagaattcattcgtcaaaagaattaggcttagtag

SEQ ID NO: 203959 - DNA, 2036 bp, Cannabis indica
ggagtcttttatggtgttggaaccaaaaagaagcagttttggaaggagagggcgaagcaattttggttgaaggaaggtgatcagaattctaaatactccatagggctgctagtaatagaaaaagtttcaacaagatttcaaagctcaaagattctagtggtaattggaaggattgggaaaatggccttgcggatgtcgtcgtggattatttctcttctcttttcagtgcatcgaacttgagcagtgacatggtggttcagtgcattcaaagacgggttactactcaaattaacaaagatcttcatcaaccaattcttgccgaggaagttcggaaagctgtgttcagtatgcacccagataagagccctggcccagatggtatgactcctgtctttttatcataagtgttggaatattattcagtttgatattgtcaacgtggttcaggattttttcactacaggggagtttggcttagcttgcggcgatgttgatcggaaaaagaaagtccctgaaagtatggttgatttaagaccaattgctttatgtaatgttctgtataagatcatcactaagtaatggctaataggatgaagccttatatggaccaaattgtatctgaatccgaaagtgctttcattccagggagacttattactgataatattcttgtttcctttgaaattcttcactacttgaagaggaaaagaaagggcaaggatggttatatggctttaaaactggatcttagcaaagcctatgaccgcatcgagtggaatttcttggattcggtgcttagaaagattggtttctcggataggtggatttcattggtgatgaagtgtgttagttctgcaagttacaaagttattcatggtggaagaaccatgggatcgattactccatcaagaggtatccgtcaaggggatcctttatcaccctacatttttatcttgtgtgcggaaggcttatcagctttgattaaaaggtatgaggataggggtcttattcatgggtgtaaagtggcgaatggtgcaccgaaagtgtctcacatgcttttcgctgacgacagttacttgtacagtaaagctactcttctagaggccaatcggattcgagaacttcttcatcagtttgaatgtgcttcaggacaaaaagtgaacttggggaaatcatcaatcttctatagtactaacactaagaaccaggtgagggcggacattaagtctttgttacaaatgcctcaagcagatgaaaggagtatgtatctggggcttccaagtactatgggaaggaataaatcggctgtgttgggtttcttgaaggacagagtcaggaaaaagcttcaaggttgggactcaaaagttctgtctcgtgccggtaaagaagtgttaattaagtcggtagcacaagctctccctagctatgccatgaatgtttttttgcttcccttggagattagtagagacattgaaagtaacatggcaagattttggtggaagagttcatcgaaagaaaataaaggtattccttggatgtcatgggatcagatgtgtaatagcaaaagcaatgggggtcttggttttcgaaatcttcatgattttaacttggcgctattgggaaaacaaggttggtgcttcctaacaagaaccgagtctctggtttctcgcattttcaaggcgagatatttcccaaatggaacatacctctcggcccctataggaaacaacctgagttttgtgtggcgaagtgtttgggaagctcagtctcttattcgggcgggagttcgctggagtgttgggaatggctcatctattaatgtgctgaatgaaccatggttgcctgatcaccaacaacctttagtgacttcatatcatccggcccttcaacatgccaaagtgtgcaatttaatgtcaatggatatgtcttccgtgggatgaggatattctaaaggtctttttgagaacgtgaccagagctagataaggcaaataccagttgaagcaataaaccaagattcagatgctctttgctggt

SEQ ID NO: 203960 - DNA, 1072 bp, Cannabis indica
aaggcttaacagatgagtaagaacgttctatactaggatacgaccatgtaccatgtaccacatgcactcagtataccttcgtactagtgtaggtagggtatggaccgcaccttgagtactgttaagtgttgtaccacagacaccttgtaccttcccgtacaagtgctggtaacaccacgatgtactttcagacatcatacactttaccaatgcactctgtaccgcaaccgtacaagtgttggtagtgtatgaatcacaacatataagcatgcatatacactaaacatatacatacattcgcatatccatatcacacattatatacagttcttaccttctttccagattcaagtgtgctggccgacctgaacggaaagtctcgtgctagatggatgccctaatcacataatgaaaccaggtaaatcacatgatcaaaaaccctaatccaggaaacccgaacccaccactctaggttctgttatactctctagggattactctaactcaagaaatagggaaacacccaactaaggctctgaaatggacaagaattgaggaaatggaacattcgagataccctgcaaaaactggctaaccagttttacgggtactggtaaaaccggctagtcggtttacaccaattcacccaaaaaccccattccttgctcaaaactccaccaaatgcaaccaaaccttccagagtacctaattagggtataagcaacatattccaaccagtatttcacagaaaaactcaatgaaactcaacatgccattaaagacctaagctttgagttcaaagctcagacttgcataaattcaacacaaagtggtaaaaccacctactagaacctttaaccaacctaaattgactgtaaaagttgaaccctaagtatttctaacgctaacaacaccaaaacccaaaatcaaatactcaaccaaccacaaaactcaagaactaaagaagggtgttactagggattaccttggcttcaagaagccttgaatccctactgaatttccaaaaaaacagcaagaaataagctgggtcctccttggtttagtgctgctc

SEQ ID NO: 203961 - DNA, 622 bp, Cannabis indica
atatttttataagtttctttttttatattaatcaatttttataactaatttttcaaaatattcatacgttaaaaatagggaaaattgatatcgtatcatgtataaaaatgaaaagaaaaatatattaatataacacgatttttcaatacaaaatttacatacaaacaattatggtcacacaattcaaaataagggcattatatttatattgtaaaaatttatattagtatctcaaaattaaaaattttagaaaaaaaaaaattaaaaaaaaaaacaatatatgaaataatttcccttaatttaaagtaattttagattttacttataataacatttctttaaaaaaaattgatgatgttattctgtgttaattttaataattttattttcatatatattttaagtaaaatggtatattttatatttcaattttgaatatttttgttttttattaaaaaaataaaaatgaaaaagaagaaaaagacaaagcgcaccgataatagacattactttttgattaatcaaagagagataatcacaagaagtgaaagggatgcatttttcaactaaatcctcaataaaaaatagatattttatataatgtattatattttaattattt

SEQ ID NO: 203962 - DNA, 705 bp, Cannabis indica
atggaccacgaagttacaataccaattatatatagtttgtatattttataaaaatcactcactcaatttttttaaaattatacatatctacactacaattaaactaaaaaaaagaattatatactaaactgcacttattatgttaccacgttattcttcagatttttatatatatatttatatatattattttatttacaattgttacataatattatatgatatatattacttgcttgatagtaatttttgcaccctcattaattttctgcttgatgtcagttcaaaaggttttataattttgttattttgttcaaaaattgttaattaattacttaaatttttatatttatctgtttatttactttttttaagaaatcgacatgctataatttagttgaaaaaaatgaataaatataaagagaagagaaaaaaaaaaagcggtaagtaaaaagaaaagaaagagtagagtatttaattgacattaaaatagtataataagataaatgtataggaataaattataaataatataataattaaattacataaaattaaggccagtatatataatcaagtaaaaaaagaacaaaaacacgtattttactgatggggccttaaacttcatatattaatacctaagaatattatcaataatagctttcccactcacattattggtataaaaaaatataaaaaataaga

SEQ ID NO: 203963 - DNA, 1147 bp, Cannabis indica
ataaatatttgtcttataataagttaacgcaacactttcgagcagcggtccttgctgcccattcactagttgaacccaccaacaacaaaattgtagtaaaagatcccatatggcaaaaagtcatggacactaaaattgatacacttgaagccaacgatacttggatcgtcgtcactctccctgacaaacaccatgacattggttgtaaatgggtatacagaattaaatacattgctgatgactctattgatcgattcaaagcacgattggttgccaaaggcttcaatcaaaaataaggtattaattactttcacacctttgccccagttgcaaagtttaataccttaaaactactgctcgccattgcggccattaagaattagtctttgtaccaacttgatatcaacaacgcctttcttcatgacgacttaaataaaactgtctatatgacactccctaaaggatacagacccaagggataaattcccccaaatgttgtttgtaaagtaaccaaaagtctctatggtttgaaacaagcctttagacaatgattcacaaaagtcagcgattatcttctatttactggtttcactcaatctctctcggaccacaccttgttcatttaaaatgataaaggcgtctttctcgctcttttaacatatgttgatgacattgtggttacctccaataatgatgttgttattacttcctttaaacaacaacttaactcagtatttcagcttaaggaccttgatcctttacgttttttcttaggtttggagattggtcgttcttcctccagaatttctatctctcaacgaccattcaccttacaacttttgactgacacaagttatttaagagctttcactgctcccactgtaatggaacctaacattcagctttcattcgatgttggaaaactattagaaaatctgaaaatctaccacaacctattggtaaactcatttacttaacaattacacgcccagatatttcttttgctgttaacaagctaagtcagtttttattcaattccagagctcctcatctcactgctgctcatagaatattacaatatcttaaaagcacctctggccaagggctttttttccctcaacatcttccactaacttatttgcttata

SEQ ID NO: 203964 - DNA, 2127 bp, Cannabis indica
gttaggttaggctaggcagatattataatttgtttagtgtggaagtactaactagaggctctaattttcttttaatcccttaattataattgtatcatctatagttggtgatcaaataattatacttgattctactatattttgttggattagacatgataagtaggattcatataagtatttttttttttttttttttattattattatatgaagggagagagaattcgaacttaagacctctgagaagtgtgaaattactaagttatttctatgatcacgatttacataagttttttgtttcttataatttattattggaaagttagtcaactcattcattggtgacttataaatgattgtaatgtatgattttgattcatttagttcatcaatatgaattctgtttgctctgttaaatcaacttcatattcatattccaactattacaattaaaacaaagagaaaaggacttgggaattttaatgcaaattgtaccattgactcactacttgtatttagacaacgcattaaacctaattaatatatatatatatatatatataaatatcagtatgtatatgtattttttttagagaaacctaattgatattgacaattggtgatagtgtgtttgtttgttcccactaggttatgagtggagcctttgagacaaacatttatttcatggctatgtcctaacatgaagggtattctatttttccaatctaataaacacaatatttctagaaggtctttagcctaaacacaaggccatttgattggaaaaaaaaagggcaagaatttataaatgcatctgaattttcaaaaatttgacttaaattgatttttgacacttttttaattgttcatttattttcttttgtgatatttttaataattttcatttgttttgtataaatatattttatttttactctaataaaattttatatattttcttggttttttttggttgatatttaaaatatattttattttatatacttatttttatagaatcctagaaggaaaagaaaaactaaatatagtgcattcatacttaaaaaagaagaaattacattgtatattttatttattttaatttttacttcatttttattttttttaaaatatactcatttttatagattatattcttattagactccttaatttaatgtaaattatatgaaacacttaagtaaagagtgagagtatattgagcaatccactcataaaagtgggtataatttaatcaaatttaatataaaagtatttttgattaatggataaaaaaaaatgtatttctcaatttatcccccaaaagaggggctcttttgccaaaatacaagtctagcagtcttgttctttatcgtttacaagtgctatctaacaatggttttatcgactaaaaaaaaacaatgatgttattagttgctaattttctttgttttttatgcggtttggtacatttggaggaagtagaacaagtagttttaacttaggagtggaagatggagatttccagtaatacaaggatattgtctggcaatataagtcacgttggatagtttttccttcaaagttctttgaacttgttgattctgaccccttaacaattgtgtttgcttttgctaggagatattcttttttcagtgatctaggatcattgttagaggatgtagcaagtatgttatccagatttttagagtgtcactgatccgtattcatcggtcggtcattgtggctgcatatggattagttgtgcatgctcttcggatggataaataacttgtttggctaaagattatctatttttttttttacatgtaaatagtcctttagcctgttcgacattatttaatttttaatgattttggtcattgcttacagaaaaaataaaaagaaaatgatattaattttatccttaaaaataaactaaattattttaataaaaactttgaaaatataaataaaaatgagaaatttctttttgactaacaaaaagaaagcggtaacaacaagttgtactatctccccaatactaaataaaacaaacgaaagttaagttttctatagtactagtactattatactcatgagcgatgacattgaaaaagcctt

SEQ ID NO: 203965 - DNA, 2067 bp, Cannabis indica
gtgatcatcctcaatctcatcattttgtgtgtgtgtgaatgtgcgtccgtccgcatggattaaagagtaatttgattgaagtttgacatcgcaacactattttctcaagattctaaaacacaaaaatcattatttagaacaatgcacaacttaaaatgtggcaaattacatgtcgaagactcaaactcatgatataggtccaattcaatttgcagtaagactatcatgtgttgaaaatatcgatataagaagctttagctatataattaacccatgatagatgcaatcatatagtaattttcttcttatgaaaaaaaaaaacataaaaaggcctgcagaaatagatgaaagtaaaaaggaaagaaagacccattattccgatcaactactccttagaaaccccaaaaccatactgttgagaggaaaaaaatggacagcaaagagataggcgtctgagattagtcacttatatgatgtaaatgagaagaaattattgagttgagtaatactgaatgtcacagaggccttcttttctaccattttcacgctgtactcagtacattcaataaactatgtagtggaagtattccactatgttgtggaaccctaatatacattagtacctgatacaaaagatatttaacaaaagtacaacactaatcaacacgcaagcctataatcaactacaactaagcagcacacattacacaggcctataatcaactaaaattgagtaacacacattcaaagatatcaaacattcagtaatatactcaaagaatcctataatcaactaaaattcagtaacacacaaagaaggaaacaaacagttaaaaacaataatcgagtatcaactaaaattcagttcattaaaacacacacacacacacacaaagaaccttataatccactaaatttcagtaacagtgtaacacacacaataaatgaatcctataatccactacaaagtacaaaattagaaataacaattccaagataaatttataacaaacatgcaaaatgaaatgttaaaatgtatccaattgatccaacctgtgcaaaataatagtttgtaattgtatgtatatactatgcatatttcaatataaattaaaaacagtaaggaaatcaaattctgtagaaaacaaatctatatgaaatctaattacataaattagaaattctatatatattatatgcatttgctatttatttagaaaataaattatatgagaaaatacaaaactgagaataaaaatggaacataaagattcttagtttaagaacagatcaatgcgattccattacgaaaaaaaaaatgagaaacctaacctagaaattagtttagagcagatgaatactaattgattataataaaaactaaaaaggatataaataaacatatactagctaaactaatttacagtcagtcattcattaattgattcaagggtttgcgattttattttcatacctgcaggtgaacgtgaacgatggccgacgctgtccggggttccggtgtggagcagaagcaggggagggaggatccggagagcggagagggacgtctagacagtctgacagagaaaagagaaaggaatatcgagagaggagagagggaaagacacgagggagcgtctgcgtcgtcgattgtagccccgccggcaccgacgactggttggggcctgggggtgtgcgccgcgaggggaaggaaagtgtctagcgagagagagtgacggggcgagtggtcggattttcaaatgggattttttcaacaatatacttaaaatataaaataattacaaaaataagttaacaaaactcaattacaataatatcttgccacgtaattaaaaaataccttaatttcaaaataatatgcctgaataaatatcccgaatttttttttttttaatttttctgcattttaaaagtaaccttttagttagttatgatgttaataataaaccaataagtaacttttttataaataaatattacttatatattatataatttgtagatacattctagttacctctaaaatttatatgtatgcactttaat

SEQ ID NO: 203966 - DNA, 1165 bp, Cannabis indica
ttaataatatattttttgtctatgtatattgtataacataaacacaagaattcaactgaattggctgagtaaagtgtatttatttatattatatttaatttttatataataattggcctaacaagtttcataggcacgtgcaaaagtgaatgaataacaattatatgtattaatatatatatctttttcattaatacaattttattttttgagcaaatacaaatacaaaatcttttggatatatattatacaccgtttgatttttgtgtccatccttgccttgaaggttattaacaaaataattatcagaagttttgtaaaatatatatataatattttttaaaaaaaaagatttattttcacaaattactcaaatttagattttgtatatttcaatatgacaaatactttatgtattattgactacttctcatcttaattattatgccttcttgaatagtttgcatacattgtatttggttatggtttccattatttattatttctaaaaatgaataaagggaagtagtttattttgtacaataattatatattttaataatcttttgcaaactatattatattaaattagtatctcacaatctcacgggttaataatagaaaaaaaaaattagggttttttattcttaaatttatagttatcggaggttttttttctctgcccaagctcgctgaccttctttaggcttaggtgcggcttagttggggttgtattttgctactgcaatttaatttttgctaatgcgattagtcttgtctcagtgatattgttttgagtactttattagtctctgtgacatagttttgagtatttttgtcttatttttgtgacattgtgttgagtgttttagtcttgtttgtgtgatatgattttattttgttttgcttttggttcttctttgttcttcgatggttcgatatccaatcattgttaacggttgggaataacaagttctctacgactgaagggattgttagtagtgcacttatgtaccttacacaatagttgagtgctcaagttataaggttgaatgaacctactgcaacagtttctactattatatgtattctgggtggtggatgaaacagaatataagtgttcttaaggttaattttaatgatacaatctttttcatctgatttt

SEQ ID NO: 203967 - DNA, 865 bp, Cannabis indica
cttcttcttctttctctctaaaaaatacaattcaaaggtccccaaaaacaaccttaaatgtcctataaatacccttgaaaatcctataatttcaaaaatatcaaattcgaaaaaattggaatcgtgctcttgccgcagggaagggaagtgctcgccgcgcgaccatgatccttactgtcgaaatttttttgtgacgtgttcagattagtattttggccataacttccttaatacaacttgaaattgaacgattcaagatatttcgaaaagttgaaaacgagatctaaaagttttatgtttagctccaagtccaattctacttcttaggttgtcaaaatttataattaaattctaccttgtaaaattgagctcgccagcttttactatttttcactaaaatgtgttaaaatcttgtttaataactccaaatgtatgattagtcttcaaaatagcctaataaattaaaattacactaattaataatttaaaaaattaatttaagaatattaatacataaataatagttataaaataaaatattgacttattattaaaattagttgattgttattagttgattgttattattaaaattacatgatttatcaaaaaaaaattattattatgtgagattcaaattaggttgatggagacttgagtgcaaagcttgtgtatttgaaagtgatggtcaaattattggcattgaggtcgcctcctcctatggcgttctttcttccaagtccaagcattttgtgtggttaattgaagttgaacacaccaactattttactttgaccaattctatatatacaattacaatcatattaaaattttgggttatatatttttaatcatcaaggatatt

SEQ ID NO: 203968 - DNA, 592 bp, Cannabis indica
ttttaaactttagcatttgattaatttttgctatttcaaaatttaccattttgctttttaagtctaagcatgcatttgcattattggaatatatatgcattggacatggtccaattattatgtagaatcaaattaaagacattaaacaacaatatatagatttgaattgcaaattaatgtattatatgtggattttatcaattaaaaaaaatcaatattttatatataataaattacatttgaagtggtgatatattttggtggatctaatagtgttataatgggtttaaaaacaaaattattacaaacttgtttttaagcaaaaggactacatttggtgccagcttgcaaatcattaatcataattttttttaattttattttgctgggtttaaaagtaccccttaatattaaaaattgattcctcaccaacagaattatataatagattaaatgtattatatagttagagaacatcaggtgagtttctgcgtgttaaatactttgggtgcattctacaaaatttttatttcgaattgtttaaacataaaatttggaatacatgtattttttttatattagcttttatttt

SEQ ID NO: 203969 - DNA, 900 bp, Cannabis indica
agtatatatataaataaaataatcatttggaaggaaacaacaacattcaataatttacagttgggatattaattttgactaattaagcctctcttgattaattagtacttctagtctagaacaacttggcatataattttaaggctgtctaatgaattaaattacattttatatgttctagatataaaaaatcatagttttaattttcacaaaatttgtaaacttaattttgaattttgaagttaaggtaattgagtttcaatcttgtttaattgttggaaattagagtaaattaatcgtaagtagtacacattgaatctatggcttaatttggaattttctccttaattatttataaattatgtgaccattgatttgaaatcaaatcatataaattagtcctagatcattttttttatataagaattgggtcattttgggtgactatttgcatgcacgcaataaattactcgttttattaccgtgcaaatataattacaaaaaaaaactttgtataactagcaaaaatattggcatgatggtttaataaaattcttagcttcaaaaaaaaaaaatattagcatgaaaccataaattagtacacctcaatgtattaagtcaatatcaataataataataataaaatatagcactacaatctagtaatgtcacatttatctggacaaaagatcacacattttaattttttttctaatgtaaaaaattgtacaaaaatattagtataaattataaacatgattttctttccaaaaaaaaaaaaattataagcatgattgtaaaatactacgataatttatatttaaaaaaataaagaaaattaatgaataataacatgaaataatttttctcatattatttactgttgtggacattgtccca

SEQ ID NO: 203970 - DNA, 1152 bp, Cannabis indica
tgcatgccatctgtccttttgattccattgtcataaattctatttttttccggaccacaatttcttgtcttcctccacatggaacacgtgttcttttataatttatttatctttctgtaaaagcggcaattcaaaagttttttttttttttattttgaggagtgcaattcaaaagctttatctgttgttgccacaaaaaataaatacaaatacataaataaaaaatgatgggttgttaagtaaaattaacaatattaatagcattttaaggactaaaatgcaacattttcagctgctccttttttgtgcatagtgaccataaacaaggttaggaacaaccgatcaagctgtcactgtcggtttagcaaatatcatagcagctaaccttatataaatgctgcgataacttccccttctacttctagggcattccattacagattccactctcttattctctcttatctggttagctctctctctcgatttctcttagtttttttatggcttcaattttattttttttggataattagactaaattatttcatgatcgtagaacacgtgcatttttgtgtaaggatcaattttagtgaaatagcgttgtattcttaattagatttgggaattttaatctgccgatctcgttactctcttttttttttggtgaaattccagaacctagactgcgtttgggttaaatatatttttgaatatggaaattagtgtaatataattatatatttattaattttttttttacagtgaattattatttcatttgctggatatggcggaggcttctgcagctgctgttgctcccaacgctgagttgttagaatggccgaagaaagataagcgccgaatgcttcatgctgtttatcgtgtgggtgatcttgagcgcactatcaagtaagttgttatcaaagttaaattttgttatttatttgcatgtgagagatttctgtttaagttcttatttcaatattcaatttaaattcaggttctatactgaagcttttggaatgaagttgttgaggcaaagagatattccagaggagaaatactcgaatgcctttcttggctttggccctgaagaatcaaactttgctgtggaattaacttacagtaatgcttttttcctactttttc

SEQ ID NO: 203971 - DNA, 932 bp, Cannabis indica
ttttttaaaaaaaaaaatcaatgtacattttccatttgattttgaattacaatatattcactaacagcattttacattatgtataaggttaaattaagatgcaattgttctcaattaattatgctaaaaagatgtgaataacataaaaaaattcttagtcatgcatataaaaaaagaattaataagttttcaattttaataggtgatataaaatatctctcaattttttttattttttaaagtttattattttgaataaattactaatttttgaacccattttgtcttctgtttgtatataataatcttgctcaaatttacgttttaaaaaaataataatcttgctcaaatattataaaatttcgtgtaaaagatatgtgcacatattattattacttgatagccattacttttttaaatttatcatgtctatgttgttattggttcacaattttattatttatctaatctaataataaaaaaatataataataataaattatttaaacatcaatatcaatcatcaatatatataaatgaaggttttaaagaattgtgtgacatgcttaatcttcttactttttttaatacctattttctgttttctaatttcttttaaaaaaaaatgagtatgtaactaataactaacactaaattaatacctcctaatcaaaagaaatcaaatcaaagacttatagtattctaaaataattaccatgtatactaaattaaaaaaaaattattaaaagaaatcaaacttaataagacttataatattctaaaataattaccacctataaattgattataaaataatgtaacatacataataatatacgaagtaatgaagaaaaaaaatcagtcatgtgacattacacatgagttttcttattcaccttttttattttctaaattttcttatttatttctgt

SEQ ID NO: 203972 - DNA, 521 bp, Cannabis indica
agacaggggaggactggccaattgttgctcacattccaaatatcattctcgatcacaagaaaagatttattcaatattgaaactcatcaaagagtcttcaatttgtgtccgttttaggtatgacagtttgactcctcttcttctttattatttttctagtctatattttgtaattttctgcctctaattatttacttatattttgctagaatttttaatggttgtgagatgattaatatgaagctactacaataaatatgtaaggtttttctttccttgttgttcaaatatgattttcataatatcttatcagtttagctacttttctttcctttaaatttctgattctcactcattggcagtgctgtgatcataataacagaagtccttaactaaggcagggtgatcttctaagagctggaaagagaagattagtttcaccatttgatctaaaggtttgatctctactctacttgtttgttaaggccttccaaattaatagcttccattccaagtgaatg

SEQ ID NO: 203973 - DNA, 984 bp, Cannabis indica
agtgatttggaaggcctttttccatatgccacttctactcatatagaatttttttggctctaatcatagtcataaattccatctacaccccaaacccaacctactctttgacccttaaaaccataataacataaaagtaatagggattccgagcttcatccttgtatctacgagagacttgatcttgaacaggagcttgattattgccaagttgatcgcttgaatgctgaccttcttctataactcctccactttgcgtttgaaccatggtggaaagtgatgaacagaaaagaaacagagtagaaaagaaattgcagaagaagaagaagaagaagaagccttacggctctgataccatttcagaaagtaaagaaaagaaaataaaagaaggaaaagaaaggaacgttgattcaatggatttttcattgaatgaatgaagcaatacaattgaggcccttttatatacacaagacaaacagatacaaacatcaactataacataacagaattgacagctcatcctaactaacttcgaccaattctaaaaattagctttatttggatcattaatatgggagatcatatagatttgttccaacttacaacctttgaataattttcattttccctcaaatatatcaacacatcacattgtttaatatttaaagagaagtaatttcagaatagaaatttcttaaagcagcaaaattaacataaaaagtaatcttaaattcattaacagttttaatctcgatctgttagagtttgagggtcccagttacacttaaataacaaccacactaaccataataacatccaagagcgccttaattggtgtatcactaatagtgattggaagggccattcccaaatgccactcttactcatatgggtttttttttggctctgatcatagaatcataagtccatctcacccccaatcccaacctctctttgtcccctaaacccaagcgcttccttttt

SEQ ID NO: 203974 - DNA, 761 bp, Cannabis indica
aaataatctgagaagcaagaaggtagcagtccgatgcacgctcgtcggagaaaggctcagaacccaccaacaagttcggaggagtgacattggatttagccctttaaggtccaataggtttggaggagcgacctattcattaattattattattattattataatggaacttaaatggaatggtaacaaagctctaaactaatttatttaatgagtggtttggaatatctttatagataaaatatgaccatctaacaatttttattggtttagcaaaatattttaagaatataagaatattcatttaatggtgttaatagggttagttttataaatatatatacatattaatattatttattttagattaatttaaatatatatataaatattaatatattatttgtaacattattatttttattgttatttttaatattgagagtatgttcaattttaatattttcaaacttttatttttctcaaaattttaaaagtttaaatattattctttaaaaaaattaaataattaataagtagtttacttttatttataaaattttataaatatacataattaaaaaaattaaaaatataactaaatatacgtaacaataacctttatttataacgtactacaagtgtacaacaaaaccattcttattttaagcttaataattctatttatgcaatacaaaatcacttaatttaatttgacaacaatattttatttggaaactaaaagaaattcaataaaaagt

SEQ ID NO: 203975 - DNA, 1129 bp, Cannabis indica
tcaccactaagaaaaccttagtggcttcaaatgttctcttcagttgctactttgtttattttttaagataatttattgacgttgctatgattataattacattaaacatttaaacactaactctaaaattatagttatacagtcttagattttaacgataaaagtattatcaatgctattactttttgttgaactctcgaatgataatatattaattttggatcaatcttacatcacaaatttgtatttattacaaagttagaagggctttttttttgaaaaaaaattattcaaggtaaaaatctattttactaataaaaattaataagaaatgctacatgatacccataatgcctaacacctaagaataatagttgcactagtggatatggagctacaagtcccacctaaataagaaataaggtaggaataggataactttctatccctaaatgttaaacggacagagatagagataacatccccgcccttacggagatccatttaattttttttatttattttataatattatttttaattattatacattatcttgatgtgttttgtagtttattattagtaaatttttatgaatttttattttattttaaataacattgtttattttaaattattaacatatataatactttagtggttatacgcatagtttagtggtttcacacttcttttcacaaagagaaaataacaagttcgaattcccctcaaaaaaaaaaaaaacatatataatattttaaactttatacaatctgatttttatttatattttttacaaaataaatgggttctttgtccccacccgccccacctgtgatagggaatatgtgtggataaaagcgaggatgggtattaaaatagttaacggggaatgatgttgtcagcccaaaatttatgaaggctaatatatatataatttacttatttatattttttatatttttacgtggaatatttaaaaaattagttcggaggacaacaccctctagcctctcttagctccgtcattattaactgcgatgggaacggaggagaatttttctacttattacctgcctaatttctatctctattaaagctttaataatatatcatattgttattagta

SEQ ID NO: 203976 - DNA, 1468 bp, Cannabis indica
acacacatgaatgttgcacaaagagctcttcagtatgtcaaaagttctcttggacagaatttgttctaccctgctaattctgaaattaaacttaagggatacactgatgcggattggacagcatgtgtagatactagaagatcaacaacagacttttatgtgtttcttggaagatctctgatatcatggaagagcaagaaacaacacatagtctcaaggtattcagtagaagctaaatacagagcaatgtcaaacaccacctgtgaactggtttggttactttctttgctgcatgagataaagattgagcataggggacctgctatactacactgtgataataacgctcctcaataaattgcagctaacctcgtgttccatgaaagaaccaaacacatagaaatagattatcatttggtaagagaaaaggttcaagagggaattataaaagctgttcacacttctagcaaagaacaaatagctaacatatgcacaaaagcacttcttcctaatcagtttcaagttctcaaagataagatgaaaatttgtaagcatgcatacccgtgcggaagtatcaagagttagtaagttggagtgttagttagaaggtagttgagagttagttaaggtcgttagctagttgttagaaggtggttagcttaattgtcaagctgtatatatgcacattgtaatgctttgttttcagtaatgagaattctgcaactttgatccattttttcttccttctattctttccttcttctctttcattcctaaactaataactttagagtacactagattacttagagtaagggttgggttctcttttttgggtgtgaaggattttagtagtaatggtaacttttgtggaagagaacccgaagtcctgagaaattaatggaaggctttcagtcatttttatctcatctattctactctattttctactgttaattaaatcagttttgataggttatccctaaaagaagaagagaagatttttagaaatagcatgcgctattaatctattaattaattaatgtaaatagttagtaagtacagactagaatcacctatatctcacatgcgccccaaataaatattatatttataataaattaatatatcaataaaatacgaaatatagctctttttgaaaaaaagtttactatttagttttttttttttttattttttagtaagtaaaaaagttctaggtttacgtatcatgtacactaataatataattttgtttagaatgcgtatcatgtacacatatagtattactattagtatacataattaattattatttattttcgtaaggagtaatcgaagatgttagctgactctgcgctccacacaacttagtaaggacatatcttcaagtaacaacaagtgaaaactatatatataaatttgtcttctttttaaaatataatatataattaataatagtcaaatt

SEQ ID NO: 203977 - DNA, 1572 bp, Cannabis indica
tcgtctgatgcaaccttggccaaccactcagcaaccacccagaaacttcgtctgattgaaaccttcgtttgatgcacccttcgaccaaccacccagcaaccatcgtctgattgaaacctttgtctaatgcaaccaccgcgcaaccacgcagcaaccaccctacaaccatcgtctgattgtgtaagtggtattttggtaattaaaatcatataaaaggtataaatattatccacacctcttatggaggtatttttgtaaataaagtgtcattttatattttctatataataattccaaattagaaactattaaaccctagaattcctataggtggttgaaccccattctcgttctgcctttctaatacataatttgtgattgagagctgcccacatttgtgatatctaggatactaaggaagattgtggagaaattatagtttttctacatcattgaagttcagtttagattttgaataatactttgcggcataaaagaagaagggttacgtaatccacaaggatgagacatattcaactgcgtaatcaatgtgagatcttctaatcttgacatccgtttaattttatctgtagaaatatgttttgaattatttatatttaggttaaatattaaaactcgtgaaaataaataaaattgttgtataagtaattccagtaaccatctgcatgtgtgagtacgatttgacacctgagtattacctcaataccaaaaccacttgtatgtgtcatttgatattcatcagagtattatcttgtccctttgacacatgtatcttacagttaataaagctcctataaaaacctccttcatcaattgaaggagttggaaaattttttattgcgaacattcaaagagcaataatttcatttatttatctctacaacctattgagttcatgcaaggtcttagtcattttatattttatgtgtatttcctagttcataattttccaaataagtaacttagttggcgagcttctacggtcaacaagaatgtaagacatatagaaaagaaaagccaaacaatcttattagtcggaatatttctagcttgatggaatagaaaatctggaacaaagggtagcaattatctctaataacaaagaaaatttatggcacatttactaaattctaactagatcagaataatcaattgaagaaatgaatgagtttaatatataaaatattacaattgatttaattattaacttgatggtgcataaaactcgcatttggggaacaagaaacagctcctttgccgcctgagttacactcatcaatgcagtgctcattacgattcattcatattggtgacaaatcatgattctccctaaattgatcttacgcaagattaatgctatttgtagatcatttttatggaaaggttcggcagaatcaaactccccaggttatgtggcatgggatcggctatgcaaacccaaaaatgaaggagggttaggattgaggaatacaatgttatggaatgaagctgcactagggaagtatgtgtgggttgcagccaccaaaccagacaacttgtgggtaaaatggg

SEQ ID NO: 203978 - DNA, 1478 bp, Cannabis indica
gatgtaggacttctgtctctatgtattgagcttattgacatgtattgttgtttcttgatgtaggattatgagtatcattggtttgttttattggatgggatgtttattcagatggagcgatttaatttttctcttgacttttgtatttcttttagccaaataaaaatagttatctattacaaaaaaaaaatagttgtactcgtattgccaaactaaaaaataaaattaaccaaaagtactaattaaatcttattaatttgggagcagaagagtatggatatacttacacttgaataaaaaattttataattaccattaataacgatttttgaaaaagtggtaaactttttaaattcataaacacttaagctaaaacttgtaatggataaagaatggatttaactttagtcacatgataagcactcaatctagaagtgagtattaactccaaaaaaaataactagtgagtggaacatgttactcaagggagctcaaagagaaaactcaccatgataactatttaactaagggaacttagaaaaataagtgtataaagtacttgaaataatataaccaagaaaattaaaatacaacctcgagcaagggacataactctactcgcacatcaataagagttagggatataaatctgcttacatattaaaaagggcgagggatataactctactcccgcatcaaaaaagagtatggaatataactttgctcgtacatcaaaatgaagaaagaggctttaactctacttaaatatcaaacttgagtaagagactctaactctattcaagtgccaaatttgagtaaaaaaaataacttaaatttgatatttagtgggatgagagatgtaactcaactcatatagcaagggaagtcatgaggttacactttatattttaaactccataattgaggtacatagttcaagatgaaaagaagtttcgcccaagcatgatactcaagcaactttggcccacatgaccaaatatactagtcaaagcaaaaacactaggccaaagaccatctcaccacctcctcatctcaaagccatctcgaccctaatcaatgaaaaggaagtggagaagattgtgaagcaccatcttggccaacacttaggagagtcatctttccatccccatcaaggtccaccatctcgtaccaaaggctgagaaccacgaggccttaaacaaatgccactaatattggaatgcatcatcttgacctagttaataaaataaattggaagagaactcagaccaggggcggagctagattaaatgtgaggggggccaacaacgagcaatgcgtgcaaaaataagattttatgtttatgaattttggtgaccaacgtctctatttcaagataatagtgactatattcattggtaatcttagtgttagtctcctaaatttaatttaaaacttttataaattaaaataaacatatgaatcaatcaattaaaaat

SEQ ID NO: 203979 - DNA, 945 bp, Cannabis indica
ttcaagatttataaatattaaatacttaatgaaaatgttttgccatatatattataggtgactcgactccaaccccagccccaaccccaaccccgacaacatcatcagggcctataatctatgaaatggaaaatggctttattggagtaagctatccaaacggaccagccccaggcccaacaacatctaactccattctctcaaatcattttaaaaaatgagttgtgttatagggtgtcacaaaaaaaatcagtctgtattattttagtgttttttaaaagatatgcttagtgtttttgtgtcgtctaacaatctcaatagtttaagggagatttttaacgaccagaaaaatttaggagcataatttagaacatatcaaagtttaaaagacgaaaattctaattaatttatttgtaatagtagtttaatcaaagcactactatttttttattatttagtttttatgtaaagttatttatgagttttttttttataaattttaaaattaaataatatttcatttattattttaaaattaatatgacatctcacatcttatacaacaattagtacacaggtagtatcggaaatagaaaaaatatttttgatattatttgtagtttttgtgattgagttgtagtaatataaatatatgtacacattttcttaacatttgtagtttccattgtcccatatcgatatgaaagtaggagtaccttatttccttttgaatataagtaaactcatattctttcaatcttctaagttcattttcctaattatctctttatatatcaattaaagcaaaatttgaaatttaatgatctttttaaagaaatcatcaaaattgaatttactttgaaggtattgtgattgttttgtaagtgtgataattgtaaaaacaaattaaagaagatgctctgaaaaaattaaagactagaaaat

SEQ ID NO: 203980 - DNA, 1711 bp, Cannabis indica
cccagcctttatttatactaagtgtttcagtacaaagcagatgaacaataacagaaacttaactaacagaaataacagaaataacagaaataacaactaacagttaagtaatcgattccaacacttgtttaacacatatgcattatatattttttagatctctctctttagagcactcgcaattataatatcttaataaagttaaaagctaagaaaaaaaaaaatagtttagattaaaattgagcttaatgtaattttaaacccttagttattatatctcatttcaaattttaagaaatttttctctgcatttaacttataaatagtaaagtggtacgtaagacatattatatttttttcttcctctctttcattccattaattattatttgtttattattcttctttacttattttcatatttttctttattttaattaataaaatatataaagatataatatttaaatgtatagtataatgtaaatatgtaaggtaaaagtaaaaaaaaaaattttagtaaattattttaaagaaataaaataataaagaagacttatatgtagaggagtggtagtgaagtttttttgctataactgtaaaggtattttctaatttcagaaaaattatatttcaatttttatttgattgaatttatattatagttataattgttagctagtttttgagaaattgagaataatttatagttttatataaaataattaattatatgcgtataaaataaagtaagaatgtgtagaattcaccaatattttaatcttaatgtattcatgttaacatgatcaacaaattgtttaaaaaaattatcaaaatgtaagtgaatttcgggggaaacacatcttttatttattctaataaacaaatagtactattataatatgtgtattacatatatatgataggtacccggatgatggttatgatcgaacttggtatcctgcacgaggtataggattaataacagtttcaaatgaagcatcatccattgatgttagcagtgcagaagataagccaccagaaattgtgttcaaaactgctgccactttcaaccaaactactagtactagtagctctactactactactatgcaactatacactaccggtttgacagccgccaaagttgggatttacatgacaatttacttttctgaggtgacattactgccctctacacaaaagaggtcgtttcaagtgttcatagatggagaggcttattccaaacccgtaatcccaccttttgggagctctgtccaagtttacattgccaacatcactgcttcttatgatactttgatcgagttacgtccaacccctgactccacacttcttccacttatcaatgccaatgaactttacactctctcccaggtttcaacactccaaacccacccaaacgatggtacctatctaattaattacttacttacaaataacaattttattaaattaatttgtgtgtgattaatttaattatgtggtaattatatatactctatataatatacttatttgactattaatttatcaattttaaaaattttctagataaaatatgtgtgaaaattaactcttgttgttggttattaatagattgcttatgcataaaactgctgaagattcttgaggaaatttttaatacgctttgtaattattttgtgcaagttaattatgtcttgcaaatatg

SEQ ID NO: 203981 - DNA, 576 bp, Cannabis indica
ctcctcctctcaagtttataacatcaaattcccttcattccatatcactacttttattattattattattgttttaattaaaatattcaaaaatataaaccatcacgcttcacaaaaattctgaaccgacatatctttttttacttatatatgtaccttatgaaatacatcacctcaatttttttaattatctatagtagaatttataatgttactaattttattaatatggttgtacacagtctaggccatacattcggttttcctctcaaaatgtgtgtgtgttttttttaataaaactttgtaacttcattaagataaagcaattagtttaagttagcaaatttagaatacaaccattctaaataatctcctgatctagttctaaaagctctcctacgcagattatgtgctatagttatagtattatttccctaggtacataatttagagagatattaggaaattttaaaaaagagattataacattccgtatcaaatcagacaaacaaaacttgtcattctacttgccttattttgttaaatgacaatcggattccactaaagcaactggaa

SEQ ID NO: 203982 - DNA, 1077 bp, Cannabis indica
taaaaaaaaaaaaaaaaatctcctacatgtaaaggatgcctatgtacggtcggtcagctcaggaggccttatttaacaagaattgaagttacctcataaacccaacctttgtgataaaagagcaagaagtagatctagttgctcaactcaactccaaataagtaaaacaagtaagttgaatcatgatgattacgctgagtaagctcctatttaatctgacactcttccccaaaagtttggatcttgacaagagaatgatttattacattttttgaatgacaagatattcagatacttttttctctaattttatttaagaacttgatcatctctatttctttcttctccattttttctaaaataaattatttaattaaacaaattctatgttaatttaaatttacactaattttattgggttgttagtaaccattcattaaatctaacacacgaaacaaatgtgattaataaattacaaaatgttttttatttttagaacaaattttaattattcaataaattaaaatttagacaaatcaactacaatccatttctttagatttaatagagtttttttcatacaaaattgttgatttttgtgttttgtttttttttttttttctataaatcaagctcacttggtagcttaagtgcaatgctttgaattacttattgtttttactgttgttgtgataaatttaacacgcaaatatacgtatcatttacaagtattaataatgaaagtaaagtattattcccataaagactgtaactaggtatcaatcaattaaattcttgtttctatttggcaatcaaatagatagattttgaaactaaataaactaaacaaaaatcaaataaaacaaacaaataaaagaggtttaacaatggatataaatttagggatatgatttcaattgtattgactgcccaattattaaaacttattaaccgttcttcttcctcttatagaaaattataaattaacctaaactcacatctatgagatagtacaacaaacaattggcattaagcaataatctaaaaaccatataagctatgtgaatactttcgttt

SEQ ID NO: 203983 - DNA, 677 bp, Cannabis indica
aagagaggagttgatgtaattggaagaggatattttggtgaaaataataaaattgttatatattagaaatattaataagtataaatttaggaaaaaaaaatttaaaataatgtaatcataaaaattcaaatttcctttatatttttaatggatgcttggcttaatatataacgctgagtcagtgacgacacaggagtgaggatgtttaatttttcttctttctttggaaatgatgagtcagaactcaggatgtctttgtagtttgtattagttaatataactaatctatttattgatctggcccatatataatcaatgaacaacttgtgcctatctgtgtacacctaaactggtattttagtattatttaattaataataatcttaagtgtagagagagaagagtcaaccagattttcaatataaaatccaggacctcaaaagttaattatttactaattacttaaataccgggttgcttaactaattatttaattaccatcgtacataaaaggataaagtagtatagccctctaagaacctaataaagttaaccatatatttttaaatgggtattgttagactattactgatggaagatttaaaatttgtgttatatttgacataaaaaataagtttatgctatatttatttcactatttacaattatgctccaat

SEQ ID NO: 203984 - DNA, 1042 bp, Cannabis indica
ttttcaataaattttgagatatactaaattatactcaattattgacatgtaagatttaaagatatttacaaaaatggaaatatacatgttaaaattcgagtgactgtgaatggtttggttagacctcagaggggcttacgtcagcgtgatccgccttatctttttttgatctattctgaaggactttcggctttacttcgaatggaagagagtttaagcaatcttaaaggtttatctatatctcggggtgccccatcggttactcatcttttacttgctgatgatagtttgttattttgtcaagctcatgattcctcctgtcaagctatcagctgtgttttagatgtgtatcatcgagcttcaggacagtttcttaacactgacaaaacggtcatgtctttttctccaaatgctagtgtggatttgaaagctagatttaacaatatgttgggtatgccgatttgtgatcttcatgaaaagtacctcggccttccttcttatgctagtagagagaaatctgaactttttagtaatatcaaagactgaatctggaagctcctgaactcttggcatgcaaagcttttctcaattggtggtagggaagatcttcttaaagcagtggtgcaatctatacctactcatgcgatgagttgtttcagtttacctaagaagttctgcaaataacttgaagctatgatggcaaacttttggtggggttctagcactaacaagtccaaaattcattggaaaaaatggaaaatgttatggcaatctaaagaagagggtggctggggttttcgatctttcctccactttaatcaagctctccttgctaaacagacttggagaattttagaggatcctcactcacttttggctcaagttttaaaagctcgctactttaaaaatggagatttcctcaacgcttcaaaaggtacacttccatctcttacttggcaaagtatttgtgatggtcgagaccttcttgtcaaaggccttcgttggaagattgggtttggaaataaagttaaatgcgcttcag

SEQ ID NO: 203985 - DNA, 1184 bp, Cannabis indica
aaaaatacctttttatttgtatatataattaaagttattatatttacaatatttgtatgtaaaagatataattataaatgtaaaatacaaaatattaacatattatcatatactaatataaaattattgtacttattataatttttctaaattataagaattactatttatttatatataccaagctagttactatatatattaataaatcaaaaaataagtaagaataatcacttatattaatttcataaaaatcacacatatattatacatcattatttaatattttattgagaaaatataaaaactaatatttatttatgtttttattattaaaactgtggtaatatactaagatatgtaagaaaaaaaaattattgtaggctaatttatcacaatactatatcatatataaaatttaaaataacttttaatatgcttcaaattaccacacttttttcagaaaaaaaaaaatttaccactcttttagaacattgctggagtaatattgtttctaatctaagtatactataaggtaatattttttagcactctattaaaatacttttacctcaatattataaaaaatatcactaagattttctataatttgtttttgaataataccatatttaacatttgtgttttgtaaaaattatcaatttaactctctattattagttaaatgatgtttgaactttgtatttttttaaaattatataaaatagtacccagtttaattttatcaaaataaaacttagtaataacttgactttaagctgttttgaccatactggttacatttttaatttcgcatctggccaatttacaaataggctccaagttcgttataataaaagatttgacgaaaaattaagctagaagtattatacattttgtaccaatttaaaaaatataaagttcgatttgtcatttgacaaaataaaaagtttgattggtaatttctacaaaatatatagtcctaaataatatttacctatttttttaccataatttcattaaaggttcttctagggtgctcctctccaaagtgggtgcatccatgcaccatttttatatttttgcatctgtataattctaattttagagtatttttcatatgacagtgtacattataataatttaacatattttgtaaatttttgttaaaattaaaataattt

SEQ ID NO: 203986 - DNA, 501 bp, Cannabis indica
aggccaagggagaagggagaaagaaacaagagaggggaggggaggagggttctgtcgtcgttagagtagggagcctgagagggagaaggtgatgtttggcgagaaatggggcacgattctggggaaattttgggtgagggaagaagcaaaaaaaaaaggaaaaacataaaatttattaatttaattattgtttttttataatttgtaattttttttttgtaatttttaaattatttttataatatttaaataattaaaattatatagaccactaaaaaatttccacgtgtatatatgggtacaattaggttgtccacttggcacttaacacaatattttagatggaaaagtaaaaatcaaaacagaacggtaattttaaggattttaccaccaaaaaattaatttgtaaaattaaatatcacaaatcatataactacgtagtagtttagtttgtctttaattattttaagtattactattagtaaggaaaagtaaaaaagg

SEQ ID NO: 203987 - DNA, 1109 bp, Cannabis indica
tgttagaaatttatttatttaggaatacaattatatatataaagtatgtgttgggttatcatataaataggtttattttgaaataaaatttatgatgataattgtcataatttttaatatgtggatacataagggtaatttttaatttaatgagaggttaaatagaaataattaataaatattattaattattttgtcaatcacttggtaatataacaggtaatagttcacaatttacagtatcttatattttcattctcttgaaactccttcgttaagagacaaaggttcttgagagatttcactgcaaatttgaaagatcatactatttcaaaattgattttgtcgattttggtacactttcgctaatttttgattccattgttaaatttctcataaattataaatttagattataacatgtggtatcaaaattactcttaaattaattcttaaagatttatgattgtattggtcttcaatgaaattattttggtagttctgtatatatatttttaatttgtaattaaatttattatagatttattcggttattgctatttacattttgcataatacgatttgggttgaattcattcctgtagaatgatcagtacatacacatgtacagtgtcttcaatatataagtatatacttttttggttatatcagtggcaagatattgattgggcttaaattattgaattgggctttcgtttactggtgctctcttttatgccatttgtttacagcattcatatatgaatttgcagtatcgtatatgtttatattgtatcattttattgataaagtcaccaaaaatagtttagtggcgagagagtgatggaaaaagagagatgcaatattaaatttctatgattgagtaaacagtacaatatataaaatatgattatcgaattaaattattaatattatgtgaaaattgttatgagaacgggttgttttttgttgaaataaatagcatttagtttctgatattaaaaatattaagtgttaaaataaaaaaaaaataataatgcatctgagcccaccacgtgtccatatttatgagtgggctatttacaaaaatatggaaaaataaatatatg

SEQ ID NO: 203988 - DNA, 1055 bp, Cannabis indica
agtagaagacactgtgtacttttgcatgcatttcacctgcaatgcgaatgcaaatgcaagctgtgttgcacccacctgacctaatcttccttctaaaagcatcattcatcaatgcaaatactaagtagtagacacaagctactaatgtagtcttgtcttgtacaatgtacatgataaatacacctttttttttaattgtactcatttcgttttataaccctactttgtccccatttccattaataataacaacagctgcacagatgagatgagatgccatttcactatagattacgtacatagagaatttaagtcacacatcaatggaaaaagaaagagagatgtaaatgggacgatagcactactcgtacatactatttccgataaagctttaattttttttaaaaaaaaaaaaaaaatctgttttcttcttctctgttcaataaaaatctacaacacaagacacaaagaactgatattattattattgagaaaataatcttcgttgcaaaaattaatgcttcttgaaaattattaatgacatgtttattaataagtaatgtgaattaataataagggagtcattcacttatatttatttattttattaaaaattaaaaaaaaaaaaaaaaaaaaagagagaactttgttaaatatgagataaaagaagagcaacttacaaaaataatagattttgagtaaaaatttacatttatactgtcacacgacaaaaattacattaatattgtcttttccttttttttttcttttgtcatactgtagacgccgaaaatcatataccaaacctctatctttcacacccacagacagaaccacccccagcaatatgagaacactttaaaacaaccattaattttggaaatcgacgtcaaataaataatcatagtaaaacaacactaaaacaaattaaaaaaacaaaagaaaaaaggattaaaaaactaactatcttctacacaacctcaaaactagatacaatagcggttatatttgcaagcccagtcctgaaaaatcagaataaaaaaactactaaaaac

SEQ ID NO: 203989 - DNA, 653 bp, Cannabis indica
aaaaaattgaaaaattatgtcagaaatagagctcatccagaagggagtatcattgaattatatgttgtggatgagacattgatattttgttctatgtacttcaaaagcatacaaacaagatttaatatcttgatcgtaatgtggatacaccttctgttactcgtcacctgactgtgtttgaatctcaatgttgtccacttggaaagcaaaccataattccatttgatgataaaaacttagaagaaagcagagtgattcaaattgtataattgttctcaaattgatcattatatggagtaagttaatcaaaatctattgcgttaatgcttagtatattgaattaaaactttgatttgtaataatttatttttttaattagggaacacttcaacgagatttgacatagagatggagtttctaaccataatcttttacatgagaaagaatttcccaaatagtttgataagaaggtaattattgccctacaaactttgaacacaatctttctaaattttcaaattgatgtttgcatattttactatatgcagatatatgagctaaatcgtctcgggtctttagagcatggtaatgaactgctagctctagcatatgggtctgatcttgtggtttcctcttatccagcgtgtatcatg

SEQ ID NO: 203990 - DNA, 1222 bp, Cannabis indica
ctagcagacgcaaaatttaacaaagtgatcgaattatgttccaattgatcaactgagctaggaaatagctcgatttcagttcattgtaaccaaaacacccaaaacccagataacaaacctaccttagttcgtgctatccatcactttccgtcaaaatcttactagggtttgtttggttgcccagaatataaattacagccaaaaaaaaaaggaaaacgaaaagctcacctttttctgatacaaattacgcgaaaggaggtttaagagaaggcagatagctgaggggtatcatatcttctaggatccctaatgaagtcggaatgatctggtgatcgacccaactggggaagacgatggtgtttgatcggggttctctgagagagtttcagtagttttagggctttctcttttctagtttatttgtcatgagcttaggtgggaaagatagatagatgacagaggccccaacatcgaaaggctcttaaacgacgccgctcagaaaaagcaaaccaaattgtacttttattttttaacttttttttcaaatttattttatttatttttttgaagtgtgtatacacatagcactcactatacacactcgtaagctgtttgagctagtctcgagtggttaaaaaaaattaatattttataaataaattgaattaaaccctccttagttattacataaaatgtttttcaactacactatgacaacaaaattataatgtctagtctttcaaaaaaaaaattataacatctagaaattttaataaaattataacttggggaaacatttaacaatctaatacaatcactaatataattatcagtgtctcatctagaaaagagacccatgagagtattgaattacaatctttgagtcgcattccacaaacacaaaattatagcccttagcaactacaatctccaaaggaaagaagccaagtcgatgcttcaccaataagagagcgcaaaaaatagtctttttgttgtctcccagaagattgttccttgatggtcacacgccaaagtcatagcacacatcacttccccccacccttcacatcacaattaatctttacctagtctaaggaaggaggacttagaatccacaacaataataacaggattaaagagaaggattataatttacgtaacaataagtgatagaatcaatatagtgtttgatgttacgtattattattatgtaccttatcat

SEQ ID NO: 203991 - DNA, 1016 bp, Cannabis indica
gattaaattgtaataaaatatacaagagtattgttatgggctattattagtgcctaacaccacttctaacatactatttaaaaattattatattaaataatatgagacttgattttatttgaactaatagcatttcttattcttaatatatgaagtaaaatattaaaagagactagtggtgttaaatattttcttcgttgtcatattattgttggtacaattaaatataagattttatataatttaatataataattttagaatatcactagctaatcgttgaacgtcacttctaaaatgtgtctaataataatatttttatacaaaataataaagagtgcttctacaataaaaaatgttataatacgctaatacctaaaacacttgtttcatataatttaacgaaataatttctgtgagatatcgttaaccaataaaaaaatgctacttataaatagtgctaggcagtagtttatagcaatgctcttctacaatgcaccctaaaaaaagtctactaacatatattttactattttgacatttagagaaacgttttaagcaaatttttttttatagttaagtactttatagttatttaatatataatgtaaaattttgaaaattttgaaataatttacaacatagaaagcagtttttaaacagtttattttacacacataaaattaaagagtcacgtgtgcaataatttttggcttgctaaatttttttgaatttctcaaaaattttgcaagatgtctttaataactacaacgtacatgactaagaaaaaaaaattagactaaaaaatttacttagatgccaaagtatagataggagtaaaaaaattgaagaaaaaaattacaaaaatactttaatacagaaaaaatttcatttttacgttttgaactttattatttataaaaaatactcttcaataaaaataataaaatatatttttaattattttacattttgttttataattattatgaggttattttatagtttattgatag

SEQ ID NO: 203992 - DNA, 1066 bp, Cannabis indica
aagattgtggtaatgctaacattgttctcattcctaaaactcgaaatccttcagatatgacgcagctaagaccaatagctttatgcaatgttttgtacaaaatcatcacaaaagttatggtgaatcgtatgaagcctttcatggattgcatcatcacagagaaccaaagtgctttcatcccggggcgtttaatttcagacaacattcttgtttcttttgaagtacttcactacttaaaaaggaagagaaaagggaaagatggatttatggcactcaagttagacatgagtaaggcgtacgatagaattgaatggcaatttttggaggcaatacttcggaagttgggctttgaagattggtgggtcagattgctaatgaagtgtgtttcctcggctcgatatatggtcactcacggtagtcatgagttgggacctatagtaccttctagaggcattagacaaggggatccactatccccttatctgttcattctctgtgcagaaggtctttcggccatccttcgcagatatgagggtcgaggtttgatccatggttgcaaagtagctaacggtgctccacgaattacccatatgctcttcgctgacgacagttacctctattgtaaagcaactttggaggaggcttctagaattcaggaagtgctaagtaaatttgaagaagcttcgggtcagaaagtaaacttgttaaagtcctctatctttttcagcacaaacacggacatggctactaaggatatcattagcaaccggctggggatgagtattgcggctgaagacagtttgtatctgggccttccaagtacaatgagtagaaacaagtcggccgtgttgggttttctcaaggaaagagtccgtaaacgaatccaaggctgggagtcaaagtttctctcgcgagcagggaaagaggttttaataaagacagtggctcagtctttgccaagttatgcaatgagcgtttttttgctacctttggagatcacgagagatatggaaaaagtaatgacaaagttctggtggcaatcttctaacaagaatgggaaagggat

SEQ ID NO: 203993 - DNA, 564 bp, Cannabis indica
gggaaagggattcattggctctcatgggaacgtctctgcaagcataaaaacatgggtggcatgggttttagacaccttcgagatgcttggaaagcaaggatggagacttcttgttcgacctcactctttgattgcaaaaattttcaaagctagatactatcctaatggtagctacctatcggctagtttagggagtaatcctagttttgtgtggaggagtgtgtgggaagctcaacaattagttcgaaaaggagtgcattggtgtgttggggatgggagttcaataggtgttttgaatgaaccatggcttccttgtgatgataatccttttgttacttcttcacatccgggtttagagaatgctgtactaaaaaatctaatggatgaagatggtacatgggatcaggagctgattgcagacctgttcaatgacagggacagtgctttaatcaatgggatacctctcttctctgctattgaagaccggctggtttggaagcttgaaatctcaagtctttactctgtaaaaagcgcatacaacttattgcaaacagctcaagggag

SEQ ID NO: 203994 - DNA, 956 bp, Cannabis indica
gagagagagagagagagtgaagtaatagttgtacaaaaactactgtggctgtcctctcttgctatatctggcagagagtgaacagtatagcactactatcaataataattagttctttttattaacagaaaatgacttaaagatggtggtggcactcctatatatataacaatatctaagtacttatgctgtataatgttaacgttttagggttaatatattttccactcgtattctatagaagttacatattttattttgttagataataaattaaattaatattttgaagtaattttactttaataaaatttaataataatcttatttaattttatgatactactaattacatccatttttattaaaaattattttcgagttggttattttaaaaaacagttttgttaaaaattaaactcaaaatactaatttgtataattttaaagagaaatactaaagggcaccagtggtgctaaggatcctcctatgtgtcaatatcgctattggtctaactaggtatcggaactatataatttaatatagtagcttttaggaagtatcgctagtcaatctcaacgtgacatgtcgagaaggtgctaggcaccactagtgtttaatagcaatgctcaattttaaaatatacaaaatttaatttgtcatttaattataaaatgaggtaccaccatgcagtagcatatttctataataatttattattaaaataaaataagtgagaattaatattataaattgtactaaagtatgtttgatttgatgatttgtatgataaaattatttgtaccattacatttttatctttaaagctttgtaatgattttatattaataattattacatcatattataatttcctttacattataaaacgagtgtaatagagattatattgttagaaaagacttattttgctcttcttctttttttcttctttt

SEQ ID NO: 203995 - DNA, 839 bp, Cannabis indica
ggccaaatgttgacctgggcactgggacttctaacctaagcttcgggattctatttttgatactttcaaggcttctgaacttcaggacagtgtctctccccctatttttgaccacgtcggattcaatgcttacatcaaatttggcattcgagcattttaaggcagcgtcccaggataattatcaacatgggcattgggcctagcaccatgtcaacctaggtactgggccttgtttccaaggacataggtttgtggttttctccccgagtttacttaaatctttgttatttctgacgacaatgaagatttcttgagcactttttactgaactaatttagaaacaacccaggttgacaaaatgccaacctaggtgctaggtccctcttctgccccttcagaagttccgtttggtacctagacctagtttatttacaattttttctaaatttgaatgtgattctcaaaataattttgggaaaactccatttttttggccaatgttgacaaattgtcaacctgggcgctgggccctggttttcttcctagaacttgttgttttcctcggaaggatttttttccccatttttgatgtagacagattcaatgcaaaaaatatattcgatctgacacttggaaggtgcccaaattgacaaattgtcaacctgggcattgggtgcttgaggccccgagtgtgtaaaagttaacttgcttcgaatctaattatgatgcctcaatcatatccatggtatgtttagttgatgccccaatgcatgttttggccattttgcactaatacagtcctggaaacttaaaccctaattgaggatgtcaacttgggc

SEQ ID NO: 203996 - DNA, 1327 bp, Cannabis indica
tatctatttttggttaatttttatataatattatttattttaaagttatttaatttacattttttttaaaaaaaagttatttaattcatttaaaactattaaaataagatttattagataattacatttttgaattcgaataaatatttaggttgttttaataaccttattttgaaatttacatggttaatatattttttgttttaaaaaatagagtatctcaaccaactttgttacatttttatgtattttaaaattaattattggtaaaatctaaattaactatggctaaattgatgatgatgttagggtttataccttaaaaatctatatataaataagagttgaacattttaatatatggtgaatgttaaattattaataatttatattgaataatttatagataaatatttcaaagtttcttattcatacatgaaattgtgacttgtgttgtacagagaattaagatcacttagctatgaataaaatagttaacaacatattaaatttatgggatatttaatcgatggttgctagtacgattcactggcccgttattcagtgcaagcaatctcgattcgaattgctgatgtcgtgtttgtagaagcaatgccttgtacaattttctaaattcgatcatagaacatacatgatggcctactttttattatgtgcataggcttattataggtgtttagtgagactagacttgtctcttactaatgatttaattgctcataatgtagtcattactaattgaatttgataggttttaaattgaatatccaatacacacctaattttttatataattaataacttaaaaacatgaggaaaaatacttaaaacctatacaaaccttcatttaagtttaatattacataagtatataatccttacaagtttaattgaagcaaaagtttaaaataactaaaacaataacactaccagctaaaaaatagaacaaaacatcataaaaataaatacacaaagtaaccaagtattataaattcaaaaaaaaaaaaaagctagaaaaaatataattaaaatattttatttattatatataaataaatataaataatttttaaatatgtattagatgtaattagattggattagtttttaattagattttgagattgagatccaataactgatctaatctaattaattaaatctaatttttaacatccaatcaaattcaattataattggatatctaattttttgaaattagattgtaaaagattagttttgctcaattggattgaattggattttgtccacccctacttatgtacttgagattgatgaactagaa

SEQ ID NO: 203997 - DNA, 1300 bp, Cannabis indica
ttactgttatgcattaatcacttagtaccatatatgcatgtacatcattccttatatagtttttcttgtgaaaaacattctttatattagtattattattgggagattaattcaacataaaaaaaatccacaagaaacgtttgtacatcaaaataaaattctgtatgtagtaatataaattgaaatccagatatatgattaaattttatttatatataaaaagaaaaattaatgttatgtatacataaatatattgaatgtccatagtagaggtagaggatatagttaataggcgtaaagaaaagttgaatttaaggccgtctacccaatttagatgggccaaaacttatgtggctttagtgttagggcattgctttaaagtacaaagttaattacttcaaccagattttgttcaaggatgacacaaaatttatacgtaataatgtacaacattatttttaaccaatagtcaaataatgtggtcttttctctcaatgctatgcatcgatatatgtgtaattaatagacttttcatcttttttttcaataaattacctttaataatggtttttttttggtaatttaataatgggtttagcaggtcaagaatcaagattatatctatatagtgcactaggcaaaagtatttctttgaatcaatcaagtggcaatcaaaaaagcacaatgaagacgaaattcattcaagaatgcccagtcaatttttggaagataacatttttattcacacacaagggaatataagttttgagcgtaaaatttgattaaaaaccacataattgattctcattctaagaataaatttgtgcagatgaacttaaataattaagagaaatgctaaaaagtatccgtggtgccaagcattctcctacttataaatatcgctattgatctaattaagtatcagatcccatatagtttaataaaataacatttaaataatatcgttatctaatcgcaaaacaacaacatgtttaagggtgctaggcactactggtgcccaataacaatactcaataattaatcattcatcaaaaaaaaaaaacataagtaatccacttagtattaagtcgacaatcctagaatataatgcttaatctcatttctaatctcataacttattacatatacaaatgtgtgagcttgacttccataactcaccaaacaatgatgcgaaagtcatatgactactcaaattttgtttaattttattttaactaacatgttgatacataataacgaaattacgtcaaaaattgtaaaaagcgttttttccgttaaa

SEQ ID NO: 203998 - DNA, 642 bp, Cannabis indica
tacatcaaataatttttaaatcagttaacaaaaaagacaaaataatcaattaaataaaacaaaaatttaatacatataaatatataattaaattttacaatctaaatcatctaattcttttatgaaccaaacaacctattataattggagaaatctaatctaactctaaaaagagagacatcacggataaataaaagagcagttagataaggttcaactcatgtttgtatcactgataatatcaataaaaaattagcaatactcacttttttttatcaagaaaaggatatcattactaaaaaccatcaaagtttacacaaaacctgctaaacatcacccaggccaaagccatagccctctctcaactacattatacaaatgatctctttaatggataaatctctactggtatagttcccacccttgacaaataacattctatatttcagagagtttttatcaactatctacatgagtaattaacatagctttttgttcaaagatacataaatttttattccaccaaatgcaataaacttctcaagccaaatacttgaagtcagctatataagatctgatatgttgcatgacccttagagaataaccacaatcaaagaaaaaattagcatgtgtatcatctct

SEQ ID NO: 203999 - DNA, 1124 bp, Cannabis indica
gactgctatatagaccgcgagaccacctagactcgaaccttctaaccctacaatatttggagaccttgaacctaaaacaattgctacctagataccggagggaactgaatctcagacctattataaaagcaccccacatgtctgatcattttagctagccctcttggatcaaaccttttgagttatcaatagggttaagagtccatccattctctaatactacaagtctacaatatttggaagacaaaaaatctagcaaattcccatgagaaattgctctccaaaccccatgagaacaaaacacaaaactttaagtttaacatgatcaagcgtcatttgttttagtcaatacaatattggatctagtaccaaaaagaattgtcctaaatcatgcaagactagcatggtagacggtagaccaaatgtttttacccgtttcttaactaatgtcaaagatagtttctgaaaccccaaaaatacaatgtctaaacatgcaactatttttcataatcatgtgaaacaattcaatgaggcattcgattttctagccaatcacgactcacgagttaatatagattttggttgagaaaaatcaagcgaaagataattgctttcaaatcctaccgaacaatctaacagatcttcctaatcaaacaaacataaaaccctaaaaatcccccacccaaaagaaaatctcacctaagctgagccaacgatgatgttgttgatagggatgaatatcagtttgacgaagaaaccgacgaatcccatgacgacgaagccgatcgcggtacggagcgccactttggagaattctggatcacagatcaaccatgcgagaccatcaatatcaaatcgaaccaaatatatatcataaaataaattgaatcgagaaaagagagatgaatacaaaatctaagaatacctttgcgatcgggcttgtggcacctcttgacgaggcgaacactgtccttggcaaagtctctgagaggatcgatcacggaatcaattgcatccatttttgtgtttctgggaaatctaaaatttgggggttttggaatttggagagagaaagaggagagagatgcgattataagatgagaaggcagtcaagtcaatttata

SEQ ID NO: 204000 - DNA, 1607 bp, Cannabis indica
cagtacccatcacaccaatgcttgaaattaaatgctggatgaattgttccaatatttccagtaggatacaatcctcattatcatcatataaccaaagtgagatcagaaaattatcaatagttggccttatcccataaatgtgttgagtcaccatttgagaactaaagaatatgtaacagtgacaaagtacacattcatatcttgtagtaatttctttgtgccccatttgtctaacagtgcccatgaataaacaaccccccttatcaccaactaatttcccaaatccaatgaaaaacatgaaattagtagtaaaattggttctattccatttgaaatacctggtgacccaaaatttgttgtgcaagcttggccatggaagaaactcttgagagcaagcttttcttcctctgtcaaaaagccaacgaacagttggtgtcttttcctcttcgtcatacccaaaagctgaacgtgaaagttgtgctccaaccacccacacctcattttccgttgccggccctaagttacagcacccaagttgcaccaccttgagataccatgagaatgaagacttaatattcccaatattcaatgcgtgacatggagaaatggttgatgaaccattattctttggatgccacatgacccaattgtgacctaaattaagatatgggctttttgtcttgcttactgggcccctattttgttttgatttgggccttaagtttagaaagaaagaagtgagccctacctccaaacagaacattatttctctacgacattgatcacccctatcaccctcgaccaaatttggcggcttccctggcattgcactcgacggtggacgatgttgatccttcggcgcaaatcggcagcgcaatttctccaccagcgagtgtttttcaatggaggcaccatcactcatggtttttaatggtgggaaagatttattctctagcttccttagagctgattgcaacgatagatcttcaagagctaagtcgttgttcatagttgaagatgatttcgcttccaatggagatccggcggctctttttccttcttcagcaccggttggccgtgcagctcccatgagcttgacgtcggcgatcgaaaacgctgctcctctccaatgttattatcctccagctgaatgctgatcatcttcattagatccggtgagctacggttcgacttcgacgacatgtgtagaagagccatgtcatggtgtttggctggaagtgttagcgagacacttcttagatctgaaatcttcgttgcttcacccttatcagctttgtcacgtcgtttgtcctcctctatggttatcactgcctttgttacttgtggcagcaacatcctcaaacaactttgtgtaggcatcagcggctcatcctcagtcaccacttgttcgtcgttggcgtttcgtgcctctctgactttttgtatcaactgagtaagttgattcatcatcaggcctacatgtttctcgatggtcttttcaatcgtcatgtgaaatgatgatttcatcagctccaattgatttgaagcttggtgaagtttcgatcgaatttccgtcttaccttgccccatagatcgattgctctgat

SEQ ID NO: 204001 - DNA, 678 bp, Cannabis indica
agctgattgctactaataaaattatattatttattaaaaagatagatagatcacaatttctataaatgacttttgcaatatgtttttggtgattattatttttattatttattggttggtattttttttttttgaaaaatttaatagttgatattacttctacacctcaaattaaaattcaataaacatcaatttaaacatcccacattgtaattaacgtgtctaattattattatattaattatgaatatattattaacaaaacattttttaacttctttctctttctacacttagattaagaataactatttattaatatttattttctttgtgtaattaaaatttaggatctcttctatgatctgatctaatttataataaccatgataataataatattcttttgttgattataaagagaaataataatattctttttttatacaaaaaatattattattacaatacaagattatattctcttttttattatacacttggttagtgagccaaacacacttgtctcaatattcatatattaaatttatatatatacacgtatataacgtatgattgtatttttttaatttattattatttttttttaaaaaaaaacgtatgcttgtattgaatttttacgtagtaaatgaagtttatttttaaataattttacta

SEQ ID NO: 204002 - DNA, 1757 bp, Cannabis indica
ctgggtggtgtggtgtggtgttagatagtaataagtgaaaattataagggttggtttagaagggtaggtaggtaaagtgtagcctttcagccacacaaaagggtacctttaaggcaatgagagacttgttagatctatcgttttttttttctcaatttctttctcttgtcgcaatcgaaaactgagaaaaatcgagactctgttttattgagtgttatatggataataaagatagatacactactcggacacgttatgggaatgttttggactcgttttgtctgtacagttaactagtgtttgaatttgaacccacacgtaaagttgggagttgggacccttcattctcagttaataatacccttttgaattctaggattattacttaatggagtttaagattattaataaaaggaggatgagttgagttgagtgggaggtcggtcactctggtggtgttctcggttcctgatacgttacactatgcattaacacaaaatatgtgggtgatgatttttcttttcatttcttgtaataataatcaaacacaatcactaggaaaaaaaaaaaaaatagtttagtgacaattatacaattttcctataaatttgttattgtgtgaaggaaggcctaacttccaaataacccttttactcctttattttaaatacaaatactagaatttaattttgtattttcttttagattttttacacactaatttttaatgtacacgatatgagaaggaaagaacacaaatgatcaaacaataattaaaaaaattatttagctaaaaagtaaatcttaactaaatgttgaagaatattgagttattataaatcatctattgaaagtagaggagtattactgtcaaatctctattacaacctcttaatcaacttttacgcttaaaaatacacgtcgaaatatttttttttcaatttttttttcacaatggtattcattatgcttacaatatcattcctttttaaaaaaaaattgaataatttacagtgccaaaatacgtttaaaattttttaaactatgcttgttaattaagctggaatattaaaaactactgttttgggtcactgtaaactattcaaatttttaaaaaaatttacatagatgatactgtaactataacgaatatcgctaataaaaaaaatattccgacatgtgaatttaaaacgggaaggtgaacaaaaaattgtaattagcactcttcttgaaagttatatttttttttttttttggtaacaaattgaaagtattttgttagttttaaaaaataacttaactagaataatgatttgcacttaaaatatacaccaaaatattacattcaatttcaataacataagcactactttttaaagtaatgaatctcagtttaaatacaacaattacgccaaggtcttaaagaagaccccaaggcccattcatctaagggtggtggtggattggttggcatgtataatgtacatatatacttcacacaatctaaaaagataggagtttgtgtcctaaaagaaatgaacaaaatcatccaatttgtaataataatgtgtgtcatgcacgttttatgtcgcatcactatttcaatatttgtaggattttattattattatttctttccaatacttatcttatacctttgtcatcaggggcggaggtacataatgcattagggtggccctgacctcccacaatttattacaaaatagttgtataatatgtgtagttatctaaagaaa

SEQ ID NO: 204003 - DNA, 532 bp, Cannabis indica
actaaaaataaaagtcatcaactacatacaaatactatttttttttaatatatattgggggagagtatatttaaagttagaacctcctctttacgagaagaagtgcaaaactactagactaagtctatgaccacactacatacaaatattattaaaaccaaaaaataaagtaatcatgaataaatttcgataataaataatagcagaaaatataaaataaaaatagcataaaaaggagtaaaataaggtaataaataatactagaaaatataaattaaataacaataaatataaacttaaaaatggcaaatagaatgaataaagcaaagttgaaataaaatactatattacctattaaggaataataaatattattttacaaaataacaaaataaaattgatttcataattaaaattaaacttaaaacaaataattattaagataaacatataaataaaactaattatatactatgaaagacataataatgaaaatattacaaaatgaaattatataataataatacaaaaa

SEQ ID NO: 204004 - DNA, 821 bp, Cannabis indica
gtcttcttctcaagctagtttctcgaatgtcacttgaagcttattcggatgccaattgggctaggtgtcttgatgataggcgttcaactagtggttatgctatgttttttgatccaaatcttatttcctagtctgctaagaagaaacaagttgtttctcactcgtctactgaatcagaatttcgatcgttgcttactgaacttcaagttacccttgctgatgttcctataatctaggtcgataaccaaggagttggtgccttagccaccaaccctttcttccatgctcggtgcaagcatatcaagattgatcgacattttgttcgtgatcaaattctgactaatgcactttcactacgttttgtgccatcaatcgaccaagtagttgatgttcttaccaagtgcttgcctaaagattaatttttgtacctcaaatctaaactcaaagttgtaaataccccttttcgtttgaggggagatgacaaccaacaacttgattctggtcaggaagttagtttaggctaggccttgtagttagttagtattagttgtccatttgtgctaactataatgaattttgttataacagaaattctcagttttgtactgaatcaaaagtgtataaatgaagttcttagctcattaatcacactaagatttctttcaaactgaatcaaaagtgtataaaagaaagttagctgagattaattctctcaaactttcttcttcttttgttttctttcaactaaatgttccttaactatttgacatattaaattgtattttaaattttgacatgtatcaaaaatattatttatttgc

SEQ ID NO: 204005 - DNA, 635 bp, Cannabis indica
gttctgtcttttgtttctaagtttgtttttttttgttgtttttttttttttgtatttttctctatttttcttgttagttctctgagtggttggattgtttcctttgctcttgttttgtcatatacactattttttagtatttttttttttcactctaaagataaacatctatcaaaagatgtcaaaatatatccatttcatcaacaaaaatttaaaacatcacactatagatgctctaagtgctgttattttagttctctctcttttttttttcttattttattttgttttctatggagtattctttctataattactccactttttctatataactccagtatacaattttctctttgcttaatataatagagaatttgattatatatccatacattagggagaaattaattctctaaacttatgtgtaccaatattggaggagtaggtcaactttctccttattccgaaaatgtcctccctattttgaaacccccgactcatctctctttcctcttttttttctcgctctcttctccttcttccctaaactgaaacacaacaagtttcaaccccgagcgccacccacgaagcagcccaaccaccttgcaccaccaacgaagttccccaaccat

SEQ ID NO: 204006 - DNA, 1397 bp, Cannabis indica
acaacattaacctaataacaaaaaggtaacctaccatgaactaatcaatgtatgtattttttcaataatatacttaaaatacgaattaattataaaaatagcttaacagatataattacaataatattccttccatgccataaaagaaatatcttaattctaaattaatatgtttgaattagggatgcacatgggacgaaaaatttgcgaagagtcctctcatcccatccatacttatttcttattgtggacggggcgggaaatccccaatataaaaataaaatttatttaaaaatttaaatatataaaattattaaattatataaaaattaaaatattatatattatttattattcaatatactaattattatataaaaacacaacttaataaattatataaatgacactagtacactaagaaattacatatacctattataaaatataaaatattaataaaaatataatcaataaattaaacgggtcctcgtcggagcggggagtgtcatcttgtctccgccccgtttaatattcaaggataaaaaatggtccatttccccgcctcattccctcatttaaacagagaggtaggtctccgcaaggtccatccccataaagaaaatgtgcatccctatttaaaatggaatcaatcatgaaatattacttttcatttttgcattgtcaaaaataatttttttgttactcttacttattatgttgaaaaaaccaattagtaactttttcataaaaatactatatttttgtattatataatttgtgatatattttggctatagaggtatatacaaatgttgactaaaattaaaaatattgattatttaaataatatttattgatcaagaacactgaatgctatataaaaatatttattattgaatagttacatatgcaaatatttaaacaacaaataaatagtaaaataaataattattcattgtaacatttaagcaattataatgttcatcttcaacaataaattggctattttatcaaaagtaatgttcattgtcaataacaactgcataattaaattgtatcgccactgataattgatctacttctttgatatcaaataatttaaaagccatcgatctttcatcttcaacatgtctttaaactctgcagcattggtcaattttattctgcacatagcaaataatcaataaattttatcatataatatatgtacttgaattttcaaaattcttcttcttcttcttcttcaaaaaaaaagaattctcaaaatttgacaaaaacttacattccataatggataaccataaaacaactcgtaggtaatattttttcttactacgcagtgaacaccatatcaatattttctcttcttcacattagaagagtcgctattcttc

SEQ ID NO: 204007 - DNA, 530 bp, Cannabis indica
gtttgctttcttggtgtttcttcatggttcattcttatgtcttcattatattctttacctatttatgtatatgttgacagagtgggatgtgaaagaagaaggaaaagaaaccacacagcaatgggaagatgactgggatgatgatgatgtcaatgatgacttttcacaacagctaaagaaagagttggagagcaatgttgcaaagagctgaacatttgaaaaatttatgttgccttggtactttcccttttccttgatattagtcacaccttgaaaggtagcttgaaatgtatcatactattgcctcttttatagagtgagaagttatctacccaaactttgaatgttaattttagatagagcaaattatcagaatttctgtgttggtgtttcgtaagttcgtattgaaataattgacagctctaagtagtcctttagaatgattgttgctttgttatgctagtcaaaactctccatgttggagtgataaagactataaaaatgccgaagaactacctctctctctctct

SEQ ID NO: 204008 - DNA, 1233 bp, Cannabis indica
gtttagattgatgggttaggttttgtagagtttgtttgagttcagaattgttgttagtttgatttaaggttgaattttgtgttggtttgtaaggttttagcttctgtagtttgtgttggaagaatttgagtttttgaactcaaagctcactcaaaattggtaaaattagtttcagatggttttaggtgcttttgtagtgtaggttatgtttagattatcctatattgttattttggtgagtttataccctttggttaaggtgggagctagttttgagggtctaaaagttcggtagtttcaaactctgttttgcctagaatggtttcgaatgagttatactcattagaggggattagggtcgtaaggtctggtagggtagttttgaacgatgttttggtggttaggttctgagtagttgaatatgaatggatgcttctggagtgtaggttgcccatataggtacaacctggctggtagtatctggattaggggatctcaaatgaatgtgagtaaggcttggacagaggtatctagttggtatgttccagagagtggttctaagcaggggttatgattggtatgttctggccgaaggtttcagacattggtatgttttgttaggagttgttttgggaaggctcaagttgtgaggttttgaaatggaagattccaggttggatccgattgttttgatgagggactcccaggcagaaacttccaaatgtagtttttttttttgttttttttttttttttttattaaggacttttatgtagaacttctggatgggattttctagatgggttgtagccagcttttatgttaagtcctaaagtgggtttgagtgagttatttagcagtttatcgttgtacgacatggcccggatcgccctgcatttcccactcgagttggccagtacacttgaatttagacttgaggtaagaaaagtataactatacaatttagcatgttgaatgtgatacgattattgccatatgcatatggaagagttattactcctaaaaacttgttgtagggtaatgtgtatggaagggttattactctttaaaacccattgtagggttttcaatatggaagagttgcactctctaaaacccactatagggtataaaggttgtcttcttgggaaatagattaatggttgcctcattacacaacgaaccgaaggttttttaattaaataacggagaataatggttactttattaagt

SEQ ID NO: 204009 - DNA, 802 bp, Cannabis indica
ggttaagttagttttaagttaaacacatttaactaattttgttatttacctaaactatctactctgtcgataatcttagaaattagagttactttatcacattttataagttgaaaatggtttagtatttatgcttttagttaatctattaagttattgagcattttttttatatataatttattagatttattttcatttcatagttttctgtgtgtttttatagctattttatttaattatataatgtgttatttacttttaatttgattttaattttttattaattttatgtacttgtaagtgtgtttgtggaacaaataatgcgggactaaatggaaaaaaaaatattgaagaattggggtgaaaattcaattttaaaaatataatcagatcaaatataattcaaggttcccggaattgataattacacacctcaaaatattaatgagacttataagaatccttaatcacaagaaatgccctcaggggtcttccaggaatggaagctggaaaggtatcttcgatagtctatggtcctgagagctacttacgtgtcacacctctgacacgatcctaagaaatctaaggacttgtcccttctaccaaccttcgcaaaggcacacaaaaaaaaaaagggagagcaccttttttaagggtgcaccttaacttttacattcctattctaaacgacagtgtacaacctcgcctatcaccatcaatagtactacactttgtctggcagattgctttcaagaatcgggcctcacatttacgacctgatagatcaaaataaatgctc

SEQ ID NO: 204010 - DNA, 1162 bp, Cannabis indica
taatatttctgtttctgctctcttcttaatttttttttttttacctctgtgagtgaattttttttggtgaattagtacaatcgctttccatgactaaaacaacttcaagatctaaaatcttcctcacccaaaagtaatccaaacccatttgaacctaagctttgttgaagtgcattaatggcggaagaggggttgagctggagacacaaaagatttgtgggcattgctaatacgctctctctctctctctctcacggacataacttcacgtgaagtcatctcagaacttgcagagaccaccacatataatggaagctgctttctctttctctcttctccatgattctttttttcatattgtttaaactgcatcaaccaatgtcgaaaactatttaattctttataacaataaaaaccaaaaaacaaatctcagaatatcttggggctgctaaaaatttgaacttttactgaaatcaattgagtttagcgctgaaaacgtgaaaataataaataaatacaacaaccagttataataatttcaaaacccagtagaaaatgaaatcattcattctattattatacatgtatatttatacaatacaaaatgaagagtgaggaaaaagagagtgaggtggtggagtggtatataccaaacccaaatccagctatgcaaaagtattgaacagtgtttaacatcaatgatactctgtatattttgttccaaataataatacaagagagagagggactcactcactcactcacttctgctctctgctcaagaaatgagctgaaagagatataaaaaatacaaagcatgagaaggaaacattataactttaggaaaaatatatagtacactcacctaaacttgtatgtttgtacaccctatttgttttcccagagtgttaattttttttttaatgattgtatacattataattatcggtatctaaagaaaaaaatttaatctgacttttttttacgtcatagtgtatattatagttattttgaaataaagattatccgtaaatttttaaaaaaaatttaataatttacaaagtaagatttacatattgtattacacgcatgactggtcataaatagctacaatgtatataattatgaaaaaatatagaataataaaattttttatatgtta

SEQ ID NO: 204011 - DNA, 2143 bp, Cannabis indica
ctgaaacttccggaagtacctaaccattaagtgtcaagtgaatgactacgtatcagtccctgattggtcaacgtctaattaaaattcttattttttatttagaaaaattaatttaaatatactaataaagaaaataatacgtagataatgacttgacacttaacggttaagtacttaacggaaattactaaaaatataacttagtacaaaagttaaatttagatatttatctgtaattaataattaaaattaaatatttatggaacaaattaatttgttaagttagtagggattccaatattctaaatagtataattgtaattaagagaattgttaataggaactaatttagcacattttctttttatgaataaggaagtatatagtgactaaaaaataacttgtttttacaatctactagcactccaaaagggccttaactatttttctttttttggttgagaaaaaattactgtttataaaaaaaaattatgagcgttgttattgaatattagtggtgcctaacaccttctatacgtgttatcttacaattagttaacttaacgatactctttaaaaattattacattaaattatatgaaactcaatatttaattgtaccaataaaaatattagcatgtaagagagtactaagcattattggtactttttaacatttctcttaatataatgtgagatcatagtagacaactttaacattgtcaacttttttaataagaaaatgaattaaattttatatggataaaagaaaataaaaaaggtaataaaatgctctaatatctattattgatgctagaattatcttttattaagttatgtttatgtgtaattataataagagaatagcaaaaattatatatttaaaatgataatagctttaaatagaatagagcataaatgacaaattcataatagagataagtaaccaatttttctaatttgctatttttggttacatgatatatacactatgacttatatcatattctcccttggtttggttggatcatcctttgagggttctcatctttgttaagccgacatggcaaaataacttttagaaatcctttacaaaaacttgatcaaatcataaaaatgctagcaatgactattttgaagagaattaggataattatggagaacttttagaaatgttttaagtaatagattgataaaaatacgtacttcaataaaattaataaattattttttagcgattttataatttcattattttttaatagttgttatgagatttttttgttgttgttttagagctgacttatagttattattatccacgtttagtgacatatgtatttttcaaagcccaatatcaatcaaagtagaattattcttggtccaatcaagttaataaatcaacctaattacgaaatcaagctatgactcaaaatccaaatgtacgcccgtcttacagatgcgataaggtcaagccacttcgatctagaaaatattgtttggcttagaaggcaaagggtccatcgacatcaagatctatactgacgccttcatggggtaatctggatacatgaaattgaagagatatcgaaagccttcgaatatcatcttatgtggcgacctccaaacacgggccccaccatgtcaagtttgtccccccacgtcaagttcaaggagtgcacgtactataaaaaaaatcaaatttttatccaatgctatattctctaacattcttacagaaccaacatagtaactcacgacgtgtgtcatcataatcggtctacgcttgtacgaacgaccattatcagtgttctcatgaattggacctcatctaattggctcaaagtcaatatgtattgtattttttccatcagtgggcctagttgacacctttaaatcctaccgggtctgagtttgcctatatccgaatctagcctataaatagaatattatctcttcacacaaagggatcggttgaaaaattattttctgctactaagagctaagaattaaggttcttcaactaggaaaaaaatatttgtgtaaaaatacattgaagtttttctagctcaataatattgactcatatacttagactcattaacactctaaaaatccaggtttcttcttcttacaattattt

SEQ ID NO: 204012 - DNA, 1231 bp, Cannabis indica
gcttatcaaccacatcaatatcagcaaaccgaacataatgcaatgacaacgatttcaagcatggaaaatcaaatgagaggctagaatccaactccacatcactcaacaccaaattaatcaaatattttgcattgattactagtgttttaggtaatctgtagtagtaaatttggtgattctcctcagatctatctggggccaaacaaaggtttatttcctgcaccttattgtcaactacaaaagctaaccatttatctaagcaaccaactaaacttctatcatagaatttcatttgaagctcaaaattagtaaccattgattcagggacaaagttcctacttatcttacggtgttccaaacacttgtccacaaaatgaaagaactcttcttgggaatgagattcagtattggagaaagagagtttaggaacaaaataccagatgagtttccaacgttttgaaaggaggcaagtccgaaccacatccttagtgggaagaaacgacagtatgtgtacgatcaatgcattaggtagttttgaaattctgtctttgtcttcctcaaccatcatcattattgattttattctcttagccataaatgaaatgtgaaaactgctaataaagaatccatgaataaaaaatagaacaagctaagtcataaatcaaataaaaaagatagaatggtttataattacctgtagctaggtcgggtgcatcagagaaaatttgagtaggatttgggttagggtttaggttgaagatgaaagaacaacaacatttgactcaattattattaatatgtgtttgaatttttgtctttaaaaaaagaattgatgacacgtgacttccacgagtgcttacatgtcttaatttgagatttttttttttatcaataatgaataattttattgaaaagaaaaatataatgtcatacaaatctgatcttatccattcctcttcagtttggtcatgaccgagatcaccttacatggaaaggtgagatttttgggtggtatactgttaaaagtgcatatagatttgctcaagagattaatggggaagatgttcaagatggtgatgttgctgcaactttttggaaaaaattctgagcagtgaaatcacctccgaagatgaaaaacatggtgtggagggcctgccaaagttgtcttccaaccatgattcagttgcgaatgaggtgtgtggatgtgtctctcgtctgccctgattgtaac

SEQ ID NO: 204013 - DNA, 570 bp, Cannabis indica
taaaagtatgaccatatctaactagtttaactttttctcacaatattataataaatgagtttgttgatgtgatcagataaattagtgtcgagtcataaattgcaacaactgttgtgggaattcaaaggattatatagcattagcactttggttttccaatttttcccacgggtattgtttaggttcactaccaggatttgtttagttcccacgaatataccaatctaagcattaaatgtcagtattgctattcagcaccaggactagtgcccaacaccttttatcggtagtgtcttacgatttgttagttttttttcaaaaaaaaatttaagttacatgagataaaaagtgctagacacccataatatcttttataaatttactgttttataaatacaagccagtagtactaaacaaaaagtctctcaccacacttcagctaaaatatttctaattaaaaattgtaggtttattttcagattaagagtacgtcaatggaatcagcagggttgtttcaagtgaatcggttagagccagagttggtcagaccagcagaagcaacacctcgtg

SEQ ID NO: 204014 - DNA, 1116 bp, Cannabis indica
atttttatcgaaatagtaaaaatgtcatattttctgatagtggtacccatttgtgaaatgtggtcaggacccatctcggaatatttttccccactagttaaaataaatttgtactactaagacgtgaatatgaagattgtttccgcattaaatttggtgaaaatggcatcctaaattaaaaatttaaaatgttattcttttcaagataattttaacatgtttttccttactcttacactcgttagtgttctcttaaaatctcacactacacatatcaaaaaattgtgaaatttctcagggtggaagccaagaccgttgtccatcacttttctattagacacgttgagagaaaacctagttttcaagtactaacaattattttttatcgaaatagtgaaaatctatcatttcttatagtggaacccctttgtgaaatgtggcccggacccatctcaaaatattttttcccactaattacaatgaatttgtactactaactactaagacttgaatattaataatggttttaagttaaattaagttaaaatagccccctaattcaaaaactaaaaatattcttctttttagagtaaattttaacaagttttttcttactctactgaaacatgtctttaaaagggcccacagtagacttacccaataatatttcaaaaagtaatggtaactatggttaatacaattttattggtataattactttataacaattattaaaatatatgtaaaaagagaagaaaataaaagtgaaaatagaagtaaacttaacttttgtgaccgaaaatatatactaatatattttttttaaaaaaaaaaaagaattatagattatactcacaataccatcattgtaaattttttaaaaatttcgaatagtttacaatgttaaaaataggtatgaagttttttgaaacacacgtgataattagaatatcaagatctattttcgatatagtaaactattaaaaaatttcaaaaatttacagaaataatattataattataacatccaaaatgtcaattaaaaattttcaagtagttgattgaaaagtggttagtttccaaatgttaaatgcaaatatagttgattgtctacat

SEQ ID NO: 204015 - DNA, 856 bp, Cannabis indica
ttcgtcccctttacatgaaccctctcttaagtttttctagtacgttctttgcatgcatgactgtggtgtcacgtctttaatatatgctctgacaaacatgtgtacttctgagctgttaatttgtaatgattaagtttattgagggattatctctttcaggctaattttgttttatctaggatgaaatacactatattaatttggtttggccttgcttctaactgaacagaggtatgatttatttcaactaggcctgacatttatcccatttcaactatattcaaattgtggtgtacttttccttggtctgagatacatgctatctcggatccttgatatgctctgccttaacttggtccaaatataattatgtcttggtttggcctgcaacatgttctgtctcagcttgattcgagatacaatttacctaggcttgatcgaagttttgactggtctcggtcaagtccagagcgtcttggtcagtaccaggttaaattttagaggaaattagatggtatatcctttttaagggaggccatctcatttttacttctttcttaaaactcattaatttatgccctcttttttaattattattccaattatgtccctcttatttcatacaattaacgccttcccaaccatataaatacccaccaactattaattaaggtaacatatgtaagggtaaattagatagtaatcttataaaagtgggtaaatttgaatagattttaataagcaggcatttttagttaactgataaaaaaagaggcatttctcattttatccctttttttatctcgacctggtttgagtcttaatcttatctcggccttttacgagtaatgtctta

SEQ ID NO: 204016 - DNA, 607 bp, Cannabis indica
agaaccaactgctgggaccatcaagtaccccgacaattacacctttgcaatcacaactctaacatctgagggttaggaggtgtatcatgtgctgaccatcatcaatttgtaacacaagttcagtagagtctcattattaatacccttctcttccattgaagtgggagttgaaaaatcagtgtaatacgaagacttcttttgctgcattgttgttctaatcttcaagctttttaagttatattactctttaatttgatatcttaattttgattttctcacttttattttattagcgagaattagccgttaacaatactatttagatatattcttaaaataactaagttaatactaattgattatctaatagaaaccatacaaatattaaaacaaaactcatattttggtgtggcattatttttatttatttatttatttttgtataaatttccttaatagaaccgtaaataaatgattaaatatttaagtattatatatttatgcatggaaaaacaaaaaataaaataaaaaattaatataactataactcacgtcataggtatttccattttgaagaataaaaatcccatgtaattgatacgttacc

SEQ ID NO: 204017 - DNA, 1076 bp, Cannabis indica
gtttagcgtcctctaggattagcttgtgctctcgcaattttgtagtagtacacaacaagcgtcagtcgcgatcttccacagggaggccgcttaggactttggcaatttctaaacggttttggtctagtacagattgagctggtctatctacgaataaggaaaataagcttagtgtctataaggtgatcaaaataaatactaagtgtaaaaatacacgacatacgaggacggaaattgaagtcaatcttgactcctggcatcttaaatgcgtagaaccattttgatttctaatcccccacattggaaaccgtgccttctaccccgtttatttcagagttggcccatttactaaagcaatagaagtcattatcatgaccaacactaaaagaagctaaaatctttaactgttggttctccttgcgtatactccatatacatcgcataaaacctgaggattatgcggtaactgtttggggtaagttggaaaagaaaaatgtcataacgagaaagaatgtccttcatgaaaggatgaaaaggaacgtcaccctgcatcgaagaatgagaattgaaaccaccacattttgtgttgggatgatcgcatgtaaaggggaggtgaggtcgttgtgttggcaaaggcttggaggtagccgtgtgaatcagattcagctttgcaaatgttgacaaatcagatttcttgactcacgagactagatcctcgtaggagaaaggcttgttaattgggcattgtcgactgaatctgtctcacttccttcaccttccgcctcgtcctccatctctcggtttggtaatttgaagtcctcacccatttcctcgacttttgtatctagggcaagtcataaatgaacaagatagccttgggttgacatcatagactcgctgtcgcgcacttctaaggtcactagttccgctaattcctaaactatcctgtctatctcattcgtagacaacgagcccttgcgagctctggccacaggggcctcaccctcggacatcgaggttgggatgaagctattgctccttttttattcatttgtgaaggctccctctctagagtc

SEQ ID NO: 204018 - DNA, 681 bp, Cannabis indica
gtaaaattgtaatttttatccaactttattagtatagacactcttagacttaaatattaatgtttttgaagaagatttagaagtaggttattttggtccaataatttaaaatttataacatgtattttatttaagacactaacaaagtttgtacttacaaaactaaacaaaaattacatcttaatttattaacattttgtacttaatagctttaaaaaattagatttatactagttacaaactcaaaattttaatcacttatactacaaatatctcatatattatatatattttaaaatggtaaactaacaattaatattaatttttttattcaattttgaattttgttgaacaaatttctttattcgaattgatatactatactttttgaatgtaacaaataatgaaagtatgcgcgtgcaaataatatgcttattattaatagtattataattaaattaattaagtgtgtgatacattggtatggcactgcttcttagttatagggtcttctgtgtccatatagttcatgtgtacatatatttaattctaaatcataaaatttataattcaatactagggttattaatccaatttaatttacgctttatttttttttttttttagaaactattactacttatttattttagttgtatatgattaatattaatgatatct

SEQ ID NO: 204019 - DNA, 1360 bp, Cannabis indica
ttttttttaatatatatatagttttgtgtgtatacaattttggtagactcgagtttattgtaagatgttttggtgaggaaattaaagcaatcggcaagcactatatataaatatttttatatatttaaacatatatatatacataatattttatgtatgatgatcccatttgagtattatataatatatagagagagatcatgatatacatacaataatatatacaagccatgcatggacgaaagcttgatcgatatattgattatggatttatatttatatatatatattttaaaataattggtcgacaatatttacatttttaattaatttatttttaaaaaatattaatttggaaaaaatatgcgccaaaaagaggtaaaaaaatagatatataatcatgaattcatgattagataatgatatcttcaaaggccatataccaattaaattatcgtgatgatgatcatatattttcactttataataataattaatattatatatataatgaaagatacatatagatttgcaacctttttaagaggttattaattattaggtgcggtaaaatgtgccatcatattctatttgtgttatattttatatcgatttgttttttttttgactcgtgtttaattttcttaactttaattcgattcgtaaaaaatcatatttaaactaaaattgtaaaaaaaataataaatttaggttctattaaaaaacttatatatataatttttttatataaataataagttaaaaaatttaaaatattttaatttcacaaaaataaatttttttaatttattttaactttaacaatgaatcactaaatatatatttttatataattatatatattattattaataattttttatttttttatttttaaaaaaattgtgtcatacatgcatgtcaaagagtgttaaacaggtcgtgtcgtgtttgactcgttttttattttgtgtctattcatttttcgacctgtgtttaatttttttgaccctaacccgtcaaattcatgcacattcgtattcgtgtattgtgtcgaaacctcttttactacccttaaatattattagaatagagatcaactttacgtgataatattattgattattcaactatattatatatcacattcatataagtgtataaaaataattaaatatatttacaatattttatcatcatgatcattatactttttcatcaatgtcggattattataattattatcattgctttaattagatattaattataattgctttgttatctttttgtaaagtattattacttttctcatgaattcattttggcctcttataattattattaattaatatttttg

SEQ ID NO: 204020 - DNA, 730 bp, Cannabis indica
agagatattattcatccttatatatcaataattctttttatttttagtcaatgtaaaaccttaattttacacataatactatttcaacaaccaataatagaccttatgtcaaaatacctttgattcaaaaagataaataaaacttttcatacccaatctccagcatcgtacaatcctcacaactgaccaaatcttcaattactatgtaacttttttttacttacgttaatttttttttttttttttttttttttttttttttgtcaatatgcttgttatacttaggttgtcaatacagtagggggtttgtctctactaaattttaagctatttttaataatgtaaatatataaccctacgaatctatcatgtttatattactacaatttatcttacttaaagagtgcaaatcaagataaagcaaacaatcacaacaccaagatttacaaggttcacataccttagaaacacgtgtttctaagcagctaatccttggattcctaagaaaaaagataataactttcaccaaaacaaaagtgtattttacaattatcaatccaaattacagattttaaacaatacaatcttttattgaaaatagtaacgagtaccctaaaaaccaaattctttagttgcacacaagatccccttgtgttgttgttaaaattctttacaatctttagattcgaactcccttttagatctgtgtagctaagatttgagctaaatg

SEQ ID NO: 204021 - DNA, 564 bp, Cannabis indica
tatatatatatataattaaatttgtctggtttgtagacaattaattaatatgtttggaaaccaaatctatatagaaataaagaatattatatgtagatgaatgaaatatgaaattgtatcacattattaatttcagatttctcttagagaagtatgggcgtgatcactcatatataattctattcttctctcaatgattttcttataaatcaaatatatttatgtcttgcaacagttatatattacaatcttttgaatatatttatatatcctgaaacaccaaattaattaagattatattataatcagtatattgtttttcctattgatccttcaaataattactctttaaaatttgaagtcttgacgtgctttttgtttgaaagaacgtcttttagcatgattggtttttttgtttttttcttcctcgaaatccatataataataattcagttattaaatattaataaaaacagtatctatcaagttattctaattattatttttaaagatgttttaatacttttgttaagttgtgtacaccattcttcccaaaaaaaaaaa

SEQ ID NO: 204022 - DNA, 768 bp, Cannabis indica
agagcccgataatccacacaaaacagccaacttctgtcattcttttttaccaatagaactaggcttgaaaacaggctgttactattctgaataatctgagcttccatcatttgtccaataaacctctcaatctcatttttcgttatttggggatatcgatatggctgcacgctcactggagccgcatcgggacgcaaagtgattggatgatcgtgttggcggaagggaggaagagtttttggctcttcaaacacggtggagtattgttgtaacaaaatggaaacacccatagacggggtttcgcttgctgccaacaatgtggtgtgccacaattccaccaaaatttcaaatttctcagcttgtatcgctgccatcatggaaattggaatcttatgtaatggcggatcacccttcaaaatcaccttttgatctcataccttgaattccatggtgtgttcttgccaatggtgggtggttttttttcaaagtattcaaccattgaacccctaaaatcacatcagtatttgtccttgacagtggaggaaaatcatcaataatatcagcctatgtttaaaattgcgtttctattgaggcacgcctcattttcaaatcgaattgtttgagattcaaaagtgaaagaaataattttaactattgcgtgcgcctcagtatttggaagagaggtgtaagcctcacacgtgtgaggcagtggtaaatggtctaaggcgtaaaaaagagtgaggcgctcgcctaaaaaaaaaaaaagaa

SEQ ID NO: 204023 - DNA, 2219 bp, Cannabis indica
ataaaggaatttaatatcattatcatttctgtgtgaatgtgaatatttatataatatatataaaccatgaacaaaaaaccttcaaagaaggacagtccaaagaagaagacaacaacaaatataaaacctactaccttattagggggaaaaaaactaaataaaataaaataaaaagggagaattagattccttaccagtaccacatagtttttaaagaaaacattttggattatgagaatgccaaagaacttgacaaatgggaaactgacacatgttaaggtgtaccctttcgataggaggttcctattgattggtatcatataaaaaaaaatataaatgagtataaaaagttaaaaatgttaaaaattaattaaaataaatattatatattatattatagagagggaagagttggttcatggttggcatggctctgcttttgggaaagataaaaccaagcaaccaaatcccatccattgcaacatgggatgagagttggggattcgagatctcttaagcagagctttagaattctttaacctcaatcaaccactgtatctgtaatctttgatgatctctctcttctttatatatatatacatacatatattttatatatattgaatatgtttaataaagtagtccaaggagggcttaacacctttaatcaattgatgaagaagcacgttatgacttattacattaataaatattatcatcattatgacatatttttcttgctaatcatagtctactacagtactcatataatatattcatctaaattttaaatacccacgtatagttgtgttcttgtgtgtatatttttgtatatattatataataactatcattcttctgatttacttaaagagcttcttctcataggggaaaaagattaattatgggacttaggtaactcttattacttataatatatatatactcttgttacttgcaaaccaagatttcaactgaatattcatcatatatgttaacgacatgatccatgttctttcttatagtaaatcggaataaactttttatcatttatttatttatattaaaatgtatatatttggagaatatgattcaaaggagagtccaattaagagcatctctttcatagatttaaattaattaatattaaataattataaaaacttgtataataaatctagatatgcaaaatattcatatttctaaacttttatacttagacatcgtcgtttcacaataacataattattacaaatttatcttactgtactgtaatatattattaataaatatatatactagacaattatcttatagaataatccttattaatttaaaaattgtgatcgatttttatctctatgtacttctatagtgttgatcacaggaggcttctcagatttgccggaccctaagaaaataatattattgggcccttgttaaaaaaaatatagtattttcaaaaattacaaaaaattatgtgtatttaaaagagaaaaattattttgggtccctaaatcgaagggttatttacaaaaatataggaaaaaaatgtaagttttgataaatatagcgtaaaaacttaagtgtattgttgtgaaactcagcaagaacattaaatgacgagattaaacaataaaaccagttaaagattgagaaaattacattgtatatccactttattttacttgttttaatttttaccttaatttttatatttttttaaaatatacccacttcccattagactccttttatatcttagatttaagtagagagtgaggatatattgggcaacccactcaaaaaagtggctatattttaataaaatattataatatgagagtatttttgattaatggataaaaaaaagaagtaatttttaatttattccttaaagattagcaaggaatgacaccaatgatcaatatccatggcaaaaacatattaaaatcaacactaaacacatgaacttaacgaggttcgaacaaggtgatagaacatcaccttgcctacatccccagccaaaaagcagccacaacagggttgagagattcctttatttgctgatcaatatgaagagattacaatgttcaattacttagctcgagaagcttaacttctggtacaaacagttacactagtggtgatgatgtttcaagatgcatcataccattacaatctcaagaacactcactattctctctcttttctttatg

SEQ ID NO: 204024 - DNA, 1444 bp, Cannabis indica
aaaaattaaaaaaaagagagagaattgaaaaggaataaataaaggtatttagttggtttaaagctactaataaataagtttaaaaaagtgagaaaattaaggagaagaaagaaaaatgactttagagtaattttagaaaaaattaaataaatagattcttaaaaaatatgtatatttacttttttttttttgatgaattggtgcaattttattgataaaaattagataaaataatagtttgcaattatattgagacatctttttattggacacgaccaatattagaattagaaaaatgagctaattaatcaattgcctgattttgagattgtttgacaaaaaaaactaaaataaaatcatatgaaaaaagattgcagcatcatagttaaccttaagagtacctacatttagttttatctaccgctcataatacataacagtagaaactgttgcagcaggttcattcaacctcgtagtttaagcattcaactattaaggtacgtaaccacaccagtaacaaccccttcagtcgtagagaacttattatttctaaccactaccagtgatttgatggtgagtcatcgaaaaatatccaacaatgaaacaaaacaagataaaacaaaaccatgtaacagaaacaagacaaagactcaaaactatgtcacagagataagactaatcccaataataaaaatctaatcacatagcaaaactacaaatcctgaccaagcatacacctaagcccaaaaaagatcggtgaacctagccagagaaaaaagacaagctaaggatttaggaaaccaaaaaccctagtagactatttattatctacggtgtattgataacacaaatataaaaatatgtatattaaattaaataaagaaaattatatatattttttatatgttaaaaaacaatataaattaagaataaaaatcattagataaaatataaaaaatagtaaatataacatatagtcttataaaaagaatctctccattctctaattataatttttaatatgttaaaaaacaatagaaattaaaaataaaattcattagataaaataaaaaatgtaaagataattatttagtcttacaaaaagaatctctatattctttcaaaaaaaagaatctctatattctctaattttcattaaaatatcaaacaaataaaaattataaggaaatttacactctttactaactttttcccatgtattacaaaaatactgtgccacgcccaaatttacgtttatactttgttttttttttttttttttttttatttttttttttaatttcggcagtatactgccaaattgtatatgttatttgttttgtttttttttttgattgattgggacatgggctcaagttatttatttaattttttattttaatggatgtaaaaattattatttattatttttaatatttaataa

SEQ ID NO: 204025 - DNA, 967 bp, Cannabis indica
gtaatttgtttcttttaaatcacctacaacacaatggttgggttaatgaaatatgattcaatcaaatacacaaataaatatttaatttccctcccaaacttttacacgaatcaaattatgtttttttgaatttattaggctattaaaaaattttctcaaattattattaatattattagatataatgatttttgtcaaattccgtttaattttactaatgtgatgattatttatgtaccgaatcaagtttcctaaattatcatttacgacagacgtccgttagtaaaattagacgaaaatctttaaatttaacaatttcaatagttcgagaaaaattttaatgatttaaaaagtttgagaagaacaatttagtacatatcaatatcaaaatttagaaagtataaattctaattaacttttatattatggtaataatctttgcttataatgtggtgagctgctcactctacaatcatcaaaataataatttaaactagattgatgaaacggttgttaagtattgaaagtcaaaacaaataaaatgaaatgaagttctataattaatacacaaaattaaaattgcacataatgtcaacatctaataatatattgtttatatttaatttgacaagaacaatacaactagctagattgacctcgtacgtacgtacgtacgtgtttagactatgatgaattagattattattaacaagtcctacctagctcatcaacattgcctttttgttaaaatgtggaagtttgtacatcttatatatgatatcatatatatgctggaatttattatgaaagtgtgaatgttgaaaatgagatttagaaagtaagatgaaggttgatcacctgataggttagttttaggttgtacaaattatttgtttaggttaatggtatattgatatatgaattgaaaatgagaaaaacatataaataagatgaatatatcatgaaa

SEQ ID NO: 204026 - DNA, 1033 bp, Cannabis indica
attttattaaatgatattatgaaattgtatttttaaaagggtacaaaatactatccatatgaactcaattttcatcgaaatgaaaattagatctgaaagtgttatgaccaaattaattgcatttttgcgtatatttgtgctataaaaaaagattttagattagttatgttaaaaaaattaacgaaaattgaacaaagtattattttatactattttagaaaggataactaccattttagatcttgtgttttgtaaaagttatcgattggatcatctattttgttaaatgataaaatagaccatgtatttttaaaaatgataaaaataggattctggacttaatttttgataattttttttaatataaccaacttgaagatgtaaccaatttatcataacacctctagatcaatttattattaaatttttattttaataaaaaattaatttaaaatcttatttgtatcattttaaaaataattaatctattttatcatttaacaaaactaataatttttataccataattttttaacatgtatataaaccctaatttactttgacatagttggggtagggatctatagtttgttctagagactagaaatggttaatgaataaacaaagcacacaaagcctgagcactaatcatttaaagttagctccctcattaagcaatatttatcatcatcatcatctcttcccaacaactacttaagtttttttttttttctttttaattttattttatttatttatttatttaattatcaagttttgtaggccgtacttcctcaactgtaaaatttattgcaatttttatttttttactttgaacaatttgaaacacgtaaacataaagaacaagtcccactctttagctcttttacatttaataatattcaattctcggacgttgtatcactttattgtaataatttctccaaatttgtcttaaaaataaaacctttgccatatttcaaatatatatatcacacaattaaattacactatattttatattgattgattt

SEQ ID NO: 204027 - DNA, 1142 bp, Cannabis indica
ttggaccaggaagaaaaaccaagatatgggttgcagaaacagagagttcccacccaatgacaatccttctacttcttctccgggttcttcatcactgaacgaagccttgcttttcgccactatgtgcatcattggtctccacgtcgatgttcatgtcaaagatggctctgtttattctggaatctttcacactgcctctgtagaaaatgaatacggtacaaattgtttgttcggaatcaaatgcaatagaattgttgaaatattttctggattgttgttataatttgagggtgtgagtcctttctttctttcttttgctttttgtttaagtgggaaaattgcttgatcttattgtattctgatccgggttttgtatattatgcttgttgattttccttctgcttgtttagatttttttttctctttcagatttttgtagttgagaaaaagatagtaagaggagaaagattaatgtttgaaagttgggaatgattcttcttttggctaaagaatcagatctttgttctctatgaaccatttttttttttttctgagataaagaagattcattattagtttaacattaatgaaagctctttccactaatatagaagaaaatttggtcgtgtttgcatgtatttgttgtaattatgatgttcttttgcttttgttctttggagtttcttagggaagtttattgatatgatgatctttccataggcattgttttgaagaaagcgagaatgactaaaaaggggaaaggaaattcaaatgtagtaaatggggaagtgatagatacacttgtaattctttcaggtgaccttgttcaggttgttgcaaaggtatgaaatttgtggaattgattattttcttgaactaacaacctgattattttaaataatatgctaccttgttgatgctattcagggagctcagcttccagccgacggttatgctgggaatgtggcttgtagcaatgctgaagctgttgtagagtctattccttctgcagaattttcagtgaaggatgttgaaaaatctatcacgtccactgcgtgtggacagaatgttgaacagctaaggtattgtgtattattgaatgagtactatacaaatcttttggcatcaaatcatgttgtatt

SEQ ID NO: 204028 - DNA, 795 bp, Cannabis indica
tttttttttaattaattgtttcgctttgatttgtttttattttttaatttattggttatgatcttatgtatttgaatctgaagcagtttttgtttcctctacctgatataattgatttcttgatattcgtattgaattgggtcttccttttaagttgatataggtatatatatatttttttggggaagatttgagtgttttgattttggatttgatttgaatgttttttagatttgtcagatttgtattgttcccttctgattttgtgatctaattttaccatttctggttatttttattccctaattattgattttggcgagttagggttttttgtttattttgggtatatatgaacgacgattgtggtttgaatgcatttcaggcaattggttttgaaagatttgagggaaattggagatggaaagtgggtttggagaatcaacaagtgtttcacctcaaatcccttcgtgctcgggaaatggagccaatgatgctggtgattttgaatgcaatatttgctttgaattagctcaagaccctattgttactctttgtggtcacctcttttgttggccttgtctatacaaatggcttcatcatcactcacaatcacaagaatgccctgtttgtaaggctcttattcaagaggagaagttggtccccctctatggccgtggcaaaactcagtccgacccaagatcaaaatcttattcgggtatcgatatttctcatcgccccgccagcaagagacctccaacaactcctccgccagatgcaaatcaatttacaaat

SEQ ID NO: 204029 - DNA, 397 bp, Cannabis indica
tatttttttacgaaaattcacataaaaactcacatagtaccgattgaataacttaaattgtaatcaaaattcacataacaatccacataaaaattaacagaacaattcaaaccgtaaatttaaaaaaattaaaaaaaaaagtatatgaaatattcaaacaatattttgatagatgcatatttcataatgtgagacgggggctaattataaaggtatggagaaatgttaaggcaaagaataaatatggaaaatagagtgtagaaataataatatttaaacttttaacttcgattattattttatttatttatttatttaaaaaaaaataagtattgcgtttgaataaggcagcggcaattcaaagagggcagacatttggaacaatgacagctttagg

SEQ ID NO: 204030 - DNA, 777 bp, Cannabis indica
ctaagtttgcattttgaagcattgaaactcaaatttggcattatatttatttagcttctgatttagctttggtatggaaatttcatcttttgtttttaattgtattagtgtacgtcatatctgttgttcggccggggcttcagaattttgtgagtgaggcgccattgatgattacacagcaaaatcatccatctctttcatccttaaaagccttactaagcaatgttcccacctactcgccgtagcttcctcttcatccctcgcttttactctgctttcttctactcttcttctcctttggaaaatgaatctcttgctccccctcctgttattcattctcgaagagtggtcgtcaccggtactattctctctctctctctgctttgctttcatggaaatgttttattggcttttatttcgatatgtgatttgggccattgtatcttccagggttgggaatggtgactcctttgggttgtggggtggagacgacgtggaatcgcttagtgaaaggagagtgtggggttagagctttgtccatggatgatcttaagatgaatagcttcgatactgaaaccaaattgcacgcctacgagcagctcacttccaaagttgctgcagtggtgccttgtggaacagcccctggacagttcaatgaggatttgtggcttaattctaaggtggaattggaatagaatgctacccacatctcacttttctctactttttgcttatttccattctttcctttgatgctgttcttacatttctcccttc

SEQ ID NO: 204031 - DNA, 766 bp, Cannabis indica
tacattgttattaatataattaagcattaagtctcatataacataataaaataaattttaaagaatatcactgatcaatcatgaatcactacttataaaaagtattatgctcaatactaatgctatttattttatttgattgctcggctatcctattatattcatgtgttttttcatctaatttaagaaaatatgatgattctattaaagaattgcaaaaaagaatgagtataagaagcctaaaatatatttcaagaacagtataaactatgtcctacataaaattatattatatttatagacaacatcgtcacgagtcaatgtagcatcattagtcatagaaagaaacaaaaaggaaaatctaattaaaagaaactagagttaattttattaattgtttaaggtaagaatcttattatctcgaattttgtaacctagctcctaagtttctcaacttttaataatatcatgtatagatacataaaagaataaaaataaataaaaggtattttgatttttaaattgtcatctataagattgtgccctctaaattattagcaataataaatattcttcttcaattttaaatattagtgaatatgggttttctattagagtactttaatagtttttttttttattttgttaaatatttaatatttactccaaatatggctaatatcgtacttttgcccttaaactctactcaagccaatcttgtcttcatttattaaagaggtatactttggcaatgatcaaaatttgg

SEQ ID NO: 204032 - DNA, 565 bp, Cannabis indica
tattgtgtttttatgctatatttctattatggctttttcaaatgctatatttgattttttttattaaataaatatgaaacacaagaaattaaattttttcattaagaaattagtttattcatttgaaaattagttttttcatcagggaactatttttggttgtgggttgatagtcgagtcttgaaacttttgaaaagtttgtgattggctttagtttttgtattatgttggatttgtttatattccatacagtaaactaaaatacaaagcatgtaaaatttatatgttttggtattcgtaactgattttttcattaaaaaactagttttgattacatgaaagtaacatgtttcttaatttataaccttaaacaagattagttttgattggtttcttgatcagaaaattaggtgtttttgaacaaaaaactagtttcttgctcaaaaaactggttttgattatacaaaaataaaatttatatatgagtttttaaattgtttatgatatttcttcttatttatgacgatttatctcatatactaactgtaatatatgagataaatcg

SEQ ID NO: 204033 - DNA, 677 bp, Cannabis indica
tgaaaaaaagcccttaaatttaatataaaatataaaataagctaaattggcactacaatatatgtcacattttttatttattattgttttgataatttttagtccatcttaatcaatttgtattttttaggaatcctttaccctctattcattattgatttcttcttagtctctgcccccatttatccattagcatcccttttatttatccttttctcttattatttagtatcatcctactaaagtcttactttaacacgtgttcattattttatttatgaggtatctttacatacttttgacatatgttagttgttctcttaagtgtccatattatatatatatatttatatatatatatatatatatatataaagtctcctatctaaaatgtgtaactttctcgtctagtatatttaagtattctgtcttggtcatcctatccgagatgggtaggtcatcctatcctagatatgtgagccatcatattagagatatacgagtcatttctcttaaagatatgtcatcctattgagataagtcattctatttgagatgcgtgagtcatcccatcaaagatgtgtgagtcatcttatccgaaataaatgatttatgagataaatcatcccatccaagtataaatatgaatcaatataagataagtcatccatccgaaa

SEQ ID NO: 204034 - DNA, 1547 bp, Cannabis indica
tgatttcaattgcttcaattacccaattgtgataaaaatcacttaaattcttttcaaataataaagttactaaattgcaatccaactactgcatgcatctctgaaatagttcaacaaataatttacattaagcaataatttaaaaattacatatgcaaatacttccattttactttatgtttattcatttagattatactaataatgtttatttttcaaaatttacattaaaatcataaatcatgctcgaggtgatcaaacttaaacatataataaacacaacaaatatgaataaatcacctaatcaagaattagaacaataatctatctacacactcactctaatttcttctctacactctattctctaataagtagttcaatttctattttcttttgactaagtaactattttaaatttatatagctggctagcatgttcgagtgtttgtggacaaaaaaaaagtaaaaagacaaaaagaattaaaagaaagacaagaatgaagaaaagaatgttatatagaataattctttggattaatgaaattaattaatctttttaagtatgttttgagaagattggacccactatgcttttgtatcatacaaatttcatacaataattttttatttatttgtttattggctctgaaaataaacataaaattacttgcttgagccacaagttatagttaactagtagagccaattaattattagctagcttatatatatacttaattatttaaagcaaaacttaatgaatctcgtttagattttgtgtgatttgatcaattcaaaacaaccattaatctaagaataattattattttgtccccttacttttgacactactagattgttccctttttattaggtttttatttgttaattattaatatatatattttctaattttgtgaacacttaaattttgcccattttttattgaaagaattaattttaattttaataataattcttaaaaaatgaacaaaaaaattattaaaaaatgtgatcaaattattaaattaataaaaaaaaaaaatggacaaagtttttgtgaagaaaaaatcaaataaaaatataaattattaaaaaaaaataaactaaaaaaatattatatatgtttatttaagcaaatcaggatttttgaaagaaaaaaaatagattgaagtttgtttcataaaattaagtttctataaaaattgaatttttaatgtataattttttttatatctaaatgaatatttttataaaaagaattaatttttaaatcgctaattggtttaaaattttggtttctttttcaattttttaatccttcaaaatgattttttttttttcttattttaagatttgatataattttttaagaattataaaagaaatgttgaattttcataatttttatttagagggggtagaatttgattgttatttaagtttaggggtaaagttattaatttacaaagacacatcaatatttcaatatttcaacgataaaataggatgaaacttaacaaaataattaaatttctataaat

SEQ ID NO: 204035 - DNA, 1044 bp, Cannabis indica
tgagagatctgatcatagaaaattaaaatgatttagggatgggggttaatatgctagaaatccatccaggaaaagattaattcccagaaggtcattctgttcttatttattgggttttgcattctttttctgaagaccgactaacatttcagaacagattccggtttgttcagtcatttaatggaaactgaacaaagaaataaaacactctagatggctataaaattattatctaattgccctctaatatcaaagccattattcccatgaaacaaatgctaccaaattttctcattagtcttagttaagtagcttattttaagataatgaatgtgaacatgaacaataacagaaatgcaaagagacaatccaacaaacaaagaaccctcaaaactcagcatcattagcttaaaaaacttcgttgttccttcataatggaaaaaatatagagatgtgggtcttaaccaggccctcagataaaagccgggtggcatcggtggggacagacatcttaacccaccggttcaatatccgtgcacattaccaatgttccttcattatcatccatagcatcggattattgtacacagaatatcacaatgtttcttacattaacaatcacaaccattattttaattatgaaaatcaatttaaatgaacttcaataaacccagttacaaaacaaataactcaattaagaagaaacaaaccaaatgagcatatatctattgtcgcttaaaatttaaagtatgtacccatatgtatactatggaaagagaaatagatacctttagacttgtcgacgaagaagagggattcggcgggagcggaggcaagagagccaccggagagagcgtctttagtagacttgtcgaagaaatcatgaatgtcttccgtgcttatattggctctccatgccttcttcccctttctagacgtcttagctttcttccccatttctccgtgcttaactctgctagggtttatgtgctaaatgacgagaaactctttgccaaaaacaataagcatctctatatgtataaa

SEQ ID NO: 204036 - DNA, 2171 bp, Cannabis indica
aaactccattatatttttgttacctctacaccactttgaagaggagatcaatatatgcaagagtacatcttcaatgtgtccatcctgttcctatatatatagatataaattatgattgcgtaaatggttacatacagtaaagattttgactaaaaaaatcaataaaaataatactaaaataatttatgaaaagaactcatccactggatccatccctttatttcttcaaaaaactcttatctgtattccatatgtcatcagtaatgtattagatagttttattattttccaaatttgtttttttgtttgttataataacaatatatatcataaaattactgatcagcaaattattagagtgctttgtaaaaatgtaaaatttgtcaaatattaacatttaacaatgtatgaaatattaaaatttttaaaataatcttatttaatgtattttatacgtaccatgatgaccgcacaatgtaaatttatagtcattttgcgactataataatcgtttatggtcgcacaatataatttatggttgtttctataaccatacaaagttattttactaagaaaaatatttagaaagtcatttttttatttataaaggttatttggccgaaaggcttgtaaaattagtttatgaaattttttattagtaaaataattttacaacaaattttattagtaaaataatattgtatagtcgcggatatgatcataaattacactatgcgaccataaacgaccattatggtcgcgaaacgactataaattttttcgcgaccataaatttacactgttcgaccatcatagttgcatagagtaaactaagtgagattattgtgtatttcacattgtgggtttggcaaattccccaaaaagttatcatcaagctagagggcaacttgctgtgatgccttaacttcaattggtgactctactttttgaatgttatgcttattctgatcgcactaatatctatgaatttcttaatttagttatggatgaacttactaatttttttggtttgagaaatatagtatttgtaaattgtgtgtgcatggaggacttggtaccatatgaataaacatttcaatgataaatctctcttctaagatagccatgttgttgattagaatttgggtttgctggattgtttccaagctagactaatgctcaagatagcctgactgttccgttgcaacaagtaggtgctatacggtgtccctttataaaaggccttggctaggtgttttaaaactaactatgatgctggtctaataaagtctctcaaaatgcaatagtcttattgttgtccttatcaaggcctcggcaacctagaaccttacctcagtaatgtttattctccttttgttgttgaagccttgtgcattaatttggggttgactctttatatgtgcatgttttatttattgagctggatgcattaatgttattaaagttatttctaagtgtttggatgataacttttaccctggttttgtattattggagacaccatttctttctttcttttttttttccttttagtgatctctcattttcttattgtcttatatttggcaatagtgttgcacaattattggcaaaagtagctttttatttttattttattgttgtgatgaaaaactcacactcaattcctcactattatggtactaacatagtaacaaggttgcacacaaacgtgaaattaaaagtagagtaatgaaatcaataacttaaatggtttaaggaaaaaatgaatcagctttattaacttgaatcaacactttataaactgaactaaaacctatcaaagctaagtaatttatggtgattaacaccattaccttatagctaacattaaggaaaccctcatcaaacacacagggatcctaaatacaaccctcctaatcactcgagaatacaaaaccaaaggttagagaaatagagagaaagagggatgagagctgaatccgagaggctttaagtttcatctaggtgttgatcccttgaatgagagtagagctgacatatttatagtctttccaagactcctgccctaagtagaaagagccttaaataacttaactactttctttgccatgtaagattagtagtgatgacttggacacatgagtaagtggactaaatctccaaaaatt

SEQ ID NO: 204037 - DNA, 1449 bp, Cannabis indica
gaacgacgaactaccaacttgaatgtcataatcaaacatgtttatgcatacattagttaagagtctcaagacaagatctgacacagcaaaagcttttcaaacatttatgcattcaataacttcaccgtggtagtagatttcaattgaaaaaagaatttatatttttaaaaacaagcatttcacattcaaaaccctggcctgggaattcgttgagggctgcagaaggcacaaataaaatagtgaaacaagaagatattgccaaattatagataaggctcatcataccaaaataaggaaaatagggtcctacttttaagggagtgaagaaatttcaaggcaactcctttggaaacaaagtggctattgatcaaatcaagtaccccttaatatatataaatccaatttgtatagaaaatggtccattttggttcctaagaaaaagactatcttgttcttattgttattaatattttctatcttaattttttttttttactatatatatgaaaagggtactcaagaaatggggtcataatcaaatgaatgagtccctttttcataatatgggaccattttattatgtaaggctattttgtggctagtttaatagtgaggtacttgtatttatagggctaagggctgttgattttgtggactgtgttattaagaataaaataataggctaggccattcttattttattggttggtttaatttttaaacttataaggaatcaatcatttttatatggaatcattattccaccaattgaagctagagaatagtgaatttagttgttagtgaatttgattggatcaaacaaacaagggaatatcatttattcatttatatattctgaatataataattttcattttattataacaattatgattccaccaaaattgaccttcccaattgatcacaatctttttttttttaaggttagcacactatttatatattggggtgatgaattttatgacacttcactttctattttcattgagatttataaaaaaaaaataggaattgaaattagtttttggtcaatatgatgttattatgtgtcattttagttaaatttaacatttgatttaacatgaaggggtaaattacaacaaaagcttcacattatgtaatttcacctatagatattttacataaaaagttatgtgctgcaaaataaaatagtttcacatactattttcttttattgaattaattggggcaaattgggcttattcatatatgaaaatctaaagaaagaataaacaaccacaactattgatgcctctatgtatcaaataatatttccatatgaattaaggtcaaaccccatcatttataaaaattaccactttttgcattacattacactgatgccaccactatataacatttttatattgtaaaatgcataatcttatatacatataaatagtcttg

SEQ ID NO: 204038 - DNA, 870 bp, Cannabis indica
tttaggggcatcgactttcacattgtcatgcttatacaatgacgtttagattcgactggaatgtgatgtgattatattgaaccgtttttctttaataaacaatagaatttttttaatgtcaattaactaaaataataatctgcaatctaatcggttaatttctttgttagagacacgactaatattaaaactaaaaaacgtactaaataattaatcgtctaattcccacctcatttgacaagaaaactaaaataaaatgagatgaaaaagattacaacattataattaaccataaaaatatctataatcggtttcatccactactcagaagacacaatagttgaaactgttgcagcagatttattgtgtaaggtacgtaactgcactactaagaatctcttcagtcgtagagaacttgttattcccaaccactaacaacgatttcatggtgagctatcgaaaaacaaagaagaactaacaacaaaacaaaactatgttacacaaacaatactaaaacactcaaaatcatgtcacaaatataagacgaaaagaatcaaaattatatcacagagacaataccaaaacactcaaaattatgtcacataaataagaataattagaataacaaaaatcgaattgccacaaaccatcagaaaaaaagacaacctttaatagctataaaattaagaaggaccccccattattaattaacccttgtattcagccgattttaacctaataaaaatagtactttattgggctcgactcgacttctacatagcttgtatactcaaatcaaatgaacagtgtaggaaattcgaagacagtcgtaaatgccaatggaggaagaactgggtcgactcgctcctt

SEQ ID NO: 204039 - DNA, 866 bp, Cannabis indica
aagtatatgattacagacgatcttcaagtgaagtcgatgtctgtaatctcgtacttaactttattcaacttcttcagcatgagaagacggttttggtctatattaaaagtgtaaatatatatattatgtatatttatatgttgtttcttttctgaaaagacctattttcctattttttgatgaagactaagaagatgcaaaagttggatctccgatttgatacttggaagacgcccagattaacagattgtcaacctgggcactgggtgtcggggccctgggtgctcaaaaataacttgctctgattctgattctgatgcctcaaacatgtctgtggtatgtctagttgatgtcccaatacaagtcttgacccttttgcactaagacggtcccgaaaactaaaaccctaattagaaatgttaacctgggcgctggggtgaaatcctaagtgcccaagttggcttccaggttgcagttccattaaatttcagctcacggtgcttggctttgactgctccatgtctttatagtacaagatactgaaagatagtgagtttgattcaagttattgaagtttaaacttccattccggagttcccaaaatcaacatgggcgcagggctagggacccctcccaagtcgacttactatggctcgggactactcgactctgagatgtaatctttcttatcacatgtcaaacattgatgtttacgttattaggactactcttgatgtacataggtgtgaattattatgtaaatttataattttctatgaatatcaacacaataagataattctaaaattgtttacaaaactttaacatgttgacttttaaaacaaataaatgattgatgacataag

SEQ ID NO: 204040 - DNA, 884 bp, Cannabis indica
ggaggaccgagttttgggttttgggacctgaggattccaaatatatgctttgcttggaccactgtcgtcggagatgtctggcccccaactaagtcagcaccagacgagagaagacagagagagtgtggtagagagagagagagagtgtgtgtgggtggataaaattagtagttttttccatgttttagttttttttaatattattttaattttttgaagaattttaaattatttttaattgaaattatatgatttgaactaataaaaaattgacatgtagcattttattagtatttaatgaatttgttaaaattgggcactacaaacgaaaaaatatgacttttgagattattcctgttaatttttgagattaaattttttttttcattaaaatcaactttttagcacttatgtcacaatatattctttattattttataattatatttaaaaatattaattaaatattacatcactttgtttttgagaacaattacatcactttttttaagttaatattacatctttttttttttgtataaaaagcgtttatatcataaattcaaataagtttagacctcatggtcattacaaaatatattgtcaggtaaagaggccaccgggatattcccaaacacctgatgagcaaatgcccatctagccacattgtgagcgataaaattacaagttctagaaacataagaaaaattacaactgataaaagagggagaagacttagtacaaaatgagacatagttttcaagactccaacgagaatcccatcccattgagagcattgataaccaccctcgagtcattctccacaatcacaaacttggatccaatttctaaagctacagaaacagctaagcagcaggcagccg

SEQ ID NO: 204041 - DNA, 1086 bp, Cannabis indica
gggctttgcctctagcttaagttcttccctctttgtttgagagcagtctttctaaaaatgcctgacctggccacattggaagcatgtctttcgattgcactctctgggatggtgtttcttacaacgagggcacttagggtaagaataaccttgttgtccacctcaccttggttcctttagaaccttttgttctaacccgaaccaccaaattttgggaaggtcttcctcttctgattaggattggaatcaccaccgtccctaccatatccaaaagtaggaaaatggtgttcccacaaacacttgaagtctctcgtggcttctaaaggaatttcactgcaccctcggcatatgttgttgtatcgcctgtagtaatcaccatatcatattttatcttgacgtttaaacctgccaagtatttttctttcttactgaagtctgtgggtactattctcgaaaccaacttggctaaacggttaaactttgtcgtgtattccactactgacatactttttccctacccaagtcagtgaactctttccacttagcactacggactacctcattataatacttagcattgaacaattctcgaaactctcccatgtcatagtagtgacgtcttaggtgagggatactaactcccactatacgagtgtgtcttcctggaattggaaggtggcacaagtcactcagtcattcccgacaacacccataaaacccaaaattcttcgattacaatgacccactactcgacattcataacattcagacctcctagaaaaacagaggtgcctatttgtgaaacctctcatacaaaggcttcatacaattgccagcaacaggttattctctggcaccgttggaaccaaagtagtcgaggcttgctatggaagcactacagggggaccctattgtctgatcctctgaatttcttcttgttgagtgatccaagcttgcatttctgcaaacctttgttcccaatcctgaggagttggtggtggattttcatgaccacccctttggaaccttccatgtcctctacctcgtccacatggaatcaggggattttgacctccttgattgcct

SEQ ID NO: 204042 - DNA, 502 bp, Cannabis indica
attttagattctgactctaacttggacctatggacctgaactacggacccaaacccagtctcggactcggatcacaaccccagtcccagacccaaacgtggatccgacttaaataaaatcaaaaaataaaagtgaaagttatagaacacacttttgttttctgtttttaaaattaaaaaacaaaagtggttatagaacacatttttatttttaaaaacacaaattttactttcaattttgtaattaaaaaataaaagtattacaaaatgtcacctaaattttatatatatgagtgtggtatttattttactcacttggtcattctaagctagaaggacctcaaaattggataccttttattaactttcttaaaattttactatatcattcatttatatgacaattttaaaattattaatttttatgtatttttataaagttactaaatttatttgtttggaatttttattctaggtatgaacttttttagcagtcgttatta

SEQ ID NO: 204043 - DNA, 678 bp, Cannabis indica
agagagagagagaagaggattatttattcaaaacacacaaatacaaaccaggaatacaaaagaagcaagcctgctggccgagcccctagccctttgatgaaattttagactattgatttataacttgaatgatgtgctattataattatagtaaaagtaacttaatttttattaacataacaagtcagttaatttcttaattatttgatttatctatatttgagggcattcttcataggtagtttgttggggtgtgttttgcctatttatataagttttgttaataatagggccgacaaaacgggtcgaacacgataatatgactcgaaatccacacgaaagttagcaaatttagattttctttaaatggattagggtcatgtttaagttgactcatctagcctgtttaataaacaaattgtgttcgagttgacacgactaacccgaaattgttataaatgacctatttaaagttatttaagtactttaacaaggcataataagtcataaacgtgttaaacatgtcattaatataataatggatttatatgtttaaacaaaatctatttataaatgggttacatgattcatgtcatgtcaacccatttataaatgggttgtgtttgagttttattctttgacaattattaaacaggtcgcgtttggatgaagtatata

SEQ ID NO: 204044 - DNA, 526 bp, Cannabis indica
gtctaaaatagtatttaccccttgttgtacatatttttcgagcaattaatgaataggtttgatggcatgacacatgtgcaaaacaataaatgaacagaattctttagatcgtatattgaatggtcaagactatataaacgcctcgatgtacattatttgggtgtcatcattactttgattaaggcaactaacaaagatctcaaagtagtcttcacaaagaaggttatcttttacctcggatgatcaatattttgtagaagctaatgagaacaactctctactcaaaataccttcttatcgagaagaagaaatcatgtcttgcgtaaaaaatgatcaatattgatttggctattgagtctacttagaagaagcttgactagatctattattcttcatttaagctttccgagaagaagagctgaatatggttttgctcaattacaacacgttctgactaagtcaaagcaacaatttatttacattttcaaagatacaagcggttatttatattcctgtctattagaaa

SEQ ID NO: 204045 - DNA, 1946 bp, Cannabis indica
gggaaagagtccaagtgtacctgctatagtcatcaaggaaatgaacatagtatttatacccatcaatggagagagtcatgggaaggaccccaaagatcagtgtggatgagtgcgagaggttgagtggctctactttgtgaaataggaaatgggagagtatgacttttacctaactgacaagaattgcaaaattttaaatctttcaatgtgccagtgtgtggtaagtggggtaatagacggcttaaggtttgagcattggggtgcccaagcttgcaatgccaattgttcacatctttattgagagatgaatgaaaaatagcatggttacaaccatctgtagtatgagaaaaagaacaatttttattgcttgttggagaattacaagaactgacactatggtcagtattacaagagttgggaatggactcattagacatatcagaagccatatatgcaagattgcattgcaatacagatttggagatggaagaaccttctcctagtaagtaaagaccatctttaagccgccccctcagtagaacttggccagtgttcttgtccttgacaaaacaagaatttttatgaaattcaagaaaaaaatgattgtcattagtcaattgagaaacacttatcaaactttttgtaatagagggaacagtgaggacagagttgagactaagacatttatgagaggaagaaggtaaagaagtagagccaatatgggaaatagctaatttcttaccattaccgacagccaatgtgtcatttccattgtagactataacattgtcaagattgtcattggtgttggtgacatgatttgtggctccagtgtcaataaaccacccaaaatcatcaccaaaatcagggacaacttgaggagagtagttggtgggatcttggtcaatgtccatttcagcaaggtaagcccgagggttggtggggttgggtttgggggtgacccaatttttgtcgaatcgatagtgacatacagccgctgtatggccacttttgagacacaattgacaaatcagcctagtattggtgttgaatcccctttcataacctctgatatgagtccgagagggatgttcttgagtggaatttcgaacaccctgctgaaatgggcgaggctggccatttctttgtgttccatatgcaatgttagcctgcatctttaagtttagatcagtaagggagttatgatggtcaagccgactctcatgagccatgagaagagcctgcacttcttcaagggtcagatcatcacttcgagatgtaatacccgatacaactgagtcatactcaggacccaacccatttagcaattgaagaattaaatcttggtcagagattgtggaaccagcagtaacaatggagtcagagatagattgaactttatcgatatagtcagaaattgataaagaacccttacgaatatgagaaaattggcctttgagctgaagtaatcgggcgcgagagtggctagtgaagcgttgttcaagagctcgccataactgagcggaggtattgtatgtagcaacagcagcaagaatcccttctgtcatggaggatcgaagccaagaaagtagcaattggtcacgtttcttccattgaagatattggggatttggagctccattaacaagatgtgttggagggggaacaccggtgaacagaatatcctcaagatcatggccgattacggttggagcaacctgtgatttccatgccaggaaattcgtgcgatccaagcgcacagtgagagaggcagagagagaatgggcaaatggattccacgacggatgatggagcggagtagcaacagcggtagtagcatgaacaggatcatgttgagcagcagtggaggaggtgttatcatgggaagccatgggagacagtggtcaagggcgattgataccatgtagagctttgaaatggcagca

SEQ ID NO: 204046 - DNA, 1153 bp, Cannabis indica
aaataatcaaaattaaaaaaaatctaaccaataaagtaaatttatagaatatatttttttttcacgttcaaaatctactaatatttaaaattagttaaataaattataattaattttaaactgatattagttttgaaatttaaaaaataaaatttacacaaaaaatctaccataaaatcaaaattaatatgtgttatcccaaattttatccacctgacatggcatgtccacgtaagccaaagacagagtacaggtggagtacagcctgccagtagcagaaagggcctccatgcaagataaaacaaaaccgtcaaacaacaactgaaaagagtgaagcgagctctcaaggagttgtacctacatccttcaccaaccaacagaagcctatagggccgccaagacttacttaggaatggcaacttgtagatttggacccagaaaggtgtgaagattaagtcttcttttgagacattttgtagagcatctggcgcgagaagtataattagatgaatctgaaaatgccaaggttctttattgagcactcttctcctgtcaccttcacaaccaaaagcaatgtggaacatgtctgacttgaactcactaatcaccactggaaaacgaccccctaatggcccgacatttgttcataaaatcctggtttgtagacaggtttagataagaatacacgagtaattagggtataggctgatctgtgtaagggactagaagcagtagtatcaagcaaagtgatgatgtttctctcgtcttcacaaagagaaaggatagagtgaaaagtgtttaaaaacggttctatgggaaagagaaaacactgaaaaaccagtcacaaggcaaagaaaaccagaaaaaaaaaacaaaagagcagagaaagaaggaggaagggggcggaaaggatgaaggtgagggaggcgggagcaacacagttacataaagcaggaaattcaaagaagagaaaaataagaaagaaaggttgttaaaaaactaaaatacagttaaaattccataactgaaacagacccaaaataggacacatattttaaagagtttaaaaatcttttttaaagttataaatttaaaaaatgcataacaaaataaaaactgaaaatataattaaatatatataataaccgtaatg

SEQ ID NO: 204047 - DNA, 524 bp, Cannabis indica
caaatggtgatgagagccttagacaagatgtgctctcaaaataagttcttgcaagagtacatgaagcaaaaaaaataactcgatggagcatgcaacaaaaagggtctaacaataaaatgttctaccaaagacacatgctcatgctgaaagcagaaaggtgaaaagaagaaaagcttcaagtacatatcctcaaagagcaaaaccccttggaaattccttcaaaaaaagaaaaatccaggaaaatcatcaaagaggtgtttcttatgtggaaaaaagggccactttgcaaaacaatgtccgaaaggcaaaactgccaaaatgataacacacatagaagatgccactggggtgtctctctatgataatgatgtagagtctgtcttctccgtcgaagatgaaatctccccaaatgctatgtgtgcattacaactgtgttatgattccaacgatgacagatttggaggactcttcaacatgcatccgttccccgctggccaacctatcccaattgcaaaaatgcatgt

SEQ ID NO: 204048 - DNA, 582 bp, Cannabis indica
attgatattgttatattcccttttttatataataatcttcatccattatatatagggccggctaagttctttcaggactttgggcaaaaaaaaatgaaaaatgggaagaaaaaaatataaaataaataaaaagcataaaaaaaaattaaactaggaaacctaaatgaacttttttttttttttgaatagaagtgttctttaaaaatacacatgatttgggatcacacaaaagctctatcatttattatttttttattctaattttagagtttttatttatatatatatatataaataaagtaaattgtgccttacaaattatgagacattgtgcaataattcaagctgtccaatattttagacgacgttatatattattgtacttattagtagatatccagttttaaagaaaaaatttaaaataatattgtgttgtgaaaaataagatttaaatagttagtcatatgtgttttttatttatttatttttattttggtaagtaaaatttttattgcacaagatgaacaaattgactcggttgctcaactcaatcaatatgaaccctactctctctctcttgat

SEQ ID NO: 204049 - DNA, 872 bp, Cannabis indica
ttgttggttggttttgctcttagctagctagtctttaaatttgaattgtattttacaaaactcacacgatccttttaaatgtaacttctagaaataacttaatttcgtaacaatttggcaagtttaaaataaaataataagaataataataaaaagctagctttgttggatttgcacagatctccttaataatgattattattatattatattaatcaataaagttgttaagaagtttgatggaaaacggaatctttcttcctctttattgtttgtttgttggtaagaatggagagctggctctctccttccaatcaaataaagatagatgggatcatattatgggaccactactactactacatttgaatttttaatcaattaactttgaaaatttatacttttctccttccaatatcgattatcatgacaaacatgtctttatacgcgtttccaaacttgaatgtttcacaacttcattcttcaaattgatattgaaatgtacctactcactcgtaacgacttatagctatactttgttattttcactaaaatgatgatacaagtagttaaatcctgtattatatttaattaactatttatggctttactaattcaaaatactcaatgaagtacaaccgggtcatataccccatgctgtgtggttaatttaataatgatccacactcaacttttcttctttttaaataacaattaaaattatcatattttttatacttgatggaagataggatgtgtattattttaagtggattgacataattaagtattactcacttggtattattatcatcatatgaggataactaaatatttacatgcatggtgtagtgcctatgatataataagaa

SEQ ID NO: 204050 - DNA, 1970 bp, Cannabis indica
ctctcatcttgattaatcttcgtttatattccctttaatttctgagttctttatttttaaattgcaacttattattttaccaaatagaatcataaggataatttagtagtacttaatccaattccctgtggttcgacctcacttgcgtgagatactacttgatacgtacacttgcgtaataaacagaattttcgtaacaactgcgctggcaaagagatcaaagttttaccagcgtacatttgcagtggctaaaatctaacttttaccagcccatttatgcactgggaaaagtcttttttgccagcgcttttcattttatcctagcaaaagttttaataccaacattgatttgtcaacccccttttaccaacatatcataggtaaattctattttacaagcgcaatactaacttttgccagcacaaaaatgtgctggcaaaagtgacatttcttgtagtgggtggttaagccaaaaatagccgagacaattgggattaaggaggccttaagttggatagagagaaaacaatggtccaatgtagtaattgaaaccgatgctttggttgtggttcaagctattaatagctcatttttaatgccttctcagtttgggttacttgttggtgactgtaggattttaatctcgtctttaaataatgtgtctttaaaattgttaaacgatctacaaaggactgttcattgccttgctagagagtcttgtttttggtcagattgtgttttttagtcagcatatattctgctgctttaaagtctattataatggctgaaaagtatttgaataaaattttacactttgactcaaaataaaaataaaaaatttacgaagagatataaggactataaatgatatctatatatatactcaagaaagtaaaataataattagatgctcttctaatcaaatcaaatcaatatacttgcagtgatttgtgaaaaagctctaacaagtcatttcaggttgatttataattatatataaaatcaccacataaatactagttagaaaacgcacaaatttacactattcaaaaggccttctgcatacaatttttctttacttgttttgttatttaagaggtttctaattttagttttgtttttttataagatgcatcttgttaatatttaagattttgagaaaatttgaaatgatttacaatgttaatatctatttagaaatttttaaaaatttatatgtggtctaaaataagcaaaatacgtacttgattataatagtaataataataataaaaaaaaataacaaactttcaaaaatatagaaacagatacaaatacactaaaatgatattttaggaggtattataaaactacatacctattacctaatatcttattggaaaagttttagtctaccctcttaaataggtgttttggtaaataatttttatatccaatttgacatttaggagaattttttaaattaattttcgtttttatgattgagtatgttttaattatttagggtaatttataaatttcaaaaatactacaaaaatagcttttagagacagttttttaggccctttaaaggaggatttggcaaagtttacaattgaagacgttttaggagtcactaaggggatcgaaaagaaccgtctctaaaaggaccatatatatggtagcgattatttgctaactgcctctaaatgaacaccatggtggtagttatttgccaataaccctttagaggcggctaatagcaaataatcaccacacatttttttaatgataatttgaaaacggagaataatgaacaaagtgggagagagtttgatttaactaagaaatcataaattcaaacataaaatgatattttttttcttagaaaaatacaccacaaatatgagttaaccgcaagaaccacctctaaacataaaaataaaatgataaaaaaaagggtaaataccattttggaccctctgttttac

SEQ ID NO: 204051 - DNA, 1717 bp, Cannabis indica
taatgtcaaacaatattcatctaaactctaatgaactgtttagctactcatgttcatcgtagcaatttcacacatattaatttagaatagaagaagaaaatagagaaataaagaatgttgaaaaccctgttgagaaaccttcaatatcgagtttgctctccaaaattcgtactttttcattgcttgttgaaaactatggaagtccacttcttttatagctaaaaaatgataaaaaaatataaaagacgctgaaaacctattctgcttgggattagaaggggtgagccgcgacatgcacttcctatgtcgcgacccgtgttgcaaatccacacgtcccaagcttcaattgacacgggcctaagcatgggatttccatgcctaggcatgacctcctcttttgtgcacagtgagcttttattttgattttttttttattcatattccttcaatattttcctttattcttctattttaaatctgcaaaaataaaagataacaaaacatgtaaaattattccaaacaagagtaaaattaaattaaaaacacattaaaattaacctaaaaatagcactaataacatcctaacaaaatgtaacagtttagaaaaatttttaataagtcgtatattttaagggacaagatcaatcatatatttagggataaaattattaaatatttttgaaagtgtgtatatatatttatatatatgtatgtagtataaatatgaagataactacaattttaaacatttttttattatcattattgatgtacgagttgttttgattctctaagaaaatgatttttgtaatgttagtatctagtaaaaaataaataatttgtattgataaatcactaatttttatttttttttattagaaaaaacatcaaataaatacgactcataccaaaaaattaatcttatgtttttaataatacaaaaagtttataaaagaagatttaaaactgatgtcttttaattaaaaaaataaaatataaaaactttgacttacatatctataaattaatgtatctatattctacaaagggggtgatgataggatgttaacacttcaatcgtcattattttatacaaacacttctgtcaccattaaaggtagaattgttttttcaacccattatataaaaaaataattaataaaaaaatatcaaaaatatattttatatggtgatatgtatattttaataatttcacacctctatttcaaaaacacacttggaactaagtaaactatattgcaaataaaaagttataactaaataaaagtacattaagaaaaaaaaaaattggcataccataaccgaccataaaaccgatcgtaaaaagcttagaagatgccacatcatcaccaaatttggctatcggtttcggtttttaaaatcattgtggttggtttcgattattgcaatttttaaaagttagttaaccgcaaccaattgtacttgttttataaatgttatttaccgatatttttagaaactgaattaaaaataaactaagctaaagaaaaaacttcaagaaataagtatgaagagtatttttacgtagttggagcgttaatgagtcttagtccacgattcaatattattaagcttgaaaaagtatggagtatttttactacagagtgtcttccaaagtcttagaatctaaactttatccctgaatttgtgtaaataagctttgaacccttgcatg

SEQ ID NO: 204052 - DNA, 955 bp, Cannabis indica
gattagaggttatgttttactaagttagtatttttagataaaagttttactctatatatattttaaaactatgcacaactatatagatttaataacaaattaattaatatatttattatgtacgtttataaaatttaaatataagtttaattaaggattatatttcaaatagatttatggtaaagtgattatatgcttaataaattataatgcttttaatattaagttatttttactgttttgctatgtcaattttttttttcaagtgcaataaagaaagaaaaaataaataaataaatatttatggtgcaattttatgtattaaatacaattatataaattgttatgtgtatggatatgatgatttgtttgtttgtgtaattatctaaatatttttttaataatatgatggtgaaatatttttgcttttttatgtgtatttatagtgattcttttaataaatatttaccaatttatattttaatctcacttttaataaaaatgagaaaaaagatttttgatcttatttttgggtaaatatattagaaaaaaattagaaggtagataaagagactatgagagattttagcttactacacaattttgtatcagttgcttgctccaattcgaattcgaaagggttttcctcactttctcctgttcttgctccaatcgattagtatttcttagagaaattgctattggaaacttattttattaagatcttgatttattaatatgtatgttgattatatgacaataatctaacatcctaaatataaaatttctaaaacaatcaataaacacataagggattaagaaatccttactgtagttgcaacagaataatataactcattccgttcaggtctctaacccttgatccttcatgttagagagtataatcaagatctaaatctaaattctctttataataaaaattgaaccatagagt

SEQ ID NO: 204053 - DNA, 653 bp, Cannabis indica
tagaatgtattggacactaatgatgttaaaaaacaatgagttcacgcttagcatttggtgcatagatttgtgaaatttgtccaaattgtaccttttctgtctgagaacaaagttaaggtgggaaaaggaaaatgtatacaattacaataaaactctccattaaagcttccttattctcttcttgcgcctcaaggtgtcctactcctttaagccaatcttgttccaaagttgaaggtatgaattacttttttttctttttcattgatgagagaatcgccgcacattccaaatttgattaaaagacattatagaaatatttttaaacaccagtgacctattaacatttattttattattattattattatttttaaaaaaaacatttattttattttattttcaataacacaaaatcctctattacattaaatgggggttggaaaatggtgattcgtgtgaacgcattcactttattttttgacatttgggttgcagtacagaaaattttaacgtttcctttccattattttattttcccattctaaaagataataataataataataataataataagagtaatttgtggcataaatacctaagtttatcttcgagttgcaatttaatatttaagttaaaattttggcagcata

SEQ ID NO: 204054 - DNA, 750 bp, Cannabis indica
aattatattactttatataataatatatgtaaaataaaaataaataaaaaaaactataaccggaaatctgtggtcttcctgagtttaatggctctcccattttactggagacattctcaagaaaaacagttctattgttctcaacaatcttacaacattgtttttgttttataattacttactaattcattgcacaaaataaactaaacacaattttttttaaaaaaaaaatgttgcacattacaatttacaatctacatatcacacctgccaatttcaacaaacacaaaaaaaaacccatcaaaaagccaataattctactctaacaataaaaaaaaccaaaatggttactacaaacaaatttacataataatagagacatgtgtaacaacaacactctcttcaattgaactactaacattcgagtcacggttgttattgttgttgttgttgttgttgtggtcaaaaggcatagcctttttcttaatgaactcaatgcaatcagcaacagcctcactttgcatatgatcatccccggggcgacggtaacatcgagtggcctcgggggtggatccatcgcggttgagtacagttgaagaagcggttttagaagaaggggagaaggcagagaacatgattaatcgaaaaaccgcctctcgaaaccgatccaacaatgtcattgctggtgttaaacctttcttctttgttgtacatgagttgttgtggttgttgttgttgttgttgtttctc

SEQ ID NO: 204055 - DNA, 654 bp, Cannabis indica
ttaataggtagaatttatcttttcttccttaatatactcaattttgataaagtttagaaaaaaaaaaaaaaatactctattcattagtttatcttttcatccattgtagccaaaatttctaatccatacaactatttctactttagattccaaattttaatattgatatattttttaataaaacttatcaagacattatgagtaattaatcaaaataataattgttatccatctttctagatatgtgactcatgtacttttaaggtctcaaaatcaacccagacaagcctaatcacaggcccaattaagccagtgaagtcagccaacgacgaagtccaaccacagctccaaatttaatagcaaattagctcttatttttataaggtcgaaccattttagacttagaaagcaactcgtctaaagaaaggaatacttaataggacgtattcaaatgctctcacggggtaatctgaaacatgcattcaaagagaggtctgggtgttgtcttgtggggcatcgttctaacgctaaattctataggtttatcttctacatttttccaacgttaactaccctaacatttactgtacaccctcgacggcgcatgcccacttgccataattaattgtattgttttatatgaaagatggttat

SEQ ID NO: 204056 - DNA, 560 bp, Cannabis indica
gaaaaatatttaaaaattgatgattttggatactaatgggtagtgttgtaaagctaactaaagtgtaaatataaattaagactatatatgttttttagaagagaatttggtaacttcattctattattgaggtaatgacatataggttagtttaaagtttccacatccaatttaatttaattttttttttttctcttcatctcatctagactaattagttattgaattttgaaaatcatcatctaattcaatccaattaaaatttaaaatccaatctaattactaattgaattggattcgatcaattttttatttggatattcaactacacacttaatttttaatattaatataaaaatattaagaaaaatatgtaaaaattaaatatcacgatttatttaaatttaataccccatgataatacaaattttataagtataatataactaaaaacttgaaataactaaaacaacaacattgtgtagtaataaaataaaacaaaatatcatgaaaataaatacaaaataattaaatattgttacaaattcaaaaaaaaaaaa

SEQ ID NO: 204057 - DNA, 725 bp, Cannabis indica
ctttcttatcctagctatctaccaagaatgtcttttttgggagctgcatagcttattttagagtattgttattgaatattgaattatatgagatccgatacttaattatactaataataatatgagaccgaataaagtattaaatatcagtacgtaaggtcatattgaatcttactatactattttattttattttatttttgagaggattaatacagattaatttaacagaattgaagtagctagaaattgtgctattctgtgcgtctataatttaatataatgaagtgttaattttaattatgttaaattaagaaaaaataataggtagagataagaaaattggtgtggatggggggttgttgactatcattactattagtagtgttggttgatttttatatcgtgaggtggtatataagccacgatatgcgtgttggcctattcagcacgatcatcatatttgcaatttcacatgaaaaacgtgacctaattattattattattattattattattattattattattattatatgcaaatatatttatatatatataattgtatgagtcaacgaagaccaagtactagctatcacttcattgtatatttattcttaccctttaggctacacgtgaaatgctaaaataaatgttataagattctatatatataattttagctcatacaattcttgatgctttttcttttaaaaaaaaattat

SEQ ID NO: 204058 - DNA, 506 bp, Cannabis indica
aaacacggtttttcacttggcaaatcatgtttttaaggctcggtattatgccaacgattgttttcttaatgcaaccttgggtaataatccaagctatatatagaggagtgttcttgaagatcaagaagtggtgaagagaggagctaggcactgtattggtaatagtttgactgtgagtattttaaatgacttgtggctgttttatgaggccaatccttatattgaatctactcatcaggcattgcttggtaaaccaataaggtctcttatgacagatgatggtttggattgggataaggaggtgcatggtgatgttctttcagacagagatgtggagctagtttcgtaggttcttattagtgaatcttctcatggtttgtggttttggtcaaaggaaagatctgggctattctctgtcataaccatgtatattatgttgtagaaattgaaaggaaattggtttggcaatgcaaattcaagtttttggaggcagctgtggcatctta

SEQ ID NO: 204059 - DNA, 941 bp, Cannabis indica
cttaacgtagatgcagctatattcgatcgtgaatcaaaacacggatttggttgtgtggtgagggactcgggtggagatctgctctcggcttttgccggtgtgaacttcggcaaagtctcccctgagttggctgaaatcattggtataagagaggtccttagctggctcaaggaccacggatacacggacgctgcagtagagacggatagtttggtctgcgttgaagccattcgtcatactgcaagcttcaattctggtttcggtctggttgtggaggattgtaaaactttgctaaaaagtttgtcaaatgttttttgtttttcgttaagcgttctgcgaaccgtgccgcacactttgttgcccgccactctattactttcgctgaatgtatgttctcaattaatagtgttcctctagagttgttatcccttctcatgagcgatagctcctcttaataaagaacacttttcttcaaaaaaaaatatgtaacttacaagactggctttggtttctttctcatacttggcttcgtgaacacctaaagctggaacagagctcattttcagtgtcttctttgttatttgattggctactgcatcactgtaaaaattggaaagtgataaataaataaataaattgagatgtcaaaataaaaatcaatgattgtcccataataattatccagtccaataaattaaaattaacaaaaaaaaaaaaaacaaaaacatacccctgttagcagaatattcttgttcgtcgatctcaatgctttcaccttcattttctgtgttaatgagaaaaatgaggtgcttcacttcttgttctgggtcctcaatacccctatgcttttctaccgctctcacatcttcttcttcttctttctactctcgctttctacattccaatacaatcttcgctgcttctggtatctctctctctct

SEQ ID NO: 204060 - DNA, 1991 bp, Cannabis indica
aatacatatgttgcccctgattttgcccaaaatacgtggaccaaccggatgatgacacgtggatgggaagggtttagcggttaaacaaaacagctaagtcttcttgaaagcaaaggattatctcggacatgcctcccggagaaggcatgtaagtctcaggagctcccggagagcaagatggccacaaagcacctccgggtggtgtcagattccatctgaacagtcatctcgcatttaatgccgcatgggaggaagcgtattggaactgccacacgcaataaagtctgacgacacaacccccaatttgcacctactaggctatgatcaataaagtctagtgacggctactctgtaaggaatcacatcagccaaaagggattaaggactaccttcatgaaatccctacatcacctagggattagaccatgcattactcataatatattcattgggaatgtataactttactaatagtcacagaaaggcatgtaccttaattctaaggatcaccccacaaaaacactataaataccccccaaagctcattaaagaggggtcgagaattctgggttgcataagtgctagaagagtaaaaactcaccaagaacattctctgtattaaatactatcataaatacacagactcgtggactaaggctcattaacgccccaaccacgtaaaaaatctccttcttaatttcttgcagctctctaaattattattattttattggttgccgaaaaccacggtcaacaacatatataaataaaatataattttttttctaaaggaaaataaaatgttgtttaaataagtgtatatcaaatatatataaatatatattataagaaatttttatagtagacacctaaaggatcgttctagtagattctttatttgtatcggcatctaaaaaaaaattatacactacttttttgcatgatcgcgtatgttgtagctatttaggattatttataaatttttaaatttttttaatagtttacagtgttgaaagtaaggtttatataattacttatcacgcgtaaaagaaaaaacattcacatgtgcaacacaatatgtaaatcatatttttgacattgtaaactactcaaaatttttttaaaatttacaattcatcttaaataactataatatacatgattatgaaaaaaaaaatatgtaaccatgacctcctcctcctcattattattattattattaataataattattattattattattattattattatttctttttaagatactgatgccctttgtctatgtataccgaacttaacaacctatttagttgttttaaatatataatgtgtctctctagtctagtaatgctttgagctccaaaacgctattcaagataaattcaagatttacgggtcacccacacttccgagttactctgatcaaagttggaatcttttggctaatttacaaacagattttaagctctctggtgacggaaaagacgaccaaaaagaagaaatggttacgatagatgatatggttgaggatatcaagattaaaattcttacttttgtctatgaaaggtataggaatcacaaaatgccttcctaaatcttggtataacctagtatgatcttttattatgctagactttagttatcgagtttttttctttaattatggccagattgcaggatcttggtggcataggctttgcttgttgctcgaattttccaattatatcctaatgctataatgcattgcttagcatgttagtatcccgatacttcagagtgtacaatagcggtggcccaacccggttatgctttgtatgattgaagaaggatgtttgtgcttcaagtttgggatcctaaaataaagatagatatcatctaatgccaataattactccagcttatccttcaatgaattcaagctacaatgtctcatcaagtactttacaaattatgtcatgggagtgatatctgtgtggtatgatcat

SEQ ID NO: 204061 - DNA, 849 bp, Cannabis indica
ctataccatagagttatcacttgacaagagctcttacttcttgattcatagctacattccattgtggattatttaaggttgctttgagtgttttcggttcagttggcaatgtggactcatataaaggatgttttgctgcatgatacgacttgggtttgtggatgccattctgtgatctagtcaccattttgtgaattcttgtacctgtaggtaatgatgtctcttgaatggatatgggggcattgtgtgtgataggttgggaggttgttgaatcagttggtggtaatgacgatggtgactcatggtggggttctgctgcagcaggttgtgtggtgggtgaaattttatctggtggtgagtttgagggttcaacacgtaagatattcaaggctgaactgggttgaggagttgtgtttgagtgattaggtgattgaatagttggggaaagatttggtgtagggctgacagacggtatagagtactcagagacatcatttgcagaatttatatgattagtgtcaggcatagtagtattcgaatcagtagagaagaaagcagtaggcatagtaaaagaagatgtacctgagaaggagttgttgagtctttttctggaaatgattcttcatcaaagacaacatttcctgctatagaaagtctggcttcttggttttcacagagatatcctttgtgagatgcagaatatctcagaaaaatacacctttgtgatatgaactccattttgtgtctattataaggcctcaaatgagggtagcaagcacagccaaagggctttaatatattgtagtcaggtgtattaccaaataagcattcgagtggagattgctggtg

SEQ ID NO: 204062 - DNA, 723 bp, Cannabis indica
aattacactaatagtaatataactccaaaaaaatactaaccaccatcaatattttttagcaattcttatatataataattattaaaagtttactcctctaaattatttttttttaataattaaccgccccattacaattgctagttactactatttctactaggatgtttaaaaggctgaacttagtttctaaaaggggtgtcccacctcccacgggcctttcgctatctaaaatatgagtatgtaaaactaacacccagcccaacccagctcacaaccaaattcacatatacattctattctccaatataaagatgtactaaattatatttttaaaattattctaattattaaatttttttctaaattattgagattgttagatttaagatttttgtttaattttattcatttttattatttgtgtactaaataatcatgctctctagattttaatatctaccaaaacatgtttctcgaactttgaccaaaatgccccctgaatttttaactgttttataattttttaattgaaattagacagaaatttttaaatctaacaactttaatagcttacgaaaattttttaaattgactttaaaatttaaaaagtaatataatttagtaacatattaaaattttaaataaagtgaaaatttaaattaacctttaacttaattagtggagcacatatatgaatgtgtgtaatatatatagtaatgt

SEQ ID NO: 204063 - DNA, 1407 bp, Cannabis indica
actgagatttttgaaaactaatacaatatgagaattaaagcttaagaaatataataaacgaagaatcaaaccataatttttacgtggctggagcgttaaagccttagtccacaagtcaatattatttaagattgaaaaggccttaagatttacacaagtgtttgaaccctagaatttgcatgagcactataagaatgagattctcaccctttgcatgaatgagttttcttacatttatagtgttaggattcttatatgtacaccttccccactgatggggtaaatataaatagtataatatcattttagctaatttggtgagacccagctcgtttgtgaggctttgatcttctgatgaggtggaggccacatgatgctcatagttgtcaaatcatattctacttttatggataaaaagacacataatgcttgtttgatatttactttatttacttatttggaaggtacaaattatagacataatcttggaaataaaactatgatattgtgaaatttgacaataaattactgtgatacggagctggacatccagatgcccatcaatcactcatctagataatctttttgatgccatccagagatacgctgtgccaaaggtttatcttgtctgaaagattcatttgtctagcatccggaaggcttgtctttgctaatgaatacaatccactatctttgtcgggcctgcaatcaggcgtgaagcaactgagctgaaaccatcttggaattacacgtgtcctctatccagaaatatggataacatttacccccccaagccttcaaaacttaaggggttttagaggcttgctttcaatcttccaaatggcatgagggcatgtggacgttaaaaaggtggaaacctttttgaattctaaacaaatttatttatggttgacagcctattgctttgtgaaatgaagcacacatggcattatttctttggctcgtgtgcataactttaatttatggagcgcttgcagtatggatttgcgaaatgactggtgatcacgtgagtaactgtcctgagaagaatatcattatttgaatatctcggttccaaaccatgcattaaatgcaaatttgattatttttgcagatcattggatgtaaagtgtattttcttggatatcatcttgctcataatttgagttcacgcgaatcaccatcttcgttgtataaatacactaaaattttcccatttacaatgctttcccaaatttcattatgatttcaaattttcaaagagataaagagcgaaaatagcttttggtgaatgcaccactatttcaacaagtgtatttatcttctttttcaagctcgtgagcgagaatatctaggaataccacccccagttttgaccattgattctgttggatttttatgccctaa

SEQ ID NO: 204064 - DNA, 1037 bp, Cannabis indica
attcagatggaggtcaaaaagaaaactcccattcatgtgtaatgcttgtgggggatatggatataatgcaactacctgtagaaaagaagtcaaaaaggtgtgaataccaaaagctcataatgtgggtgtgtctactgaaaatgtttaaaaggatgataataaaacactacaacaagatataaatactgaagagacaattacattggttcctattgatcaaaatgatggaaaatcaaaagagacattagtagtggaccctccttgaggctattgatgagaataatgttaatccctttcatccaataaagaagaatgatgatattggaggtaactgagagacgccaaagaggaagatcaagggaaactaccagcttcatttggaggtattcttagaaagcaagaaaggaagggaaatttctaaatcatcattattaaataaagtgtggcaatgtactattaataaacaggagaaagttattactctttgtaagttgaataaagtgggaataggaactttactagatactaagattcgaggagacaaagtggatgatatgatgaagaccaacttttgtggtggcataattttgtaaatataactacttttgttgagaatgaacagtatctgcattgcttggttacacattctgggttccaagatgatttttatctcactttggtttatgggttgaattctattatagagcaaaatgacttatggtagggtcttgctttgcttccattccatgttaaacctttgcttcttatgggagactttaatgttgttttggatgtggtgaatattgtgggtggttttcctattgcttccctcgaacttgatgatccgtgtaattggttgtctcttgtcttaactaatgagttgaagagcttaggtttgatgttacttggaacaacaagcatgacagtgatataatttattcaagaattgatggagttcttaagaatgagactaggcttgatttacacccttctgttgaagctttctattaatgggatccaatgtctgaccactgtct

SEQ ID NO: 204065 - DNA, 791 bp, Cannabis indica
tgaaacgttataatgtgtttgaaccgaattcgggaattcattataataacttcacttaataagtctgaatatatatctttgtcccacgtcaaattttcatttttttttttttttgttatattttcacttatataccattaaaaattaatatgtcaatttaaatttatgtcatacgtatgtataaatataatttgttcctatatatctatatatatgtactcctactactactccaaccactctaatcctaaacttgtggtcactttcatttcttagctccttatagcaccaaactctagaccaaccaaatcaagaatctcaagatatatataagagtgagctagaaaaaccaagaagtatataacagccttgtgtggtgataaactttttagtttcttctccaatactcgatcgaagtgatgataatgacccatcttatataaaagctcaataactcaagaaggaagtaactccccatgaaaagaaatatatatacaaaataaaaatcagaataattgaaaataataatattataataataatcacagccctttaactcttgtacatatatatgtttaatgaattaattaagattagacgccgaccaaaaccatgattttgtttgtattaggtatacaaagagagttgatatatagaatcccaatattgctaatatgctctaccacctaatctcctcctattcatcaatttatacacaagaatatacgtttgtcggtcttttggacggcctcttctaccgtcatcaccttatatatacatacatatatata

SEQ ID NO: 204066 - DNA, 1257 bp, Cannabis indica
taattaatgtttaaacttgcttgcgtatgatagtccatatctggctgatgacttggaagagttttttattagtgcccagatatcgaaacactcaagactccattccaacatctttttcgaccagcatcttcatcagaatccatcactaggtattaaggttatgagggcttatgcagccaatggggaaacaaggattacccgccacatatttgatgaaatgtctgtgaagaatgttgtcttctttaatgtcattatcagaaagcattgtaacaattacctttatgatgatggtcttcttgtttttaaaagctggataattacacatacacttgtgtcttaaagccatgttcagcatcccattatttgtgggttggaaattcatgttgctgttgtgaaaattggacttgatagaaatttgtttgttgggaatggtctagtttttatgtatgggaaatgtgataattattaattggaggcacgataagttcttgatgagatgccgagtagagatgttgtttcttggtacttgatggttgtagagtgttgatagataaaatggcataataggaagttattacttttaattaaaactcttggtgaaacactttaattacgaatgaatgagatactaggtcgataagagttgataaaaagataagattagtacaactggttaaggagcctgtatttagagtaggttttaggaaaggtaagttaatacttggctcctatgaaaagaagactgatggaattcacaatacacaatttaaaagcacaaaagagtctctctcgaaagtaactctcttttcattattcttctctcttacacacaaccatctcatctcatcacttctcttttatacacagctatctcattcctaatagtctttttaattaaccacaccgttactattcaccaagctacctatttaatatgcttctttaaaagattagactgcttatttaacaagtttctatagaaattaggttacttatttaacaagcttctataaaagtcagactgcctattttataaccctctatgaaaaccatgcttctgatttcataaccttctatgaaaccaagctacctattttataaccttctataaaaactaaagtgctcacaccaccttcaaacttgtcgacagttcaccaaatttgttcgtaaattataagttcctctattcacaattatttttcttcttacaaacatatataattatagtgtatgcattctatttatctactaaatact

SEQ ID NO: 204067 - DNA, 1079 bp, Cannabis indica
tttagttaatgtgttataaaaaggggtaattttcaagttatgccctttcaaattaaccaacaccactataactttcctcataaatctagtatatagcaataagaattcatgatctaactcacatgcacagattgaacacaaaagtatgtatggtaacaaaataaaaaataaaataacaaatacagtatccaaataaataatttgaatattgaaataaacatagacccatgccaagttttaaataaaaataaactacttctattcaaactaagtgaatatgtgagtaaaaaaaagtaccaaataatattcaacaaatattttttttggattttcacaagtagttggccataacagaagcccagccttaagcgcataggcatgtgtttagagtccacctaaattaagggactcaaaaaaaatttcctttatttttttttattaattgtaaaaatatcacatttcattctaaggtctaaattattttttttatggtcggctaaaattcagagtctctcctaactattatgagtatattggtggaaaaaatttagacgtatattcgttgataattgacccgcacagttatttagatactaatatgtagttgagggtgtttacgaattttttttataccaattagtacaataatatgaactcatcttaataaatattaaaaagtataaaataacatatagagaataggtagaaatcaattatactaattagtatatatagaacgaaaaaaataataaacttaaataccaaaacatatctaaaattcgacaaatacaaaaggaatcgtaaaatggactaaaacttaatactatttaaattctaatgactagaaaaagaatcatatataaattaaataataaaaagaaataaagagaaatgaggttataaattttgtacatgtataaactgaactatgtactgtgtaagatatcacataggttcttcctaagatatatggcacttgcgcctggttttcctatgttactcagaagcttcaagaaattaagttaatgctgatgatgaaatcctctgatcgagaaaaacacaatcctcccagactcaaa

SEQ ID NO: 204068 - DNA, 785 bp, Cannabis indica
atcctaatatgtataatcgaaaaaacaaatcagcaaagaaaacattaatttagtagattttataaataagaaaattatcattgtattttatttttagaaattaattaagatttaagtaaaaaaattaattgaccttaacatggagtggacatctattattattgccaagcatcataaaagggaaggcacgtgaatgctaaaatgagcaataaaaaaaggtgacatatactattaatgtggtttaatattaagtctcctatattttttttttattaacaaaatttgttatattttaagttaataaataatataagaaagtattaattatttatatattatgttatttatttatttattttatgaagaaaaaaaagttaatttttaacgaactcaatgtaggaatgttcaagtgtgtttggaataaagcacacagggaagccttttcatgggggtggtttgagtcaaaaattgtggtcagactccttgaaccaactgcattacttccaggtcctttttagactttttattaactcccacgtgtaacttaattaactcatgagaaaaagtattaataaaaattaaaaagtaatctcttattattacgggttacattaaaataataatatcaaatcccaaggaaagaaaggaactcttgtttcaaaaatatttgtttatttttgtcatttttatcgttcacttatatagagttgtatctagaatagattcatgccactttatcttaaataaataaaaaactttatttattgaggcataaaatcatttct

SEQ ID NO: 204069 - DNA, 771 bp, Cannabis indica
ctttatgtatatatatttttataatcaagacattgcttcaatttgagtgattctagttcactttactactataactattactgtttataattacttttgtaatttttttttctttctctccattggagatcaaaggttcaaagagctgtcctttaagatccaattaattatctatctatatatctatatatatatataggaaagtacaacaaatttaagtgatatcttagaattttttcattgtattttttaaattttgtgacatttttatattttgtttagaaataaactactacaaatacaaaagtcccacataatttaaaaatatttaaagtgttatccatgtaagttataaatgtatttctaaaaatctattactttaggatcaaataatgaaacaatacaccatccatcaactctaaaccctaaatcatgataacacattaatacacaaagaattattcattatataattttagttggttaaatttaaaatgtgacacgtaaaacacgtacaaatatacatactaatttccttccaaattcattgcaagcgagctcgtaaattaatactccaattttagtttcgaagaaaacttcaaagaaataataaaagcaattgagttgaaagtcgtaccgagaatccaatttgaattgaacccatacaagaatcttatttggatccaacccatacaaatgataacaagacacaataaaagaaaagcctagcgtggagttccatatgcctgagtttaactgtttttattagat

SEQ ID NO: 204070 - DNA, 691 bp, Cannabis indica
tacaatataattttttatttttttgaggtaatgaataaactcattaaaattattaataatatccattaaaataataataataaaataagatatcaatgagggtgatctatctaattgaattgttgatatgttcaataagtatgcacactaaccaaaaatttaagaggcctttgacaaaataataaaaatggtcattttaaaagagtatttttgtgtgtttttttttttaaaaaaaatatacacatataacgtcaattttaaaattaggcttcttaaaaaaaacaattttttttaaagaatcttttggcattgaaaaaaattatcatagaaaagcagttgatataaccaaaagtttttgaatttaacaattttaatcatttagagaaaatttaaaattttgaatgacttgaaaaatttaagaagtaccattttgtacatatcaaatcaaaattgaggaggacaaatcctaattagcttaatataaatatatatccttttttaatattaattctttaaaatttagagtatatatatattctattttaacttatataatgagtgtgctataggaacatgcaaatattgagcaattattcaccttactcttagtagtgaaattgtttatccaaaatttaaacatagtgaaacacaaacataagaaccctagccaattgggaataactagtcaaaa

SEQ ID NO: 204071 - DNA, 982 bp, Cannabis indica
aatacataaaaaaaaatagacaaagtttagtaaaacttctcaaagtgcattcttctattgaatagaattaatatttcactttttgactagtaactcatgtagcctttaccccttactgctagaaaattaaaattatacatgtttggacttaaaattttgtttacataagaggctatggtcaactttttagttaggagacaatgatctcttcggtgctaattaattcgtcggctagatgtggtttcgattccaaatcgataaactggttggacttactagcaaggtgtgaaatgctaaccctgccctgatgcttaatatattcagctacagcttgcatttcttcttgagagatgtaaatatattttcccctgtcatccataattccggaaagtcgccctattttgggaattacaacaaaacaacattaaattttaactaaatttgcgttgttgtaaacatgcatgtacttcaattatccagcaaattaaatctgcactagttccaattgctacaatagattattaacctgatatggtagaagagaaagtagcatgataagtcaatgggagatatgaaatggatacagaatgtaagacattatagattctcagtaaaaagtgccagaaaataagagataagaaaaagcttgaaataaacaggagaaacccctaattgctgacagctgaactagccatttcttgatagaatatagttgcaagaagaaatattcatcaaataataacactcttgttgaaacagaaataaaacatagcatacctatactctccaaggaagcaatcctattgatacattcctgcatagaggcaaaaacaaggcaaataataaaacaaaagagaacagatacataaatttaattaacaaaattgaaataccaaaacagtagtgagcctacctgtgtccttaacttgaattcagcagcaagatcctctaaaggaacacatttctgcttctgcaatattaa

SEQ ID NO: 204072 - DNA, 672 bp, Cannabis indica
aggttgttttagtattttttttcaaattaatgaaggtagaaatctttgttttcttttctttttttttttttttattgttttaccttttgaattttgatttatcgggattaaatcactttttggttgagatctacatttcgttctcaatttttcccaccttggtcgattttcgttggagcttcacacggactggttgttcaatctgtatttttgaaaataaaaattttaatttctatttttatttaattttcctttctaggatcaaaatataaattggtaccttaaaatacttactatagaaaaatcccattataatatacataattacaaaaaaaaaaaatacaaaattaaaattttctactagttaaaaacaatacgagggtgcatggtgtgggatgtactatataattttcttaaaatatttttatatatttattttttctataaaaacaatttgattttaattttaatgcttatatattcaattattcttcaaactagtctgggtctgagtttggagtttgggttaggtgtttgaagttcggggtccagaggctaagtctgagtagggtttgagattcggggtattggaccgagccaggtcaaagtcaacttcgggacctaggccaagttctggtgatccaagttcagggtctgggtcaatgtccaatt

SEQ ID NO: 204073 - DNA, 1184 bp, Cannabis indica
cccaacaaactgatggaaaatattttttaagggtagtttagtcttttgtattttatcaattttatatgaaaatatctaagggttttattgtaaattaaggttttaggcttcctatataaagggcttaactctaacctagaaacctaagttactaagcctaatccttagcctccaaattactctaagttagaaaccctagtctctctatctactacacgcccccaagggctctctctcttcctctctcatatgcctctaaggctattcatctccctcattagagatttgtctacttgattcatgttttgtatcaatatggagagctatatcagatcccacctatagttatctgaatagtgttatctctagttattaatacaactaaaaggggagtaggtcattacctgctaccacaagggagtcaaaactctataacaaatttccgtgttttatactttttcattttgtttgtgcaacatgtggcaagcatcagatctatacgaccccgctattagttgatcacttttctggtcaacagtgagttttggctgacccaagtaagtttcttacggcatgttgcaaataaagatggcagcctggtggacccagtgaagattgaggtggttcgggatcggcctcggcccaagtttgcaaccaaagtcaaagtttccttgcattagcaagataccacagaaggttcgttgaagggtttgcaaaattttttacatccttaacggaatgaactcaaaaaaattgtaagtttgtttggactgacaagtgcaaaagtagctttcaggagttgaactagaggttaattatcgcactagtgctaaactttccaattagtgatgagaaatttgtgatttactgtgacacttctaaacaagggttaggttgtgttttaatgtagtctggtaaagttattgcctatgcatctaggcaattgaaagaatatgaacagtagtatcccacacacgatttggaattggcagcagtagttttctctttgaaagtttggcaccattacttgtgtagaaaaaagtgcaaaatctacacatatcacaaaagctcaaatgctttttcactcaaaaggatttgaatatgaggcaacaatgatggttagaattagttaaggattatgactacaagatcctttaccaacctagaaaagcaaatgtggtagc

SEQ ID NO: 204074 - DNA, 799 bp, Cannabis indica
ccatgtattaaatcatgttcctctaactttcatatctactaaatcatgttactcgaactttcatatgtgtcaaattatgtcccttgaactttcatccatgttagacatttcttattaaaattagacaaaagtctttaaatctaacaatctcaatagttcatgaaaagtttttaacaatctttaattttaaagggcatgatttggtacatgtcaaaatttaaaaggtaaaaatcctaattattattattatttttttttaaataaatcatgtaattttattaatagaaattagctaaaataatagcctgtaaatcatttaggatatctcctcgttggagacaccaccaaattaaaataagaaaaacgagtcaaataatcaaccgtctagatcgtttgatacctatattcaattttatttattgcccggaagacacaacagtaaaaactgttacaataggttcattcaaccttgtagcttgagcactcaattattatgtaaagtatataactgcactactaacaaccatttaatcttcgagaacttcttttaaagtaagaatacaatccgtaaaaaaatagaatggatatagtactgacaatgaacgtcttacacaagttacaattttattgtccacacttaaaattaggtattaatgcatatatcactagaaaatatgtaaaaaaaaatcttaatttatttgatttttaacttatttatttgttaaagattcttaatttattatcatatataggttgcaaagtgactttctcattccgggatgcacacagggtggggaat

SEQ ID NO: 204075 - DNA, 1228 bp, Cannabis indica
ttttcaaaaaactcggtaaataggatcattgaattatacttccactagtgaattaatgatactaaaggataaaaaagtaattagaagggtaaaatggtattttgaccaaaactaattacgaccaatatattgagggctaatcactggaattgattgtatcaatggacattgtagttaaactcagtaaatataattttatagttgctaagagtgcaattccatatttatagtggagtaatcatggatttaataaacaaggaattacttggttcatgagactcaataaataatctaatttattcaaggttacaattataggtccatggtccccgaattttgaccttgaaactctatcaagggtagggagaaagggttgtataaagatctttaaaaaaatctattttgaattggcaagatagtaattatttatgtttgtaataaataaataatttttaaaaattaattaaataggaaaaaagacgaaaaattttaagacaaaaattttcaagacaagataatttgtcaccacaaagttgttgggacaaaagacaccaaccttgacaaggtatgtgactaaggtgttgttcctatgcctatggactatggagtttctctttttgggttaattaattcaattaggtaaatatctaatttgaaaagtagttttaaatattttaaggttgttgagatattctcttaaatggttgagagattccctcataaatatcagtaaccgaatcttgttgtagatattatttatttaaataattaaatataacttaattaaaagatttaactaatataaatagaatcaagatttgagaaatcagactaacactttgacatcagtttacactattatttttgaaattatagagttattcttgctcatgtcttgagaactcaataagaacaaaagttatatattttatcctaatagctagccacaatactattccttgtgtgtggtggattgatagactttaagaggtatattctaaacttattattttattattttaatttaatgtacattcatttggagatccaataggacatggtactatgataatcagacaatacaatactttttcatacctaatttagtaccataaaactaatagatcggatccggacccagacccaagaaccaggattggtcccaagctcgagtctggtacccagatctgggacgggggacccggagttggattagatccaaaaaaaa

SEQ ID NO: 204076 - DNA, 664 bp, Cannabis indica
aaatggccaaaaagaccattttaccctcacataagccaaaaaaaaaaaaacacacttgtcacttagggataatttggtcatttctaaaacctcaaatattcccgacattcccaatgtctaactaagttgccccactactacaaaaatactaaaatgtgattctattggccaaaagtcgtgttctaatgttaccgggcacaaaacatgaaaaatgtaaaatttcatatacaacatgcataatgcaccctaaatttaaataaatctctatatattcataaatcataattaataatctagtttcataattaaattctaattatctgttaatttctataataaaattaagtagtctttaaattccaccagttgattgattcagaaaagcaaaaaatagtctttagggcaagccttatttaggtcagtgaagttgacacatgttctccactttccattatgtttgggcactagaacagggttagatacccagataaggtaaaaagcttccctaaattcttttctcgcaatgtctcaactttttccttgagagccttggagcactctttgtcaaggagcatgtgtttctattgtacaggcttgaagttctttttatcaatgttaagggcatgaaagataaccttgaagtcaatcccaatcatgtcctcat

SEQ ID NO: 204077 - DNA, 917 bp, Cannabis indica
atttaagtttaaagctcataacttaggagctttaactctagtctcaagtagaccaaccaagcttactttcaatttagagattagaatcattagatgcttaacctctaactgtttgttgctcttgttgatctctcaaacattccagctcatgattttatccattttagatgggaagctctcccccggctgatcttatagcctgaatttcctcaatctgacattctacttcttctaccaaagaacattctcctcctattgccaaagcttagaagttattcaaaatttcaattgctggtgtagcttctataatcttcttccttgcttaaaaccttctttatctatcacaatgtctcgcttttcttattccatctcctctttttgtttattctcaacctaaatctactttgtcttgaatgttgcagtattttccttcttcctacacattgctgccgtgtgccccattttttgcattctttacacaccaacagaatccattcatacttcacgttaacctcaatctcttgatctaatccattgtaaaatgagataattctaggcaattcttgatgcattctgacttttaagggaatcctgagaaagttaagacattccctgttctttgtaaccaaatctaccataagtggttctcctaattgccaaacaattttgaacaatgacgtctctccccaatacttcaagtctaatccatggagttgaatccatgttggaatcgcataaacttcctccttttcaaagtctgttatgggatctcatcatttcatgattataggcttcctgtcaaaaaacaaaaaactagcctccatgatctcatctctggtgctagtagctaaaaatctgactataaaaatgcccggtttcaacaagccaactttttccactcctttctccttccaaac

SEQ ID NO: 204078 - DNA, 620 bp, Cannabis indica
aaacaaaacattagtgtttaagcttgaaccatatagccagcactactcgttctcgatcagcaaagagacttaagaagcaaagaaggggctcaaatcatgatgatgagcaccactggcagcattcagacatcaccaaattgtgactcgcatcgaacagggtatgtttgtaagatctagcaagagaaaggagatatgtcatatgcacacacaaatggtttatgtcttggcataagaatttcaaaaatttgaggtgtcttgctttctgtcttcttataattccacacctttccttagatgaaaacttattcattttttgtttctttatttcatttatgaggcttacactatttctcattttctgtgatgtagcacatccaaacatggagagatgaaacttattggattcacttgttagctcgaaaaaaatcccgtgtgcacgaagggtttagacatcaagtgaagcttccattgttcatcagagtttagtggatgcattccaagaggagttcagctgtctaaagttgcccctcacaagtattatagtttaagtttctatctacaatttataaaggtgttaaaactcacctctcgaatcaactagcctcaccccatgagtaggg

SEQ ID NO: 204079 - DNA, 650 bp, Cannabis indica
caagacaaatgtatgaagattcaataatgaatgaactcaagccagtttttatttttgtatagtgcttcaattttatgaacaagatactaacatgtgcgctctcctatctttttctacagccatgcaaaggagcaccaacagtaagatgatctttccctcggttataattgcatattcaggtatgaataagagtgataataaagagtttgatttgggtttttattgcaggcattgactatagattctagcacagctataaaggtaaaaggcctcaccatacagaacagccaacagatgaattttattatttctcggtcagattctgtgcgaattactggtgtacaagttacatgtcctggagacagtcccaacactgatggaatccatatcactcaatcaactaatgtggttctacaagaaagcagaatttcaacaggtttgtcattataatgttctatgttaaatttcattggtcatatcattaagtatgcagacccaagagtgttttctggtggttcttttggcatttgatttcaggggatgattgtgtctcaattgtcaatgccagctccaacatcaaaatgaaaagaatctattgtggcccaggacatggaataaggtacttgtctatctacaaaatatgaccactc

SEQ ID NO: 204080 - DNA, 1920 bp, Cannabis indica
agtacatctttttatcttcattggatgtgttagtcaattattgaacaattgatccatgacaataaatattttatatattatatatattgtttccgcctatagaaatgaaaagtaatactaagcatttatatacaatggcactgaaaattataaaaagtttaatttaatttgattgtcaaattaatatatatgaagatctaattaccttattagcttataattaatgattacatgtgtaattatagtgactcttgcattcagaaaaaggcaacacatctatatagccaagagtgatcttgtggccctatatatttatataaccttaaatataattaattaagctactatactgtattgttatacttatatatatagtatattgatgattaagctatatatatatatatagtgggttgttcgttttccttaaccgatttccaatatcttttcttttgtggaaaatggtccctatatatatatatttatagcacaatatgttatacttgaattatgtatatatatagcttcatatataattaacagatggactataattaatattggacacattaattattaattctaccaaagaattagtaacaaataggactatatataatatatatggctggcggcttgctccatatagtcaatccaaaacattcattaattacgtactaattcataaatgtccttataatttaattttaatataatatttttactctttttttttttatttttattttttacaaattaagcctaagaacaaacttttgaaaaaactaaaagtttttttttttaaagtgtgataaaaatgtatttggtaaaccgtcaaaaaataactttttgaaaaatttatagagaagttacagaaagttaacgctgatacaactcaacttttaattaaaaaaagctattttaattaaaagaatataataaatttatttgtactaaaattataattacttatttattatatattagaaaaataaaaaatatttaaaataaattaattataataaaataaataataattaagtctcttatttttttttaaaaaaaaattattttatattttattttaatattaagaaaccatatcaacttaggatttttcttatatacttgagttttaaatttttttatttacaattgataaaatataattattttttacctaattacatataaatttaaacttaaaaaaaagaatttaaaatatatagaaaataaaaatagttatataaaataaacttttatatatttgtggtaattataaactagattataacattatcattattataatagatcttaataacacacagtactttgaaatttataatttaccacactcagcttagtttttttctacaattcttctgcaactgttttttctcacagcatccctacagatatttttcccacattgcagctgtgccagaataaaaactactatatatatgattaaaaatatattttagtggtcataagcttagtctaataattttatatttctttttataaaaaagaggtcccaatataaaaaaaaaagcatattaagtataattgcaagattttgtttaataaatgtgtatttcattatatattagtgatttgtgaagtggaaagtaatatgatatgtatcattttctattaaaaataattaaattgataaaatacttaaaattataatcaaacctatacaatattataaataaaataactgaaggttacttcaaaaaaaaatcaaataattaaagaaattgctttaaactatagatatatatttttcacaagtttatgttaaaaatgtttatttttcttccttttagtgtaattgtgtattttttattaatagtgtctagaacaacatcatcacaaaaatatcgaagaattgattttttttttttattt

SEQ ID NO: 204081 - DNA, 1104 bp, Cannabis indica
aaaattagttctctagtaaaaaatataagtttataaattaaacctcatctttagtgtataatctttagttaataatagaaataaaattccttagaaaaagcaaagaattattttttaattgataaaatagtttgtatgttttttaaatacactatcttcttaaaatagtttcttaatgaaaagaaaaataattacatttcggtttttagttaaaaaaaaaaaggtaaaaataactaattacaaatatagaatacttgattttcgtaaatattatttgcaaatatataatgaatggttatggtaaaaaaaatttacaaatctataatagttgttaactaagtattgattacaaaaataaactttatattatttcgtatttttgttagattttgtttttttcttttacaaacttttgtgtttttgaaaatttgcctaataaaaatataattcattgtacaaaaaggattccaagaccaacttcaatgaaaaacatacacaaataggatttttaccttcatgttaaagataaaataggattttttacttttggattatgatccctgtaaaattttacccatgaacttttctttgttatgaatattgcccccaaagtatataaattgttgaaaatattctcctctgagttatattcttttaagttttttaaaacaatttacttgtgtaactatgagttacatatataattgcagtctaagggcatatttgatagctttaaccaatctaaaatttaaattattgacattaaatatataaatagtagttctaaaaatacacatatatattctcataattcatcattaaactattatttatacatttatttttttgtctaaactattgaattggactatattaatattatattaatgttatattaactgatcgttttaagaattgagcagaatgcaattataaaagatatttgcaatgatttttatagttcagagagaatttttgtaacaaaaataaattaaaagcaaaattctacaagagtcataattcaaagaaaataaatcatatttattctaaaaaaataataataaaaaaattcagcgctcataatcaaacataataatgtaaatg

SEQ ID NO: 204082 - DNA, 955 bp, Cannabis indica
ggtttttgcagagtatgtatatctcttattttagtatgagtgaatttattttcttgaagattttaagagtatattgtatatctcttatatcaattatattagtatttatttatattatatttttataataagtcattaagtaatcaaaaaactcaattctaatctagacaactatgaaaccttccgagagtaagaatggtcaggaccctggtatttactttttttttttttgtcttcttatttatctagataaatgttctgtaatgatactttgatttcttaactcatgatttatttatatttatattttatttattaatattattctaagaattttgactgtcttcacacattttagggcatgataaataaaaaataatatttgaaatgtagggcatagcatttcctttgcacaaaaaatgcgtgatacccaattcttgttcctctaaaaaattgtggagaaattattagccaaaaaaagaaaaatccaactgtatgcagatctaaaacgaacgatgagtttaaagtacaattaatttactattcaaagtgctgacacatagtttacttatataaaacaaatcctttaaataatcatattactttaatgaccaaaatcttaaaaaaaaactaaaactttaagtaaaacttatatttacgtggctcgacacgtaacatccaactagtatataaaaaataagtttaaaaacatatacatttgaagacatatttacataaaaaccatagaattggtcattaaattatattatgcattaaggagtaaatttactataaataaatttttattaatatatatattactatccttaattcaataagaatttttataattgccatacaatttagtgacattcaaatcaatttcttacataaggaaaaataaaaatctcttaaactcgtgatataatagcattaatctcaattaaacctagaa

SEQ ID NO: 204083 - DNA, 891 bp, Cannabis indica
aaaaaattaaaaaatataaatttacagtttttttatggattcaattttttgtttgagatttttttattttcacactttaaaataattttatttgcatttatacgaaattttatatagaaatttctattgcaactaacagagtaatttaaattgtaactaaaaaatcatataacgacctacatagaaactactagagaaactattttaaaaatctaaaccgtaaatttttgaaagaaaaatttaaaaaattgtatatagggtattttttttttatatatataaaaatatatgtagttataatttttttactatgttatgttaaaacattgtttttcgaaaaaaaaaagaatactaaaaaaaatatttataaaataatttaaaaatgggtatttttttgttaaaaaaaaatattattattggatattaataatacctaatagtttttataagtggtatcagacaatatttactttctaaattaatgagcatctttttttgagagagaaagcatttatatcatttattgatcagtgtgaatagtgttaatgtggtttttattcagcatttatagattagcgtgaatagttttagttatttaaagaaaaatgctaaaagacattactggtgctaaacattctcctacgtgtcaatattgctattggtataatttagtattttttttgaatggaaataattttattaaataaccatctctgctaccaaagtaggtaacaagtcagttggaacagactccaaactgaaagtgcaatcagggtagaatatagaggctcgagcaaagctatgagcaaccatattagttgatcgtcttacaaagtaaatactaacatcatttaaaaacttaagcatgtccttacaaacattcaccacttg

SEQ ID NO: 204084 - DNA, 785 bp, Cannabis indica
aaaaaaaaaacatatatttttcgttaccctaaatattatttaccttttgtcacctatttttcacttttatttccatcactattgttttatttttttttcttttttttcacttactttttattttcttactgatgaaatagtaccaaatgtatatagggaattgttgtttttggcatcagtaatggctactcttgggctacaaatactgttcgaatcaggtcgagaacttctaacaaaggtacgcactaaacacactataaatttaacattaatgttaagtgtcacatacattaaacataaatttgattataagttttttttaaggaaaatcagaaagttattaattattattaatgataaatttgtagacacaaccagaaagagactcagtgaaagagaaatggatgatagggataatggtatcagtgacagtggtgaaatttgtgttaatggtatattgtcgaagattcagtaatgaaatagtgagagcatatgcccaagaccatttctttgatgttattaccaactcaattggccttggtgctgctgttttggctataaaattctattggtggatcgatcccctcggtgctattcttgtaagtacttataatttagattattctaaaacaagtattttgatacacttctattctttatttttatttttttttaaagattttatgaatgaatttcaaaagaaaattgaaattatgatagttctttactttgtaaaaagctaaaaaaaatgtattgataagtaattagacattatgtacaagaac

SEQ ID NO: 204085 - DNA, 1439 bp, Cannabis indica
tgtaacatagtatgaagatttttattctattttttaatctataatttgtttttttgtgaattaaattaatccttattatagaagctaaggtgactacatagagtaaccttagaggagaaaattattttagttatggctagtaaattgtaaaaataaaatggagaaaagaataagagttttctcaattgtgtaattacttaatgtaagatcatatattaaaatgtttcaaaaaaaaataatcatacattaaaattaaatatatagaggggcatttttgtaagctaaatttttgaagaataaaatatcttttaattttaaattttctattataaaaattaaataaagagatattgttttacatatatatatatatataacttttatagaatttaccaattattataacaccacacaaataattttcattagcctagggaaacatgacattataaaattttattgagtgtacaatagaccataccattactggtagctatagagtcaatggtcatcttattatatgaattttttataagttgtgatgagtttataatataaataagtaataaattaaatttgagtaagcctatgatatacaaaggtagtattctattagtattctacaattaagctaatttgataatcttgaaaagtatgtatgatatttttggctaataggatttttgttattaaactttgatacgtattaaatcgtgtctctaaattttttaggatgtgaattttttttaatgaactattaatattgttagatttaaggatttttgtacatgtcaaaattcaagagatatgatttaataaattttaaagttttgaggtacgattttgtaaatagacaattgtcacattagtaaaactaaatagaattagataaaatctcttgaatcaaataattttaatagttcaagtgaaacttataacgggttaaaaagtttaaaaaatataatttaataacatttaaagataaaaatttgaattagtttaatattttctcaatgttaattttaaaagaatataaaagaaaatagataaaaagagaatgttgaagaatttgagataatatatacaacgcggtttgtggtttcttaaattggattttgatccctttaaaaaaaaaattagggtttggtccttttggatttggatattttagttttcaactctcattttgttatccatcacaatcaatattactaattttaacttcttccccttaactctttttattatttattattattagcaaaaacaaagtgttataattaccaaccactacatttattaattaatttatcccattttacatgtatatcaatgaagtcccaaaatttataaatttggcttatgtgcaaccctagaaattatttgttttaccattttaagaattggaatatatgtcatatatatattttttaataaaa

SEQ ID NO: 204086 - DNA, 1759 bp, Cannabis indica
taaaattattttaattgatttatggttttggaaaatatcctaaataaatagattatttaagaataatataattaaattattttaattaatttagagggtttaagagatgacttaaataaaacattttatttaagaataattaattaaaaatattttatattaattttaagacttacaacgatcctacaaaattacaaaaatatcattgatgctatggttattagttttataatttagtttctaattttaaaatttgtaaaattagaaatacctaatttatactctattcatcgtcatttatatttattgttttaaataaatattcatttatagttgattaataaaatggtcatgtattagtgaataacataccatacataaaaatatcacacggttatataatcatgtatttcatagtagaaacatgatatattaagattgtcttatgtgtttttgtatttatcgttttttgaaaccgaaagtatgtaaactagctaagattaatttagaattagcttggtaatttaaaattaacctattaatttaaaagagttttaaagtatgaattaaagagttaattcagatttaataattatgacagcaaatttaattataatttgaggattttattataaataaattaatcataatcattaaagtggttaatatgtattaatcctaagaattaataaaacaaacgcattaacctaaaatagtgagtgggagaaggagacatgtcaatgtaacctaagacctccattattgctcaataccgagggagtatagacttgcctcaagacagctttgtttttgtccctctaaggaaggtatgtgtctaaactgttgctcaaggttgatctcttgactaagataagtggaagtgatgtattttagtgtgacatcgacccttaaggcgacaaactaagttaagtcatgaaatcttaaataatgggctacactcacaaagtgtaactaagtggttagttgttaacttggtcaaaaagcggtactttatattttagaaaggaaatctgagatttttttatgtttcaaataataaagatgagaattgtctcataggctcaatgaaattgactcgataccaaccctaaggtggcgatcaattattaaagaatttttatcgtggaataacttatataatattttatgtgttttacttgtatgcgctcatgcatcacgtttatagtaattctgaaatgatatttatttttcaaatataagtattgtgtcaatttttttaaaaaaaaaatatatactatgctaaatatccttaatgctttactagcaattgaaaaactaaatgatgcatatttccttaaaaatttaatctgaatatggtgttggtttgtgagaaccataaaatttttccttactgagtagtatctctctaagaactcatgcattgcacatgactttggtaatacatgaggcggagacacgtatgtctatcgtacaggacgatgcaagtatgcattattcttgaatcgctcattcattgcttcaaaatgttcaccacacgctatgtgatgaacaagatatagttcaatatgactcaatagttaaacgaagtttgactatgtttgaaaaaccttgataaatgataaagtccaaaggaaaggtgagttaaatatgttgaagcaatgtcaaactttccgtcttatttggataagaaaaggaaatgggatgctaaggaaaacagtagtggcaagcacaagccaaaaggcaagaaggcacctaa

SEQ ID NO: 204087 - DNA, 667 bp, Cannabis indica
actctgattttatacataataataatgtgtacagtgtgatgtggaagaaatggagtatttgtgagattcgattcgattcacgtggatgatcattcgaaacagaaggtttcagttttttcttccgttttcgacattctactaaatgacaaaagtttaacgtttcttggcaagcggtgtacggacttgttccgaatccacatcacatgcatacaatgggactaagcagagcatcactcaacaacccttatagtcaagcttcactatttagtcttttctgtcgtctaaaattatgaaaaccccgaaaaatctttgttttaggatctgggttcttacttcggagcctttttccttcatgggtatgccaatttctgtactgtattttcttgatctttgtgctctcatgtgtttcgtttctgtatcgtttcaggttaaacacatttgggaatttcactgttcttattacaacttttttcatttcccctttctttcattctagtaagactgcatttttaagctctgaagctcttttcttctttttccgcttcgaaaaggttccacgctttgttttagtttttctgaaaatgtgaggattttttttgcaggtgaaagtaatttctttcaaaattttggagctgagaacttttcttatctgacattttgatgcttt

SEQ ID NO: 204088 - DNA, 759 bp, Cannabis indica
gtgtaaattggatttttgatgtaaaaatttcaaaaataaatgggaaaaaatcggttttttttttttaatcatagaagaattgaatcgtagctaaaaattttgaaaagaaacgtttctatttattaattaattgaacatgtttgaaaacatttttaactaaataaaaacaataatattttaataaattaaaacagcggagacagtgcgtgtatggtgtttaggatcaacccaaatatatatagattagcaaacaagtgttgtaataaactaatatgaaatagcaccttttgatttttaacaattcataaaatgttccaacaataaccaatcatacgtaacgtactgtccccacactccacagtaatgtgaacaggaaattgatgttgattcaatcctgtattatgtaatgaccttcaatggtccacttgagcgtttaatagtcttcaaatactacaaaataaactatgtaaatgagttgactcatatgagagagagagagaaagaaaactatataaagtggatttatttactttggatatttgatacacattccttcactcattttcacaacaaatgtttcaatatgtaaaagtggtctatcaaataaaactatgatcactcaaaatagacctataaaaattcttaattgacaattgaaaaaaagagaactttattctatatattatttttttaaaaaaatttactgtttgagttactttaataatttctatataaattactatatgaattttagttgcg

SEQ ID NO: 204089 - DNA, 763 bp, Cannabis indica
tcccagataatgaatttcaggggtcagttctttcttatctgaaattaataataaagtgccagtttagatcattacactcatgcgaaacaacctaaattactgacaagtgactttcttgcagtaactacgttgatcatcacgttagtgcaagagatcagattacacttcaagataccatggaaggtgttgtttactcaacatctcagttcggattggatggttagtattttgtttttaattgcatgatgattgttgtaattgaaaatggggtatcatgatataagttcctagacttatttgagcttatggggtatagtttgagtttatttttggatagtttctgtgacagttgttaattagttgagtatagttggtagttttatttctcttgcagatatcttgttggaatttcttttcattttccccagtggagagggtttacataaaaaagttaatttctttttttttgtttgatatctattactttttatagaaagagatgtctgtcagggaataaatggctgctttaagaaataaaataaaacaaccaattattgatagctatgagttataaatttaaactgaaatctctaacatctcgtggtgtgttattagagcgatttggcgacggtgatacttctcaaattggttttgacctagatgaggtaactttttattgtaatttttttttaattaaattttgttggttactcaagataccatcgaaggtgttgtttattcaccatattcttgtttttttttt

SEQ ID NO: 204090 - DNA, 810 bp, Cannabis indica
gttaatagcacatatagttttacataaaaatattgcataaaatacattttaatataatacaatacaatacgacttaatacgacgttccaaacgagcccttaatggcttgtttgatttaatacaaagacatttcgggctccttctacataatcagtgttgaagagtacaaatatatcctaacaatagtacataaaaaatcgagatttgcatggaattacatgttaaaaactaagtttgaagtacagactataattcctcaattttacaccatggtctgcactcaatactcagttactacctaagctgtaaaatcgaacaataccaaagaattcagtttcaattattttttttgcctctaaagcattgtttcacaccactcatgtgtagaacaaccacattagatttcagttgtggaaagaaaacatcaacatattctaaatgtcgctagagcattaagttattccaatctaatatccttctggtatattagtaatatgttgttcaaattgctatatacttgctcaattgaacaccatctgccttactcaaagccaagacctccttttttatactacatagtaaagaaactacctatgatcacctaagaacttttggttgcttatcatatggttccactcttattctcacaagcataaattttctcctagaagtggagcttcttttttcataggctatccctcaagcatgaaggcttaaacccttcttgacatccaatccaatcaaatatatcaaatagggatgtggtctttcgtaaaaccatctttctctttcttcatcatacacatcaac

SEQ ID NO: 204091 - DNA, 1485 bp, Cannabis indica
aaatgtgcaagtagttggaaattgttggtcgtcccaaagataaaacaaccaagtcatcgtacactgtatcaggataccactgcaatgtagcaaactgtcaaatgcatccttaaatatgatactgcatatggagtttttagagaaaattgcgttttgcttttttcggtatgaaaacgatgtgattctcccatcaatttaatcatattatatagatcaatagattgaaaaaaacataacgagaagaattacatgtttgttctaaatcgtggggagttgttaattcaattgcattatataaatttttcgtaagaaaataaagtgtcacatcacaccaaccaggtcggtctatttggacggcgcatttgtgtcctcacttattcacacaaaattaggtaccccttgtggtcctatcccaaattttataattgcaccttatatacacttgtaaacaagagctcatatctcatgtgagactctttatattacacacacactaggacactatcttattttataaaaaattcattcactttgtaaaaagttccaacaaataataatgatggttaaaagtattagagagtctcatattgataatatgtaaaaacataatcttatatataagatgcatgagttacttctttcattatcaatacgcgataaaaatattaaagagtctcacattgatattatctggaaacataatctcatatataagatgagcaattggttttgaaagaaaaaaaaaggggaccaggggctactagtgtgactcctctctctaggcgttaccaagagagctaattccgccctggaatgttcgccaagacccaaatcgtacgctctccccccatctaagatagggtgcgttaccaaaattgtcgatcacaaacggagcgtgttgagcatccaaaacttagaattttttattatattttagaactataaatttcatgatatattcatcttatttaatatgttttttctcattttcaattcatattatcaattataccatttaaacctaaaacaaataattttgtacaacctaaaactaacctatcaggtgatcaaccttcatcttactttctaaatctcattttcaacattcacactttcataataaattccagcatatatatgatatcatatataagatgtacaaacttccacattttaacaaaaaggcaatgttgatgagctaggtaggacttgttaataataatctaattcatcatagtctaaacacgtacgtacgtacgtacgaggtcaatctagctagttgtattgttcttgtcaaattaaatataaacatatatattagatgtgtacattatgtgcaatttttaattttgtgtattaattatgaaacttcatttcatttttatttgtttttgactttcaatcttaacaaccgttttcatcaatctgttaaattattatttttgattgattgtagagtgagcagctcaccactatattaaagct

SEQ ID NO: 204092 - DNA, 984 bp, Cannabis indica
ataatagttattaaattaaaataaattcgatctgatactaaattagttttacctataaaacttgtatttagaattggaacaaaacaaaattgatatgaaacaccattagattctcacaaggatttagtcgataagagaaaaaaaaatccactaccatagatcatataatatagatacattctcattatgtaacaacaaatctatcaaatatcttatatgatatattctttcaagaaatgcccatgttattattttggtcaagaaagtgaggaaaatagaataggggaccactaaggataataataataataataataataataatatcggctggacaaagacagaaagactaagtgttaaagtttattttgtgcaacgcaatctttttctattgataggttcaaaacttcgaatttggctttggcctcttttacatataataataaaacaactcattttattaggtttggtttggtttgaactttactcaaattgtgatgtatgtaatgtaactcaatgtttgtacgttacatcattctatttctttaaaacacccataaaatactagattgttaggtcatctccaatttcacattaaattcattccaactatactttaaaacttatctcttaatgggtgaacaaaatatgggtcaaactattcaatccggctaattcaacctttttttttgtagtaaaaggttatgttaagagtaagtcatgattcattgagctaaaaactgataagttgtatggatattatcgttgctattaataactttgttacccacacaatggatattatcgttgttatgtcaggtgacagctactttaaagagtaattattgaattggagagatttttttaaagtagttgtcacctgacatagcaattcatatattttatacgctggagttgctcttaggaacaatatagatccactccttcttatggtgccagtcggttagttggagttgctcttgg

SEQ ID NO: 204093 - DNA, 678 bp, Cannabis indica
tcaaaataaatagaaaatttatcgaaacaactcaaaaatgtacttataatattttcctattcttttaggtatgttgaccaaactttctatagtctccccctctagatttctctaaccccattctcttcttcacattatatttttttttaataaatttattatttttattttttataatgagaaaacgagtatagtagagtgctactatttgacatgttgggtcaaattccctaaaatcatcaaacaattaaaaaagaaaaagaaataaaaaaattaagtccattatattattattggacagtagttaatgactattctaggattctctttctttgttcaattgtttttagcaatatatatatatgtgtgtcattttctttaaccccaccattatctctctctttctttccatttctacaaagaccaaattaagagaagaaaaaaataaaataattataataaaattttattaaaaagaacaaaagaaaaaaaaaagtttcaaaaaagacaaaccaaaccaattacctttattataataaaatcaatcactatatataaatgcaaaggctttctcacaaaagttctggatatgaacccctctcaattgagagataattcatcaaagttaaagaatttctctctaaattaagatgggtttatggaataataataataata

SEQ ID NO: 204094 - DNA, 543 bp, Cannabis indica
aaaaagaataatttaaatttatgaaatttagggttggaagattaaccgcaagtgaaatgatatttgaaagctaaactcatttaggtggtgtttgattggaggtaatgaaatagaaagaaatagaaagaaaacaatttttattttattcttttgtttggttacatattaaagtattggaatgtcattccaatagaatgttctttctactattttggtagaatctattttgaaatacaaggaaagaccatttcaatatgagaaaaaatttaataatttttttatatattttaaattttattttattccattcttatttttattctcattcatattctcatgttttcattcttcgcctaagtttttaagtttggcacgattaacccccactactaaatatttggagtagaattctccaaacttcaatcttcttttgctctctacttttccgttagtttttaactgtcaaatgtcaaatagacctaccattatgtacacatattgtgtgatttcattagtcaacatatatcattttatttatttaga

SEQ ID NO: 204095 - DNA, 1749 bp, Cannabis indica
gcatcaggtttttgatagtacttgccacaatggttgattcgttaagaccttgatatgatgcgcttaaaaaatatggccacaatttgcgagatgcatgaatcaggcatagtgcaagttttttttagaggtgggtatctcgattctgcctctagtaatctttgactaacatagtaaattgatcgttggtttttaccctcttctcgcactaatgttgcactgatggcatgttctgagacaacaagataaaggtatagtgtttcaccagctactggtttagccaaaaatggaggtgtggaaagatgcttctttattcctttaaatgcttcctcgtactcttcattccactcaaatatcttattacctcgtaaaatattgaaaaatgggagacacttatcagttgactttgagatgaatttattgagtgctgccattcttcctgttaaatcctgaacttcttttggctttgtaggtgaaggcatctcgattaaagcttttattttctctgcattagcttcaattcctcttgcattcacaatgaaacttaaaaatttcaccgaggaaaccccaaaagaacatttttttagggttaaacttcatatcatactttctaagtatagaaaaacaccctgcaaggtcctccgtatggttctcgctttctagtgacttcactaacatgttgtcaatatagacctccatgtttcgtccaatctggttttcaaacataccatttacgagacgttggtatgttgctctagaattttttaattcgatggcatgacttcgtaacagtagagccccatatttgtcacaaagcttgtatgctcctagtctaggatttgcattttaatctagttatatccagaatacgcatccatgaaagtcatccattcatgcaccggtattgcatctaccaattggtcaatccttggtagtggaaagttatctttaggacatgtcttattcaaatttaagaaatttatacaagttctacatgtgccatttagttttggtatgaggattggattagagattcacaagggatagaaggcttctcgtatgaagtcattagttaacaatttgtaaacctcttttttgagtgcgcattttgtctcgtgatccaatggtcgttgcttctgacattttgctagagaattgggtcgatattcaggtgatgacgaatcacattcgagtttattctaaccatgtctgagtggctccaagcgaactgatcttggtttgccttcaaaaaagtgattagtggttattttagttcttcccccaaatttttcccaatatgaacacactttatgggattgttcagatctaaaaacacctcttccaactcttcaattggcttgagttggttgttattatcttggatcccaggatccaaatattttgtttccttctcaatttcttcagtcagaattaccatcagttgatgactggctcttctatttttaagttccaatctataacactctcgagccaataactggtcttctctaactgttcccactccaaagttcgtaggaaatcttaaggacaaattcttatcgagctcactgccccccagtccaattaatgttgggtgacccatcaacacgttatatacagaggggatgtcgataaccaaaaactcttgcatttgtgttgcagacaacgctgtctcccccgtagtcaagggaagctcgattatgcctaagctcacgacactgtcgccagtgaagccacataaatttacccata

SEQ ID NO: 204096 - DNA, 604 bp, Cannabis indica
atgtcaagtttttagagacataattcatgtttgtattgtacattttacgtcatgtaattacttaaataacggcataattacctaaataaatttttgtaagaggtataaatatccaatattaaaaaaattgtaatttttgtctaaatttattagtacatacttcatttatatctgttacatataaaccttagataacacaaaatggaaaattaattagaagaaatagtgtaaagtatagaataataaaaactttgaaaaccacaaacataaggaatgacatcacaaacctaaccatataattaattatattttttaaagcaaataatttgaatattatatttttttgaaaataattaaatatagaatgtttttataatgcactcttaaaagagattattgatgcatcccttatttattttggcatttaaaaaagatttggtctaattttttcctggtcatctgtgtcagcaaaattttgagaaaatttaaaaaatttaacatttcggtgtgttaaacttttataaattttacaaaatatcttaaataatcctaaaaaaataaactttccaaatgacaaaacaaatatgtattgataaaccctttt

SEQ ID NO: 204097 - DNA, 881 bp, Cannabis indica
catgccccttgactttcatccatgttagaatttttttactaaaattagacaaaagtccttaaatctaacaatctcaatagttcaggagaaatttttaacggccaaaaaagttcagaaagcatgatttggtacatgtcaaagtttcggggaaaaaaaataataattagcctaataataataagggaaattatgtcaaatattattttaaattttttttttttttcaaatttacagttttggttgcttcgatggttgcttcgtgtgagttgctatatgacttttagttgcaattaaattgctccgttagttactatgtaaatttctatgtagatttaagtaaaaataccaacaaaaaaaaaactattttaaagtattaaaatgaaaaaatctctaataaatatttctattacatattctattgcctttatagattcatgtcacagattctcttcaatgtgaggcccaaatcattcatttcgatctgatgcccaaaaaagctgtgtcaggccaacttcattgcaccttcaactccaaattcaatcaaataatttcaggcccaaaataatccttttattcacgaatttaaaaaatgcagaatattatttttgtaaaaatatttatattatgttgttttcatgttattttaatattatatttacggtactctgtgaaaatgtgattaaaaacaaactctgtaaaaaatgaatcatagtctataaaaaatatttaagaagttcactttcctgtgaaaaaaaataaaaataaatgtgctacttttgtgcattttgtgtaaaaattccaaaaaagatgcattgtaccttgaaatgtaaaaaatgtttgaaagaaagaaacaatatttggaagaaaaaaagaaaaaagaa

SEQ ID NO: 204098 - DNA, 1012 bp, Cannabis indica
aattctagcttcgctcgtagctttcggcatattcagcatgcccttctcgaaagtaaacaacatgtttgttgagggagggtacgtaggtgaatgctcccgcaagagcttgccaaagaaccatgttcatctcccactccttgttcttgattcatcatattcatttgcatgtctcgttcttgttcttagttaataatagtaagatggtctctaggaagataaaccaagtctctcacaagttactatttgttacaatgaaaaggataattatgttattgaacaggtgaatttccttgtgtttaagaactctctcattaagtcaatcattctccactccaccacccaccttttattattatttatttatttatttatttactgggacatcacttagaaattccaattattatgctatggcaaaaacaatataacccttttcattcaaattagtacataaataaaagaattagagttgaaagaattcattgaaaaatagcatcaactaatataaaatttctaatacaacttgaatatccgagaccaccaaattgtgctaacaatagtgttaaagtaaatttgacaaaagtaccaactactacattaacaattctggaacaaaaattaaaaactcacaatactaaaatatttacataaaactcaaatatcatcaagaatcaaatccgaagaaaatataagaaaaaaccttaaaaatacaaatatactgaatttacatattaagaaaataaaaatgataattaggaagaagctgcaatttccaaaagaaacatcccaagtgttgtcaaaatacaaataaatatttaatagaagaaagccatagaaattgccaagccttttaaagcacaataaaattaataacataactgtgtccatagaaaaaagcatttcctaactgggatgatatattccagtctattacattaaaacaatttataaaaaaaaataataataataataaaacaataaaaacctgaatttaatataaatatataagcaa

SEQ ID NO: 204099 - DNA, 1145 bp, Cannabis indica
ttttttttttttttaagtaaacgagttagtctttttctgtgtagatataactagtttgaaaaggaattgagctacttcggacgaagtcaaaatgtaatgtgttgggacgaattttgaaagtgattattctcatcccatgttgtgaaaatttgattggtggggctatccacatctactgcagcacaagaaagaaagaataacttaatatttatgtccttcttaagctattttgatccatcaattttacaaaatctttctacacaacacaacttacttgattctacaacttgatgatgatgataatgatgtatattacataagccatttcttatctattccatttgatcatcatcaatacttaatggttaaccctaccatatatgtcctcattaatttcatatactagtaattatatatgtttgatcattcattgcaagtatgatttgcatataaaatgatcaatatttgaaaattgcatcatccttaattttgtcaatattattgttgttattaatttgggtacaaataaatactaacacccccacttgtgacaactaatattgaaatctgccgtcttattattttattaatttacagggaatattatatgacctccctctaggttgcacttacatgtgggtgtgtgggtttaaataattaataatattatttttatttttattttccttttcaattagctagagaataatataaatggggtatctatatctatctatctcacaatggagacaaaataataaaataagaagattaagagtttgtgccttaatgggagtcatcaacttctctcattatatatattctattaaaaaaatacacagttgaccaagccccttcaaattttattatttagtactatagctgtatggaatagatccaccttcaattcaagatattggatgtattattgtttgctttattagagttagctattaattaattaattaattatgaatgtaaattaataataataaaatgcaatttaattatatttttcaaatatataaaatttaatttaatttaaaatttatttaattgaaaattaaactaagtaattttattaaacaaaaaaataaacaaataaacttaaatattataaataatataattaaatttattataaa

SEQ ID NO: 204100 - DNA, 1653 bp, Cannabis indica
ttatcgtgacatttacgaccacctcgtcatgatccacatttccaaacccgaaaatattttctttgaattattatgtctacgatacccacatattccaatacaatctccgtaattaataaattacgctttattactcattagttcatattttcctaatcaaatcatgattatcttaagtaggattataatcctactgtaatacccataatcacatatttaataaaatatgtccaattaaaatatcaatatatttttcgggatattacaatttaagcaatcgccctgacgtttcaggttttgccgatacttatcgtaagcgatagtttgtcagtacttcaatactatgtacttaaaaatatggtcacagcttttgagaagcaactactagtgcaaatgctaatcgctccatttccagatagcgagtttcagtatctagtaagcgtttacttacatagtaaaccagatgttgtctacctttgtctttacaaattaacaccgagctaattgtgtattcggacactgccaggtagattgataacacttctctatgcatcggcttggatagtatcgtgggttgccccaggtgcgattttagtgcctaaaaagcctcttcgcatttatcagtccactaaaacttttgtaaccttttagaatctgaaagaattctttacatttgttaaaggaacgagatacaaaacaattcagcgcagcgactttacctgttaggctctggacctctttcagtttggtgggagatcacatctctaccagtgcctttatttttgctgggtttgcctcgattcctcgttggtttaccataaaaccaagaaattttcttgaacttacttcgaaaaagcactttagaggactaagtctcattttgtagtgttgcaggattctgaacatagaatgtaggtgagggacatggtctttttcgtgtagagattttacgagcatatcgtcaacatatacctccatggtcttccctaacaagtctacaaaaatcatgttaactaatctctgatatgttgctcctgcatttatcaagccaaaaggcattaccttataatagtacaaaccttgatcagtaatgaaggaggtgtgctcctgatctggctcatacatcgagatttgattatctcccgagtatgcatccatgaagctaagaagtttatgacctacggtagcttcaacaagttggtcaatgcttggtaaaggaaagttgactttgggacaagctttatttttcaaatcagtaaaatcgatgcatgtgtgccatgagctgttgggttttggtacaagaacaaaattggctaaccagttcgggtaaaatgactcctttatgaagccgcatgctaacagatgatccacctcttccttaagcgcttggtacctcgcggggtccattttgcggcgcttttgtcgtactcctcgcacttcagggtcaatgttcaaccggtgacacatgacctctgacaatattccgaccatgtctgaatatttccacgccaaaacatccagattctgtttgagaaaagtgacaagcttttctcgctgctgaaaaatttagtttggaactgattttcaatactttagtattatcaaatgaattaataggtaccatgatatggatacgctataaatttaaccatt

SEQ ID NO: 204101 - DNA, 713 bp, Cannabis indica
ttgagatatttatgcactatgaaagaacagctagaacacaaatttaaggatgaactttaaaaagtatacaaataaaataaaatatcattttgcccaagaatatcaaacttttttgtgattttttcttttatgtgtcatttatcaaacagtgttgggtaatcattatttcttattacagtacatgaataagttatttaagttattttagtgttacttcttatagagatatcattaatcattctcttatatgggtataatttaacattaccccacatattttattttaaaaatatagaaagttttaattactcgtatgacgctacttctttgtagtgatgttaaattctattagtacttaataaaaaaattataaactatataatggaaatatttatagataatgattaaaacatactcttgttaaagttatttatttgtttctgaatttgtcctttcaatcaagagttctgaatttatttatttatatacatactaactatttccaaaataaataaataaataaataatagaggaaagaaaaacttaagatttttttttctttcattgctttttaagaaacttctttttttttttgttgaattaaattttgtggtatttggtgtagatggaataatataaaagatgatttaaaccaattataagtagggtatatttccaaccaataccaattgtggacagttaaaaaatatatt

SEQ ID NO: 204102 - DNA, 905 bp, Cannabis indica
attaaaataaaataatataaaaacttacaattaataaaaatttacttatattatattgtatgtggctcttcgtataagaattggaaagatgatataaaattaaagattaataaaaaacctaaaaagaaaatataaaatgaagaagaagtataagatattacaatattactattgaatattgtgcatgaagaacttctgccaccttctcaatttttgagatccacttacaaaataaataaataattaaaaaacttactaagtcacagagtggctgaaagagaacaatatagtggaaataatatagggaggtaatatctaatgtgtatatataatatatatagataaatattttgatatattgttgaaagaagcaattataatggtgacccgactctttcttgctagctgatcaaaaccatgattgtttactatatgatccaaaacctaaacatacttatgaatgacgactatggagagaaaaatgatagaagagaaaaataattgtacgtctttggttataaatgtaaaattagagaggaaatttagggaatgaaatctcagctcattatccttgaacatgagaggcacatatatatatatgtattgctgagaattgatacagaggaaaatacagagtaacggctaccatacaggtaagcaatacaaatcccaataaagatttcataggggaatattctaacagaatggcctaatcattatctcctacatattggaccacaaggacacctgtcagtgaatgatgagagactaatcatgtgcagctcactgtagagagtaagcatacaccagcagccagattgcttatttctcaacacctcgtctcaaacgaagggagaggatctcactccaagtttcgtcaactagaaatgagaatctggaattgg

SEQ ID NO: 204103 - DNA, 676 bp, Cannabis indica
aataataattacatacatataattaatgaacagttatttgcctatacaaatcaatttaaaccagcccctagctatctttttcaccaattaattttcccaatatgtctatgagctatatagaactttttactaataccagagtttattaagaaaaaataccatattttaaacaatttatacagaaaaaaaatgtaattatatttttttaggattttttttttaataacatgttttaaagatacctaatttattttttttagaaattaatattatattttaagttttgaacatatgagatggggatattattaatgaataaaatgatttaaatatttattgagaaagaaatgaagcttgtgaaatattatgtactccttattaattaatatttgttggtcaatcgtcatcatgtgttagatgaacacatatggtactttacacacttatatggtgatttgtactggacaatctccaacttattttgttgctgtaatggatttatattaataatttgtttggtacgtcgtattgtattgtattgtattgtggtagattgtattatatatggtatatattgtattgtattagaattattaatacaatactatgtttgatattgacgtgtattaatgggtaatgtgtaaaattataatatattttcaataaactcgacccc

SEQ ID NO: 204104 - DNA, 935 bp, Cannabis indica
cagtgattaaactgtcagaagctaaaaaattattttctcttttatcgtcaaacttattgttttacttttaccatcaaaacagaacctaaactaataaactaaagatctatgttggaaaagggaaaacaccatcaattaatcgtttcataaatcatagcaaattttatcatatgataaactgaataagtgactatatcccattgctccaataataaatacttaaaaaacatcgaaaaaagtaaaaggaaactagcaaccctaaaggtatcactttctcgcgccctaattccaaaactaaaaaactcaaaacgttctccaccaccaattgttaaaatccaagtgaccattttcgaatcagattttcttataaatcaaatatctttttttttttaatacatttgtaaccattttaccgcaatcaaacatacacaacaatgaaaatcagatacaaaagcgatctctttaatattcaaagtattcacatatcatggatctcaatacacagatccataatccaataagattcaactgttagatagcatactgtagaaaatacgaaacaaaaaaaaaacaaaaaccgcttacttggagcgagttggctcgggacaatagtgagtgatgaatccgagtcaggcgaacaaacgaagaagaagaatgattcgtgactctgtaaaaccctagcagagactctggaaagggaaacacaagcagaaacgccgatattgtaatgctgggatttacagaacaaagaaaacccaaaaaaaaaaaggaaaaagaaaaagaaaaagaagcaaaaaaaaaataatgtttttatatttttcttcaagtgagcacacgcgaggcgtttagcgcgtgagaggtgtgtgattaaaagagaggatcaagcgtttgggaattggctctaaggaattcgtatattcgtgttttcatataaa

SEQ ID NO: 204105 - DNA, 732 bp, Cannabis indica
aagaggaaataattaatgaacagttgagggagcttgttgaaagagcaataatttccacaaatgtgttttgaatttttgaggtgtaaactgtaaactcaaactcttgttttgtttgtttgtgtttgggcgggattaatactaatagacctataattgcatttttgtagtgtagttgttgttgggttcggatctcatttttgtatgagggtatttttgtaattttcttttgttgttttagtgtatttataagattatcttatttttaaaccacacactaaatttactcaaaatattacatttataatgataggatgtatattttacatttatacgggctaatcttggttcttgaatgcttaagaaagttgagcctctaacataaaaatgtcaatgtcgacactaggaatgatcttgaatgtcttaaaaaagcttagcaccctcagtttcatattgtgagtgtgtttagacatttctcacttgatgttgcatatgtcggtttactccgagaagatcgggcataactttcatatttcaaggaggtcattttatcttggttttcttgttaattaggttaatttatttctttcattgtacacatgtcatttatttagatgtcctcatttactgttcgaaaaatgggtataacacgatgaatctagctaagacacttgggatgatggtttactagcactttttatcaaaaattttggagccagctaaaagccaacgtgg

SEQ ID NO: 204106 - DNA, 946 bp, Cannabis indica
aaaaaaaaaaaaaagaataatacaatatcgggaaaaaattagtgcaaaatttaatgggaaaaaaaagggttattttttattttttataagataaaatagtatatatttattataaaaaagaagttaaaagaaagacgcgtcagtatattatttacatagagaaaaggagaaattaataaaatagcctaaaaaaaataaacaagtaaatgatacatattttaattatcaataaaaaataaaaataatataattataactatacttaaatattattttaaaagtaacatatgtcactcaattgtaaagagtacaaaatattatttttcttaacactcctatgtaattaactatgtcatgtatagtataagtacgtacttgcaaattacaactagtactctgatccatatcataatttgctcgtgccaactttacatataatcataaacataaattattagcattattagaatttaaatatttataaatattcaaatttttatatcacactctacaaataaattcatatataattttcaaatgaagattctcctgtatgaagattctcttgtggaacgtatttacaaagcccgctactttccaaatggtaattttcttacggctgagataggtctgaacccaagttttatttgacggggtgtgcttgaatcacaacgactggttcatgatggtgctagaaggagaatcgggtctggtgtgtctacccctgtgcttaatgtcccttggctggtttctgatgtgaatccttgtgtcatttctagacatcctgtgttggctcatagcacggtctcgcagttgatgcacatcgatcgtaagcaatgggatcttgaggtcttgcatgatttgtttgaggcaagggatatcgagttgataatgcaggttcctctaagtgataatgttaatgttgattcttggttttggggtaaag

SEQ ID NO: 204107 - DNA, 1230 bp, Cannabis indica
cataataatatatcaatcttttcaaccaatcactttatttaaattattattcaaaaaatatttacatatattttgaacacacatatcattattcttatcgattaataataattaccaataaaaactaaaacaaaatggacctcattaggtccccataacatatgcaaaaaagcatttatgccataatatgatctaatgcatcaaacaaatccaagattagaatgcaaaagagtgattggagagatttttaatattaattaattaatgaattaattaagctctaacatgggtgattatgttggtctattccactcaaagccagcaacataataatcttagaattctttttaatattttactgccaagaccagccgacaacatgaccagatttgcagcttcataatataaaaatatatttaaatgaaattaagaaaaaaaaaagaaaaaaaaccattaatattaacttatttctcattcataatcatgtgcacatcactacatattattccacatatattttctccttcatgtaattaaattaaatcataaacaaaaccaaaatggatcttcaataattcaatattaaaatatattatatatatgcatgtaatataatattatcaataataaattatatattgctacaatttttttactacaaaaatcagttgaccttttatcatcaaaacatgctcatttatgtgtttatatgacataaagaaccttattaaaatcaatatatatatatatatttatatatttctataacttttttttctttccaaatatttattaagagaaaatagtagtaagtgtgttgataatatatatatatatatatatatatttatatatataagcacatggcaagcttagcaattgtgatttgtgaccacaaataatgaatattggaccactttgagtttatttaagaagatgatgatacagtaaattagctcagcaaatataatcaatttgtggctatttttagttggtttaacttttatcactgtttggaagataaaatccattaattttgcagatgtatattatatttatatatttatatgtaagaaaaaaaaagaaaaaaagaaaaatcagtttgttatgtcattattgcaacttttaccaaaatgaataaatttattaggatttttactatttctaatttaattcttgggaattttgttgcaactaatttaattcttgagaataattaattgaattttt

SEQ ID NO: 204108 - DNA, 637 bp, Cannabis indica
aaccaaacaaaggaatggaatgaaaattgttttctttccattccattccatttcattacctccaaaaccctacctaaatttattgaattaatcacttgcaaatattggaagagtgatcaaaatgtgtttaggttttgtggaataaaataagtagtaatttataaaccaacaaaatcctaaatgtgcctcaatcttagagatgatggtattcatgaggagcatctagggcaaaaatgaaaaacgatttaaagagtgagaattttaaaaaataaattaaattatatggtaaagtttgatctaaacaaaatgttactatatagtacccatataaccatagtactcatacccattttgtaatacaaaagtcttctaaaaataataaaaattacaacattgtgccacaaaattcttttgtgaataaaaaattgttcttaataatttttttttttaatttctaaatattttaaaatgaaccatataactatttgtcaagtactttctaactttgtcacaactttttcaattttacttataagttatagtaattttattgtataagccttacaatgataataagttaaagtttgagtctcatgaaatcgataacaaattaacaattcaacaagatgtttttttt

SEQ ID NO: 204109 - DNA, 1592 bp, Cannabis indica
aatgagttttaagtgaaatctaataatattctatttatttactagtgagattgagtagttcgagggtgcactcccttgcaccataaatttccccaaattatatacaaaacaataataataaataaaaaatatttacgataaaaatgataaaagaatattagtaaagtaatatttaaaaatgataaaataaacaaaataaatgagatcagaaggatcagtctccaaaaaataaaataaaccaaacaacatccacagctaggcccacctattcagccgagaaaagaaagacatgcacagcacgtgattaatatgaaatgaaaaatagtaatttcaataattttaattttgaattgactgttaatggtcggtcgtttaacttcattatacaagtaaagtaaggccaatcttattggccgagacccaacctccaactctttccgtgtaccgcagcgcactggataattgccctcctttctcctatttcagttcccaacactacaatttatagcttcacacttcccactattttctcggcgtttgtactgtttagaaaatattaatttcaatcaaactattattttcttgattcaattcattcatggactccgaatcaggtgagctattgaaaagtacaaacttaacctgaacctatactctcctttcttcgccacctacaaattgactgacaaaatatccactttattttaacgttttcctgtattgtttgggctttttcgcttttggggtttcatatatttttatttttcagtgattgaattcctgggttgtgttcccttgcttcagagtttacctgcctcatcgctcaagaaaattgccgatttggttatcgtcaaaagctatggttgttattcttattctactttttttttttttttttttccattgttctcgttcaatttttctttcattcgaaattaattaatgggtattttaatttttttttccgagtgaattcatggtcgaattgagggtggcactgatttttgtaacttgtttttttgtgttagattctggagagtatgttgttcgtgagggagaaaccggacatggagtttactttgtatgggaaggagaggttggttatatggtttgtctatattgttcgcattatgaaatcaaaatttttgtttgttgaaagtgaatatcgtggttttttacaggctgaagttactggtaatgttagttctggtgccgataatcgtttggagtttcaattgaaacgttatgattattttggttatggtgagaagctttccatgttctttcagtttttgtgtttagagcatagattggctatattaagtttcatgtaaaattcgaattgtttgttaatcaaacaaataaaaggggcttcttatgattaaacctgctaccagcaataaaattgaagagtaacgtcacttgcatgtgtaggttcaacattatctgttcatcacactgatgtaatcgctttgtctaaggtacctgcaattattttatttatttatttttcttttaaggtacctgcgattattacaatagtggttttgcctttacgagggctaaaagtgttgttggctgttcaaatttgt

SEQ ID NO: 204110 - DNA, 1056 bp, Cannabis indica
tatatttaattattaaatgatctgaatattatgtttttgtaaatatatatatatattttttttgtataggttttataatttaattttttttgaacattttttgtaatataataattttttattgttgtacactaataaaaaaaccatgaaataatattgtatttttttttttatcataaccattaataattagatgattaatattgattaattgtatttgtaaatgtagagctataaaaagcagcgagttgacgaattaaaggaagtggtaaggagagaggtatttttagaatgttatgataatgtttcatatgtgttgaagatagtggatgatgttcaacgtttgggattgtcgtatcattttgaaaatgaaatagaaaaagcgctacaacacatttacgataacactattcatcaaaaccacaaagatgaagatttacatgacacttctacccgctttagactattgcgccaacatggatttatggtttcatctagtaagtttaacgcacaatatttttatataatcattatttttttgggtgtctacacatttggtaccctgtgttttatctaaatacaagtttggtaccctgtatttttaataatgcttatttggtaccctgtattttaaaattatacttatttggtaccctaaattcaaatttttttgataaaatttaatcaatactatcaatagtctaaaattttatgaattctaaattctaatttatttatttgattacatataactgagaattgtttggttaaattaataaaattgtattgattaaattttattttaaggtaccaaatatgtacaatttaaaaatatgaggtaccaattaagtattattgaaaacatagggtaccaaatatgtttttcataaaaacacaaggtactaaatgagtatattccctatttttttagctatcatattgaatgtttacattaatttaaaaattaactaaaaaataatttagaaaataacttgtaacttaaatgtcatttaatttacttaatatattttgtttactttataaataataattaat

SEQ ID NO: 204111 - DNA, 1055 bp, Cannabis indica
gttggttgattacaacaatggttcctagcggtggcacaaaccaatggtgcatacgatggagattaatgtcgatggagctatatttgatagtgagagacgatatgggtttggctgcttattagaagccgtggctgacaatagactcgagactgtgcaaccagagcttgctgaagtgttcggggtcaaggaagcgctaagctagataaagcgcaaaggcttgtcggaggtggtggttgaatcaaatgcgttagttatagtacaagctatcaatagctcggttcctatgacctctcagtttggattcttaatcatgattgtcgtttattactctcctctctaaactatgtttctatttgttttgttaaatgatctgtaaataaggttgctcattgtgttgctaaaggattttattttctgtcagattgtagttatgatgagctctctgctcccatttccttaaaagatattgtaatagttgaacgatattgaataatattcacaacttttgttcaaaaaaaaaaaaaaaaaacatcatagatggataagatgaggtgagaggagagagttctaacttgacaacaaatgacagcttttaagaattcatcaatatattccatcatcttttttgtctaaataatcatactcctatcatctttgtgtaaaataaaatacacacgtatacaataaataaatttcatttttattttcaacattttattaattatccttaatttttactcacataaaaatacaatataaaactatataactatttagttaccgtaaacatgaatacctgcttcgatacatttcttaggtagagtatattataattttttcagatgacactatacagggccagcccaagtattttggggctttgtgcgaaattttaaaattaagaccctttaaaaaaaaaaaaaacatgtacattaaaattacaattctatcattagcttctttttttttttttttttttttaaatttgcttcataaattttcaattaaattttttttatttgtataaataataggagaaaaaaaaagaaaaaaaa

SEQ ID NO: 204112 - DNA, 1009 bp, Cannabis indica
cttgtctttttctttttgtgaatttagtattggcctgcctgaggtttcaaattatatccttctcatttttatttttgataataaatgtcaactaactttatatgttaaatggtgttcaactagtttttttatgaaataaaaacaaaaacttatgtctttgtttttttttttttttaaaaaaaattgtaattgttattaactatatgagtagctgttaacaggttttggagataggaatagttgttcattcagtgataattggggtgtcacttggtgcttctcaaagtccaaaaataatcaagcctctagtggcagctcttagttttcatcaattttttgagggcattggtcttggtggctgcatctatcaggtacttaagaatattcttagtaaattatattgttacattgtttttaattatttctcctaaactcctaccaaattggtgctacatagcaacttatgaaattaaaaattaaaagaggagtgatactgtaacttcttattacaactttttagttaactttcatgttcaaaaatacatgttgagatattttttttcaatttttttttcataacggtgttagttatacttacaatatcattcatgtaaatttttgaaaattttaaagttttttgaacgaacgttgtaaactgaaatatcaggaaatctgtttttagcattgtaaactattcaaaaatttacaagaatgatacagtaattataacgaatactgttatgaaaaaattttgaaagaaaaatattctgacatgtgattttagacgtaaagttttaattagcactcatcaaattaataattgggtgagctaagtccaaagtgatcctttgattttttttttaaaaaaaaaatagattatattcaatttttttagtttaacaagaaaatataaagaaaatggaattacatgtatcaattatgatatgccccattaaaaaccaataatttagttttatattagggggaatttttatttttatgttttttt

SEQ ID NO: 204113 - DNA, 1004 bp, Cannabis indica
aaatttgtcatcaattttggggatattgttgatggtttctgcccaaaagacctatctttaagtacagtaaataaagttgttgaagaatttgagaaatttgatggccctgtctatcatatgattggcaatcactgtctctacaatcttcctagggacaagttacttccaatgttgaagattccaagtgaggatggttgtgcttactacgatttttccccaagtcccgagtttagattcgtcgtcttggatggctatgacataagtgcaattggctggcctcaagatcatcctaaaagattggaggctgtgaaaatcctcaaggagaagaatccaaattcagacaagaatagccccgagggactggttggtatcgagagaaggttcctcatgtttaatggagctgttgggaaagagcaactgaaatggttagatggcatccttcaggaggcaacaaacatgaggcaaaaagtagtgatctgttgtcatctacctttagatcccagctcaacatcttttgcagctcttctatggaacttcgacgaagtaatggatctgatacacaagtacaattgtgtgaaggtttgcattgctggtcataatcacaaaggtgggcattcaattgactctcatggaatacaccacagagttcttgaagctgcccttgagtgtcctccagaaaaagatgcctttggatatatggacctttataatgatagactatcacttactggtactgatcggatggaaagtactgatatgtgcttcagtccttaagcagacaattgataaagtttgggagactaacattttaaatattcaaaagctgcatactttcatggtaaaataccatgatcattgttcacctatctctttactctaaagagcaaattgttcccacgactttaaaattcatcattagatacttccatgtataaacttttctttttcaattagcctaagcaagtcctaaagaagtttttcgactaggtatattggcattcaaa

SEQ ID NO: 204114 - DNA, 572 bp, Cannabis indica
attttgatatttgtagtagtgatgactcgaccaaagaatcctataattaaaactatcaagtttacacctttagtagggatcatccatatagaatttgtacttaattgtccgcgcagatcctcactatctaaaaaatgtcgagtctttcgagtagagtagttcggcataagaagatcttcagagatactttccataaatgatccagcatttacatctcaatcaaatccctaattttgtggaattgacttgcaccgacaagatataatagaataccttcctaatttccttttttagtttcatctattttgggaaacctaattattgtatttttatcctacgaatagtggagtcattccattgttcagaaatttgaaatctcatattcttgagagttcttacgttgtcaaataattgtaagcatttttttattaagaattgttaagaaacttacttagtaagctccttgtaatcttattaattctttaaattgatacaagaaaaagaagaatagactattaccataatcataaggtcgaacatctataaatgttgtattcttattgcttaattat

SEQ ID NO: 204115 - DNA, 1438 bp, Cannabis indica
aaaaacacttaataacacacaataaaatctttttcctaaaaatcatatataaacattagggaaattttagatatgctcttaaaatttttgaagcttcatatatttaatctagtgtctgaaaataaatatatcctcagaattttatgtttcaacattatattgtaactagtatgttttcaacttgtaattttgaaaataatacgagaaattttatgtctctcttttttgagagttttgttttgtccctctctttgagtgtcttttgtgatagtgtattatctgtttgactgtcttttgttttttctgtctagcttgtgtacgtgcctttgagtgtctattgtgatagtgttttactatggcatctagtagtctcaatatggataatatagaagaacgttggaaagatatctaacttgaggaggaaaaggcagaggagactttttatgaagagaatgaagaagaagatgaagatgatttggctattgacaccagatagtgtctcgttggacgaatgcttacagggaaagtctcagactttcgaatttttcagaatctgatggctgatctttggagacctggcaagggttatgtatgccaagcaacttgatcagaatcagtttttgtttcagttttatcatgagttagatatcaagcatgttattgcgtgtagtccttggacctatgattgcaaacaattggttataactcgtctcaaagatggtgacaacccccgcactattggccttaatactcttgatttatggttacaaatccatgatctggaaaatggattcatgaccatgaaggtggctacggatgctgggaattatgtaggcacttttattgaatcagatccaaacaactttactggggtatggagggaatatcttcgggttcgagtaacactttctcttgatcttcctctgaaacgaaggatgaagtttcgtaagcgggatggtgattcattttatgctacatttcgctatgaaaatatcccaactttctgtttcatatgtggcttaatgggacactccgagagattctgtcctcgcacgtttgacacaccaccccacctgatcgttaagccttacagtttaggcttgaaagctcttccccgtcgacaccagaactttgctacttcaccattcctacggtcaagtaaggcttctgcacattcatcacctggtgtgaacaccaataatgcaggagccaatttcgggaagtcaactgatcccatctttatgggaatatcttcccctgatatttctcattctaaaaccaaaaataaagggattatgctttatgatagtcaacatgctgatgaggaattgactcaagatgaacttaaaaggaaacggtttgctgctgagagaattaatgggcctgctgatgcttcggtccatgttgaatctggttcaaaaaacttgaatttggtggg

SEQ ID NO: 204116 - DNA, 816 bp, Cannabis indica
aaagaggcatgaaaatctgcataagaattacaaatactgtcaatacatttttttatatcaggtgaacagttattatgaaccttctcgtttcgcactctccagatagtatccacaacaatcgaggcatatagaaaaaccgcatcagcatcgatgccttttattggtatatatttgttttaaattatatttaatactataaaagaacaagttctatttcttcgttaattaattttgatgaaactttaatctttatcaattatatttagcaacttaattattagactcatactctttattttattggtatatatttgttttaaattatatttaatacgataaaagaacaagttctatttcttcattaattttgataaaacttttagtgtattattttatttttataaaaaaaaaatatgatgctctatctcaaattgaatctttagtctgctaactgccattggtgctacgtacatacttacagtattagaaccttaatattattgtgtgtgattattattgaatccttacacacattaatacgataattttattaaaaattattaaattaattatataattttgcgtgtatataatttataaacgaatgaattatgattatataaaaattaataatttttacttaatatatattatcaaaataaaattatttagattagtattatttatctctactaatttgttgtaattattatttttgtagtagattatttacaaattaaaaaattgtaaaaagattaatacaaaacattctcataatatatataaaataaggaaattaactcatatactattttt

SEQ ID NO: 204117 - DNA, 1381 bp, Cannabis indica
gtaagaggtttaaagaccaagtttttgctgctcgagctcaattcgcggggttgctccgatgctgactgctaattaggaaactttcaggtctcatctgtaatattttgactaccttgcatccagagtttctcttctttgtttgcaggccaaatcctacaaaacaggcctgtctgttttacatgatgacatttctgaggtagatcagccaagggatctctttttctctattgctattatgggtgagtttcttctgtgtttgtgtcgaaaatcttgtttaattgttgttatatgctttgatcttattgggatcttttctgttaaactcggaggctcttcacacattgctgttattttctattctcttgttccttgatgttattatccatatgttcttttggatatttatttagattgcttttattttgaaaagtgtcaaaaaaatttcaagaattaattatttggtttggaaaaccaagagagagagttcaaatggtaaggcgtgtgatttcctcccaaagatctaagtttgagttttgttacagttttccagtccccaaatgttgtagggttaggcagagagcctaagtttttttttttttaaaaaaaaaaaaaccatgtagtttgaaagcctcattagtttgttgatccaggtaacttttattaggagatatgaatgatgatgaacatgcaatgcaaatatgttatttttgtcttgattaatattgagctgtttctcgagtacatctgtagatattttgtgatttcaatgagaaaaaattctgactacatatattttttaaatattataatagggggatgatatgcattgggcaaaagcacttccgtaaagcattggagcttctacacaatgtctgccatcatatgtcactttctttaattttttgcaatatgaacctttgatttagttgaccaaacttattttctttcttgtatacttcaggttgtaactgctccaatgtctactgttaacgccatagcagttgaagcgtacaaaaaatacattttggtttttctcattctccacgggcatgtatgtttcttgttttatttcattcctttatttccttgtactttgaatttagatactatgacttcacagttcatttgtcttgcaaaatatcttgtaattttcattacaaattgatagaattgtttgtttctactttcatttctggtggcagttctcgacaaatctccccaagtacacttcttcagtagctcagagaaatctgaagaatttttgttcggtaattggcacactcttttttgttctatgacattttatctgaatgagttgcggatgttttcatgaatttagaaatatgttatttagtcatatgagttagtggtctcttatttt

SEQ ID NO: 204118 - DNA, 663 bp, Cannabis indica
attttgttgttactttcatgtgtattttttagtttaaaaatgtaataaaaaaaaaaaaaaaactttaaatgtcaaaatataaaaaatttacaaaaacgagtgttttatataattatcggaataaaaaaataaagggatcgatgaaaaggatcataacgatgatgacttatatagtttttttttttagtttgttttgcatgaaatcattggcaagataaatagagacttaattagttatgaaattactatctggctatcttacatatttcattttattattgtatatgtttttgtgttaattttacaaattagtactcaaatttgcaatgatattggaagaaaggtataataattttgtaaatttttatgtttttattgataataacactgcggggagaatttgataattaaacacaatttataagagtgtgactattgatattcctctttttttttttaactttaacttttttgtttgggaattttttttaacttaactagttattactaaattaattattttcgtaaatgaacctaaatatcttcgtaaaatattaataaataataaaaaaaaaatcattcgtcagcccactccaaaaatatttcacttatgtattaattagtcttttttaacaatttttggaagtaatgagataatttaaa

SEQ ID NO: 204119 - DNA, 1139 bp, Cannabis indica
agttttttttagtttttttttttttttttttttgttttttttgttttttgatactatatcatgttaaaggtttaaataccttaaggttcattcaaaatcaattgagtataagagaaatatctgatgaaatttatatattttattttcaatccacacattactaatataaaactctaacagataccgttgggaaaataattcaatactcagtgtggtttccttttgttgttacctgacaaaaaaaaaaattaagtaaattgaaaaagtgaaaccaaccaagtacgtacagactttaactcataacaataaaaatatcagtcttgatatttatatttaaaaaacaatccacttttcctctctataaaaccaaatgttcatttcgctattcttcaaaagaaaaacacaaaaaaaactcatctcaaagctcagccaaggcaagccatgcaagtacaggtcagtaatatttcattgtgggccttaaatggccaccaaagcccaaacaagctccaactgagaagcccatcaccaaaacccagattccgagtctcagccgtggcctcaccaccgcggccgataaaactccatcagccgacgatgtcgccggctaaagaagaagtgttcaagtcgctagaagggtgggccactgaatcgattcttccactgctaaagccggtggaggaatgttggcagccccaagacttgttacccaacccatcaaattatgatgaagaattcttcgatcagatccgttcgattcaagatcgtgcggctgagattccagatgagtattttgttgtgttggttggggatatgatcacggaggaagcattgcctacttaccagaccattatgaactctattgatgccgttaaggataggactggagtttgctccagtccatgggctcggtggatccgcgcttggtccgccgaagagaatcgccacggtgacttgcttcgtacctatttatatttatcgggtcgggtcgatatgaccatggttgaacggactatccaacatttgattggagctggcatggtaagtttacgtacttacgtacgttggttttttgtttctttatagtacgtacgtaaatatatttttagttaaagctaataatgaacaatatatatatatat

SEQ ID NO: 204120 - DNA, 731 bp, Cannabis indica
ccgtggccttaccaccaccaccgatgtcgccggatatagaagaagttttcaagtcactagagagctgggccacccaatcaattatcccactgctaaagccggtggaggaatcttggcagccccaagatttgttaccaagcccaacctataataatgtcgaggaggaattcttcgatcagatccgttcgattcaagatcgtgcggctgagattccagatgagtactttgttgtcttggttggagatatgatcacggaggaagcattgcctacataccagaccattatgaattctattgatgccattaaggataagactggagtttgctccagtccatgggctcggtggacccgcgcatggtccgccgaggagaatcgccatggtgacttgcttcgtacctatttatatttaacgggtcgggtcgatatgaccatggttgaacgtactatccaacacttgattggagctggcatggtaagtgtattgttatatatacgtaagattttgtttatattatagaattttaattatgtttacgtatattgctagttattttttcttttttaatgaacatattcgaaaaggttgatttaaaatgtgttagcaagtgtaaataagccacttttgtggactttcatattgagttcaaagcctactcttcctagcatttgaatagtcgaatgtggggtaaagtgttttattattatcagtaaaataactttatacaaaaaa

SEQ ID NO: 204121 - DNA, 594 bp, Cannabis indica
aactacaatgaagaacaaacatggctagtatatctagaaccaacaatccaaaagtatttgtccttctcaaaaacactggattcaaaaacaaaagcgttacctttgttcgagttgtccaaaagtctgggatatcgttcttcttaatatcccctcttatcacaatatgaacatttgagggtacgactatccattgtttcaatatttccagcaatgtcagaagcgtcatactcaattactatcttccttttcttgtctacaattcttgagggaagtctcctagtaggcaaagtctgttcgtaagcatgcaattctgcatctagcttacttatgtcagatgagttaaaattattgatcatataagatacaacaaattgattacactcaggtggtagactattgagtaagaattgaacaatcagtggtttcgacaaggaatttcccagcatttgtgctttcatgattttcatgtgaaacaccattatatatgaactgattctctttttaggagacatcttcacatgatgcagttcatttgcaaaggcatgtaaatggtgagaggatgtgggtagtccattttgacaatacaaatatcaa

SEQ ID NO: 204122 - DNA, 1490 bp, Cannabis indica
aaaaatgcaattagcttacaagattgtggtccaagaaataatgcatttttttgttgagaattagtgcacccaccggtggtgtccaataaggtgttagttatcaatattttataataattattattaaataaaaacatgtgaaacccaaatattaaattatacaaatgacagtaccctttagcaatttttatatttttgttttcatataaacctacttaatgttagtaatctatcataatattaaaataaatcaaatatgtaaatactgaatttaattactgtgtaattattaagatagtaattaattattacccaacatatatcgtaattacatgccaaatcttgtaacttttcaaaattacaccaaattttaattagatagtttaaaatatttcgaaagcaaattagaagaatatccaatcactattcccatttatttttattattgtttttcaaaaaatcttagtcccaattccttctaatttatttttcaacaaatttaaagtatatctgataaacctttcaataataatttttttttttctttttttgtagatattaaaataaatagtattcattacaaaatgagtaggaaaaagacatgcatgtgtgtaatcctagctagctagctatccatcttgtgttgtttgtgaccaatttaatgaaaattttgtagataaaaaataaagtgtcccaattccaatataccaatatataggtagtagttgattatttgattccaaaaccactaacatttaattcattgaaacttgactaaataataaagcatttaaaagagtggtacacaaattctccatgatgctcaactctgaaagcaacaactaaaatctacaccaaaatacatctcaaccttagaaataattgttttaattaaacaaaatacacttgataaattgcatgaaaagttttttgttgaatctcacaaagcaattacctttgaaatatttatcaacttacttgtatattcatttatttcagagccaaaaatattggaattcaaattcaatagttacaatagaccagaacttgagttgtgatatgtcatctgatcattgatttatagagcaatttcagtactgaatggaagagatttctttgttctaatcactcttttacaagttgctttagagacatatacatagtaagatcaagaagaaaaaaaatatatcaaaataaaaaaggagaccctttatcaggaaatatcaggctaattattgagcaagcaagatcagaccattataccctttgaagtaatttctccatcttgcaaagaattctagcaaaaaagcttttttttgttggttgggagggaccattggaatcggataagcttcttgatgacttactcatcaacctattagcatcagacaaaaacagtgctgtcatttcaaaaactatgtgatggtgacaaacaattacagctatgaaaatttttctaactaaaaagatataagaaaatgagtagcaac

SEQ ID NO: 204123 - DNA, 2315 bp, Cannabis indica
cttaacttatagtcaaacttatggttgggaattgcttcaaatatagattgaaatttgactgctatgttttattttttccattaaattttcctgggttgcacaaattatataactttatctttctttcttttcgttttttttttttaagtaatttaacattttattaaaaatataataatcttatacaagttaaaagagactaaacatttcataaagcatacacaaaaaatgaaaaattatctaatgaaacaagttgtttatttattggaagaacatgaatagctaatgtatatatatttagccatataataacataatttctacatcctaaaacacttaatgatcttaaatcatacaaaaacaataacaatctcgaaataaaaataattaataagggtcagaatcaatatgtacaactattaatgttcaggagagaatccaatatatagccactacaatcaaactttatcttcttttttttaattactttcaaactttatgattactcttttcaaagtttgtaattttttgtattaacattactcggcaaaaaataaaaattgtatgaaactaatttatcttatatgactaactgaaacttgaatcaaaatcacaaagtactgatacacctttataacttattggtgttaaaaaaaaacttattggttttggttggtggctttattttatttatttttgttttatatatatgtagatgaatagttaaataatattaagaaaatgacaaccacggaaagaagaaagaagaaaaaaccgaaaatcaatctttatcaatttgtcatcaaatcaaaattgttgatcttatctttaacatatgcttctagaaaattgtgtgattttgcataatgaatgtaatttaaatattcagaataacatgaataattaacacttgcaattatgcttttgaattatctgacctcccaaaagaaataatgggacggtctttggaagcttgggctatcaagtatttacaaatagttgattgtgatgtattatttggtgtccaaaggacactacaagatgaatttggacactttaattaattttatttgaacatgaggtgtgctggcaacttgaattgacttccaaattattgtgtcacttttttctaaaaaaattatataatgtaaattaatataggaaatcccattaatataataagaataagaacactattaagtgtttattattaattattccataatttgtttatatataccattacttatgatttgttttcaatgtttattattatatctttttagttgatgtttacttgtatgtaataaaaaaatgacaaacggttaattaaacaaggtagtatcaattttatataatggtaacgttgaacttttgtagtgctgaaaatgatttcatgtcttgtcgagttagcatggttttgagcataatcatgcaattaatataatatttaattatttaaaaataagggtatataaatattatttcaaactatagaggcattcaaaaaatgagtaggtacatatcaatttgatcatcatcacgattatattattgatacggatgggtggtatccgtttggtaattaactctaaaaacaaagatactatatagtatatacttaaaataaccaaaaaaaaacgtacacttttttttgcttttaaaatgagaatatagtgttaaattttcaactttgagcattatattataaagatctatgctgaagctggtacttcgctgacagctgagcttcatgccattcaggatggattgcaagaaggctatcattgctgattgggaaaattcagaattgagtctgtagattgccgggttaacaatgaacctagctagtacttgcagagaagagatggtctggtgataggctaattttagttgtattttatgaagtgatttagaggtgcatttcagttgattatatttattttgtgtaaaattatgcttattttttacttgttttaggtttaagtggtaaaatctataatatgaattaaaaatgagaagaaacatattaaatgagataaataagatgaatttatcatggaatttaaggttttaagatataataggcgaaaaattctaagttttgaatgctcactacgctccatttgtaatcgaaaatcaaatctgaaacttcaagctaatttttgactatgttgcgcgttcactttcaagaaaaaaaaaaatgtcaataaaagttctagatctctctttcagctttccaaaatatcttaaatcgtccaatgatctgagtaatattgaaagagttatgaccaaatattatcggtcatcgctcc

SEQ ID NO: 204124 - DNA, 1151 bp, Cannabis indica
catctatctacaaataaagggtatttttagtgagttgggggtgctgtttgagaatgttatagttttattagtctaaatttctagggacaattttatcccatatggcttgcgataagaattttgcagcgcatagtttggcaaaatatgacctttagttagaaaataaactattctggttcgaggaggtgcttccgccaattgtgaattgttggaatattaattatgtgcaattttgatcacaacgtcaaaaaaaaattacaacaaaattcaaaataatatagggcatgaaataactaaaaaataatatttaaaaattttaaactccaccaaatatatttatacaaatacataaatctttaagaacatacaaaaaaatattataaaataatgttcaaatcttaattgtatagataaacttgataatattcactaagacttaaatcaatatatgtattttgaaacttcaaaatttactttacaaatgtgaattgttgtataaatttatataccaaattaaattggcgaatcacaaactaaatcccaccgcttagtttaacaaaaatgcaaactataatagtactacaaagtatttcaaaccgcgaacataatttttatgcaatgttactacggatggtttatgtaattactacaagaaatatcacttttaccagcacagttcgttattgcgctggtaaaagtaactttttaccagcacattttacaaactgagttggcaaagaggtcaaagttttaccagcatacatttacagtggctaaaatttaatttttaccagcgcatttatgtgctggaaaaattcatctttgccaacgcttttcattttatgctagtaaaagttctaataccaaaactgatttgccaacctccttttgccaacacagcacaagtaaattctattttatcagcacaaaaatgtgctggtaaaagtgacatttcttgtagtgaatatgagtatagtttgatgggcaccactatgagagaggccaaagtaaccatttcagcccctatagccacacctcagcctgaaaaattttatttttagtcacacaaaatttgactaaagtaaaaaagtaaaaaagttgtgactaattataaattattattcttacgttgtcactaaaaggtcgtagct

SEQ ID NO: 204125 - DNA, 1242 bp, Cannabis indica
atatagatatagaccaatcggctttgaatccattaaaagaaatgcatcgaatagcaatgtagttctaagtgaaacttgattcttattcaacacaaatttggtttaacataaaaaaggaaaggcacaagctataatataagagaacaacaaaaaaaaaaacacctaaagaattagaatttcaggagtacatcttttcattaatttggtaaaacaaacaccaaataaaaaagtgaagttaaatttaaattcaagaatgaaactagtagaccaagttctttgtcaattaaaattcgcatcaattgtgaaaacctaaggccaatcattcaatttcaataacatatatatatatatatataattgtgtaatgataattacaccaaaataaaagtatcacaacaattccaattaaacagattaaatacaaaataactcatgaaatttaaaactgaatcaaacaaacaaataaacaataagaaacaaaacccaattgctcaaaccaaacacttcaccatttagattccaatatcgacctaaggcactaatctagggtttacaattcctctcttttaatcgaatattaatcagtgagccaaaaaaaaaaaaaaacaaaatacacggttcgtcaaataaatcctctgatttaagagaaaaaaaaaacagatttaccgctaatctaatccctaaacaacaaataactcgatttaaatacaaatagtcgcgacccagtataatataacatattatatatatgtgaaatagcatacacacaaacaaaatctgaatctccagaacgtacacaaggaaaaaagtttgtttttttttattcttttcgaaaaatccgatgtttttcttaagaatgagaaaaaaaaaatatttgaaaagaatttctgggaaaagagatatttatagagagggagagagaagatttgttacctcgtccatggatggttgattggatcaaagaaaaggggaagattgggagttgtaattgcgaaagaggaagacgatggttaattatgacgaccaatataagcttaacccaataaataaatatttcaaattaaatattaaccaaaaaataaatgttgaatgtaaaagatttgctgtggactttccctactttctttgcaggccaatcaaacatttccacgtgtcattttggtgacccacagtttgctaattaatattattattatttgtgcacatactaataatttcaaaatatttgtatttatatatgta

SEQ ID NO: 204126 - DNA, 508 bp, Cannabis indica
agttggctgatcttcgaacaatattagtaacagaactatcactagggcttttggctgatatgcaatccattttattgtaattatatatttatatatatataaatttgtatatatgaacaatattaataacaataaaatattttttgagatgaaaacttatgcattactttgcaattgtacgtatttatatatgttgataaagaacagttaggctaaaaacattaatgattaatattaattattaattgttattaaatgtgtacacaattaagtctcttccactttttttttcttaaaaaaaaagaaagtatcttccacttaattaatttatagtttttttttattcaaattaatttatagtttgatcactttattagattgaaaaattaaaagtcaccattagggattggagagataactcttccatctaaaaaagctagtgatcatctatccaatgactcttcatttaattatattatgtttccttcatattatatttatatatata

SEQ ID NO: 204127 - DNA, 687 bp, Cannabis indica
agcgagcgcccaagttgacattttgtcaacttgggcaattctaagaaatttttctaaaaagtattccgagcatattcaccgttttcaacaaagattgagatacaactattttcggggaccaaacgaaacttccaggtggcttaaaactgcacccagcgcccaaattaactaaatcagtttcttaaaaaagtgttccagacatttttttcgtcatcagaaataacaaaaaatacaagtaaatttggagaaaaaaccacaatcctaagagcatcaaaactgagcccaacgctgtggttgacaaaataaaaattatataataacataaagattttaattaattacaaaacttaaagtagagatcaaccatctaattcatacttaatttttattttaaccaaatatactttctttaatttagaaaaataataattatagagagaccatatggaacaaagaatatattctttccttacctcctagtcttactagtgccccttttacatacacatcatcaccatagaatctctctatagactaacaccaccctcgatcgaatttatgccaaagcaaacacacacacacacatatatatacacacacacattatataacaacacattaattccacgcagtaattttaaaaaataaaaatgggttaggtttttaagagacggaagcagttcgtca

SEQ ID NO: 204128 - DNA, 1305 bp, Cannabis indica
aaaaaacatggttatacgctattggtttgttttactactaatatatgccatttgagagattggttgaagttccataattttggtaatttactataacatttacacctttgtttttttcatgtatatattttgaatataagagcacgtttagaaccttaccaaacaaaaaaaaaacacgtttagaaaatattaatgtatacttgatgtattcaaaatttttattgttgtaggaaaaagcactatactccttataattaatatctcttacattgtattgtaagagatttttcacaatgaggcagcatgaccatccaaaataatagtgtgacaaaccactaagttaagttggcaccaaaagggtctttttctatgtctttctatttgttaaattaattgtgggattcttttgcacaaatagaaaaatgacattaataatagtttgaaaactgaaaagtatagaaaaatgacaattgatgatgatatgaagctttttgtatattattattactattcttagcaatatatttgttctatacatgtcctttccaccaaaccaaaacaaagtagtcaataattagtaacaatctcatacaaacaaatcaagttgtgcccacaaaccacttgtcctttagcaaaaacgacttatatatgcaatggatttgaaagaaaaagaaaattacaatgactagtcaatcttatttaatgctataatccatataaatgcgtaccctaaggtatataaatattgtacttgtcttaaaatatgtatatatataaagttttatttgtacactcatttatttcactttgattactcagcactgagaaatattaaatgacatttactacaagttagaaattgaatcacttctgctatggctcttcaagggttgatcttttgctcttccttgggatttcagaacctcgtgtttgtgccactctttctaataacaattctttaattgctgaatttggaagtgttatcttggaagctcttgttctatacaaaaaaatgtttttagctttgtttattgtaatcggctagctagttcataattttgctaaattgacactttatttagatgttgctatggtttagtggcctggactttcaagatgtacttgagtggttgctcgctcgtttttcatagatgccttaatgatatatatttcattatcttcaaaaaaaaaaaataaataacttaattatttctaatgacatttgaacaatgcagtcaaacatataagcctaactttgagatcactcacgacagtttttttttttggctaattaggatttttgcc

SEQ ID NO: 204129 - DNA, 979 bp, Cannabis indica
aaaaaaaaagagttttgtgtcgattatatttgattatactcttttgttttgtcagactgaacagaaatgctattgctattagtatataaatatagatatatatagcctggcctacttcagataaagtaacacatttttctaacattgtttttccaagttttcaatatataatatccatgtgctaaagggcatatgcaaatactcataaacattatattttatcatagttgaatactaatcattaaagctttaagctatgagatctactcatcaaagttagattttcttttctttcttttgtataccagagagtggttgttttttaaggtgaacacacatatttcaacaaaaataactatttgattatttacttttaaactaataagaaaagaaaaatgtttacaaatcacaatattgggcacccaaatgtattatatcacaatatagggtatcaaaataaattaaataataataaaagttagcctagcctattttatatggtagctaagcaagctgaaactagccagctttttgggggcataaccttgcaacctttgctctttttcacaggttcaaagtattattcttttatatatattttatttttattatggtaaatgtaatagaatataattattaaagaaaaaaactacacatacatgttgtactagtggttaagcccaacccaagccatctttttatgtcttggtaggagtggcatttgtactttcaggcttagcttctgtaccagcgttgagcagtaaatcttatttttaaaaagtctaccaagacgtagcaactagcaaacattggtttttttatatatataatatatatataagattcatgtccctaaattcctctttgagaacatttacccttttgtttgtatgtggactagtaatttatatatatagagagagagagaaagagagagtgagagacatataaatgattgtacatagtaaaactcaaaact

SEQ ID NO: 204130 - DNA, 992 bp, Cannabis indica
tttatatttttttatgttgttttagttatattttagtagtctttctattcttatttttcaaggctgggcttgcaaatataaccgctattgcatctcgtattgaggttatgtaaaaaattgttagttttttttaattatttttttctattttttttatttattttagtgttgttttgcaataattatttatttgacgtcaattttactgtttttgctcaatctcgctaaaattaatggttgtttttttttgatgttctgttgtttctgtggtagtgtctgtttggtatttatagtataaaaggaaaaaagggaaggtagtatatatgtaatttttaccgtgtgacagtaaaattgtaaacttttacttaaaatttaatattttcgtaaaacccctatttattgtctttttttttgtttttttttttgtatttttacagaatttcacatagcaacctacatattacataacaacttaaatcgcaacctaaattcacatagcaattaccggaacaactactgaaacaacccaaacctaaaaattaaaaaataatatataaggtgattctactattttttttaaccaaataataataataataataaatagagatgtatgtcttagttggttatttgattttaattattttcataagcttctccattaaccatcattaatcaatctttttaaccctactccctggacagtgatattttgccaagaataatcaaattctatgaaactttataaaaagaagaaagaaaatataaatataagagactactagagaatacattacacatgttacttaaagttttctgcctaacattagtggctatgaataaaatgaagccgtttttaactttgggatcacaaatcaacacagctaaattaacaactctaagaggacgtaaagtcacaaaaccaaaccaacataaattggaaagaagaacaggaaaaggtaacaaaaaaaaaaaaaagacaaaaaataaat

SEQ ID NO: 204131 - DNA, 809 bp, Cannabis indica
aaaataaataatattaataataccatatggcaaaacctgtgaatttctcctgaatcctgatcctagtcacaaccaaaatggccccacgtttatgggacccacatccacttcattaagcggggcccttacttctttctgctctagtgttttgacattttctttccatttaaggtagacaatgaattgtttttcatatatatttttaatataagtaatgataaacactgactgaaacaccaaacactgcttctcctaatggataagattatataatagtatctgttattatgtgttttgcgaatatggacttagacagactatatattcaaatactcagtcagaacagactaaagcacgttacataatacattgctccaacggcctcatgtcgccacttcgctggcactttcttacatgacccttcgtcaccccgaaaggtcactttgtccacctcatccttccccaacattgccacgtgtctgccacgtcaattccctcgtggattttcactattaccaaacaggtttattcctctgcatatgcgaatcttatcttgccttggtcaaccactgccctcaatcgccacgtgttatgacgaagccgattttcctcgtctgctgctcaatgaatgatttatttaattaaaattttacaccaaaaacaataaatcattttaattaattaatccttattagaagatatgataatctttttaagtttattttattatccccatgaatcaggctattagtttactggtttgcaaattagtcaataaaaaattgagaaaaatcgtttctttttctttt

SEQ ID NO: 204132 - DNA, 561 bp, Cannabis indica
gtggcttgagtgaaattacagagattgaaggctttttcattctggaaaatgtagagcttgtagtgatatttgtgcttgaaaactgagaaaaaaaagaagagttgtgttattattagttgttataattcaaagtttaaagaaaagcaaagatatgaatagtttagtttagtttagggtttttgtgaacacttactaacagaatctcccacatgaacagtggggtccttccactcagaaactccatcaacaagtatttttgtggattgacaagtttgggagagtaaagagagaagaatagagagcaagatgatgaggtatgaatttgaaaactccattgatgactactacaactacaactactacactactttcttctttctgtgttttttttttcttctttttctacaaatgcaaagaaacaaaggtgggattttgattaattagcagagctttgtctctatggaccccttggctgttgtggccctggttgatgaagagtggactgtcttctgggtcatagagagaaaaaggaaaagagagtttttgaaaactgtgagagaa

SEQ ID NO: 204133 - DNA, 543 bp, Cannabis indica
gtatatattgcttgcagtaacatggcatatatatccaagatgattaatccattaccactccaaatctttggtcaatctttctttctgctaatttcaacgaaacatataattatgatatatataaatatatatatgtcattttctcccgaaaatcaattgtttgtgatgagaaaaaacctaataaatttatacataagcagtaggccaattttgccatgcccaccactagtcgattatggtgtcaaatcttcgttccgctccattgttttagttctagcaccacgacaaaactcattgagtggctacctatttgaccctacataaacattataaagtagacattacaccccatgatattgatatatgtatggtactattcagtttcacacatgcatataatatctaccctaactaataataaagaggatatgatatcaaactggtagatttcgtatgtcatttacttggaacacttttcagatcagccttgggacgacactaaagtacaaaccatttggcccatcctgagctgtattatatttt

SEQ ID NO: 204134 - DNA, 812 bp, Cannabis indica
acaactacaaacatataaattaattgttcaaaaactaattatcttattttttaactttaatattaataaaaaataatatattattagtaactataatacatacaaaaaaaattaataaattaatatatatatatgtataaggtcggtttcggtgtttttcagtcggtttattatccaaaaaaaaaccgaccgttcaatggcggttttaaccgttagtgattttttcggttttcggtttcctcggtttcggttccaacgatgttcggtaggtcagtttgaatgattttttcaattttctggattttatgctcacccgtaccaggaataagacatataatatctgaccactaaaatatctctatactcatttcaaaatataatatggggggatcctataagaaatgcttatgtggttctcaccttaagtgaatctctatccttgattttctcaaatgtggtacaaaacaaagagtttataaactatgtaataggagcggacggagtaccgtttcttctggattcccatcctgtttaattttcttctggatcaaatcctgtctaatttcaccttcttggtgtcgtttaatcttcttcaacctaagtgtatatccccagtgtcgttctttgattcgtcttgcgagtgtattttcctctgttttgtgaatagttgaaggattgacttttcatctcctgtgcaacatttattatccttcttttcaactgctcttcattttattgttttgattcctcttttattagcgtctagatcttatttcaggtgactctgctgttccttttttctttttaagttg

SEQ ID NO: 204135 - DNA, 614 bp, Cannabis indica
tttttttgtttgaaatgttcttctcatacttttttagataatatataataagaacacttttgaaataaaaaggagcactagaaaaaaattattaactttattaatataaataatttttagttaaataatataatatggtattcatttttttattattgaattatcctattgtttaactaaaagattatttgtattgtattatattattttattattattattattatttttaataaaagcgtaatattataaatcgagtgagttagacttcacagtcattacaaaataaattttccggaaggtggaaatcgaaatagagtcgtacaaatagtaagtaaaagttcacttaactacgttatgggcaacaaaattacaagacttactaacattaataaaattacaactaataaaagatggataagacttagtacaaaatgagacatagttctcaagagcccaataagactcctttctattgacagcactgataactagcctcgagtcactctccactattacaaacttaaatcctagttccaacgccaccgagacagccaaacagcaagccacagtctctccacagagtgcattcgagaaattcaaccgagccgagt

SEQ ID NO: 204136 - DNA, 1425 bp, Cannabis indica
  modified_base (1370)..(1370): a, c, t, g, unknown or other
gtctttcacattctcccatacactatatgataaacttaacattacatctctcttgatcgtacttcttcccatacaaagatttccaaactcagttatcatactctttctccaccacccagtcttcatcttcctcttccatctctattgtcacacacataactcatccacttcattagggtcattcattacaagtttaaatcattacacttttctttttttttttaataaaaatacatatgatatcatgataatgtatatatatatttaaaaagggtatagaataatatatatacgtatatattttgacaagggtatataaattaatatttaatgtagtgacataatatatagctccctctcacatcacattaaatattgcatgcttaattaggttatctttgatatctagctttgactttatgacttgcgtaaaaaagaaaacaatagattccaaggagtaggttgaaacaagttgcaattggaaggaagcacaaatataaattttggaacatccactataatataaaataattctttttcactatataattattttagtaaataatgttagctaagcaggggccaaatttctcttaatttaaatcttaaaaataaatattagccaaaaatgcttaaacacaaatttattttagcatgaacaaaatacacgtgtaggcctgactcaaatataagtgcaaaggcttgtgcctaggactcatttaatttaagaactaaaaaaattattttcttgtaaaattacatattttttttttactaaatttaaaaaatattattgttttttatataagagctcaaaaatgttttttttttttttgataacctactagacccggacacttggctcttaactaaaaccagttttgaattcgttaattattactaccagtctaccataaaactaattagtgcgtgacaaaacatagaatgatcaagtaagcagataagtctttacaaattacaatgtgattaatttaatatgacaaacaactggtgtccatattattgctagaaataatgactcgagtataaattgtagtagggaccagaaaaccaaaatgtcaaaaatcatattttaagaaaaactagccctgaattcttctttttcaaaaccagttttgaattctcttttccctcttttgatcttatcctacaaacaagtaaataatttgtaggtgaagcaaaagtcaacccactgaatcattaagatttcttgtaactaaatcatatcctttgtttttgggtttatgataattaattaccctttgcttaagagttgagactctctccttattactcttttcctttcctttccaatcctatcctctaatgttatacgcgtcaagccgccncttaccatctgattaagattgaaagagcagtcaaaatcaacgccccacgttggga

SEQ ID NO: 204137 - DNA, 1631 bp, Cannabis indica
aaaaatagaaatataggattaaatattttaaaaatagaatatggattacatattttataatatgttttaactatttacataattgacttttttggtaattttgaacaccatgggcacttaaagttgctgctaccaattacaaaagtttttgaattaatttatattaaaagaaatttatggtttttatttttttcttttcatatgataattttatttatattatacatattggttatatattttacattatacaattagtttgattattttataatatatattttgaatttgaaatatagtcagttatttattattcataaaattagttattgataagtaagtaagcagagtgaagcaccaaactttccagacttcttctctctctcgccatgcacagtctgaacaagtctcttccttcttccccaatgcgttcacactcacctcctaagcgttcccactcagtggaacctatgccaagccccagatccctcgatcaaggtggctccgacccatcctccatcgaatctcaaagcagctcgacttgcccaagccgtctcagctgcatcaaactgatccattccaaccactccagtcgaatcaaccataactccggccagtttcccaaaccgtcgagccgtacaagcattaatcaccctcttacaggtattgattctttctataattttttcctattcacttggtccttaaatttagaaagaatacataaacatactatagaaaaacagaactagaataagaaagagttgacttcaaattaaattgaatgaagaaataaaatctgtcaaatctaatcagagaaatgggtatttctttgggtattttagatacaaatttggtatccccattaaattaatccttgacattcgaaatcaaaaaggggattttgagtaaagaaatttgttttaaattatttttcaggaaagctctaatcctcttgcccaatttttcaaaatttagcattaatgttagtctgcaaatgtgatctgcctggtacaatatataatcttcttgtgcagcaactctgttcgaaagttaatgctatagatgtgatagttaccaaatcagtttatccctgtttcaaagtgttttttctatttaagggcagatcatccctttgatctcgcacctgcacccttgtcatacctaagttctgttctctgcataagtatccccattttagccatttctgttttgtcatatactttatttactctaatagctcaatcgttcccccctggtcactctctcactgcacacactcgagtccatttctgcatgctgttttaagtgttttcctttggccgtgtttcaagcttcctagctttttgtcgtcgtgttgtacagtctctacgttagttcattcgctgcaatcttcaggtcaccaaatacccactgttagtttgtttttggtccatagtccctctgcctatagttttacgggtcgtattgttcacatacatacttactcttctctgtatttggctcataatcatctggtcagtgtcatatttcagtctttatataatagccatattatcctattttcacagtcctaccacgtttatattttaattttagaattaagctccactttatttgtctgcatcatg

SEQ ID NO: 204138 - DNA, 1079 bp, Cannabis indica
ttttttttaaagctatatattgtaaatttttattgtagaaatcataaaaatgaaactaccaataaacaattttttttaaacaaaagaaggaaatttttattccaacaatcactgaacaatatacactgccgagcagcaaccaaacaactcagaatttgtttatcaaatttattacatcaatttctcttttgctaagtctagataaattgacacaatgagatcgagctttgacaatgatcttcacttgatgactaagaataagagttgagccgcaagatgcttcaaatatgcacctgtccttattgcaccacacaaaataaaccactgcagtaaccaaaattgttgagagttcctctaccgaacctttcaaaggcgacaagcatctacctaaccaatcagctaagtgatttggccagtgaaaccaaccaaaccaactcatgatttcttttagcaccttccttgtaaagatacggttgaagaaaagattatcactggattcaacttcaatcacacacatcgagcacaaagaggagctaatagaaataaatctcccaataagatctctaatctgttgattttgtggtactaatcaagtatgcaggggaaaaataatttttgattatcatcataccacatcctcaaaatcaccacgtgtatatatattaaatctgaaataaatagaagaaaaaaaatttacttcttgaagcctatcagggtatccttgtttctttttgtaagttgtatccttggatgatggtaaagaactcatattgtagtcttctgaattttccaccacacacaatgactattgtgggctagtaggatatattgtatatggagttcttagtttatttctcaacacatgcgtaagaactagggctgcgcatgggtcaggtttttgggtttttggatggtcgggttcagatttttggattttgggtgtttaaaatgtgtaaccgaacctaatttttgggtagtcgggtctggcaggtttcgggtcgaatttgtgcgagtatgttgtggtcgggtttaggtttattgggcttagtccaaatgaaacatttttggaccaaatgaaa

SEQ ID NO: 204139 - DNA, 590 bp, Cannabis indica
tggaaagcaaatctttagtccatagtttccttatccactatcgaagcagaatatgttgcatgcacagaagcaattaaggaggctctttggctaaaaggactatcaagggagctaggcatagaccaaaaataactacatgtctattgtgacagttagagtgacctttatctgagcaagaaccaaatgttccatgtaaggactatgaggcttcattttataagggacatcattttagaagggaaaatacaactctgcaagatttctacagaagaaaaccctgctaacatgctcaccaaagcacttgcaacaacaaaattcaattactgcacccaactgcagaatattgtataacactttattggttctatgtgtacttactattaccatatgtaaactacttgtcaaggtggaaaactgttgtgtattatgacaagtagttatagtagttaatatatttagtggttagtagttagtttagtttctggttttactaaactatctatgtacattagttaagttcttctttaaatagtcttaactaagtcctattaaaactaactcttttgctgtaatcattcttacatgaaata

SEQ ID NO: 204140 - DNA, 932 bp, Cannabis indica
atgattgtattttccatttaaagtaaacacaaatatttattttataataatcaagtccctggcagaacaaaatttcttagcttatcactgtactaaactatttttctatattttagtggtatgttatggacaattagaggaagtaaaatcaacttttctttgaatattaattaattaaaaaaaaaatctaagctggtagtttaagttaattaagtagataattaagtaggtaccttgagcagaaaagactataaacccaacaaacataagcaatggatgaacctgaaaatgtagagaaattggtggtaattaatgaaaatttaataattaatctgtcaataatataattaatgagtaagattaatttgcatacattaaaaacacgagctggattttgtgagtcatattcaatgctgccacgaaaatggagaagccatataatcataagaatgattgataatacaccaaacaaataagccaatcctctcaatcctgccccagatcctcttcttcttacatttgggtccatattagtatgcattattattactgattaatatatataatttagaaattaatattatgggagagagagtgtgctgtgtagttgataattaaactagaatattgttaagttcattgtcattacaatttatatagggaaaaaatttcacttgtttgtgtttgagattgttaattcattattattatttatgggattgcttgttttgttgggtttggaatttggaattttggaatttttttttttttttaacaaaactttgtgaattagtaaagtatatctatatgttttaaaaattgtggaaaggaacaatttttttaaaggaaaaagacataatagttggattttagaagggtctagctctaatgaaggccttaagctgtaattactatagatcatcgtggttata

SEQ ID NO: 204141 - DNA, 1189 bp, Cannabis indica
aatagtaatttatatataatattaaagagagaggtaagtgtattaagtgtagttacattaaattttttttaaaaaaaaaaaaaaaaaaaaaaaaaaacaagaagtaaattggagacgcaaatggaaataaatatgcttcgttatacacactataactaatccaaaaaataatccatatactttgaatattaaatcatagacagttattcatgtaatacttttgtatttatcagtttcgtgtgtaattttctctttgttttatacgaatatatataattgttaatatgcattaaaaaaataaaaagagttctcacatcaaataatataaggattaaatattatgattggagggtttccaatctcttttcttctctcctctttttacttatcttcccaccaaacaaatgattatacttctaacagatttaggtgttcattgggttaattaagttaattacatgatttgtatcttgatttgcttttgttctgttagttcagttagattatgataggttagtttgatgagtcttgttaccttgattagttcagctaactctagtcagttagtataaataagtgcatttgcacactgtaattaattcaattccattatcaataaacctttttctattatcttctctttgtttttaattcctcaatatggcatcacgggtggaaaagatatgctttctcttagatcctgttagtacaggtagttaaaaggtagttaaagtctgtacgttataaagttagttagtgagctgtgagtttaggtaagagttgtcactcttgcacagctcattcataacagaattctgttatctctgtattgcttgttctatataaataaagtatacaagagcctgtaaggtctacaactcatattcatcaatctcaacttggtatcagagctctggttttttttttctttctttgttagattcaagatcttcaagcagtcaacaatggcgtctacttctgcagctggtcttaggcctgaaggctcttccacttccgctgtcaacaacactactcagactcatgctgttcaagtaattcccaatcaccttgttcctctgaatctttgcctcgatcgaaacaacttcttttattggcgatcccaaatcttatcgactgttcgtgctcatcaacttaaaggtttcattaatggtgatcgccctcgaccacc

SEQ ID NO: 204142 - DNA, 1666 bp, Cannabis indica
aaaagaaatatgagaagaaaaatagagaggaaattttagctatagttttctactccaaaaattatacttcaacaaattaaaatagaactctaatttatagagtctcaaggacttaaatgcaaaaaacaaaataaattaagaattacaaaagaaataataataataataattgacaattgatagttcacatcaatattattattatcaaaattatatatatttttattattattatgttgtataaattgatttgatattggctttgaaaagttaaattatcattatactttgttgtttggtttgctccatgttgtacaagcatgggctgccttggcgtgtgacaggggaaggaaggcgaggctgaaggaaaaggaggaagcaggcggaccaatggcagcttgccatgtggcacggatggtggagagagtgagtgcgccaggtaggcgctgactgggctttggaaacgaatgtggaggcaccatttggcgctgacgaggcagtggtggcccacgactaactgggctgctagagagagaggcttgggcctgggctgctcctttttgggcttcttcattccttttttacaattttactacttgctttcatttttttttcaacaacacactttaattcctacattataacaataaattaaattcaaattaaatattttcaataaagaaatatatctcatcaattttatgaaaatattaatataaacttaatttattttaaattttaagatcaaaaaatgtgcatttttcaaaaaatataacccgtcgggcgggttgaaaataatctcaacccacctaatcaatccgaccaacccgattaagagggttttttttctatatatttatatgtttttattgtatattatatatcatataatttatatgactatttaaaaaatataaagttcaaattaatatgtttttttttctagtggttgatttttactttaaattcaatctatgtatagttgtttcattattacaatcaactaaaataaaataattaaaataaaaaaatttaaaaattattagtggccagtttggacgggttaacccgaccaaaccgaccaatttcattaggcgggttacttttctttttcttaactgggcgggttgcacttagatttttgtaaccagatctttacattgggttgaataaaatgtaccataaaccgaccaaaccgaccaacgtacacccctacaatatagtagcacttaatattaaaattaatcataggttctctgaaatcactctaatattttaaactaataataagtaaaaattgtatataaaataaagtataactataacataaactttaaaagatagaatttgaaattaagcaaaatccatatgtattagaaatatagtagatagatacattatttataatactttaattaattattataaaaagaaaatatagtttgaattcttatttatttttttttacttaacaaataattttacgttatactatttttttgtttattatagcattaaaaattttattattattaattttagtatttcgatatttataaaaaaaatatatattaaataagttaatgaacaagagttgaaattaaaatttatagtatttttttaataaaaaaagtacagtaaaatgtattatataatcaacataatt

SEQ ID NO: 204143 - DNA, 905 bp, Cannabis indica
aactaacagtaacatcagtgtagcaaatgcataattgagctcctacaaagctgtaaaaatgaggaattttaagcaatcaactcaaagaaaaaggagaaaaaaaataaaaacctcacctgttcagaaagatacaaacgttgacgattcttgtaagtcgcttgctcaagctgaggaccccatctacaaggagcaagaatgccttattaccactagaacccataaatacaataaccgtctatacgctaaatatacatatgtagtttggaaaaatacaaataaaaaaataaataaataaataaaactaaaaccctaaaagttatacacacattactgaaaaccctagaagaaacaacaagaagaagcaaagtagagaaaatagaagtagaatacgaacttcaaaaccctagaatagaatcgaagaagaagaaaaaaagcatagataaagggatggtaccggcaagaaagagaaggccagacgaggttgtgattggagagccagtcgtagaggacagggacgacggacttccactgagtgtacttatcgtcgacggagggttgttggtgagactttttggccttagcggaggaggagtggtgttgttcgtctttcttgtcgtccttaggtttgggtttccggccacgagtttccttcttcttgaccactccgccttgctgctgtgcatccatggcgattgtacggattgagcttagctttcttccactgtcagaaacagtcctaaacactctctgtaaataaataaaataaaacaacaacaacaacaaaagaaaataggtttctctctcttccgacgaggttgagttagacgagtcactacaccagcttttaggaaataaatagtaataaaagttgtcaaaattttacaaaatattctctcccttatttt

SEQ ID NO: 204144 - DNA, 828 bp, Cannabis indica
agtgaaatacatcatgaatcatggtggaaattctattaaaattaatttattatgcactctaagtacatgcactactaatttataattatgaatattaattaaggacacttcagaaaaattaaaaagtaaactaacacaatcctctagcaaaaatcctaatacattacaaatagaggatgttagtctagaaaaattgtagatgaaagccaagtacaagagaccaatccgatgtcatcatcatagctagcttgagtatttagtgagcctccctctatatgcaatttagtatattgtgggtgactccaaagccaatacaaatgacaatgaaacatataagattttcgtgatagttagtccaacatattaagcctatttcaatcctatccttctgttggaaggctaccaataaacttgtatcacaaaatcactcactataaaatagtcattaatcattaatccttttaataaaattgagaatatattaatttaagagaatgaatggtaataaaaaacttctttctttgaaattcttaaatttttaaaaatcaagtgacttgagaaaatataaaagataaatatgtaaaatttagttcacactactaatgatagcattaaattaaagtatgactttttttttggttgataaatatagcttattttttatatttctagagctgagaatgtcagtgctaccttgcactatttttaggatgaatctaaggaaaagtttaaacaattcatcctacatagcaaactatcatatatgatacgaaacaagatacattagacacaaccaaactaccatactggacaaaccactaaatatag

SEQ ID NO: 204145 - DNA, 998 bp, Cannabis indica
gagatgagtaccaagcttaccatttttaccttattttccataataggaaagctagacaactttccttactaagatagatttcttagtattaaattcacatataaaataggaaaatcaatatttacacacagtggaaactaaataataaaatattttttgcaattaaatatgccaaaaatagaattaacagatttatatgcacaatgtggtccatttggtctgactggaacaatataatttatcataaaacacaccaaaaacaagctgaaatttatgcaaaatctatggcatatctctacaatttttacaaggcatccactacaaactcgattcttggtttgattcatactgtagctgatcatataccatggaaatatcctctgcaagggtaaaataaactgaatgtagatgcagcagtacacttctcacaaaacagaataggcttgggtgctgtaattggagactcccaagggcatgtgttagttgatgacaaattttacatggtgaattcaatagaggtggaaaacaatggttttgatattaaaataaaagaccactaaagatcctacctcatcactttgcatcacaaaactgctaaataatagtatggctgggccatacactaaatatgtcagggtagaattggttatttctcgaaaacattttaaaggaaaaataggagaaattgagtcaaaccttgtgagaaacatctcattgtttcaaggtaatcctgctaagggatttacatcaaagccgaagcccataagaaatgatgcaagtactgggtttaacttttcacaattgaactcgtacacatcgtctaatggcataaatgaatgggcttcaagagaaaaaaaaaagaaggaaggtgggaatgtcttcatggtcaaaatgccataagaaccaccactgctataactggagcattaaataataagccaaaatagtacattagtatgttcaaaattactggctgactttcatcgttctcctgaagt

SEQ ID NO: 204146 - DNA, 595 bp, Cannabis indica
taatcacttttaagaaagaaaaaaatgtcaatttcagtacttcccatctcccaatcgtccctgccaagaactttccatattcatggacaaaatttcacagcaaacaatcccacttggaggtaataatatgatatattgcataagtcatccacttcatgttttgatctttgaagtggtcagctgataatagttatattctcagttttttcacagctcaatttggttgcagtttatagtgacatacactaagtattattgttcattattaaaccccaactctgtccaaatttcactattaactcctttgattctattcagcaaattaaaactcctttgatttttttttttaaaaaaattataattattattattcaagatggggacagaggtactctgtgatcagatgctgtaatggaaaagactggacgagagtgaagaaagagaagagttattatgaactgcttggtgtttcagttgattctcaaccccatgaaattaaacaagcttataggaatttgcaaaagaagtatcacccagatattgctggccaaaaggtcatcctataaagtagatatttatttatatatattttatt

SEQ ID NO: 204147 - DNA, 1645 bp, Cannabis indica
cttctatagcaaccatgtatcagcttctattgatgacaaggatactactttttgatggcttcttctaatttctaggtttgctgtaaaatctaagtccagataactagtgatttcttccttgaaatggttctctttattgaacacaattctattgtccaaagtaccttacaattacctcattgtctattttagtacttctcaatgttcagggccagggcctgaaatgaacctgttgaccacactcatggtatgagctaagtcaggtctgttggaaacttattttaccaagatctaaatttactaacatgtatgttgattataattctataatctaacatcctaaatatgaaattcctaaaatgataagtaaacacataagagattaaggaatccttataatgatggcaatagaataatatgactccttccatttagatctctagcacttaattcctgtctgtaacagagcattgtcaagatctaaacatgaatcttcttctaatgatgattgaactacataatatttcacactatgcataggtatttctttaacatgtgtggacaagctctcaacactaaggagcacaaaattttgagagtaaaatcaaaaggaattttaaaattaattaataaaataataatagctttccttttgtttcaattttcgtcagacaaagagagagacattcatcttcttatcaaagggtattatgttctatttataaggagatactagggtttagatttagaatgaatgggcttaataaaagaatataatgacaatataataacaagccattgccaaaatctcgtcaagggcccacgggtttgacttttactattatttagtttccttgatcaaataatcttttatgtcttcaaaaatatcatttatctattttaattacttaaatgttaacttcatctatttaataattataattaattattaaacaaaattactatttaaatatattaattaattagaccctccaaaatctcttaaataataaactaatcctgaattctcttttcttctcaattatgttgtttcttagtaaaattcagacatagtcacaatttagaatcctaattgattaaataaatcaattaattgagactacaaaaataatattaactaagttagtgagagaactatgggcctatgtaaaagctcctaattagtagatcaattgttacatagatttagaattacatgattacatagtacgctctatatactgtatatagatacgctatgaattatccatggttacaatataaattatcaatgatcctctataggtgatccacattgaataaagactaaattatcgttttttcctacaatgtatgttatgcttaaaatacttagacacttttaaatgatatttcgagaaactaatataattaccgaaatgaggcctcaacgatttaaacccgtttagccaagttctaaggaaaccatctttcactttattagttatagaagctatagattctatatctatgattaacgctcccacttaattgaactacccagttcccaagatataagtattgggatgatccaattggtcaactttaacgaacaagttaaagaacccatagagaacagttatgctagaacttaaccatcttagga

SEQ ID NO: 204148 - DNA, 925 bp, Cannabis indica
aatagttagattattataaaatggttataaattagttaaaaataattaataaattacttgtaatctcgtaacttatattattttatttccttataaaattttttgaaaaaaaataaaaatatttataaatattaaaattaccttattaagtatttttaatttaaaatataattttttaaatgtatagttaattataattagtttaagtttaaaaataaaatttgtacctgttaattacttgttataacggttataaaataatataaccatcatagttacatttttaatataattataaaatagttactcatatatatatattaattgaataattatatactaaaataaaatagtaaaaaaaaatcacacacataatttttatctccaataaatttaaagaaatgacttaaagtgatcatttaatttttatttaaaatagatataaattttattttataacaattaagtcctcatagactaaaattaatggattcgtctaatataaacaataaatttgtaaaaatataagatttttactatttttgtatttttataaaataatcctttttttgtatccattttttttacagtgttaggctgaattggattccatttattggagaacattgtcctacgtaaattaaatataaaagtattaagccatatataagaacatgaactactccattcatcaccaattggttttaagatggaaccccatgattctcatcatggtatcagagccatatccctaacgagctttcgatccacgcctatccattagttagctagccgcatgagatccagatggtgcaaagacgcactacaagaaatgtcacttttactagcacagttcgctactgtgctagtaaaaaaacttttacaagcacatttcacaaacctgcgctagacaaaaaggtcaaag

SEQ ID NO: 204149 - DNA, 987 bp, Cannabis indica
ttttgttcatttattttttctcgtttgcaaaatattaaaacaagaactaatgtaactacagacaccataataagagtcgggtcgagctcattttgggttttttatggggttgggtatttcatgaggtggccggagtagcttcagcattggtggtgatagtgacatcgcacaaggaagaagcaaagagagtgtgaatgtaggattagggttattctacctttttttttagatcttatacaattgattttttcttatatagaaatttgattctttacttgtataattgaaaatcaaatgtgtattttttttttgctaataaaatctgatatgtgtatatatctatattgtgttattgacttaataaaataaaattactaattcactactacaaaataggctattcctatctgttgataagagggttaattatgagaactgttgggaaaggtaattggagattttttccatcagttttacaccgatggaaaaaaactattgggataactattgacaacggtatagaactgtgagcaatactataatgatttcttttaaaaaaataatgaattctaatcgtttttaaatgttgagaataagtatagttaacatgttataactgtgggaaatactagtattcccaacagtcataaactattgggaaaggttcattttatacaaaagaaaattagctagaaaaaataacagagctttatacgaaaatttcagagagcccacgcctctttccctccgtcatctcttcttcttccatctcagcgaccacaacgcctcgcctcgagacctcaccgaccaccgcacctctcctcaagaccccagcgaccaccatgcctctttcttttcccgacccctttctatctcaatcttctcttctctttctcttatttctctttcaccaaccccttcccatcaaacctagaacccccgctagagaaactctgccaccttttggagaaacacccaaaagtattt

SEQ ID NO: 204150 - DNA, 1166 bp, Cannabis indica
tctctctctttcgttttttttttgcatctttgtgtggttagttataggatcgattttccactgcattcatgagatataaataatagatgaattaaatcactcttcttgggttctttgaaaaatcaaaaccacactaggaaaaacaaagataattcaagtgggcaataatagatacatcataaatttatatacattagagaaggataccatcctaaacataccctatgttgtaggaatcacctaaaacaatttagaaaccgaatcataataaaatgaaaactacggagttaattattctgacagattccagccaattcttacaatgacatacctctgttcaattatgtcaaaaagttgaccgtactgtccatttacatcatatgggacatatgctggatcttctttagcaagtaagcttttatactccttgtaagaaatatatttaacggcagagacttctgattcctgtcattattatatacaaaaaaaaaaaaatatgagctcttgtatattcaaagcttcaaaagtaacacaccttaacaaatcagtagaacaataccaataagaagcagatgataaaaattgctcatatgtttatttatttttattttttctgaagtaagaaataaggtagcaagaagtaattttttttttagtaaaaaaaagtagtttattcgttacacaataacgagaaaagggtgaagagaagtgttctggaagaggctaaaaggtattgagctgagctagaaaagcaaatccctgtggaacactccaaatgacacagcagtatagtaggcttgatagatgtagcttttcaggttggttaagtgtcttttcctaaattaccaaagtccaaactagtaaactactatagaaaaacaacaaatatatctcaatttctgaaactagcaatttattttattttaagcaaaaccttcctcacctgaagagtgaatgcctcaagaggaattggatctagcgttgttaccaaatatacatcattgaattcattgttgatgaatgttccgtcatttatgacactacaacaattaatccagatataatgttagctaattaaaatattcactattcaacatatctaaaaagtttggacctcatatttatccagcctaacaatacaatagcctttgggctcgtttggaacg

SEQ ID NO: 204151 - DNA, 2181 bp, Cannabis indica
agtccatcatcttcatcataaatgattcacttgctctaaatgatgatcttcccatttattattcatgggcctttctttccctaattctttttctatgtagatctactctcttttatatttaaagatcagcttttgttgttgtgttttacattgctatctatatgatgagcccaaaaattggccaatacatctataaatttaaaaatttgcttatttttagttttagttattttttatatgtacttttttaaaaaaaatgggggatggaggggagggggcacaacaccctctcccctccctatattcgtcattactaaaaaataatcatgaactaagaaaattcttatttgtataatgagacttagaacttggaatgtaattagttttaaagattgctcccaactctaggctttttacaagttagttccaaaattataattaaagtaatttacagcataaatacttaagtttaactcctgattgtaaataaatacttaagtttaatttttggcggtaacaatagataagttataattctggaacttctgtggatacatagctgttaagtgttaagtaaattgtcacgtaacaattcttgattggctaaagtcattaaatttttattttttttaaaaaaaatagtttaaatataccattaagaaaataataataacttgatatttaatggccaagtacctacagagttctaaaaatataacttaagtactaacagtaaaaaattaaatataaaaaattatttataattaaaagttaaatttaaatatttatgacgcaaatgatagttgtatgaatacattcattattcatatttagagcatgtagtagaactaccaataatctatatcttatatatgttggggtgcatgtggaaccacctgtaatctatatcctaataatagtttgatttcattaaattatttaactaatttaataattgtgtttgacttgtaaagattttaggaagtgatcttaaacagcaaatttcatactatattgctaaatatataacaattattaaaaataggccctagcatttagaatttccaagtattttatatcaattacaaatattattatgtatataaaaattaaaaaatattatctttcttacacgacccgttaccaataatttaattgatcggttaatgaagcggaaaaattgaggacccgtcaacttgttcattcagccatcgaagttgaaaagtcaaccatgctccaaaccaatctctttcattctctatatctaatatcttttcttgtataataataacaataacacccaacttagatttaccatttcacagtattaaatcaatcaatctgttagtggtggccaaaaaacatgggctccccaattttgtggtggattttgattcttcaaatggtgtcaactttttgtgtaagaaatatatacaagttctgttcctcttactatgttcttttcttcttctttgatctgaaactgataaacatggtaattacgtacccagtggagcaatggagcaggccatctgtgttgctcagaccctccaatccttgatccacatagtggagcaggccatgttgagaaacttggtggtcttccctcctatgttattggctctccctactctaagcatgctgctgttctcatctcagatgtatatggtaattttatattttattttatcaagaaagaatacttcattaatcaaaacatgttagaatgtgggaataagggattttcaacatcccctcaagatggtggctatagagattttttgtttgtttttggtctgataccatgttgagaattatagggttccatatcagaagagtagaacattcctcttatatattttattatctttttacacattagcaataatgagactctaacaaaacaaactttttttaccaactcacacgcccaccacatcagcacacacctcaacttacaatgcttttacacatatctatctacttgagttaacttcctcttatttacaaaactcaatgatatagcttttaattactgcgatttattatattccatattcttcaccaccaaattcttactttatatgtttaatatttgcaggatatgaagctccaaacttaaggtatatatagatatctctgtaaagtttgagtagaatacattaatacctgttagaattt

SEQ ID NO: 204152 - DNA, 698 bp, Cannabis indica
cttttcaatagtactaaacactagtgccctattactcaattttaaattatgcaatgagcaatactaaaatcaatgctatctgatgtcaccattttaagaaatctcacatttattaatgtacgcagttccaaaaaataaataaaagacaacagacaaaacttaacaaaccaaaacttgatgagtgatttatttagagaaaaataataattgagtacatgtacaagcctgttgaactcatgagagaatttgtcccatatgcgtacatatggtatatttaggtatccgcatacatatatccctacgcccatatatcctgtctcacttcttgtatcatttgtatatatatttcttatttggtacttaaatataaaacagaagagtatctttaattattattaattcaaaatgttaattaactaagcaagaggacgcttaataaaccctagctacaaagaaagcctctaatctaaactatataaatatattcatttatgtattatattattttatatatagtgtcacccttgtctccattatcgaagaatccacccaccaaaaacgtccaagtaatactttgacgttaagtcgtcctatgttgcgggaagaggatacaactccatttgaaaatgagagaatcaaaacaaaattatatagtggcatcgacacgtatatatatacgattttttttttatatatat

SEQ ID NO: 204153 - DNA, 1334 bp, Cannabis indica
ctaataatttgcaagacttttaatgggagcacacatcgcaataaatgcatggagtaccctagtctgtaaagttaacatcgaaagtgtgtatctcagaatttcatatgagtctgcgtgtcttgtctttatctgtcagaagttctccattcagcaagtacttaattatgggagtcatccatgtgggacttgtatctatcatttctatgtcttacttttcagctttgcagatacttgctcgcacaacacttctactggaactaaattcaatttgtataactcaaattgtaatgccaactttgctaaggcttgaacattagagtttttttctctgggaacttgcttgattttaaagtaatcgaacttttccaagttctttcaaactttctctagatatttttccatcttggtaacttttgcttggtattcaccaaatacttgagtcacgatcagttgtgaatcgctgaaccattgaactaatatggcttttaaggcttcagtgatgccaagtcctactactaaggcctcgtattctgcctcattatttgaagcattaaactggaaccttaatgcatagtaaaacttaatttttttaagagataccactataacgcgtacccttgagccatcttcattcaaagcaccatctacaaatagtttccacacttcctgatttgttctcgatctggagtcttcttctcaatttactccttttaccaggaagtcgactaaagcatgtcccttgatggcaactcgaggatggtcttttatttcaaatttacccaatttgatcgaccactttatcaatttatgagatacatcatgttttgataatacttgtcgcaaaggctggtctatcaaaactttgatgagatgtgcttgataataaggtcgtaattttctcgaggtgtgtaccaagctgagtgttagtcatctctagtgggggtaccatgagttctacccctagtaatcatttacttatatagtaaatcagttgctgatttatgccctcttctcgcaatagtgcttcacttatggaattttttgagatggctaagtaaatgtaaaacacttctccaattatcggttttgctaatactggtggtgttgaaagatgtctcttgatttcttgaaaggtgttcttgcattcttcattccactcaaattttttgttgccttgcagaacattaaaaaatgggagacacttatcaattaattttgagaagaatctagttaaggttgccattatgttagttagagattgagcctcctttggcttctttagagaaggcattttgaacagtgcctttatattgtcggagttagcctcaattcct

SEQ ID NO: 204154 - DNA, 965 bp, Cannabis indica
gatatttataccgcaaattactcttatttgttttattaaaacacagtatttttgtaattttaaaactttaaaaatagtatttttgaaattttaatacagtaaaaatgttaaaaaaaaatgtatgatagtaaaaatacaaaaataacaacaaaaaaaaaatatttttgtaaaaactctttaaaaataataataataagaaaacattaatacgagtgcaatagaaaaataccgtggttgttaatagattggataaaatagtatgtttaatttgagaaatagttgttaatactatgttttgtgtgatgaaatagttgtttaatttgagaaagtgataatgatataattatttcaaatttttgggtgaatactgttaaaaaattcaaccgttgcaatgtgagtgatacatggaggaatcgattcatcccaatacatatcaaaagaaaatgagaaactcatgcaattaggacttgctaatttagctctctattatattgttgatgaacacgtttggggtcggtttcgcttcctcgattgattgtttcatcttggctgatttataacgtctttcatgaaatcttttctttccaaaataataataaaaagatatgcatttgggatcataatgagtacattgactgagtagtgtatgtctctgcttattgataaaaaaaaataaaaatataaatgaacggtttgttttttttgtcaaagtggtgtgctcttaactttttgcgtgagtgtttagctgacctaattatagacgaggttgaaaataaatgataatcagattcaatagctctctcaatctttatattttgattccccacttgtaacatattttgatttttattacactaggctactagccatataagtttgctatattccaaattatactcctatcctacatattttagtgtaagaaaactctctactcttttgtacaattaattaataattatcaa

SEQ ID NO: 204155 - DNA, 1054 bp, Cannabis indica
tgagtttcgcagtgggagatgccaagaatgcttgcgaaggtagtttgggtttagaggctttcgccggaaacagtacagttaaggtggcttataaatcaaccggtaaaggagggttcacacgtgccaagcttaggttcaaggccacgcaagcacgcacacgtgtgatgttcttcagcacgttctataccatgactagtgaccatagtggttctctttgtggacctgtcattgatgatgtgaggttgatcagtgaacgtctcactaaagtagttaatgctattaattaattaaattatttctattttttatttattattattattatgtatgagatgatgagatgagatcattcatgtgaggttgatcatgttcctccatgatccgaacgtttaaatgttttgttttttctaaaagaacaaaagaagaagttgaagaaaaaagtgaaaattattcgatttatcctttcttaattagtttttttttctgttactagtacgtatagttttaatattattgtaatttaagaaatatgatgaaattgaattattatgttttagtacttgtgttttttgttaaaatattattatacgatcgataaatatatagatcatataaggaaaaagacccataagacattattatgaatattaaattcacattgcccgttaacattatttatgtaaattataattaatgtgaatatctgatctgaaattaaactttttttattttcaagtggaagtacaaatgcaaggtttatctatggagaaacaaattaaatattgtacaaagtagctatatatagggttcattggggagctggttgggttgagtattaattaagaaaatcattaatggcatggtgccttaaagtcgggggtgtatctactactagggtaggttgatttttggaagaactccaccttgcattcatgatatcttcccatatctcgggtctattattataaatattactaattataaataactaatataactcttaataaaaaacaaggaaaaaaaaaactaatatgcgaaaaaatatacttataat

SEQ ID NO: 204156 - DNA, 1498 bp, Cannabis indica
aaagtaaaaaaattattgagagtgccgttaaaatttagtcgtcaaaattgaatattttcaacttattataataaaatagttgatggtaacaagttttttttttttaccaatttataaaagaaacaaaatgtttgagaaatacaaactactatttaaaaataaaataaaaaagacccaaagtgtaatgtatgtttatttatgatgtcattcatgtccttttcaagattgatttcatggtctacattttatttatttttgatatatttattttttattattataaattgtatggtgctaactttatctttacagtactccaaaattctaataattatgttggccttctctttgattttgttgcactaaatttggtcttttctcagtctttcttactatctttttgacattttgcaaaatcaaaaaatgatatgtttttctaactttttttaagaataaaataaaatcacttttttattactttattttttatattgccaaactaacattgaaactcaaagttaggcactatatagtagtagtatattaataatagaatcaattaagatcttcacacaaaatatatatatatatatatatatatatttatatgaatgtttatttatatgagaaagtgacaaaaatcaaattaataataaaaataaaaatacatctatacttgtaatatcttgtataatatatatttgagtagtgctatcgttaatattttattttaatttttgtatttaaaaatacatgtttaaatattttttttcaaaaaaaattcatagcggtatttgttatacttacaacatcattcctgtaaatttttaaaaaatttcgaatagtttacaatgtcgaaaataggtttaaagttttttgaacaacgtgataaactggtatattaggaactctgtttttagctataaattattcaatttttttaaaaaatttataaaaatgatactgtaactataacgaatatcgctatgtaaaataaattaagaaaaatatttcaatatataattttaaatgtaaaacttaactaggagattgtaatatagttgtaattagtattactctatatatttataaattataggtggtgggtacgtgtttgttagtttggaagagaagtttccaactaaggtttaactaatataaatatacatacttagctagaaaaattaattatagatatggttaattaagtataataaaaatataaatatagttgggtcctctctaatgaaatatctatttaaaaatcaattaataaaatagaataaaaaagattgagcagtttaattagttaaccacttttgtgaaactcattaatcaatatatatatttaccaatatttatatttatatatataattaatcaaatcaaatcactccttttgtttcatcattatcatgactaagtggaaggaaaaaaagatatattttccttgaaaatcaaacaaaatccaaacaaagatagaaaagaaaaagaaata

SEQ ID NO: 204157 - DNA, 583 bp, Cannabis indica
gtatactaaatgatttttttttactgaaaatatatttttttcacacttttaggtactataacttattttttttatggattttatttataactagaatgtttacggaaaaacacttaaaaaacaatatagtacaaatgtgaaagcaaccaacaaaaatgtaaaaaatattattttcataacatgcaaacaacaaaaataatattattgagtgctataattaattaatttcttatcaacgctattagtaactaaaaaattactttaaataatataagaaaataaaaaaaacaaaaacaaaaacaaaaacatcataaacatcaaatttagctgacgtggcatgtaagtaaacgtagtaatttcattattgtaaattaaatgcaaatagtatatattattgtaaacttccttataattttcctattttgggggaaattatgaaaaaaacttcaagataaactgaaaagttgaaataatattactattttggaacttgtattttgtaaaagttactgattaaaccatttgttttgttaaatgacaaagtgaatcttgtattttctaagagaaatttgataatttatgc

SEQ ID NO: 204158 - DNA, 1699 bp, Cannabis indica
  modified_base (1629)..(1629): a, c, t, g, unknown or other
acaaacacgagtttcatgaatacttaggataaagattgatcactagtgattatcgttctcatgtgaataactctttatgataaacgacacgttaataaagatgttactttatatcgttccagtcatgtataatcaaattatacacaatatatttattaaatatctatcgacattggggtttgaatcaaaatcacacatactagagtacagtgcttagtaaactgtactcggtaatttcatattaaagattccatattttagtacactactaacttattttattcatgttgtatgatcttaattttcttgtactttcttacatgatcatacattctctatatgaatatagaattttcatatatttatgaattatatttctataattaacatattcatttatcttatacttgcatctcatatattaactaacatattatccaataaaaaattacttttagggcataaactctaacactagcttagtttcaacaatcattttagaattgttgtgcaccctcatatgctcccgtgcttttagaatgtttttaaggttaacatgtaatattgatctgtcatgatgtttttgtgggccctatagacgcgtagtctattctctatttgttacgtaatttgataaaacaatatagacaacatatagtatattatttatttaatatgatatttagtttctatttcattacatataatgaatatataaatatttttggcatcctatatatatattttaataacagtatatataattttgttaatattatatgtattattaagtaataatatacgaattttagttttgttaaaaaaattatagaatataaatttattattatagtacattgattttttatgttaccgtatcaggtatcaaatatatcgtgatacacaacatatatataaatatatatttatatttgatcatataatatatttagttttgttatattattagtcattttgtctaaatttttgaaaaaaagacatatttacttaattaatctatttatgtcatttctttagccctatgttattgagatcaattttgaaggcttgtagctcgtcgttctccttaacttactctaaatcttttccacagtgggctttaagatttttttgttttttttggaaaagggctttaagatttttttagtttttaaaaatttaaaagtattattttcaatagaacaatataaattattatatgcagtatatttttggttgattgtacttttgaaaagattaaaacttaaaaatatgcatctttttattaaaatgggaaatttttaattttatggttttatttggtaaaatttacaaatatgatctttttttttttccaaaaaacttatttttgtgaaaattaaaaaaaaaaaagtaaaatcaaatatggtgaaaacagtttaggtgaactagtccttaggataaccagagcggcaagggtacaagcaattaccttataatattttctcgatattttaaagggaaattttcacaattgcactataataggaaaaaacttaacaaatatacggttacaccccaaatttacaacttatatatggtaagtgtaaatctaaattacataaaaacacggtattagcttcttcaacnccattgatgctagtccgactgaaaaaaaaaactagagcatccattgatgctcgacaaagcttgctgaaac

SEQ ID NO: 204159 - DNA, 931 bp, Cannabis indica
tttttttttttctttcttttgctatgtataattctccataatggagtcatattctaaccttgtagtattcacatctgaggacttaaaatcattcaccaacagtttccaccagaagaatctgattggagacactcagtttggtaagttatttaggggttgtataaggaatttaacaggtgttatatgcactcaagaaaatcgagatgtgactgtcaagatatgggatgaaaaatcaaattgcttgaacttggattccgatgagcatttgatgatcaaagtaagttgcccaataattgtacttgtatctgtttgtatatatatttatataaataaacctttttaatttgttgatttatacatattctaggaagaagtaaaatttttaacccatccaagcattcactgtcatcccaacttggtcaaattgattggtttttgctgtgaaaaagaagtgagaggtgtagtctatgacctaaatccaagggatattttgcataatatcatcttaaaaggtgaacttttccctcagttattatgggatggttgattattaagtatttctactgtgagatgtttgctgaaataacaagataaatatgagataaatatgtaatagttatttattaatattattttctaacaaaaaaagctttgaaactctttctttggtgtttcactaagaattatcctttttttcccataataataatagcacttgacaattatttttctatgtacagatgttcttagctggacccaaagagtaaatattatactccaacttgctggtgtccttgaatttttacatacacaagaaatgccatatttggttctcaatatttgtgaatcacatataatgctggattgggttgggcctataattcacttgagtacactttattagttgttttttttattgaaaattaatcat

SEQ ID NO: 204160 - DNA, 1317 bp, Cannabis indica
ctccagcatcacgttcaactaagctgtaatagttcttactttgggagtgccaaacaatatggcactaacttcgatagggcgagccatccagattgagacatgtctcctctaattttcataattattggttctagggagtttactaattatgatagttcttctttctcgtcagatgattatggtaatttagttaagtgggagtttatctcacaacaattatcttgtttattttgtacaagtattgacactttatcttttggctcgcagatatggactttgaaatctcctgtccaaatcgggttcaaagaaaggcaagaagcgagctgttgtactggaaacctcttctgggacaaacccagaaccatcgaagagattgaaaaaattgatggccaacaaaaaatgagcccatatggttatcgagttagaggcgccttaagtgacctcttcggttcctgctgctgcgagcactaatgaacaggctttaggatctgttcatcaggttaaattcccgggatcacaacccgagatggtactcttggagccttcttactccttgccaaattctgcaagcattaaaggtttgcaagtttgctcacagtatgccactgcctgttagcgtcattacaaaacttttcaacaagatgactggaatttaataaatgatagcaattttgaaagtttatctggaaggagcaccaatcttactctctcggttagcatgcatctccattttgtattttgatttcatacttctccatttagttatcatttcctaacttagttctattgtaggcatcttctttatcaaacagttggaatttgagcttcgaaagtccaatgaccaacgtgaagttattgcgaggcaatggaccgattctcaaactgagattctttggctaaagaaggatgctgaacagcagagaaagctcaaggatgcccagaaagctgccaaggatcacctcgaggcccatcaaaaatcccaggaagagcttaatgatgccaaaaataaacttgaagaagctgaggccaatgccaaggctagatttaactctgtttccaagcgtgctatctatagggcttggttggcgaatctaaatatggatataagcttcttggaagatggcgctgaggagatgttggctttttgtgagcaaaccaaaaaagatgaaagatgtttctgaagaaaaagaagatcccactaaatctccaactatttagattttatttttataatttgaatttctgaacaatggcccgtaggttgaggcaatggtttgcccttgtggcatttttgtaatatattcaaacctttgcttt

SEQ ID NO: 204161 - DNA, 1528 bp, Cannabis indica
ctcaaggtccaatggtttttgacaagctaagcccttgagcacgtctcatatttgatccaactgtgcttgcatagaaggatatgttgctgcaggggcctggttgattagcccttcttgattgagctccaaccctagattggcccaagcctggctggccatatcctaggagagggtatgttcaaggccggccagccccaagtaaatattcatggatggccaaccttgtgtagggtagggcctggccgcccattcttctttgactagctggtggagcctgtacgttgacatagggcagttcacgccaatttatggggttaggtggatccatgtatctaaagtgattggtctcacttcttaagttgttatcatcttgagtgtttccacctgttcccaggcctagcctgttaaagattggcctttgggttactcgctccccgatgctctgggataggatttcatcttattggtcggccagaggtgcgtcactaaggtgttggccagccaaaggttggccaataaagggtgttgctgtgctagagaaccctggtcggcccctagacaaatgatttccagagtctggctattctcgccactagatcttcgtggcaaggcttgtcctctttcaggttggggagggtttgtcctagctctagaggaacttggtcagacagattgtctgtagaacctcaccgatttgtcgattagtctccattaaagaggatctctgacaaggccctgacctattctagtagttttttcattgaactgtgttattagatcactagcttctttgttaagacgtctaattcttcctgatgagattagaggatgtactcttggtcatccatccatattagaaatttgtgtctctattatgcgaatggatcgtagccaacatcacgtggttcttcagtttggccaacttgacagacgacctctctaagtctggctaactcgagatattttcccaagtctacatgaggttctccaatggctggatcaccaattcatggccccaactcttcaacataatattggggaccagatcctgtcatggcggaggttgccccatgttggccattccttcagtatgaggtgccagtggagagtcctccctgggcaatagaggttggccattaggaccaacaaggtaggtagtgtccacctgaccagtcgtggtggccaagtttatgatgcctactaagatggtagggttggccacatccgtcgagttcatagagattccagttgtgattgaaagacgaacatcaggattctcaatcatatggtcttgaggaagacacgatgagagagaagttttagccagagttctccgtttgttaaccatggcatttgattagataaattgacaacttgctctcaatgaaagcaccaaatttttgatctcagatttggccaactgacagtaaggttgtatttaatactaatgcttgccacgtgttacacaataagaataataaagtaaataagacaagaaattttatagagattctgccccctgagttag

SEQ ID NO: 204162 - DNA, 1333 bp, Cannabis indica
aaagagctaagaaccatatgctggcaagattgttaagctgcaatgaactaaatggttttgtggttagtgattgcaagagctaagtagttatccataaaacctccatctaacaacacttttggatcaatttaaacaattaaaactccaaaaattatctaatgtaaaaacaataacaataaaatttccttaatacctattatctaaaaaatatttttaccctttactgctgaataagtatacagtaggcactatattatacatacattacatcttgattttacataaataaatgtatagcatatgtatgtattatataaagatatactttcgtggaatttttaaaaaatgtataactaatcataatttaaaacttattctaacaaaataagatcaaattgagacttaatttttttaagttgagttagaagttattttcgaatagaatattaattttactgtttatatatggttacttactgttgggatgatgaattttccagtcagaagacaaacagcaggaatggtacagtaggcaattaaagggattgaagtccaagggtagacaatggtgttggtgtaagcaagtctttcaagcaattttagttttccaccccagccataccacaatgggcaatggcgactaagaaagatttcgactgaaccaagagcccatctcagaacttggtgcaaccgatctgatagatttataggagcagatcccttgaatgcatctctctttggcatacagtacactgatttccatcctctacaatgcatcttgaatcctgttagaatatcttcagtgactgaaccataaatccatccaatctgccaatcaattttataagtaacatcatcagtaaataagatatcattagaaagattatatatgttggattataatgattctcacctctttgccccactcagttttctcctcatagccacagcttatgacatgaatggcctccttaataagtgttgtgctatttgtcccgtctggtaggccgccatcttccataagagtagaggctatgaaaacaggtgattgtccgaatcttttctcgaaattcttctgtgacatgagtgatgatttctctaactcttcataaccctcaagcccttcttcaatctcttcaagatcaaacatgtttccgctctctttcctcgtataagtctttcccatcattttctttttcttgttgtataatcctccaagcaatcttgataaccccttcttagactttgtttttgatttctttttccttgaaccaccacaacagcagcaacaccatgaaggccagcaatcacatgtcatctttggtcttttttc

SEQ ID NO: 204163 - DNA, 737 bp, Cannabis indica
gggtccgggtcccaagtttgggttggggttcaggtccgggtcccgagtctgggtttgggtgagagattggtgttgatctcgaattctttgtaaatattataatacaagctaatacggactatttgttatgtattaaataatacaacatatattgtattaaaaaatttagtcgtaataattaatacaatacattgttttatccaaacatagtgttatttattatttaatataatacaatacggcataccaaacgagccttgaagctcttaattaggttaagttttgtgctagatattaaaattatgactaaagtaaaaataaatgaatttataataatttgagaggaaagaataatatatatcttgttatctgatcttttaaattgaaataattttgtagataagcgattatctaactgcaatagaagccatggaaaatatgacagaccaagatgttgttgcaacagttcgaaggtaatattataaatatatatgagatcaaagagtactataatgttataaggtatcttatggtgcccaacaatattctataacatcacatatcatttttttggtaaatgagtaaatttataccacaaaaataagcttacaaaacaattcaacctgtacaaattagttgagaattctcaacttatcaaaccaatctaaatctttttcactgattttttcttttttaataagagaaaatctatcacaaatttctcttttaactctatt

SEQ ID NO: 204164 - DNA, 687 bp, Cannabis indica
tttgacatctgtcaaatcatgtcccctgaacttttatccatgttagattttccctactaaattggacaaaagttcttaaatccaacaatctcaatagttcagggagaatttttaacgactagaaaagttcaagagacataatttggtatacgtcaaagttcggggggtaaaaattataattagcctatatttaatgttgtttttcacttggtcaatatcatatgagactttaagaatgtcattatcattggaaaactaaaaaaaaaaattgtaccataaatttctaagaagaaaaatcattctcataatctcattgtatataagattaagactaaaaaagtatagttagaattgaatatttttttcatcattaaattgtgaaatttggtatggttaaaaactttattaccaaatcacaactttttttagtgtcaacttgcatgtgagaaaatatttatgattttatacatgcatacgcacttacacacattatcaattatacccactttatattttatttgttgtgtggctcatcttatgatgtttttcttgcaaagtttaaattttctaattttttttttttttgtaaaggggaacttttttaatcatcaaaacacaaactacatgcatggcaactctattttattaagagtatatgcacaatcagaaaaagatcccaaccaagaa

SEQ ID NO: 204165 - DNA, 1547 bp, Cannabis indica
ataataaaaatgctaataaataaaacttgttcaatatgcattgatatttttattaatgtataggaggttgataattaatatttatccttcataacttattcaatacatgacatatatgtttgtaggtgcactatagtaagaaaattgtatagtgcatacccttttaaaagcaaagtcggccttgagggtaggcgagttaggcatgcgtcttgggtccccaaacgcttagggcctcgaaattgtgaaaaatttattaatagatagataaaatattaagtaagaagaaattatttaatatagtggtaaagtgttttaatttaagctaagagatcaaaagatcaattccaacctttattgttttttttttttaaaaaaaaaaagtttagcaaaagtactattattttgataatagttaaacaatatatataatggccctaaaatttaattttgctttaggcctagttttgctcaaagggattgcattttgatattaactttttttatgattgaggtgtatagattttttataaaatttttgaaaattaaaaaaagaaatctaacgtgccaaaaacaaaattgaaacattttgttcacacgtgcctattttattataagtttgtaaaatagactgattaaatcttattttttatattttaaattattttaaatttcttaaaattttaactacaatataaattaaaattacaactactgcatgctcacatatcaaaaaaaaaaaaaaaagtaacgtgcacccttaagaaaccctatacatttgatattaatatatattgcagacttttattattactcgatccatctccacctatatcatatgtatgcaacaataatattacatactaatatcaatggttgattatatataatatgtattatgtgtatttgattaaaactcataatatatattgctatatcataataaattaacaatagaaaaacgtggtaattaatatcttcaaaaatcaaatatatatatatatatatagtggtccaaattaacaatagcttcatcaacaattatttcccttttttgttgttccttcataatatatatttatgtattatatataggtgatcataagctaggttatagtgatagccagcattattaaaaatactaaattataactataattaattaatgaaataactatcaattaaaagaaccggtagttgtatttgtttattataacatgagatctaataattatgatgatgtcaaacatattatgatcactctataatgacaccctaaccacaaaacaaaaaacatcaaacatgtcctattaatttaattactcattgttggatcatatatggtcatatttagccccacacacacctaattactacgtaccctgctgatttctctttctaagaattgttcaaaacttaaaaaataaaataaaaaaaaaaaaaaaagactaaatatataaaccttttaatgttgacccactaagatttatatcatgaagacttttgtggagtccattaatagagcaaaaaactaatcatattgtgagacc

SEQ ID NO: 204166 - DNA, 547 bp, Cannabis indica
ttaataataaaatgatatatataaaaaatttatgctaaaacacaaaattataaagttgtaaaaaaaaaccataggaagaccttatggcatcggttatcatgaaataactgacgccataggatcctatgaagtcggttattatgaaataaccaatgccataggggccctatgctgttggttgttttttacccctacagcatcgcctgaaacaacgtcggtggcgaattttgtcaaaaccgatgttaaaaactcttaaaaactgtctctaaagcccaattttgtaatagtaaaacaactatagaatacattaacaataatataaaaacaacaaaatgacagctacaaagaactagaaaaataacatggcatcgacctcgtttcaatatgcaaaacatataacctcatcaatatgttttttttattacgattttttttactttgtttttgacaacttgaattattttttttatactactgcaatgcaaaacaatataacctcatcaatatgttttttttattacgattttttttacttgtttttgacaac

SEQ ID NO: 204167 - DNA, 744 bp, Cannabis indica
tgaacacctgctgcaattgagagatttgagaatgaacaacagactcagcaatactcatgctgaacagagatgtgctctgctagtaattagtcaagaaaactctccaagtctcttgaagattgtggattgcaccatgggaaaatcgaccttgtgacctaataaatgaccatgttcctttgttcgcaaatttccatgaaaagcacaagctatgaaagcgagggaattatgttctttcaaggaaatatcagctttgtgatacttgattttcgaaatatcaaaaaaaattaaccttgcgattttgaccaagacttacaaatgattaataagttaagaatcctacttgagagtctcatggcatctttaggagacttgaaaacattgactaaccacttggtgtcgcgactcatacacccaagtgtgcccaaactaagatttatgggcccgcacgaacatttttaccctagaaacctcaatctgacaagaaaaccaacaaatacttaattcatttaggcataaaaaggtttagacttgaacataataaagttaaaattgcacaagaatcttatgcaacatgacctatgcgaccactgccacatgaaggtggtagtgctctcctttttttggcgagcatgaccacaagaagatggcgattctcgctactcacaaaatatcaaagggaacttgtcaaattgtgttcccttaacatccagtagtacaacacaacactacaaaaaaaaaaaaaaa

SEQ ID NO: 204168 - DNA, 1068 bp, Cannabis indica
tttaatatgtactaaattatgtcactgaatagtttagaccgttaaatttttttcattgagactgttaaatttaaaaacttttgtcaaattctgtttaattttactatgtgctaaattgtacctctcgaactttgatatatactaaaaagtgtaccccaaatcttaacaggtaccgtatagtacttctaaactttcatacacattaaacttgcattattaaaattagacaaataaatttaaatctatgattttaatagttcaaagaaatattaagtctaaaatattaaaaaaaaaatatgatttagtatatataaatttttttttaaaaaaaaaaaaactctaattagccaaactaaattaaatcataaaattaattaaaagtaatattgtctgcacttaaaattatttacgattaaattaaataatgtgtaaaaaaatatataatttaaatatgcttctagcatttatataacttattttcattgatgttttttttcaagtttgctttgttctcattcttttatttatttatttattttaagattaagctttgttttcattcaaattaattatattttttttacagaagctaaagatagagaaactttttacaactaccacataatattttatttattttaaattaaggaaaacaaataatgatactttggtagtgcccctagaaaaagatactataagtaggtttatattaaactaatttaaatgaatattaagctaatcattatataattttaaagttaacaagttgtactattaaattatttaaacagaattataaaatatacttaacagacccactcataaatttacttgcttttttgtcacacttttccatatacttttttttttttcataaaaaaacaaaaatagtgatgcaaccacaagctagtggaatcaacaaataatttaccaaataaaaaaatttagtaactttcattaaaaatttatacactagacccttattgggttgttttatctagtaaattttttatctttttagacattatgactgcatacgttgtacttatttaagactatttgtaaatt

SEQ ID NO: 204169 - DNA, 1152 bp, Cannabis indica
ttgtccagtccaatccaatcctgcgtaccaaacgggccctatacatataggatatgtctataatagagatcattgttttgttcttttcataagggtgtttttgtggctatagatggtagatttaacagtaaaaatgaaagagtgtataataccacttagtatttgagttccattaaattattttttaggaataattaaatattatattctctctcccctctcatctcttctctctcctcagtttttcttcttcacagtgcttcatcaattttttccacatttttccatgaaaaaagtatcaaaaataaaaatttagacactataatttattttttttttaaataaaatctataaatagaatttggctaagtcagaatataacatttttaaatgtctccatctttgtggtgtctctttcttcatgctttgaatttgtactattaattatctcttataactaacaagaaaatatttttaaaaaataaccaaactatcatatatttgacatcaagagataaaatttaataaatagcagtttaataaaaaaattactaaatatttgttctttgtgtggaatatcatataattactttctccacttccgctattaacggtattaaggttaatcaaatcttttttctttcttttttttttctttttgaatatcaatggaggtcaagccacccataaatcaccaatagacaaccacctaaataactcatcggataaatatcgataggaagactactaacaagtgcaagaaacaatatttccaattaactattttttttaaaaaaaaaatgaactatatattattttcataccttaaacttaaagattagaaggcaaaaaagaagtaagttttaacattttatctcttatttaagctttataacatgcaagaaagaaggcaagaggtttataactttttataatatcaatattttatgatatcttttttttttgtcagcatatttgtattatttgatgtttgttattgggttaatagtttttataataccaatacttactattttatatttttcaagacacataggtacacagtaaataatctatgcattcaaaagtcatatgtttgaatggttaagaaaatgttcctatactgtaatatcataaaattattctatatat

SEQ ID NO: 204170 - DNA, 571 bp, Cannabis indica
ttatcaaaaatttcatcggagttttttttgggcatatcgtgcccaatttatttcttcctattgtgttttgttgggtattttctctaggaggttgttttaaggcagggccgggtctaagctaaggctcatcaagcccgcgcctagggttaacctagtccaaaggttcaaaaaaaatatatatttttttagtagtttttaaaaatattacatatattttaactaaacggcgtaataatttttatttttttaaggtccacccaatctcagagctggctttattttaaagttaatattaatgcaactttagacttggaaagtactttttgtagcatgggaatggttattcgtgatgcttacggaattgtctttgtctcggctatctggcacatgttaggtttttttcaagctaaaactgagaaagctcttgttcttcgccatgctcgtatccaatgtcatattcttgggttcgataatgttcaattcgaaattgattgtctcaatatggttaacaaaatcaataataatgtttttttaaactcgtggctagacttaattttaagagacattcatc

SEQ ID NO: 204171 - DNA, 1415 bp, Cannabis indica
ggattgaagaccaaaatggcattcgggtggtacgatataaattttttggactaggtatataacaatttgaattatatcctgaataggctacttaaaaaaatttcagatccagaataataaagctttaattagcttccacgccatcttgattaaggaaacaaagaaacactactattgcttaaacttatcatcaaacctttttagataattatctaccaaaacaagaaaaatgagttgaaacgttgaaaactaaatgcatgtttcctttgttttctttttctttttttataagaaaaggttggtcaggtattattttattaggcgacagaaggaggcacgaacttaccttactaaggggcgaaaaaccagcaaaaaaagagttaagagggctaattatatagtttttgatcaaaaatataattaattattgtaaattaaattttgaggagggattaattatttaattgttttaaaataaaaaaataaataacgtttttaggtcgtagtgaggaagcgaaagttagagtactccggccgtttgaacaatgagcataaatatttgagcttaagcgaatctcatgctgtcttggccttaacgaaatggacaaataataaagcacatttagaaaaaggtacgaagcccacttttatgtgtaatataatatatgatattcccactaatttatacgaattagtgaccacttcccatttctcatacatgaccactaatattttattccaacaaaatgcaaataataaaaaataattcaagaaccacagtattaagtaacgcctagccagcgagaaaactgtttatataatatgaaactaatttcgatattaataagtaaaaaacaaccagctttctctgcttaaaaatatcccatttcatgaacgagtcaaatattatatcagtcagtttacggagatcaatcaacaaagaagaagaacacaccatgaaaaggaaatgaaaaaaacgtatagacaataatagcataggatagagatatataaaaaacaacatatatacatttagatatatattgaaaacttaccatatatatttggagagaagagtttgttgatgaattagctgattccagaaacttttgggaagagatgaaaatttcaatttgtagctaatcgaaactagaaatggaagagcgaaacagagtttttttgggggatttattggattcgttatgtgagggaggtagctaggaatatatttgtatttatagacgcgagaagtccaattccaaagacggagattttcagatgtaattatatgtcggtaggtaatcgtctattttcctattaattgctatataatccttctttcatataatttagatcataaattttaggactacattacacatggtattaaaacttcatagtttaatttattcaat

SEQ ID NO: 204172 - DNA, 1058 bp, Cannabis indica
cccctcaggtgagtgtttacttaattattatataatgataattatgctaataaagtatgctaaaattggtgcacctaacaaaaatttaatctaatttttttcatagtcatgtgagagtaataattgtttaaaacattctaagaaattttaaaaaattcagaataatttacaagaaaataatgttcaaacagtttattttacatgcctataaaataaaagagttgcgcatgcatcagacaatttgaacattgtttatcaaaatattttaaataattataatgtatatgaccatatgaaattagattatataaatcaattacaaactaattggttacttgtgtgtaggtgtcgagtgcgacagccacatttgcaatgacgttctcatcatctatgtctgttgtggagtattaccttctaaaacggttcccaataacttatgcttcgtattttgttggtgtggctactgttgcggcactcataggacaacatgttttaagaaagttaattattttgtctggaaggacatctttgatcatcttcattttagcctttacaatttttgtcagtgcaatcacattgggtggggttggaatttcaaacattattcgaaatattgcaagacacgaatacatgggcttcgaaaacctctgcaagtatgaagtttagcattctcaaattctcatcaccatttcacaaggctgcaactgcacttaaaactctattaattcctcagcttgattcgcattgcgcaagataacatgcacaaataatcaagaaatggtctaaatttttttttaccaaattaaaaaatcctcagcttgatgaatcaatgtttcctcttattctttagttacccgtgtaattttttcatttgaaatttcggctacttagattacaaatgagaagatacaaaacattatattatgtatagaaaaagttaaagagtatatttagctaaaatagctgaacgattacatttatagtgttttaagtacttaaattataattttaccaataaagtatctaaaatatttgcgccaaaaagttatattataaaa

SEQ ID NO: 204173 - DNA, 697 bp, Cannabis indica
aacatggtattagagcaaccaagatttaaaaatcctgtagacttgtttgatatgtacatcgactatgaagactcgatcgactcatatttcagtaagtgttaattgttagttgattattagattatctgatgattatttaaattacctgcttatttgaaatgtgcaagttattagaaaagcatagttatgggtgatatgtatgtgtatcatgataaaaattattagcattgattatggtttgggagatactaaatgatggaatgttatggtcgcatgtgatttagctcatgcacctgaggcaatctagtaggggtggccgtgagcttcctaggctcggggttggcggcgagggtaagaaccctccactaccacaaaaatgggaagaaatgtatgttgtgatgtaagaaaccatccgacaacaaggtgaataaattagagaactgagggatttggagcaagctcagctggctccaaatcccaatcttgatcctccagcaccgctagtagtggcataggatgcaagaaatcgtctagagccgttgtatgagcagtttaggaagcaaaatctgccagtgttaaggtggtgctgatccacttaaggatgagcaatggatgagtatggtaatatctatttttgacttcataagtgttgagagtaatcatcgggttagatgtgcaaaggcagaagaatttatac

SEQ ID NO: 204174 - DNA, 1821 bp, Cannabis indica
gacttgataatcaaagtctcttgtcccatcaattaaattggaaacgaaagtaaaaaaagactaacatggccactctgcagcaaagacgacacataaatcaagagacttgatcaaaattagagggtattctactttataataaacagattgtgcaactctttttcttgaatgaaaaaaatatcaacctaatattgatattagctaaaatataaacggtgtagggaaggaacaaaattaacaacagttggcatttaattgtaatatattttacaaattgtaaattttgacgaaaataagaagaagaaaaaagtggggccaacggatcgagccacccaataacatgatgacttatggaagtttttaactttactaaaatgatatcaatataaattttcatgttcttctcttatatatatttttgaccattttgttgaccaatttttaagaagttgctctaatgtgtttcaatttaaaattaaggcaggagcttgtagcagtaaatgcctttgtcagtctgaaagctcatgtgctcttggtcaagctacatacattttgagattggattatagctagaatatgcattcatgaaccttaaaagttaatttgtagcttgaagttatgtcgaccatttgattaatttgtggaagtgaaagcaaactttgtttagatttgtgaaatctatacacattctccatgtatcattagattttaggaccaaaacaagattggctagccatatgggatatagagcttcctttagaaagtggatgttagctagttagcttgtctacttttgttttcgctgcttccgctctcataggatctaaaagtctttgcttttgtcggaatggatatgccttgagatctatgttcagtgcgtgacaggctacatgaggaataattccagttatgtcagaatgactccaagctaatacatcattgttcttcttgaccgtggagactattttttctttaacaattgcaggcagattttttcccaccttgatgaatctagtgggatctttatcactgatccacacttcttctacctcttctataggttcaattattcgttctacgtctacccgtggatctagttcattctcttctcagaccacccccaatgctggctgagaaaatgttccgatttaccgttatatttccttcatggaccatgaggacaaatctatagttgaaacattatagcagcttcttgcactcttttggttgtctctaattattccaacacttccagtatctcctggaaattttaaacatagatggcggatggatgttactgccccaaagtcaattagaaaaggtcgtcctagaataatattgtaagctgttggacaatcaaccactactaatgtacaatacttgaaggaggaaattgtgttgtttttcagaatttcaaacacacttttattttctccttttttttttgaataaaaatttcagtattcattaaactgagaaatcagccaaagcaatgacaactaactcaggacacagaaaaccctctagatagtacgacctatggagaaacaagaagcccacgccatataatgagcgactctatttgcagatcgtttaacaaaacacacagaaacaaaggacaaacgagtaagcaaaagcttacaatcagaaacaataagaccaaattgagaaggcgtagaaagagaacttaaaatagcttgaacacaaactaaactgtctgtctcaagaacaacatcaccccagaaaactatcaatccaactaagagcctccttgataccaacgatttcagccatctcgggttgcacccgaccttcaaaacg

SEQ ID NO: 204175 - DNA, 579 bp, Cannabis indica
tcctattgattgttgacaaagtaaatgtttaccaaatgttatttgtgtttttattgaataaaaaaaacaaattaaaacaaatgcacaaacctaagctactaaagctagtttagtgatgaggaggaatgaaaaaaaggagagctcatcgattctcaagactttattaattgattgtaaaatactattacactgaaaaaaaaaacaaatgcaccagccggggaatcaaaccggccgatctgtatggtggcaggatactattctaccactagatcactagagtaaatgccaaatgattcattttttgtaatattactatacattatattgatagatattgaaaaatataaaccacgtttagtcaatttaaatagggtaagttaaatgtcaaaaagaaaaaaggataagttttgttaaaagagaattcaaacacgaagtaaagtttcaatggtattatcgcttcgagtggttgtacaagacagacagctgccgggcttttatttttagcaaacaacgttttttaattttacattaaacaatatgttaatatgattattcattgctttgtaagagcatcatttt

SEQ ID NO: 204176 - DNA, 880 bp, Cannabis indica
tgttctggttgcaagccaagagttcataaccggtgtcccacctgcaggcatgaactcgggaacattcgatgtcttgctttagagaaagttgctgcatctcttgagcttccatgtaaatatcagagttatggttgcattggtatatacccttattacagcaagttgaagcatgagtctcaatgcatttacagaccatacaattgcccatatgctggatcagaatgcactattgttggtgatatcccttctcttgtagcccatttaaaagatgatcacaaagttgatatgcataatggctgcacttttaatcatcgctatgtcaaatcaaatccgcaggaggttgaaaatgcaacctggatgttaacggtatttctcttctttccattctcatcttgctaaaacattcatgaaattggtcctcttgtttatctttcattgtgatcttttcagtttgtttattcttaaggctatgtttggaagtgggattttagtgagaaaagagaaaggtagggaatatataagaaaaaaagtgggaaaaaaaaataataaattggaaagaaaaattgtatagataaacactcaatttaacaaaattttccatatcaaacttgaaaaattgatttagtattttttgctgtccccaccttttttttcttacattttcctactattttcttttctcaccaaaatctaacttccaacttctaattttggacagcgacttgggtctttagaaccaaacactttgaggcttttttttttctagacttaagtaggaaatggagtgttttgttgtaaaactcagggacttttcgtttgctgggtcacttttagttctatttacactgtatttgtttttcattttgtgtaccacggtttt

SEQ ID NO: 204177 - DNA, 838 bp, Cannabis indica
gagtataaaattttataagcctactagtacattatatgttataattatatttgtgttatttataataaatttttatttatgctcgagttgtttgacgattatgattatgatacaaacgaatatataataaaaagttaagattattaaaattttaaaataataaaaaagatgggttattatactataggacacggtttaatatgtcgcgcgtaatattatatgtgacagtttcaaaccgtaccctatattacacactatactcgatgattttcaaccgttgggaataatttttgtggcgacagttttgaactatcgcccattcgacctgttttgcaacggtcgaataggcgacggttatagaaatcgacgggaatactttactcgattgtttaaaactgtcgggaaaaaccaatttttttagtagtgtttgtaaaactataatttttcttcagtttcgtcagcacatactccaattttaatttattaaaagaatattttgaagtaactgatactatatgtttctggttagacccaatgatctagaatctgagtcttatatgtgccctgtttaagaaaataacagactctgtactgacgaaattagagaaaagttatagttttacaaacattggatacttataccgctaaaaataaacattgagtttatgctacttacaaatttaaaattttgaatacttataccaatatttaccctatatattttctcttaaaattgagaaatgttgaaggaaagcaaatgtctagtacttacatgaaatgctataatatactacttgtataattaagtattccattatacatattttgattaaataat

SEQ ID NO: 204178 - DNA, 1343 bp, Cannabis indica
gatatatcttaatatacataaaaaaaaaaaaaaaaaaaaaaaaaaaaaaaaacaaccaagtcggtattaacaacttctaatttgattaaacctaattagttaattaaagataacaaaatgtcaagatagaaattccttcacaagtaaaccaaaaacgacagaaatatttggtgtcgtttttaacaatgttttttttttaggaaaaacttgttatcataaaataaaaatatgagtcatttagatactttccaaccaaagcaaacttcatccacccttaatgcaaatttagccaacccgtgaacaattattgtaaatgtgcgtttgacatgtgatatttttacatcaaggaaaaaaaaagacaaaaaacataaacaattagatcttgaaaagaagaaattgcagacgaaagagtgcacagaacattaacaaccatcaaggcatcagattcaatgttgttaattggtagttgctgctgagatgcccaattcaaactgtggaaaagagccttagcttccatctcatgagatgcataattaccaataattggcatgaagagggctgctacaacatgaccaagagagttacgaacaatagcacccacaccaattatatttttgttagcgcccaccgctgcatctacgttgagtttgagtgggccagagtcaggtgccagagctgctgttggaggtgacagcccaggagttgcagcaactgctgggtggaatttaattcttgctgcccgaaagttgtcgatgtaattggtagcgaagacagcaacattcttagcagatttagctttattatgtccatgtataactcgatttttttcagtccaaattttataaagctaggtactatcctaatggtacttttttatctgctactttgggacaaaatccaagttttaattggcgtagtattcttgatgctcaagagctagttcgggcaggggctaggagatctatgatacatggctctctaatacgttaaacccgtatgttacttcccatcatcctggtcttaatggtcaaaatgttacaagcttaatgtgtgttgatgctaatagatgggataaggaggttgtctcggatatgttcaatttaaagagacaagcaccttatctttctattcctttaagtgactcagcagacatgcatgaatgactgatattggaagaaggagggtatctgggctctattcagtaaagagtacttataaattcttgcaatcccaaaagggtgagtggctgcttactaaaaaaaggccatagatggaaaaaattgtggcaaattggtgtgccttcaaaggttcttcattttctatggagagtgatttcaggttgt

SEQ ID NO: 204179 - DNA, 1470 bp, Cannabis indica
attctttaaatttcacccttccagtagccaattatttattatttaaaagactagaccatctccaactatgttctttaaacactctttagataaaatagcgattgtgtcttaaaaaaatgagctccaatcatgaaaaatagtgtttacaccaagagtagcttcgatgacgtgaacatcaatgtgacacgtggcaagaaagatgacatctcggagttgagtagtctcgagtcatagtaggtcgacttaggaggggtccctagccttgcgcccaggttaacttcgagaactccagaatgaaagttcaaacttcaataagttgattccagcccactattttccaatattttgtaccataaagacatagagcaacctaatccaagacttgggagctgaaattacacgaacctgcaacccaaaagccaacctgagcacctaatgtttcagtttctgggaccgtcttagtagaaagtggtcaaaaattgcattaggacatcaactagacataccacagacatatttgaggcatcgaaatcagaatcggaccaagttgatttttgagcacccggggccttgcgccccgagcacccagcgcccaggttgacaatctattaatctaggcgccttccaagtgtctgattagagatttgacttttgctttgaatccgtcttcatcaaaaacgaggaaataggtccttccggagaaaaaataacaattcctgagcttaaagaacagagcccagcgctcaagttgacaatttgccaacatgggccacaaaaatggagttttttaagaattcttcgagcttcatctttgtctttagaaaatattgagattcaattattttcggggacctaacgaaatttccaaagaggcaaaattgggacccagcgcccaagttgacacttggggctgggcccaacgccaaggttgacattttgtcaacctgggctatttccaattcagttcagcaaaaagtgctctcggcattgttaccgtcataaaaaaataatgaatattcaagtaaactcagggagaaaaccacaaacccgagtccctggaaatagggcccattgttcaagttaacaatcaacttgagacgctgccgtcaattactcaaatgtcaaatccaatgcgaccattgaatctggcatggtcaaaaacaagggaagagacctcgtccttaagtttaaaagacttgaaagtatcaaaaatagaatcctaaaagctcagtttaaagggcccaacgcctaggtcaacaaatggcctggtttattgggttttgcttatttgaatatgatgatgtttcgaccatctatctagattttcataagtacaatgatccatgaagttagaacaatcaaattcacaacttcaattttttgacaaattgactcattcggaaatcaaaagtttcgagtcttttgtttccgcaaaacagtaacatcccgagaattagtgactagcttcgc

SEQ ID NO: 204180 - DNA, 717 bp, Cannabis indica
aaaacacataagatagttttcaaattgattgaccccaacaatatatcagaaacaataggatcttaaactgatggaaggtgtactaatgattcattacaataaaatgtgaaaggggccactcagaggctacctcacacttgagttttggggaaggaagagggggtttaattccccgatgtatcagaaaagaaaaaaaatggaaaaggaatgtacatagggatatggttcaaaagaaatatatataacagaagatgagagaaaaaacttcagatatcaaattttttataatggaagacaaacattctgtttattcaaacatgaggggaaaaaaattcctgcagatatcttattgacattgccttatcattgtattgaatgatatcaaacaagaatgcaacataccatcaatggacaggctccattcttaaataatgatagtgccttggtacgttcagtctgtgctttgtttccatgtatagaaacagccttccaacccctattaacaaaatcttacataccattagagactaacaagatcatttaccaacatattgtaccaatttcggaattattgacttggccaaatgcatcaaacttatgtagtaaatataaagagcttaccctttttgcagcatatgttcaacccgggttgcttctagtttgtacaagacaaataccaacactctgttgctgataaattcagaaagaaagaaaaaa

SEQ ID NO: 204181 - DNA, 1319 bp, Cannabis indica
cccatatgttttaatcacacttttttttttataactatgtatgcttgttcagaacatgaaaaggaccctctaaggatcccaacaagaagaaatatgctactggctttgaggtggctggtggaaggcagccgtgccggagactcgttggtgttcttctactccggccacggctcaaggcagcaagacaaggaccacgacgaggctgacggagtcgacgaaaccttgtgccccaccgattacgaaactgccggaaaaattgtggatgatgagattaatgccaccattgttagaccactcccttatggtgcaactcttcatgctattattgatgcttgttatagtggaacagtccttgatcttcccttcgtttgtaggatgaacaggtataattactatataaatatattttaatgaatttaaaatggaatttacttaaattattaaaaaatatgtgtgatgatctatcactaaatataatttttgttttgtatgaatttcttagttaaaaatgtaattgaacatatttttcatattttgacctctttattttatatcccggccttagatatactttttatccttgcttggcccttaggcttgtttatattttaatttaattaataaagtaataccaatattttaactaattcaccgcttctaaattttgattttgataattattatatatacatttgttcggtccggatgtgtattccaattgttaaataatggcctaagttataccaatttttttttatgagttaaccaaaaataattttattttaaattcaattgaaatgtgtccatttttatgactccattaccgattatatacactcacatgctacataagttagaattgagtggagggtattgttagaagatagggacataattggtagagttgttgaagaaaaaaagtagaaatgaaaaatatagaaagagggggtaaaattaaacacaacaacttaaaagaagtatgccatctaatttcctcttaaataattgtaaagtgaattaaacaccattgaggtccaataataatgtataaagactaaagttggcatatatgcaatttgactcctagctaagtctgtttggcatgttgttattattcttttaattttcattaatattctttactcgaccctagtatgtatacataaaggatcgttaaatatatatatgatttgttatttgctaaactaggtgattatagttatgtaattataataatgaattgattaataataagcagagatggattctacaagtgggaagatcagagagaaaccaatcaatatacaaaggaacaaggg

SEQ ID NO: 204182 - DNA, 538 bp, Cannabis indica
aaaactaataaatatgggaacatggtctcaaattaattaatatatatttatttataccttcaaaataaataattgataaaagagaaattactcctaataattaatcaaatagtaataagatcacctcgtaatatgcaaaatgccctagagatttaagaataatttggactttaaatgctactctacaatctccaatgtaaaatctattcaataacataaactaataaaatgtcaaccaaattgtactcttttcataaacattggccacttcaaaaaaattaatatcttgaaatcattattttttctctatttaatttgcaacaacaatgatgtgtattagaaggtaaacataaaaataaaaaacttcattgacttgacatatagatttgggttttatttttaaaaataaaaataaaatataaatgtaaattgcaactctcaaaaagattagactacccaatgtatagtataaattttatagctaatttatttaaaaatggcttgatgatgtatttaactcaaattttacaattttact

SEQ ID NO: 204183 - DNA, 1659 bp, Cannabis indica
ttacccacaaaagaaatatagacttttgagaaattctatggtgcacttttttagaaaagtgtactgatgtatttattatgtttttggaatccaaatagttatttttttaatgacagagtacatatttaggacattcaacaaaattttaaaagatttaaaataatttaatatactgaaaataaagttcaaaatgtctattgcatttgcactcgtattttttagtttattttatatgcatataaaataaattgtgtaattaaactctactttttgtattataaatttatttaaatttcttgagtctttgtgaaatattttaaatatttacgatgtagatattttttttttgatcaagaaggaaagcttcattaatcaacaactgaacaaatctgtacaaatacaagcaaggggcaaccccccaatcaaaataaactctctacaaattttctctcataccccctcaaacatctaattttaaccacttgcaatctataatatatgattctttttacatcattaacaatggagttgacaaaataagaatgcctattgaaaatacaattgttcctattgttcaaaagactatacattgttgcacccaacacatcgacaagaattctgtgtctagagttagtgatcctaacctgaagccaactttcccaaccggtagtagcagtcggccaagcccgataccgcagccaagcaaaaattccctgcaacactctattcgacagaacacagtcaaaaaataaatggctgtgattctcgacttccatctcacacactggacactccaaagaatctggagcaatattaaagtgagctagtttatctcgcgttagaagatgagaattaaccacttgccagaggatgaacctgtgtttggataaatttagggagctccagacagctttgttgtagggaaactgttgctggactaaccggttgttgtaaagccaattagtcttaaacttattaccaacccctgccttttggacatctcctcttgagaacttatctctcaaatggcaaagcttacgccaataccaactggaatcatgtttgagatcatactcccaaaagttactattcttcaaatagatagaattgaaccacttgacccaaagaaaatctcttttagaagtaatagcccaaatatacttagctagaatagcatgattccaacttgtcccatctttgaacccaagacctccgtaagcttttgagaggtaaactttctcccaagaagccaaatgaatcttacttctattgccattccaaccccaaaaaaaacctctacatatcttctctacttccttagtgacacttcgaggcaaaacaaaaatgctcatccagtaatttcgatgcccaaggagcaccgagtgaatcaattgcacccttcctgcataagaaagatgtctgctagcccaagtgtgtaatctttgcctcattttcttaatgataataccacaatcctctgctttccacttagttggccttagggggactcctaagtattgaagaggaaagtttccttccatcagaccaaaatctctcaaaatactctgctttgtatctcactccaccccaccaaagtaatttgagacttagaagtattgataataggccactcacagcactaaactcctcaagagtatc

SEQ ID NO: 204184 - DNA, 2131 bp, Cannabis indica
tattattattttgccaaaaccccgacattttatgggattagttgcagcttggttgggttgtgtttctattgtgattagttttgtctatgtgatatgattttgagtattttaatcttgtctctacgacataactttaagtgttttagccttatctacatggcatgattttgtttcgttattggttcttctttattcttcaatgactgtcatcaaatcgtttttaatagttgagaatttaagttctttgcgagtgaaggggttgtttgtagtgcagttacgtaccttacacaatagtcgagtactcaagttacgaggttgaatgaacttgctgcaacagtgcgatgaatgaaacaaaatataagtatttttaaaattaattatgatgctgcaatctttttcaattttattttatttttttatcaaactggaattaaacgattaattatttaacttatttttttttaattctattcaacaaattgcaactattatttaagataattgttattaataaaattacattatttattaaaaaaaattgtattatttatttaagggtaaatagcggcataagtgacataattacaatgtttatttttagcgtcatatgtacctaatgtttgtaaaactgtaatttttctttaatttcatccgtacaaaccctgttattttcttaaacaagcaaaaacttaaaatttttggtacttatgccgctatttacttttatttaatgaacatttttactttaacttaggccattttctttcaaagatttttccccaaataaaataaactcccaactgattttcgcgagagaaaattaaaaattttcccgagaaaattgaacaaagcgcgaaacggaattatggttcagtgattccccaaactctaaacaggtaagtcccgagacgatgaggtcgaaccctcccaagtctttgagatcatacaaagatttcccttggatttgtaatggaaggagagcgatccaaaatttcatcggattcgaagaaaatgaatcaggaaaatgggaaagcaataaattgggaagatttccagcaagagcttgcgcgtctatggagtctttcttctgctctcaatgaagctaatgaaaagaaacaaagccttcatctgaagctcgatccccttattcaggtagggattttgtgttgttagcattaaagattgcgttttttattctgatgttacatttgtgtttttctctactgtattgaattgggggaaatttggcaaactaacaacttgaaattgtaaaaattgcaaaataatcatgttgaatttggtagcacagtgtaaattagtgtaaatttatggtctcaaaactacaattttagtcgttttatggtggggaaatagacatagatactcaaagttttaagtttgtaaacgacataaattcaagatttatttgtaaaactgtaatttttcttcggttttgtaagactcttttttgaattgttagaagaacatttagaagtaagtgatactatgtaatgtgtctagacccaatgatctagcaactgattttatatgtgccctatttaagataataattaagaaaaaaattacaattttacaaatataggttacttatgtggctaaaaataaatattaggtttttaacacctacaaacttaaaattttgagtacttgtactgctatttacccttttatggtcaaacattgtaattttttggaaatttaatttacttatgaattttttcataaacattcattgaatagtgaaagtgactgaagattttgtgcccgtttatgttgttgaattgttttgcagtttaatactgaatgatttttgtgtattcttagtggctaagttgagaatatgttctataaacaacaagaagtttaaaagggtcttttttattttggtccttagagccatacctaaacttgttcattgtgaattcaggaattaatcactgtgttttttgtctttggtgtgtttgtttacattatagtatttatagttgttgccttgtggaattaaggaaagaagtaattgaactttatatgtagaatttgaatataggagttgtttttgttccattaggatgcatctagttcaccctccaaactcgtagatcaaaatatc

SEQ ID NO: 204185 - DNA, 806 bp, Cannabis indica
gaaaaaaaacataacaaaaacttgaaatgagtggacacaaagcttcaacttgagtttagagcattatatataaccataataacctatacaaagaatataaatagtttaattttttaatggaagaatacaaataattttgataattatattagaatattaatataaacataaatgaaaaaatgtcatacaaagaatataaatagtttttctttttaatataaacattaatgatgataagagttatatataaaggaatataaatagtttttcttgttataaatttttatttttaagtaataataaaaactaaaatcataatagtaataataaaaaaatagagaactaataaaacatgaaagaaaattcatgtgtgatgcccacatcatcctcttgaaggtttagatgcaaagatatatttttagatagaactagggaatagatccgcgcttcgcgcggttttgaataatttttttaaaattatacattaaaaaaagttaatttattaaatacgaataaaattttaagtttaataatttatgaatttaatataaaattattataatatatatatttatatataaaaaaaattatatgtaattagcaaaaatattaattataatacaacaaaaatatggatgtgtctggcatgaagttattgatgataattaaaagttatcaaaaatattaattctttttaaataagtttaaaattaataatggcatgatttttatataatttaaaaatatcatttatttatttaattataacaaacttaattaatttgttaataataacatatattttt

SEQ ID NO: 204186 - DNA, 536 bp, Cannabis indica
ccgaaccccgaactcaatgtcggatcccgacctactttctctcaccttagtttctcattccttacttaaataaaaaacataaaataaaaataaatttataaaatacacttttgtaaattatgaagcaaagtgtagattggatgtacttttactacgtgtaaaattaactaattcaatttatactctttcttacaaatattttaaagcattccgtatgaaagtgcaatattttaaaagtgtgtatttagtcactagcactatttagtattttgaaatattagttatgaaagtgcaatattttagaattttaggtgtaatattttaattagattgaatatatttacggtaaaaaaatttgggtataaaagtgtaatattttgaaatattgagtatatttactaaacaaaaaatatttgatataaaactataactttttgaaaatattaagtattttagtctcaatttactacaactaaaataatatgattatgtttttttttacaaataccgataattaaagggtgcacttaaaatat

SEQ ID NO: 204187 - DNA, 2064 bp, Cannabis indica
tttttcccatagcacaactatatcaaactggcccttagtcatataatgagtttttaatcataataaataggtgtatataattatatgcaaacctaaaataatattagtgataatgttgcttatgtataacaaccacaatccaattctacaccaatgtcgattctaaatttgaaagaaaacaataataacaatatttaaatactacatggtgatggagttcaccaaggtcattctccatagaaaagaagaacaaaaaagaaatatgtaaaacaagtgtttggaaagtaaagtctttcctcttccttgtaacctgtgcaatttagattctttgtttatggatggatattggatcaatgacttcttctaccgatgcagcaaattaggactaaaaagtcaaattatggggacccttttgttgtttaatcaatgccttttgttttggtctctccttccaaaatggaaaggaaaaaaaaaagaagcatttaaataaaagagaaagaaagttgcatgactaatttactcaactacattacatatttcacaaaacttggaggaaaagggatatgtgaacaaaccaataactaattaagaataatgcctaaaattctaatttagtaaaaaacagaaaaatggcaaaaacaaaataagaataatgtagatatatcatatacattctaacactgtctatattttgagcattattattagacactagtggtgtctggcacttacttttagtagcgtcttacgattagttaatcatactctttaaaagttattatatgaaattatagagcattgttattgggcacaacacctttcatatgtggtactctacaattagttagcgatatttcttaagttatatgggatttattacttaattacaccaataacagtataacactaaagagtgtgctaggcactagtagtacattttaacaattttactaaattatctaaaacttaatacttaattataccaattattattagtacattttaacctttctcatctaattaagggtagcaatgccactagagttcaagtttattttggtttacacaaaacaaaaagaaaaaagtatatctttaaagttgaaaagaaaagatactgagttgactgagcatataacaacttagggcatgtagggcccaaaaagcttgaccaccacttaattaccctatatacacatataaacctagttataggaccttacaagaaaaacatatttataggaagcttcctagttaagagtattacttgtgcctttaactaaaagaaaaaaaaatgaacactcaatttctttctatgacaatagatattgtacttatagcaagagtcctactaattttttttaactaaatttaataataaaatattaaaaatgacataaaaataaatataaaaataatatatttattgtgatataaattttacatgttatattgtgatcaaatttaaatcaacctttactatataacaaatttatataaccttttgacacaccattggaacaaattttttacaatcaatcaattaccaatttgcatctccattaaatatactcttattgaacaaatattatgcgtattcagcgtaatggtgattacaatagtatagaaaaagcattacaatattttcaaaatcaaacaaaataatgaaattgtaatagtgattccctttccaattagattaaatactagtttaaaacctgtgttttacgaaaaattatgatcaaactagttacatatttttgcttttatccatgctagaaattaatttcaaattaattatatcagaaaaagaattacctacttctttgcaacattcaaaaagaagctttggaaaaaggaggaaagaacctttaaaacgtgcaatcacaaggaataaaactctttaacacacaactaacttgtctgactctgccatgctttaatgcaacataaaaaccgaccttaagacattaattaaagctcaatcccacaaccacaaccaaactttatagaagaaaagaattaagcatgacccacctctgtaattgaagaaaatattaacacaaa

SEQ ID NO: 204188 - DNA, 1003 bp, Cannabis indica
ttgtcagtacatttttgtgctggcgaaagttagtattacgctggtaaaataaaattacttgtgatgtgttggcaaaaaagagggttgacaaataaattttggtattagaacttttgccaacataaaatgaaaagcactggtaaaaatgactttttccagtgcgtaaatgcgctggtaaaagttagattttagccactgcaaatgtatgctggtaaaactttgacctctttgccagtgcagtatgcgaaatgcgctggtaaaagtactctgctagtataagtgacattttttgtagtgattattttgatgcatagggtggagtaatacaatatatataatataaatgatacttaatgttagagtaagcttgaatgtattagatatgtagaattatatagcgttatttgattcaaataaatagaagcaataaaggtactaggggtataccaagtcatataagaagctaacatggaaatagtgaagttagtggcttagttagcaatgtggaaagccaaggcttggtatacgtgggagctatggagggttatgctcccattagtcaacaacaaataatacttatatcattaaggttcaataggaacctttcatacgtgtaggagtgcatggaaccatctagaagtaagaaattcaaaattctcaacaatcaacaaagtagagattaagtgatagaaatgtttgttcagttttttaaggaaatcaattaattacctaaactatgttatcaaagttgtaaggtgaatgtaatagctttaatcttatattcttttaaatccagcatcttttcaaatttagatttgaatttataaacatgtgtttgtggaaaaacaattacacgtggccaaccaagctagttagagtagagttttgttgagtttgaaacaatttaaaaatataagatgaaatcatggagagaataaatgagggaggttaggattttgaaaggtcaaagggtgaggttcagttgaactttggcctataaata

SEQ ID NO: 204189 - DNA, 1047 bp, Cannabis indica
ttatacttttttaaaaaaattatggaaagatgaaaacaaatgaagtttttaacttgtgattagtattttggttatagggtgatgctggtataatttttgacaccagaacaataggaagaatggaaacccttattttgggagctctcaaatggaggatgcgttcggtcactcccttttcttttatttcccatttcatatctcttttcaaactccaagacccaccactaacccaagctctcaaggctagagctgtccatattatcttcaaagctcaaaaaggtcggacacccagaaccaaatgttgatgaaattccataacacattaacccatataataatatttacaatataccaatttttcttttcttattgcagatattaacttcttggtttacaacccatcaatagtctctgcatcggctctactctctgcctcccacgagcttttccctctgcaatttccatgctttcaaaatgcactttccaactgttcatatttaaacaaagtaaatacgattcttgtacttttccttatttaattattattgttattattatagtaatttatttaacgcaaatgtgtgttgactggagtgggattttagaaaaaagtgtgatattgcttgtgagaatctctaaagtgttttttttttaatttactattgtttcactgtttctaggacaacttgctccactgttacaatgctttacaagccgtggtgttagaggagtacgagtcagtgtccgaggcagtttcaagcacggtcacgccggtcaacgtgcttgaccagattttttcaagctcagaaagtggaaaatccaatactgtgaccactcttcgattagagagggacattaagagaaggaaaatcagtcactattgccataatcaaacggttcatgtttctcagattcgccagttctgatgatgattagactatatatactgatttcacagctactgctattatcttttgaagctatcctaagcttttaaagctcgagctgccaccaatgtatcccaaaaaaaagaaaaagaaaaaaatg

SEQ ID NO: 204190 - DNA, 818 bp, Cannabis indica
gggaagatgagaatataattttttgtttgttttttagggaccactcacgatatataatgagaaatgctaaagggctcactagtacctagcaccctcctacgtgtcaatatcgctatggtgcaattaagtatcaaatcccatatagtttaatataataacttttatagagtatcgttaaccaatcgtaaggcgacacgcttagaaggtgctaggtactacgggtgcccaataacaatcctcatatataatcccataactaagttataattttaagtatttctaattttacctttaataaattaaaatattttttaaagtatttacacatttagcccattataatttaatatctaataatctacaatgattactttattttgactcaaactttaaataatagtacactaaaatatatatcaaagattttaatccaagagtcctatattttaaagggcacactttgatagtatcataagctcactaattattttatttttgtaaggattgattgggaaatgaaaaagtttatgaggcaaaaatacaaggaataaaaaggacaaaatatgaccgttggggcctagctggttgtgtagtgtgtatcttcgctattctccagtcgatggaatggaactggactgtcctttgtctcttttgtcaggacgttccagacaaaatgttgtgggtccactcttgcttccctcctagacacactcacatctcccaaacaaaaaatcatacggattacaatcatttattgtgtatctagtataattaaaattcaatgaacatgtcatcataacatatgaaagtaggtagtg

SEQ ID NO: 204191 - DNA, 1147 bp, Cannabis indica
tataaccaacttgaagacaaattataacacgaataaatacaaaaaacactacaaaaaatcttactttttgtcacaacaaaatttataactaaagataaaaataaaagttgtggctaatgataaattatcattattgtgttgtgactaataaaaggtccgtggctattagtcacaaaaataattacaatttgctgtgacgaaatgtgcttttagtcacaatatttattgtgactaaaactaaattagcgacaatttctaactaaatactatgttttagtcacaagtaactttttgttgtgacttttagtcacaaaaaatttatgttatgactaaaagattgtcactaaaagtaacagttttttgtagtgaaatgtaatcggtctttttataatacctctagatcgggttatattaagttttattttgacaaaaaaattagctcaacttactattttatactattttaaaaaatataaggtctaatttatcatttaacaaaactaataatctaatcagtaagttttctaaaacagatggtctaaaatagtatttatgcacatttgcttaatttatttattttttaaaaaaatattatattattgttattacaattttcaattatcatatatgaagtttaaataaataaacaatgctatatatatataataaaataatatgttattatttaattaagaataaaaaagttattagtagtatttatatatcatctgaaatctttatcaaagtctgcgtgcatattacaattataatattattatttacgattttgaaagtgaaaaatgatttataataattatagatatatttatatatatcatgaatcatatatgtttacttattaaatctctatcaattacagaatataattgaagaagaaagcttgaacaatttcaacatgccattatattgtccaagtgaaagggaagtgagaaatgtgattgaagaagaaggctcattctttctacataagttgaatgtttttgagactacttgggatgcaggtttcactactcatcaaaatataataataattacaataataatctaattgagagaggaaaatatgtttctgattacatgagagcagctacggagtctattttggtgaaacaatttggagaaacta

SEQ ID NO: 204192 - DNA, 545 bp, Cannabis indica
aaaaccagataaaagtaagtaatttatatttgtacacaagctcatcttcttgatataataaactacacacattaacatttgtcttatagtaataatgcacaatatatatatatatagctacgaattaatattattaatctcatcttgataatgatacacagcctgttattttttgtcttattctgacaatattcttcttcaattcaaaatttggaaaccttcaaatcacatatgtacacattatatatatatatatcttatatgtaattattattattattattctatcttatatgtaattaaataaatgcatgcatgcgtggaagtgataagaatgaatattagagctacaaatattatactaaaagtgccataaaaattacaaataaaacaacttaaacttaatatttagccttataaattataacctactaaccaaagaatcagtattaaccaacaaacgccaatattactttcctaaaagagccaaattaaatactctcaaacatcggaaccccaatccccctcgcatgtttatgacgact

SEQ ID NO: 204193 - DNA, 887 bp, Cannabis indica
gttccaaacgagcccttagagtaatgatccacacaccttttcttttgcacatatcgacatacgttttaaaccctaaccatgcatatttttatgtttcccttgccatgactattggcatgcatgaaattcataaaaatggtcgacatgcaattctctttgtcatgctgcattgagtggagactgtaaaatgggtagaaaaatcctaaaccaacaagctcaagatcaacgacgtcacaaccgtcatgaaatagtaaattccgctatcacaaactcgaccatggaaactgctcttcatgtggctgcaggagctaatcaacttgagtttgtggaaatgttgatcaatgatgaagatattgatttgacctatcaagacatacatggcaacactgccttttgttcggctgttatacctggagccataagaattgttcaaaaatttctcactctcccaaacctaagtgattatttcatcaaaactcgtggtagccaaaatatgtctccattattcattgcttcttggtttggacaacttgaagtaacatcactattgtgtcaacacaccaatgctgttgatatagaagctggtgaaaaatttggggtgtatttcaactgcatcaagaatgacatgtttggtacgtacttaagttagaaatacttatttgatataccctatgtttggtgctaatattatgattttttttttttcagagttggccataaaaatgattgaagataatgcagcaattgatatcgcacaccaatatgatacaaacaaagaaacagctttacatgtcttatctcgaaaccagcctttggattttacagttgattgtcgagctaaaagtatctggagtacgttcgttcttatattattactaacatctctt

SEQ ID NO: 204194 - DNA, 1107 bp, Cannabis indica
aaaatacaaaatctaaaataatttttaaaaaattatttctacaattaaagtagtttacacaatttatagtttactcacaatttttttttttgaatgatgtttgaatgtttgaaaaaggaaaccttttatataatagttatttaaagataaataataaattaaaatttttacttaatttatacttttatagctagccataagtaaaaaattaaaatttattcaaataagatttagtgatatttttggtagattgttttgagctaatgatgtgacacttttaaattggttgaaaattaattaatttagtagattttatagacttttaacttgttggatctttccttaaaaaaattgttagaaagctactttcaaaatttggaggcgataggcattaaaaagactcttagttggatcaaagacaagcagtggaataaagtgcagcgggaaacctattgccttcttgctgtccaagccttatattctttggtttttttgtgttctccatttagagtggtgattcaagagtgtaaggagttgcttgattcattaaaatctgttcagattcaatttgttaaacgttctgctaacaaggctgcacattatatggctcgtagctcttattttcattcagttcgtatattcactgaaagaaatgctccggtggatcttttgaatattgtattggttgatgcaactcgctaataaaatgtcaccattattttatctacaaaaaaaaaaaaaaaaaaaattgaaaaagagatattcaaattgaaagtaaataattattacaaaataatataaaaaaattaaaaattgagatagaaatcaacttaaaataaaccaaatttgactttttaatattcaatttgattgttactaattcgtattttacttctagtaaatatcaaaagataatgtttgacatacttttagcggaaaaaagttatataaatgataacttgtaataagttgacctcacaaattctattctcaaaattaaaattatattttaattggggaccaatcattttattattattattattaatataacattgttattacacaccaataatatttaacaccactataaataatagatattaa

SEQ ID NO: 204195 - DNA, 695 bp, Cannabis indica
cattgggagctttgcagtatctcactctcactcggccagatgtagccttcattatcaacaaactcagccaatttatacatgctcctaccacagttcattgggaggcctgcaagaggttgttcaggtatttaaaagggacaatacatgaggacttacatatcaagccgaaccttagactgtgtttgcaagcatactcggatgccgattgggcaagttgccccgatgatcgaaagtatactggtggttatgcaatttttctaggagggaatctaatctcatgggctgcaaagaagcaacctgttgttgctagaagtagcacagagagcgaattcaggtcattagctaatactgctgctgaagtacgatggtggtgctctttactctctgagctgcatgtttctcttccagccccacccattatttgggtggacaatcagggagctgcctccctttccgccaaccctgtttttcatgcccgttcgaagcacatcgaaatagatcttcactttgtgcgcgatcaaatcttagcaaaacaactcgaagtgagatatgtgccatcctttgatcaaactgctgacatccttacgaagcccctcagcaaagacagatttgcttatacaaactcagtgtgtgtatcacaccctttcgtttgaggggggatgataaagtaaattgttttgttagttagcttcttg

SEQ ID NO: 204196 - DNA, 630 bp, Cannabis indica
aaaaattaacaaaaaatgaggaaaattgataagagtaaagaaaatgaaaggaaaatcaacataaaatgctacatcacattatcttgcaaaagcattatataaatatataaatttagttagagataaatggtttgttactttgtaaattattaatgtaaaattctgcatccaaaatgttattttcgtgcataatatatatatgctctaaaactaagtatagtaacgtgtagaaaaaaaaaacaattaacttattagtaaaatatcataagatatctaattccaaaaaaaaaaaaaatcataagatattgtatgcttttaataaaaattaataaatataaataaatggtgtaataagagaagtgacgatgaaataaaaataaaattatataaatagttgaaattatatatgtttatatttattagttagcatattagcataattgatatttatgaaactaaagttagaaggtcaattaattttttttaaagtccactaaaattaaaagaaattagaaaaaaaacataatactaataaatttgataataatgtgatatatgtattgggataatgcttaggtagagtcaacaaaaaatatctatatatacagttattttttttttattatgtgt

SEQ ID NO: 204197 - DNA, 600 bp, Cannabis indica
tttaatttgacaaaaattactccattacttttgaagaacataatttcctttttcaataaaaaagaaaaaagaaagttctatttatttacaccataaacatagaaagaaaacgatagcataaatgaagataaaaataataatgtattgtgggagtggtccctcccatatcaatataaataaaaaagagattgggtatcattttttataatattattggagcgttttttatttgtggagttagagaaataatatttcatttttatttttggaaagtctagtacaccccgctacgagatgatttggtagattctttatttattttagtattcgtgaattttttttattttaatttgtttgtggtcatgtaaattgtagttatttataattatttgtaaatttttgaaattttttatattatggtgcagaaaataaatataaatattttagtatacatgtgattgtttttagatatatgtagaaaataatcccttgactttttatttggtattgtagactatttaaaaaattttataaatctacatgtagtcctaagagtactattctctataactctttatttaaaatagattcttcaaaaaa

SEQ ID NO: 204198 - DNA, 1015 bp, Cannabis indica
gagctttaatgaaattcagcacccgctaaatttctaatatttattcattggtaatgagaattctattcaaattgtacagagggttcatggcttccaagatcattgtttgttatcggtgtccatctgattatgtgcgttgaagacctagcgaagttcgcctctcttttagtggatgcacactcaccgtcatacttctcgcttgattcatgttgctcaattgacagcatatctgagatggtaagtaatgttttctctatgattgacattaattgttctttgccttgtcccaaaattcgctaaaatctgtcaaccatttcacattttcaggttgtagaggaagaagagaatcagtgccgtaaccttactcccctttcccgaccaacaccgtcccctctcggttcttccttatcatcttatactggcaaaaaaggtagaaacctcgtcaaacaagaaaaaacaatatggaaactcaagtggttctcaaaagacaatatgttcaagttcgtattgttgttaaaggcgttacacgaaagaagcacaagctcatcgcctttgccagtaagatacatcccttaaaacccgtcatccttttttcgtataatttgatttcatttccaattcaatttattctttgatttgagattttgctgttttgatttgattttagcttttcttctttggttgagtatagtgtttgtttgggctatttctttagcagtagatcgatcttgtgtaatgtacaaaatttgtacagtgtaaaatcatggcaaattgacttttaagtataatattagcactttatgatattttctcttgtataataataaggaacaactctaagagggaactttttattgggtttttattttttttattttttcacttcaaagcagttttttttacggaaatttacatagcaatccacataacaattaacaaaatagtttaaatcgcaatcaaaattcacatagtaactcacatagaaattacggtaagtttttttaaaaaaatatat

SEQ ID NO: 204199 - DNA, 937 bp, Cannabis indica
atatttttttatatatattaataatgatctaggtatgtattctatataaaataagaccaatctcgagactagggatgcacatagggtgaaaaatttataacaaatactctctcttttatattctcgttaaagattttaattaatcctatttctgtctcatcctcacttattttctatcaaggacggggcaagaaatatcctaatggagcggggacagagcgagaaatttgataatgtaaaaattaagtttattttaaaatttttaatgtaaaattattaaattatttaaaaattaaaatattacatattatttattattcaatatattaattattatataaaaatataacttaaaaaattataaaaataacactaatatactaaaaaaaatataaacatatattataaaatataaaatattaataaaaaagataattaaaaaattaaacgggtctctgtcggggcgaggagtgtcatccccgtccctgctccgtttaacattcgggaacgaaaaatgatccacatctctaccccgttacctatttagacagggtattcttggcccattaggagtgggtccccacaaaaacacagagccctatccctatggagaaaatatacattcctgcttaagaccgagtttgtgttgtaatggatgggatgttcttttttagaatttcagatgtttgaacccccacaccactaatttctcaccttaaaaatgccattttagggtcggaccaaaaaaatatattttcctgtaattttttaaaatactatatatttttttaattaaaaatacaataatttttcttctttaattaacattcacataatctcaggatcggcctaatattgaacttatcctataaattggtaggtcatatctttgactcggttcgcaacatgtgtaaaacatggaatagatgccctcaaa

SEQ ID NO: 204200 - DNA, 1809 bp, Cannabis indica
aatgaaaatgaaaacttgcaaagccaagtataggagggagccaaatttctaccactgtagaatttcagctcaaatccagaattgaacactaggttagtacctagtagcaatgatcataatgttttagcaaaaatgtattgtggtggaagggaaacgttacatcatatcttagattactaaggtctagcattaattggacttggaggatgggagctaaatagagtcattacaatgaagatgattatatatcctcttttcatttacgagtgatttagtcactttcatctgtatcctctatgaatgccatataaacagcaataatccaaacctttttacaatatgaattgtacaacaagcagcaatgaagttttgctgtttgaaccggggtaacttttaacatattcttacaaggaaagaaagaacagaagaaaactctcgttagaatctagatcaaaaagtgaatgataattcattatcaatatagaaaactttgctaccaagggaccaaagaatgcatgaggatgtataaggctacgccaatttcagaaatgttggaaatgtgttagctgtcagctgaacaaaattaacatgtcattatgctttaaataagggagcaaatgttgaagtcaaacagtactcaacttggttgacatacttaagcatggctagatccaatgctacacatacaagcatctttcaaccgaaaaaatataattacatatacaaacaaaactgagaaggaattaatctaattggagaaaaagggtaacctgcttaaatgttattcctccacatttctcaacatcaatgtatgaaaatatctgcaatccaaccaaaataaacgttacccacacacataaacttttacaaaaatcagccataaaaataaataaaacataacttttttaaaatcaaaatgtaaaacggaaaatttacatggaaaagaaaaaaaaacaagacaagttataatacagaaagaaaaaatagtaagtttccagttatctttcaagtagtaatttgtgttattcaatatccatattcaaacttatagacaacaccaactttagacatcttaaactccactatacaccaagattgaataaacaagtaaacacatgacataactcttttgaaacttaaaattagccatgggaaaacacataagcaaatcaaatagatttaaacttacctcctcggataatgtacaagcaccgagtcgtagaaccttcacaaagttatgatagttaacacgaccactgcaaaattatacaataatgagaagaaaaagttcaaaaagctaagtattacttcatatttacaattacaagtatcaagataagattttccagcagacagtaagaactgataaaatgacattttaggataataaagtcttgaaaaaataatttgaccataagttacattaaagaaaaatcacaaaagcaatttgcttttcaaaaacaaaaatgcaggaagtgattagtcatgaaatgaaaacattgtataatgatttagacttcatacgcgaaacagagaagtaataagttgcatgtgaaaagagaaaaactcacaagtttagttttgtattgtcccatgagaaaagggaaaaataatagattgcttactttaactcaaaacaacagaaaacccaggctgcaaacttccacattattatctataacacattaaaatgtacctggggtcaggattcatggcgagaaacttatccagaaaatctacagcttccaaactatttatatgatgtaactggaaagagaaaaaaatgaaaatagtgagagagagagagag

SEQ ID NO: 204201 - DNA, 916 bp, Cannabis indica
agtataaggtaactaattacccttttgttattttaagggtaattggttaccttcttaggataagataaccagttattttatattctttttctcataatataatttttttacacaaattgtatgaaaattataaaatatgtaattttattttaaaaaaaaataaaaaacataaattatagcagtgcaaaaataatttgcgtaagttcacttattttaaattatgattattcaaaaaaaaaatgattagtcccttctaaatgctcataataacacttgtttttaacttagaagttagaaacaaattaagccaaagtccaacacacactcaagctctcaaatttgcaagtttataaaccacattctaccaataataaactagaacaagttggacttttgaatctatgatcctttaatgtaaccttgtgaaaacactgaaaagaatgagtgtgagagaaactcataattcacttctttttcaatgcattctatagattatgataactttggagaaaacaatccctatacccacccaaaaaaaaaaaaactttcccaattaaaccctttgctttttcttttttctttctttttcattttttccttgaaactaactataattcattattgtactttaccaaaaaactataattcattattgtactttactttctttcttccatttcaaatttattagctgttgaattattaacttatattacatgtgtttggcttgttttttttaaaacaatttattgtacattttcttctaaatgtattataccatatattatagagatcaaatttctaatttaattacaaaaatatgtactaatattttatgggtaaatattattttgaaccttgtgttttataaaagttatcgattggatcttctgttttgctaaatgacaaaataaat

SEQ ID NO: 204202 - DNA, 886 bp, Cannabis indica
aaacgcaacccataaagtcaaaagccaatagggtatcggttctgtgctgaaatattaaaaatgatggtagctgatactttgctttcttagctttgggagagaaccaaaagtaattaaatttgcaatcctcgacacagaaatgataaacactaaaactaaaaggcaccaatgcaatggtaacttggaatcctattgctattgttgagtttattcaataattattaataatatcgttagccacttcataataattattattgaatttaagtgcgttaagtgcctaatagcaatcctcctgaaaataataaataaataaagagtttataatgagttttattgatttaatttgttatatttttgacttttttaatttgagtattgttattgagtacgagtggtgtccaacactttttataggtgtcattttatgatagattagcgatatttcttaaaagttattttcttaaattgtatgagacatgatacttaattacattaatagtaatatgacacaaaaaaaaatattagacaccaatagtaccttttaacatttctcttctaatttagggatgatgttattatatttgcatcctatgatagtatattgagtcattgacttgtctagttggtcattgtcaagaaattttaattctaaaaatataatagttgtgcaattacaatattattattttaaaaaaataaggattaaaattggcaatacacgaatcgtacagaaaaaattaaattgtgataaattttgttgtattacataagggcattatagttatcccatcatatatgaaatattttttctcaaatttcgaaatcatatgtgtttgaatttcttacgatcttattcttaagtgaaatagccagaatttatggt

SEQ ID NO: 204203 - DNA, 1273 bp, Cannabis indica
tctagcagttcgaatattcacattatcgtcgtattcaaacatgtggaccaagcacagtaagagaaagtttaaagatcatttatgaaacgaattgaagttcagggagaaattaagagagctaaggaggttctacaatgtctgctgaatatagattatactttaatttgtatgaataaataactacaaagcaagagaatgtgtccaaataattcatagatatgtttctaacaatgaaaacagaagtaatctaatatgaagtttctctgcaaagacatgagaaatcagtgatgataggaagcaaattcaagaaaccgaaaatctgaaatcccaagaatttggtacctcctgctttaacaatatcaacaagatcatcttttagaatgacaaggattgaacgaggaatagcccccacccctaatacatgtgtactttcttggattttgatttcctgataatcgtggcatgttatggaaccttctaaatatttgaaatttgtgccaccacagaatttcgatctctgttgttcaaaaataccagaagtataattagactcaaataagttactattagaagagatgtagcacataagcaaagaataccatgttgcaatatgtaaattctgaagtgagtgctctttgaaattgaagtttcactcaaaatattaggatatttttatctttggcttggaaagatcttataagtgacaatcacaaggataggcctccaatacgcttcacataatagttggcgacagaagaattaaatatgggcactaattgtattttgctttgggtagtggtcctttgtccttggttggttatgtgtttggcatgaggtaatcattttagtttgttcgggtgtagtggtagttttgcatttgtattgttcaatggtaatatatattcggctctttaattttgaggagagataggcaattagtattagtgattttgaatgagcttcgactcaagtggggagtctccaagttctctcaaacaacttggaaagcttgtactcatgctttaatatatgacacagcctactgccatttctaatcagaagtactgttacagttacattgaatattgctgtgaattgtttctaatttatcatttatggagtatgacacacatcatagcaaaattaactggttgagctcgtgatggagatacatacctgcattggacaatatgatggcaactgaacggagtttctagtttctagctaggataaactaggaagctgcacataaacatagatcagcatcaaacag

SEQ ID NO: 204204 - DNA, 622 bp, Cannabis indica
aagggttgtatctagagcaggttcactaccataactagacaactttaagtcaccgttcattggtgtggattgagtgttgacattttgcataccagctttggttaagagatcttggagatattttgtttgtgagagatggattcttgctccagttctagtaacttggattcctagaaagtagtcaaccaatccaagatctttaagagcaaatttggtgcggaggtcagtgacaagataatcaactaaacagtcatcacttctcataatgaggatgtcatcaacatatacaagcacgtagatacagttggtagagttggctttaatgaacaatgagagatctgatttggagaagtgaaatccatattcaagaagagcagtagagaattttgcaaaattaataattaataataaaagataataataataattttttaagtaaaaaatataaataaacgacgaggttgattttacaatgtacttttttgtagagcatactcattttttgtatttctgatattcaaatagttttgaggaattctaccgtaaactttctattataatttttttttacttcaatttccatacctaaaataaacaccaaaatatttttttcaattttttt

SEQ ID NO: 204205 - DNA, 768 bp, Cannabis indica
aaataaataaaagtcattacaaatagatgaggaagtaatttctttcttttatctcttatttaatcaagtttcatcttttctaattttaataaagtaaataaacaaatataagggaataactattactatcttaccattaattctcattacttattagtttatattaaattattatacgggaaagggcattccgaccatgtatacatttattaactttataaaatagaattatttttcatcgttaatcttttggatttgtgttagtttagagtgtttaaggtttattttactgtattttcattgtttaattcattcttgcttaggtttaatattaatttgttattttggtatttttggtaggaaaaactttggaagaaaaataaagtttgaacttcaagtaaattgactatgttctgatcagattttaaaaaaagttaaaatataaaagttttggatctctttctcaactttctaacgcatcttgaatcaggtcatttggagctcgtatgtaaaagtatgtgtgtttgctgagatagatcagagcaggaaaaatacttggacagtagcaatccgcgagtgcatgtgtagacgaattgggccttgtaattgcaaattttaaagttaattagggtttttaaacttaaatttccagccaagtaatcataaggaatgatgagatttaacattagaacagtaaaaacacccataagggatggagatgaaagattgatcaagattaatggatgtttctaccatgattatgaactt

SEQ ID NO: 204206 - DNA, 1905 bp, Cannabis indica
ccaaactcattgctgatttgaatttgtcatttgccttaaaggatttgggacctattcattactttcttggcatatatagggatgctgcagggatgtatctctctcaaagtaaatatgtgactgatttactttgtcggctacagctagatggtgtcaaaagttgtccaaatccaacaagtttaacacaaaaattatctttgaaagatggggaaccgtttcaggacattactttgtataggagcacacttagggctctccaatatcttaccttgacacggtctgatattgccttaataattaataaactaagtcagtttattcatgctcctactgttaatcattgggaagcatgcaagagacttcttagatatctaaaaggcactatctcccacgacttacttctcagaacaacaactaccatggatgtttgtgcttattcggatgtcgattgggccagttgtgttgatgatagaagatcaaccggggttatgtggtttttcttacaggcaacttggtttcatggtctgcaaagaagcagaatgttgttgcacgatcgagtactgaagtgagtttagaagcttagccaacacatctgcagaaatcaaatggctgctcaatttactgtctgaattacacatcaaaccagccaatactccaatcatttgggttgataaccaaggagtagctgctcttgcagccaatccggcctttcatgccagaagtaagcacatcgaaatcgatctccacttcattagagatcaaatcctggccaaagaacttggtgtcagatatgttccagcaatcgatcaagtggcagattcccttactaaaccactttcgacagaaagatttttgtatcttagaggcaaactcaatatggctgccacccctttttcgtttgaggggggatattaactaactgttttgttttagtttactatttttctatttcagttagttagtttcttgtcagttagtttcttaactaactctcttgtatcttgtattgagtggtataaataaagggacttaactcatttcaagagttaagctttcagctaaatttttctctgtcttttactttctctctgagatttctttgcttattggtttctacctttttctgtttagcttgttagcttctacagtgggcatagtgggagtgtctcataaagatacaagattttaataagatgaacataaatacttatgaaataaaatgtttatcatctatgattttctaatatataaatatatatatatataattatagtttattttgttaaaagtctacttcgtttgctaaattatgatgcaaaaatttcacttaaccaaaagtgatccaaatttgcatcacaatatagcatgatgcaaaatttacattacaataaatgttatacttttgtatttatcattatgttatttttaatattttatcattaaattttacatttaattttgcattattattattattatatatatttttttaataaattattaagtgagcattatataacatattaaatacattagagtacaacaataaaagttgatatgaaaatatcacaaattatttttgtacaaaatataacttaacttttacatatctcttattggagatgatcttatatatataaacaacttaaatggattgggtcgggtcaaactatttataaacaaattaataaatagtttggatttagatttaatatttgtgcttgtaatacttaagtctcaacacgatacgaatacgattcacaccaaaaatcactcatacttgttccctctctctctatatatatcatcctcaagcttcttattcatcattcattttcttttttcctaccaaacataaccttaacctttatccatttgttccctctctatatatatctattctat

SEQ ID NO: 204207 - DNA, 920 bp, Cannabis indica
ctcatttccaaactcattgctgatttgaatatgtcatttgcattaaaagatttgggccctattcattactttcttggcattgagatatatagggatgttgcagggatgtatctctctcaaagtaaatatgtgactgatttactttgtcggctacagctagatggtgtcaaaagttgtccaaatccaacaagttcaacacaaaagttatccttgacagatggggaaccattttcggacattactttatataggagcacacttggggctctccaatatctcactttgacacggcctgatgttgcttttatcataaataactaagtcagtttattcatgctcctactgtaactcattgggaagcatgcaagagacttcccagatatctcaaaggcaccatctctcacggcttacttctcagactagcagccaccatggatgtttgtgcttattcggatgccgattgggctagttgcattgatgatcgaagatcaaccgggggttatgtggtcttccttggaggtaacttggtttcatggtcggccaagaagcagaatgttgttgctcgatcgagtacagaaagcgagtttagaagcttggccaacacatctgcagaaattaaattgctgctcaatctactgtccgaactacacatcaaaccagccaatactcatgtcatttgggttgataaccaaggagcagctgctcttgcagctaatccggtttttcatggtagaaataagcacatcgaaattgatcttcacttcattagagatcaaatcctggccaaagaacttgctgtccgatatgttccagcgatcgatcaagtggcaggttcccttactaaaccactctcaactgaaagatttttgtatcatagaggcaaactcaacatggttgccaccccttttcgtttgaggggg

SEQ ID NO: 204208 - DNA, 738 bp, Cannabis indica
aatacccctaaagagtggtactagtagacaaacatatttacctagacatgccttcctcatcaggcactgtttcatctttaatgtctggcatctcatcttcttccaaagctagagcctgcaaaactgcataatgtcgctgcaaagctgcaacaaaaacagtacgtggatactgaaccatcttattttttttctaaaaagaacataagaaaagaaaagaaaagaaaaacacaattggtaatctactatcccataaaagtcagagactatcatagcacactccattccataagggcaaaaattcagctatagaaagtgttcaatattagaaaagagttgtgaaaatggaaatataccagggttagcgaattggcatactgaaaaatctctcaagtctatacgttttattaaagaggcagcctttctgatttgctcatcagttgcacaaggtgcatcaacacttgaatgaagctgcagagtcatagtgtctgtcagaaatgaaattaccagtaattctcaaatacaatcaaacatcttccttgcctcttcattgtctctgatatcatcagaatatgggagatatatcatgtgcatgcctgggggctcaacctgaccgccagccttaactatttcttcctgaatgtaatgaggaataatgtaatgtacaaaaccattcaaataaaaattaaggtatagtatcatcaacgaagcttcaattgatcagttactagtgtttcgaat

SEQ ID NO: 204209 - DNA, 1763 bp, Cannabis indica
acaaaggagaaaaattgtgcttacttacatggaagcaattcaattgaagagagtaatctagcctagcctaacctaagccctagaactccaccaaaaaaaccaaaaagtaatccctattgcccatgatttgtcttcacatggaatccaacccaaaatgctactttctcttaatttgtttgcaaggtatcccacctaaaatcaaaactaaaaccttattagtatttctttaaggatttatttttctcttttaaaaaaaataatagaataaaataaaataaaaatttggtaacataccccacacaacaccatgaaaaaaattgctaaatcctaggtggtggaaaaggtatcaacttcatttggtagggtcctctaattattatttatatatataattaaaaaaaatatttttttttattcaaaagaaaaattgaaaatttggggttgaaaagatagtcttctttgaacttgtgcaggccaagggcaaccatggaaatttaaattaaccaaattggtctccacatggggtgagcaaacaagatcaccaaaccaccaatgacatcaattttcaatgaacacaaagacaaaattataatagtttatttctctctctctcactctctctaacaaaacttatattagtagtagtaataataataatattgacattaaaattaataatataaaaaaaaagaattattgtctttattatatatatatatatgtgtatttgagttagtgagtgattaattattaattatttccgggtttgagggatgtggtgggacaaataggcaacatgtcccttttaagggactttagaggaacttgtctcttaactcaatatttatgcttgcagcctttcccaatatatgccttggataaatcatttcatttaaacaaaaagaaattaaaacattattaacaataattgttgaaacttgaaatatacaacttggttggatatgttaatcaaattcataaaaaaaaaaagaaaaattactcaacttaattagatcataattgttttttttttttttttgtttttggatgattgatgaaagaaacaccaaacatatcctaaacttctcgctcccaccggccggctgatggaaatagactgactaccggaaatattcgtgttacttcgtctgcaatgatttgtacacgaatgcgtgagttataccgagtactcagtaattatagatcacttcaaatattcgttttcgagagggataatccataaggggaaattataacattagatggttaattaatgttgaacaatgtcaaaaggcaatgacacaaaattaattttttttttttgggcctaatcagcaaacttaataagagggtaagacgacggtgtatattaaaatttaaatttagaaagatgttttgatttgaatgtaacaaaagttatttttttttcaaccaaagaccgaaaaataggaaggggaaacataaggcaccttattgatcgcatactctaatatcaagataagtgtaacccgacaatacacaaacaaacaccgattacactccaatcgagtgcaaaatacttctagggttttcattaaggaacgagaaaaccaaaaaaatcattgtcaatatcactatagtctatttggattaaatttgactttttaacgataaatattagaaattaaataaaagataatattacaaaagatgtttgatcacaaaataacattttctcttaatacattttttataatatacttatttttaatatatatatatat

SEQ ID NO: 204210 - DNA, 786 bp, Cannabis indica
aaaaaggctatagcatgtaatttccccttggaactatatcaactctcttttttagaaaaaaaaaaaaaaacataaaaaaataagccatactttcgaaataggtatgcagttttttttttatgccacattgaacatccttaacggaaaaaaagaaattaaataatgaagctttttttattagcattatatggttttctgaaacctatttttaaattggctttgaataatatgaaaggtgatttaaaaagagttctagccaagatactcgcattattcataagtccactatgagtgtcatgaatgtttaaaagacatatccaagattatactactgaaagacccagctagcaaagagaaaaagtttcaagagttgaagaaaaatgaaggccttttaaaagcttatgagatagcagaggttgacaagctcactcaaaaggttttattacctccattaatatttatatgcctttgtctgtaacattcagaagattaataaggttatgactctggagacaatgatgcacagtggtacaaaactttgacagaattgctgatgatgcagcttctcaaattagacactacacaggctgatggggaagccagagcccaggacccagcagcgatttgaggttggtgataatagcagattaagttttgttgagttgtcattaaaaattaaaaatgcttaattttgctctaaaaacttcgaaaattagtgttatttccaattccttcatggttaaagctatgaagtcacactatcccaagtcagatgctcctgatttt

SEQ ID NO: 204211 - DNA, 1016 bp, Cannabis indica
atcatgttttaatactttataatatatataatatttttgggggaattgaaatttggtaatttttgtctttttatctctcctttttgtcattgcaaatgatttaaccaatctctatattcctctccctccacccctctttctctgtccttctgcccctctagcaaacatagtgttaaagaaaaagtatgtgttgaatgatttgattttattatttttttgaaaaaaaaattatctaaaaggagctaactaatactatgatatccaaacaacaatatttttatttgtttaactaaattgtagtagaaaatattgaaaggtacccgtttatatctcactactataaaaaggcctatttttaccggtctttgtcgattattttttaagaccatcacaaataaagttatgcgactgtttaaaatcgttgagaatactttactaatcttgacgattttaaaaagtcatttagaattcctgactgtgcaaaacagtatcacaatttaaaatttaaaaaagagttaaaacggtctcctcgacaattttaaaccattagggatacatgttaaatatataaaaactaaaaaaaaaatcattttgttacttatctctctccctcactctcactcaaacacaaaaaagaaaaaaaaatactatcgacaccggccagcaaactccggcagaccctagccgtcgtcgtgacctctctgaactcccaacattctcacttgaatgttgattcggtgctccattggatgcatggagtatgcattggaatggaccgatattgaactttgaattagatttttgaaacttaccgtaaatatctattcaattcaatatcataagttgatcctagatcacatgatcgaaatcctgatatggttaggctcaatttcaagagtattattcgtgttctttgatttgttagttaagcctaattttagtcagggcaatacatacattttgggaacacggtagtgcgattgagtgggagcgctaacataaatatggaatctatg

SEQ ID NO: 204212 - DNA, 791 bp, Cannabis indica
ataaaaaaaaaaatagtgtaaagatcacaaccttatatccaatctccaataataattttaagttagtgctagctctactagttttatagaaatatgataagggaatttatattaaaatatttttaagaaatataattagatatgtgattatttgtattttggggtgttttataaatgggatgcatccctttaggatagttggaattgggctggtttagtggccatctcttaaagtgatgatcaatctaagtaactagtggtattggagaactaacaagctgtcctatacttccactttggaggcggaaatggaggcattatttaatttatggctctgaagtgggcgcccgaaggaaaggggtggacaaatgttgatgtgttttcggattgccaggtggctgtcatagtcattcataagaggcaaaacccatgttggagcgtaaatacttttttttggctttctagagttgagctcttggtttgacaagtgtaatgtccattatactagtcacagtaatattatatatgtggacaggttagctcagtggatcctagtattctttaattagtgtttaattagaagttatgttccatcaaaaaaagaaaaaagtgtgctatacaacactggtttgaaatctgaattgaagccttcttattatggtatatatatagaataattttatggcatcggtaagtacccttgttatgttctcatagcttagggtcattttcttaaccaatttacataacttttattaatatatacttatatgtactcaataaaaaattta

SEQ ID NO: 204213 - DNA, 898 bp, Cannabis indica
  modified_base (879)..(879): a, c, t, g, unknown or other
caagcagttttgtttgatgagccgaatcctgtgtaatgtttgtgctttttatataatatttccgtttacaaaaaaaaaaaaaaaaagaatataaaaaataaaaaatatgttaaatatgttttttaagatttgaactaactaagtcaaatttaattaagttaagtatcttaagatttattgagaaaagcaatagtcaaagaaaagaaattatgaatattttgtcaaattcaaccgtccccttgttcgagtctactcaaaattttggtaataatcgctttggaggtagtaagaggcaaaattcatgaaacatatatgtatttttaaaattatctataattaaggatattatattataaataggatcaaaataaaaaatatgtaaataataaatttttatatgttacttttattaataataataataatatacagtgtttacatgtcaattggtatcacaaatttttttattaatatttcttttatcttattgtaaggtttaaaaactttactgttcattctttagttaagtaagatcttaatttagatgaattacatgtttagtgaccggatttccctagttgtttaatttttgaggttttatttgttcttgacttatatttatttgtgacttttaatgaaattattttgtttcaaaaaaaagggaaaaattctcaagacatattatatatgtgtaacactaaaaacacgcagcatgcatacttaaggatgagaacgtctgaatttggagtttatataattatgatacaattattattaatgacatgtggcacgtggtgtccaacgcactcacatgtttgagggggttaaattttcaagtgaaatatattattatttatacactttgtatatatgtaactntatctactgcatcgatatg

SEQ ID NO: 204214 - DNA, 927 bp, Cannabis indica
tagtggaaataacagcatcttctacttcaatttcacgaccaacatcatcagaaatatcagtctttgagttaggagcttcacctttatgatcagggctgttgccagtaacaggtgaactactctctaaattttctgcttccctacttagaggactgacattgttttctgatttgggagaacatctgttctcattgatcacttgatatttgtcttgggaagagaatctcatttgtgcagtcacaaagttattttcccagtcctttctagggctgccattaggagaagcgctgtactcaggaagagaaaggatcctccccagggtcttagtattatgtcggtttgataagtctgcaccatctccattgctaagcaactgatcagagagatgtttcttggcctggtcatagatactagacattctttcactgggaaaagcatcactttcctgcttacttatttcagagtctttcattttattaatcttgtcccctctcctcgaaccactagaaggtttagcaattctttcaatatagaaatgatctttagtaggagaatttctcccaacatttcccttcccaactactttttcactatctcccttagactgatgaccggtggaagatctgcttgaaattccagatcctgattgttcttgttgttttcgcatagcctgctttaaattttcttttaatttcagaaaggaaaaagtgggatccaactctatcacttggttctttacttccaaacaatatcatgatactcttgggattttccgaggctactttcatctttggaacttcttaaacctgttagttggcccaggctttaaaatgacaattttactcaaaatgtcagggtgttcattttcctccaactggtttctttcctgagacttggtcctcctcctgaaaaaggaccgatgtttat

SEQ ID NO: 204215 - DNA, 1147 bp, Cannabis indica
gttttatgagtatatatattattaatattaattaattttataactgtcaaaacttttagtattctattattaattttgtgtattttttgtaaggtaaaagatttactgttatgtgctactaaaatatatatatttatatatttggtatgctaatgtaatgtgtatttataacttttaatattatcattaatttttgtgtaattttgtgaggtaaaaaatttactcacgtgataaaaaaaaaaggctaattagtaatttttcccctgaactttgacatgtaccaaatcatgctccctgaacttttttggtctttaaaaattccccctaaactattgagattgttagatttaaggacttttgtctaattttagtaaaaaaattctaacatagatgaaagttcaaggggcatgatttagtacatatcgaagtttgagggggatggatttggtaaatatcaaagtctggggagcataatttagtacataaacaatcactaaaacagtaaaaattgaaatgaaattagacaaaagtccttaaatttaacaatctcaatagttcggagggaattttttacgggccaaaaaagttcagaggacacaattcgatacatatcaaagttcaagaaaaaattactaattaacctaaaaaaaaatattaactttttatatgctaatataacatgtacttacattaaaataaaaataaaagacaattaataaaataacaaaactaaaagatgagtaaatcatatttgaaacaataagctttgttttggacttttgtcttttagtgtgatcatgatattttgtcactataagaggattagaaagaatatttcaattctcacacaaattggttgtcctaaatgaacccaagaacttttcatgaattacaattgattttatttttaatacgatagtatgattttttttttattatttttatgataacatagtgtttttcttatcactaagattgaaattggtgaatttcttttttatgatatatcttatggttgtttgaacacaaaataatatttagtacctcttaaaatttcactttttttttctttagtcttatttttcctcccattcttaatttgttcttttatttcttcatgattaaagtcttagtgtaatataatttg

SEQ ID NO: 204216 - DNA, 1103 bp, Cannabis indica
aaacaaaaacaaacaaaagaggtcaatgaaataggatctattagcactctactacaaagtagcctaagtaagcaaatcaatgaattacaatgaaaacactaaatgtaagttattgttggggaaaaacagttgcccccaactattgttggaaatcaaaaggacaataaaatataagacaaaacaatgtcaattagaagagaattagatgggcttaagtcattttgtattgtcaacgaaatcaaataataataaaatagaatagttaaattctgctccctttgaggtatgataaaacaaattctgttttaataagttaagaatagatgttttttaaacattttaaatataattacttgatggattaatcaactacaagaaagaacttaatcaaccatgacagttgcattcttactcttggtcaacaacaaaacatagacagaagctctataagatttttaagttatgaacagaagtcgaatgaagacattcagttaatttgtactttatgaacaggacgagagaatcaataccaaagtcaataactagtggttaagttcagttgagagaaaaacacaaaacttatgaaccaaaataagagcaaaaatctatatgtcaagtaatataaacatgttgtatttagctaagatgaaacatattatatatcccttgttcttttgagatttagctaagataaaagttcttacaattttgtgtgatgaaatcaattaccaaattacaaaagctattttgaagtaaatcaaagaacaataatcaaatcaacatacattacaactaacttcactatgatttattcgtagcacagcatcaaaactaccatagttttatcaattttgttacttataaatttggtaattttatgtccagtcttaaaccttgaaattattcaaaaccaaaatataaaaacagaaaagtccaaaccaaatattgtcaataaagtacaacaatcactaccaaaaataaataataaacagaatatttaaactaacaaccaaatcaaaaaatttataaccatagtatttttagcaaagtcaagccataacagtcctgaccattccattatttttctttccttcattattatt

SEQ ID NO: 204217 - DNA, 651 bp, Cannabis indica
taaaacaaaactaacaaattacacaagtaaacatgggtacgaagattatcaaaagaaaaaaaagtgaaattatttgggtatgaactacaaaaattaaatacatcaaaaaattgaaaagaaaaaaatagagaaagaagaatttaccgtatgtaaagaagatttattcagcccttgaaagttttggggtcatttgtttggaggtggaatataaaattttataacttcatggaaattataaaaaattataaatttcattgcgataatggaaatgaaaggaagagatgtgaatatttttcgatgaagatatgaggacgattgagatttgatattcataattaatttagatcgctgagaaattatagagttaggaaaaagaaatagctctgaaatgaaagatatcattttactcgcaagagaaaagaaaaggggaaagaaaaaatatacagtagtttcgaaaagcggcggaagagaaaatacacaatagggtactcaatactctcgagcttataaattattattgtgataatgtgtaattacaaatttatctgtttcataacgcatgttctaaggttataaaagtaaattgacgaaaaatatttaaaacgaaatatttcgatataaatttctaaatatatatagttataatattaa

SEQ ID NO: 204218 - DNA, 887 bp, Cannabis indica
cttaatgatatggtccatccaactcgacccttgtatattagtagccactgtttctttggtcctaatgctaggttctgcaaggtgttcaacaagtgccattcccagcatctctatcttactatctaaagttatcttgccagacactctgcatgggtatttttctctcgttgaattcattccactttgtattacttaaactcttacagcaattccttgataaccgatacgtaagcgaccatcttttctccccgggtttgatattcccctgacacctggttgatcaccagttgcgaatcactgtaccttgctggcccctacggccttggaaagttttaatccttctattagagcttcgtacttggcctcgttattggaagctgaaaacatgatccgtagggtagcctggagtcttaacccgtcaggtgagatcattgctattctggctcctaatccgttttcattcgacgctctgtcaacatacactttccacgtaggtacatcctaagctggcatactggcatcaactgctgctgcaaaccaagggcacaataaacgcatgaggctttattgtaccaactaccataaacatggccaccttaaagaaaaatgttttttcttgattagatttccaccaggttatggtgataagaagaaacttaaaaattaaccatctgccaatcaagtctcagcctccactgatccactttcagtcttggctaacctgaacaaataggaagatattcatactcttatttccctgttaagtcaaaaacttcagcgaacacctttgaattcagatgcatgagcattaagattcataaatcaggtagcataaagtttttaaacacattattttcacacaatgtcctctttgttcctgattttca

SEQ ID NO: 204219 - DNA, 908 bp, Cannabis indica
ttgtttgctctttcagaaacacggtattcagactgcttctgggttcgagtggtccttggcgaaagctctcttgagagaggagggaagataccttcctaacaggtcctgccaaacttgggcttggcccaagttatcttctctgggcccagtagtgggctttggatgctgacctggagtccatgtgtcccttaccaaaaatgcgaataacatttacccccaaactttcagaatgttccgtattgtggaagcttgccacaatccatatgagtagacacgtggaggttttaaagtaatattcttattaaatttcaaatgctaattgattgtggaagatgaactttcatcttcagctttgggaagtaaacatggcagtcatataaaggtggaggagtgcctaaattgaagagttactttctaggaaagcttttattttgacggttacttattattggcacgaaaattaaaaaaaaataattttcatcattgatttgtacctcgattccaaggagcattaaatgcttgacaagcctggctactggcctttggagcctttggatatgtttgtgcttttgtagagacgatcttggacagttcattttccttcacatggataaccaaccaagggtataaatacccttaaaagataccatttaccaattttttcccattttagactttcattcgctcgaattcaaattttcttgagagggaaataggtgaaattttttagcagtgaatgaacccaaccttcaatgatgttcttcgaattgctttttgcctgagaaattgtcttcttctaaactgtccacccccagtgattgagcatttttagaggagtgaattggcacatatagactttaattttgaaatcagctcattgattaccctagcaaactgtttttgtgaaa

SEQ ID NO: 204220 - DNA, 827 bp, Cannabis indica
caaactcaaaactttggatatttataactatttaccctatatataattatggcctaaataaataaatttataacaaagtaaaggtgtgatttttaataccgagaaagacattagtcctctttcctcaaccatttcttttttccttttaaaatattgaatataatagaatgtaatatatcaatggatcgaatatgtggaatcaagaaaggtgagattggggtaaaggtaagacacaataaatgaagaaaaacatatgaaaagtgtagacgtagctggttttggggagacaaccagaaagaaaaaaatcaaaacttaaatgaacacagcaagattttaatttttatatgagagagtgtgagagaaaagttatatttatgcacttccaagttatttaatgtattatatgatttagaaaaagaaatcccactaccttattcagtaacattaatctgtactactggacttgtaagacaaaaaaagctccacccaattgcacaattgtcagtagcaaatttggacaggtgtttggctggtctatcacgactttatttccccctgaattctttgttttccaaaaagaagaaaaaaaaagtagtatacaaacacatcataataattttcatcaaaaaaaaaaaatacataataataatttacttacttctaatacaaaatattaatttactaattatttttaacttcagagtgagtaactaaatgctcccattaattagcctattaagttttcttctcttcctctcatttaagagattttgaacaagatgaaatagcaaagggatgttgtagatttttttttctttaaaaaaagt

SEQ ID NO: 204221 - DNA, 755 bp, Cannabis indica
ctattctatttgagtatttgtaatttatttgtggttaattaaggtagcctttggtaagttttcagtttttaaaattgaaaaattaaaaatattttttaaaaatatgttttatataatctttttatttttttaattaagaattaaaattttgaaaaaaaaagtaattaatatttttttaaataatttttttttcttaattaatattttaaattataacccgtactcaaatttccacccatgaccctagcgttgaacccggcctgtgatccaaacctgaatctgacttcggatctagacttgatataaataaaattaaaaaaataaaatgaaaattaatatttttaaaattgaaaaacagaagtagttacagaatgcattaaacgacacttaaatttattttaaaatagtttttttctgaataatttagtaattaaataacatgtggcacaataaatagttgcgaaatgtctcttagttggcacttttactaacaaaaaggagttgcatgcaataaaatcctaataaaaggagttttaccatcaatttttttttatcgaaatcatacgtataataattataagagaagtactaccgtcaacctcatgttattataaatattaaaagaattttaacgcaaatatccctttatttgatggagtttgagtgagaaagataacggatttcaccaaacaagtgctaaatttgctgagaatagcataagtaaaacgggtaaaaaacttgactcggttacaagg

SEQ ID NO: 204222 - DNA, 1482 bp, Cannabis indica
tacaccaagacttgaacattttatcttaacaacaacacaccaagccctcacacttttatttactactacacctttacaatacaattatataactcacactttggaacactttgtttacactctaactcttttgaacacactttgaaacactttttgttggatgcacaacttgagaatccaagatcgctatttatgcaatattctagaaatttctacctaattatgttactaaaataatcttgaagttttcacaagactcaaccatttttaattacttttattataatgggcttggcatctctagaaatttttagagagttggtgatgattcttcaataccccctcatcaccaacttgtttcttttttgcgtcaagtttaattgttctcttatcttttgaaatcttttagtgttgaacactttagtgaatacatctgctacctggtcttcgcttttacttggtgcagtttttgctcttctcgaagtactatttttcttagaaaatgatagtgtgcctccacatgcttcgttcgtgcatgaaacactgggtttttagctagacaaattgtagattgattatcacaatgaagtagcactgcatagtttgtaaactggtgtatatccttcatcagttgcgtcaaccatgtactctcttgaactgccattgctgctgctctatattctggtttcgtggttgataaagacattgtcggttgccttttgctacaccaagacactactccatatccaagcttgaatacatacccagtatttgattgtcgagtatcatgatctccaacataatctgcatcgcagtatccaacaatcttgcacttatcacctttcttataaaggagaccaaagtcaactgtatcttgaacataccttagtattcatcgtactgcttccaaatacggcttctttggttgttgcatatattggctcactactccaattacataaaaaatatttggtcaagtcaatgtaaggtagactagactacatgtaagttttcgatacattgctttgtcttgcaagtccttcccagcatgagcacatatcttggtattagcttccataggtattgagatgggcttgcactcaagcattccaaatctttgcaacaaatctttagcatacttttgctgacagagaaataagcctttcttagttcgatcaacttctaatccaatgaagtttttcaattctccaagatcctttgtttgaaagcgtattaataggttctcttttgtttattaaatttttagaacatcgtctctagtgataatgagatcatcggcatataccagaacaatcgcgatctttgcttcccttactttgacgaataagcttgaatctacatgcaccatgaaacatccactttctactaagaactcaacaatcttgccatacaatgctcatggagcttgctttaatccatagagtgcctttttcagttggcaaacatagttgggtgtgctat

SEQ ID NO: 204223 - DNA, 1310 bp, Cannabis indica
atacctttaggaaaaatggtatgaacataacaataacattgcttcattacttcccagttcccacatacctaatgaagtgtggaataaagtgtcatcattccctaaatccttgttgtaaactaggaagttcaatatgtaatgtgcaccaatatgatataaataatgtcactaccctcattattatatcagtactcagtactcacccatgtattcaaatagcatacatattttattaagcaaaaagttcatccaaaatggtgtcttcattgattcaaaaaatgaaaagtgtcaaactattcatctctattttcttcaatcaggtaatgaaaatactacttaacagatccccttatctcaatgccttttgaattaataacaaaaactctctgaattaataacaaaaggggaagatctcaaaacgttacctactacagctatgctctaagtgataattatttgaaaagtgaaaaaaaaccagtaaagaataaaaaagaggcacagaaattaaaagaagtcttacacaagcaattaacataaaagactaaaataaagaaaaagactaaaataacactaaataaatatctaacaccctccctcaaactcacgatgttgttgcaagaagcatgagagtttgcctgaaagaacaaaaatgagaaatagtatccaacatagtaaaaaagtcagcaagttgcaacgaagaagaaacataaggaaaaataatggtgcccaactttagatgatgacgagtaaaatagcaatcaatcttaatatgcttggtgcgttcatgaaaaactgagttgtgagcaatctgaatggcactttgctaatcacaatacataagagtaggacaagagtgaataacacccatatctacatcacatttggctgtttgttcactttatcaagctgagttcccttctgctcaacatcacctttggcttcttccaaagccttcatcaattcattggtagtggaactagttttgaaagccgctgactttgctcaggaataggaaaaagaaacaatgaaaccaagttaagagatttggatggcgtataatctgcgcaaaagtttcaaagataacatctataaacttaccctggcagcttcaattccttcaggatgccccgactagaagttcaacttgtaaggtttcagcaccagccaactgctcgttcacctcgaccattatgcggcctttttatcgttcccaatcatatcaagtgaatgcaagtgtcttgttgtaatttgttgatcaccactaccctattaatatatgccatggcctattgacattattttcccactat

SEQ ID NO: 204224 - DNA, 1057 bp, Cannabis indica
ccctttgtaaattatggttttcatggttatacctaaaacaaacttggaattcataagtgagaaacaacatggtgcatttttcttttctggctagaattaataccaaaaaggcaaaaagtattctcaaatgtatatatattaatatatgatggtgtgtcatacatataatacgatatataatgtgagtagtgtggagcaatacccataagccataacatttttcatatttattaatcttttcttatataaaaaaatcatacataattattgagaaatgttaaaaaggcaggatcatatcactactgttgaaattaagtattaaatggtccaattaattgtaataatatttaggatatattactaaccaataatagggtgtcacctttaaagtattgaacactgctgtaaaagacattgtgtctaatagaaatgctcatatttaatttaattgattaaattaaggtttatttgtaccgcatgtccttaaactatatatgttttggcaagttagttcctaaacattattttttggcaaactgattccaaactatataagttttgacaagttggttctcaaattttatcttttgacaaattggcccacaaacttttattttcttagaaacataaaatcctcactctttaataattgtactttatttatttatttatctatttattttaaatagttttatattaatatattattaaattaaataaatatttatttttatttatatgtatttttcttttcaaatataccaaaataaaaagaagaaaagaataattgaaaaaatttaaataataatattattttctataaactattgaagtaaattatgttttaaattttatttttaacttatgttctacggagaataatgatattttaccatgcaaaatttaaataattaataaatatgcaaataattaaaaaaaaaatattatttataatcgggtccgggttggtacacattatttgtacttgtgaacccacctcacaaaacacattaatttaaatacacattatccaagtttggtttcaattttttgaacc

SEQ ID NO: 204225 - DNA, 896 bp, Cannabis indica
taaaataatttccaacatgtccctgcttgatcctgtaagttctcagggtcaacaattacacactaagatttctcaattaaaacctgataggaattacctacttgggtctcaaccactctctttgcctttgacttttattcctttgctaacttgctgaaatccatcatcatctacaactttgctttcttctacaccagcagctttgttatcattgttaaccacccactattgtttcttcagttccttcttcctacaatcatctgttgaatgttctaagcctttacaatgattacacagtacaggcttccatttcgtaattaactgaggcaaaactcattaaagccatgctcatctttgaaaggtattcgtacaggaaagtcttgatgaatagaggcttcgataaccatctcaggattgagatcactcgatctaagatcaactaggtgataatgaattgaatagatattacagtaagtttattgtatctgattcaagttcaatatcggtccctttcgatgcatactccatacatctaacacaagtttacttaaataaagccctggaaaggacatagcatttattcaaggtgcaagtaaactacattgtagattatcctatcagtttaaccatgtgtactgataaatcacaggaatacttgcactaacataaaactattagtactttttaattaatcctaaattcagtctgtgcttttcaaatgtagttacagtcaaaattttggtgaatcgatcagctaagttgtcttcagcatccactttctccaccattacatcccctcttgccacataatccatgattatatgatattccctctctatgtgtttgcttatcttgtggcttcgaggctcaactctgttggctataactccagtgtt

SEQ ID NO: 204226 - DNA, 659 bp, Cannabis indica
attgatagaaagtttcacctatagttcttccttcaagaacaacagcaccttgacggttaagatcttgagacaaagtccttttgtaatgctcactttgtggctcacttacttctttggtaccatcgcgaaagattccatggtcctgaaatattaaagaacaacaacaatataagcatgattagcgtttatgtgtaaccgatcaaacaaataatgaagaatgatgatacactacatactggaagatgggaatagtcatctcctagatctgcttccatgtccaaagttggatcaactcttctgatctgcagacacgaataatcggggattgaaatactgtaatagaaatgtctaaaaaaggagcagaagtttgcattaaaggattacctttcggcgagcttcttgtgccaatatgtcatcttcctttaagaaaatggcgagttcatcatcttctgcagcctctgctgctgcggcaacggcattctttgtactaatgaggtactcggctttaaagtatttagtaaagaagtccttttcactcatctagtttagaaatgagcaagcatttaacgaaataaccgagcaacagacaatatacctattgcctaactaataatggcgaatggaaaatagcaaaataacgaagaaattccttcaacagg

SEQ ID NO: 204227 - DNA, 1187 bp, Cannabis indica
agattacaatctaacgtgagaataaagaatataaaaagtttaaaaatatcttgaactcaacaatgatagattcaataaaccaataacaagattggatttgaacacttacccactaatgaagtccgttgaggatgcttgtgggaaggttggatcgtcaaaacgaagcgaaaatccaggaagatggagacttttgggtgtcgaattgcaaggggaagtgaagagcttccttctcatttttctcaaagaaaatttgaacagagatagagagagagtgaaatggcagtggaagtgaaaattcattcaaaggaactttatataggttctgatgtgcagtccccccagaaacttaatgggtggttacactacttagaaattttccatgcagaagatcaagggttctttaatcggaacgtgtgcagcaaaaaaattcacaatgattggcaagaaaacatttttttgtcatgaagtgggtcatatgagaggcatggtacctagccagccataagctgcctgattaagatttcaacagtcagagctggagttggaaagtccttatccgtacaaacgtcagcacagtgacttgaagggaaaatgttatcccattattgcccacatgacgtggtatgtccacataggcaggattgatgccacgtggatagatagcatgtcaacaaatgagcagagtcaccatgcacaacttataaattggcaaagagtccaaatgctcatgtaggatgaggttacaatgaaatggccaaccatgaaggtctggctacaccacccctggtcggccaaagaatggcatgtgctagccagccctagacaaagggtaagtcggccagcacctataaaaattgctagaaagaagcaagttcaattggtgtacctgcagccttcactttggacgaaccacaactctttttagctacgaaaccacttcatcaacccacgaaaatagggattcaaccccaaatatctaactattctttatgagcaatgaattaggtattttttgtatatttaaatatacgataaaagatgagtattgatatctcccccttttagggatattaacctattttaaatctagatcttttgtaagctctaacatatataaaaagtattaggctagaccaaaaacctaagttctaatttctaatcttgaaaccctagctctctctctctct

SEQ ID NO: 204228 - DNA, 1529 bp, Cannabis indica
  modified_base (33)..(33): a, c, t, g, unknown or other
  modified_base (35)..(35): a, c, t, g, unknown or other
agttagttagttagttagttagtagtagagtananatattttcctatactaatataagttaacttaaattaagtaaaataattttaatccaagtaaaattttccaaccaaattaaaagcttttgcattttaatccagaaacaaaagacaagttttttgatattgcttgttgtgactttctgcaagacaaaaggtgatgtaggctacttttgcttatatgagaaaaaaaaaaatagaaacgaaaagaaaaaacgagtaacatcttgatgtatgtatggtgataaatagacccacgagggccacgacgacacattcttatggttgaagttcagagttgaattttcgaagttcaaaagtaaacttttatttttttagatagtaccactattattataaagttatttacaacaacaataaaaacaaaatagggaatttcctatttttttattttttatatctattaattggtgttagtgagaaatgaatctttctagaaggtacagcatctcatattattattatttattttgagaaagagaatagggaaatggaggtacataaaagcatctctagtaaaattttagaggaggtttaatcatatacatatatgatgtgacaaaatattaaaaaattatattattgaaaaaaaaatattattttaaaaatttacataaatactatattataacattgatactataaaaactcctattgcaactagccctacaagcattttagaaacttaaactgttaaaatttaaaaacttaaactgtaaatttaaaaaaaaattaaaaaaataataaagggagtaatttcctttatgcttttaataaaaaaaattgaagctaaaaagttattgtaattaaaaattacaacacatgttaaaaaaatatttttagagagttatatatattaaaatacttttagaactgttaaaaataatgtaaaaaaaataaaataaaatattatattttaaaataatattttcttattaaaaaaaaagaataaataaaaaaaaaagtggtccgaatcctaagtaataatgaaatgaataaataaataagaagtaatggtggtttgacaatattgtctttccaaagtcaaagaacggcaacgcagtgcgtcatgtatgaatgagacgacgaagaaggtgttgcactgttaagagctttgcctctttttcttttatttgttttctattttttttttatatatttgtagttggaatttgaaatatcaatttcttttattcccaattaatagtatattatattactagtcatacagatacactcatatctcgtagtcaagaaactacgcaccatcatcatcattaccagtaccaaaccatctgcatctttgttattgttcatcaaactctgctcttattccattatcagatcctaatatttatcaggtggatttttttttttaaagattattaattcagactctctgctccctttttttgttgttgagattttgtggatttattcattctttttattttaggtaattagtttttctgt

SEQ ID NO: 204229 - DNA, 556 bp, Cannabis indica
caatttcacaaactgggatgtctttgttcaccattgggcatagaccgcgagctttgattggtgattagtcagaagctacacacgatttttcggagatgaaaagcttgcctctaatcagcctaagccgattcgaagccacacaggcaccagtcacctagcagcattgagaaggagaagccttgagttctttactcttaagcttttagttatttagactcacaaatatcattgctttggttggcttttatgcatattatggtgaaatagaatgatatagtctatttagaatgacactcgtttaatgtactcaagttagttgatttggctaatagagttgtctatttaagataccaaaacttcattttgataagaaaaggatattgagataagattgttagcattttcaataaagatgctaataagtaatgtaaaactaaaatatagttcataatagtgtactgcttgaatctcactagtaaatagaaagttggatctacaatagatttcacttgaatcgcctccatctatcttcttaaggagaagtttggtttcaaat

SEQ ID NO: 204230 - DNA, 921 bp, Cannabis indica
gcatctgattttcaaattagaaaaagatacatataagaattaattaagaatttggatatcatatatactatcaaatcagtgactaataagtttatatgagacatcatcatcacatgcttgctaggcctccacgttctagctaggcttttggattatgtgtactgattagttagataaagccaccataatatgtatataattatacagctattactacattgtgatataggaaaatataatgggggtgggctgaagccatctctaatttttatttattttagttttataaattatattaaattagtgaaaaaaaaaaaacaattagcataaagtaaaaaaaatctccaattcttttataataataatgatataacagtcggctccatcactaaaattgtatgattattacttaaattattaaccacacaattatcgtagtggccatattgcatgcatgtgtcaatttttttttttaaaaaataatatatggttaaattttgaataaatagaaaataggagccaaagttaggggaaaaaaagtagaaaaaaaaagagaaagcaaaaaatatgggtgtaatatgggggtaatgagaacctataataaacagagacaaaatgaaatgatgtttgtttgccaccccaatgtcctaccctccaacttaaagccaaaagagcaaattaaaattttattattattatttattatttaaatttaaaaattgaatattatacaaattaggttgctttagtcgaagcaatacattattcccagggttacgtagcaccgtgacgtcattgtgaagtgagctccacgcaagcatgatctactgaagccctaaccgagatgatactcatctgtagagattctgtacatcgatccttatactgcaaccctatcattcttcttctttttttcttttt

SEQ ID NO: 204231 - DNA, 1282 bp, Cannabis indica
agagagagagagaggcgaaagagaagaaaaagccttagggttttttttgttaaattttatctgataagaagagagagaagcaaaaatgactagagtttttttactcttattaaataatcttttcaatatttttttttctgagattaatttttttaaattgggtttgatatattttttttttatttacttattaattatagctatactttttttttaaaataaaaaataaaattttgatatagtgacgcgctaagtggatggggacacatttatccattcatgtctggcgcgtaactataggccagcatttttcaaattaataaaaataaaaaaaaaaattggatttttattctttagtgatttttcatattttaatgacccacattatatgagagtaacataaatgtttagagtctaattgtacatgtcactaaaaatcactcctaactaatgcgggtcactaaatagtgtgaataaaatgtcaaattatagtaatgaatagtgtcaattttcagaagaaaaaaagttgacgttttaaccgacaggaataccattttttgtatagtgagtgctaactaactacaattttatgtattatattgttaacttgataagagccaatgcaaaaggggcttcaaaagcaaaggtttcatacaatgggctcaccaatcaattcaaaaaggaccatgaaaagcaaaggtttcaaacaatattcaacaaacgggtaatgcacactttgtagaactagaagtcgagatcatgatagacgtacatgtctcaaaagatcatcaatcccaccaacacataagctaagggcgttatcgtcaacaaatgatgatgcatgcaagctaattgctttagaatcaaactacttcaatttcaatgcaaattcaaaacaaacacaagacttgttctaattaatccgattcataagactacccatactctcttttcttatgtttggactatttttttaggctaaattatgctatgttggttattatgtttcaagacattctatttgtagcatgttgtttgggtcaatgagtggtggcctttcttactttactatgtcgaattccacacaactcacccgtatttatgcatttttaagatttatctccatgaatgatattatcctaatttgtttacaattaatcacgtctttaaaaatactagctaatttattttatgctagtttcctaacaaatatttaaatgtacataatcaattagcaaccaaaaaaacttatgttctatttagtatatatatatattttttt

SEQ ID NO: 204232 - DNA, 1089 bp, Cannabis indica
gtttttagaaaaaaaaaaaaacgtaaatcatttgacaaattttcaatataaatagttaggtgttataggcatataaaataattagtagaattccgttaaagagaacaaagtattttatttttattttttgaaagaacaatatttcatttcttatataaatactaataagaaaaatatatttatttataataatgaaggaatatttattatattatatgccacaatttaattaattttagataattttagtttactatatataattaatatatatgttgaatatatgaatcaattaccattaaatgttggaaatgttaaaccgtctccattaggtgcccttgctgtaatggcaatcatcttctcagctctatgaattacaccaaatcaaacaaataaaatttattaataatacaaattaatttcattttttgtagagaaaatatcaacataatagttatatatatatatttatatatatacctcattatattatgttggagaggactttttcctttgtaaaaatgcgttgtttgaagcttataattctgtccccaaaaactactatggttgatccatggactaattttggactgctaattaatttatcaatttatgattagtatttatacatataatacatataaatatattaattaatggaaatgatgaactagagatatgagactacttacaagatgatatcattgttggcttaggaattatattgttgaaagagattagagatagagaaccaaagttgttcatctgtactgtggccatctttttcagtaccaaataattaatactcttttaagattatgattaattataacttgtttgtacttaaacatctttataatccaaagggtatggcctatttatagacataattgattgagtgagtaattattcttaatataataataattagacaatatatattgtgaaagtaggaaatttcctcaattttacgtgtaattattttttaaaaaataaaatgaaaactagctatatgagttgttagtatgcatgcattatgcataatgtactggatcaattcaagagagccatgtgaaattaattaattta

SEQ ID NO: 204233 - DNA, 1175 bp, Cannabis indica
tcgtggcggtgtcagtcggagctaacatctcgggtggccatgtcaacccggccgtgacctttggtgcgtttgttggtggccatatcactctcatgaggagtgtcttgtattggattgctcagttgcttggctctgttgttgcatgcttgcttctcaagttcgcaactggtggattggtaagtcatcaccaagtatatatcatatatgtttaggttcatcttttagaaatgtcactatataacataaaatgtttttttcatattgcaattagaatttaaatttattacatatatctgaaaaaaaaatataagaaaatttccaataatatatatttttttatctaatttacaataataacgttactattattattgacgagccacttcaatcaaatttaatatttttttgacattttttggttttttaatttcttgtatgtttaaaattaattttttagttactaatagtgttggtaagaatacaattagtaacctttttatatcatgtaatttgagatacattttggttacatctaaaatttatttgtatacattttagttattaattatttatttttaagttatattatgatagactaatttaaaaaacatttaggtaaccttaaaaattatttcgaaactaatgagctgtcatgtaatataataatctactatttttatatattgtttattttagatacctttttgttattttgaaagctaaatagtaatcgtataatataatataaatcaattaataaaattataaaatgaatgttaagtaagattaaaaaatcataaaattgtaactaattactatattagtaatgaaatggtttattttttaggaatagggaaaaaaaaatatattttgaaatattcacatttaatagtatatcacaataatatttttttttaggctcatccgaataatgaataacgatggatcaaaaattatttttaaagtttgagagagaaagtattaaccttaaagagaagggaaaaagagagagagaaagaaaagtataaatgagagtattgaaacatacccaaataaataaaaaccttattattatacttgaccaagtcattttttataattagaatcaaaaataaaattgtcaagtgttaaattctcaaaactatatttctattatttattcttttttttttttt

SEQ ID NO: 204234 - DNA, 702 bp, Cannabis indica
caaaaactactatcgttgatccatgggctaattttggctgctaattaatttatcaatttatgattattagtatatgtatataaatatatatattaattataatggaaatgatgaactagctagagagatgagagtacttacaagatgatatcattgttggcttaggaattatattattgaaagagaaaccaaagctgttcatctgtactgtgctcatctttcagtgccaaataattaagattattatgattaattataacttgtttctacttaaacatctttataatccaaagggtatagctatttatagatatagacataattgattgagtgagtaattattcttaatataataataattagacaatgtgaaagtgtgaaattttcttaatgattttttatgtttaatttattttttaaaaaaataaaataaaaaagtagctatgagttgttagtatgcatgcatattatgaataatgtacatgtaatggatcattaattcaagagggccatgtgaaattaattaatttactaattattaattaattaaggaagtcaatatcataaataaaacttccatctcaaacaagcctaacatatagtctgtaaatatgtgatgaagtccatttatataaattttaaagtcaacgatcgatgcaataaattatatattaaaagcacaccaaacacaatatagagaaa

SEQ ID NO: 204235 - DNA, 1598 bp, Cannabis indica
aggaatgggtcgcgacccctgggctttccagttgcacatcaaagtaaagaaaaaagggacgggccacgacatggaaatcaggggctgcgacacaccccttataaaaacactccaactgtcaattcgtcccattcactcatttttttctcaaaaaccatctaattttcttctccttctaacctacgagcagcagccttcaaacccaaaattctactattttttttaccattctaacaccaaatttcttcaccaatccatattctaatcagccacaaacacaacccattcacccatttcatcaaaaatcacccacattacttcaatccatcccaaaaatttcaaaaaaaaatcaaaaacctaaaatctagccttcattgttcatcaatttttgttggatttcttggtggaagaggactacttcaagcattacaaagcctctatcatacaagtaagtgttttctttccactaaagtttggtgattgaagaataattatttatggattgtgtgatattggcataatattgtttctggagaattagatattgaatattgctactggtagaaattataagggatgaattactgcttcaaattaatttgggggaagtgcaaaatataggggaggtgctgcccaaatttttttacaccgaagaagtatattttggctagttaagtggtatggcaactaggaaaaccgacacctgggccccattgcaatatgcaaggatcatcatcacatcaatcctaatccccaagaagaccaacctcagcatataaatagatttgtgaatcaacaggctgcaaaaagatatgaaaaattaaaaaagaggggtatacttcaggagaggggttttgaatttcaagaacaactttttataagggaccgggggtatgaaaccattagaggagaaattgcgagaagacaatggcagaggttatatgctgcagagcacgtgggagaagctaatcataatattgtgtgtgcattctttgctaactacccatacagaggagataataatgaagtctatgttagaggagtacatgtgccggtcactatggatgttattaataactcgtttaaccttgtcacactgggagaatagcaagatgaaagacgattagcactgagaagagaaaccctcactgatgaggccattgcaacaatgttgggtaagagggaaccagatttcatgttgagggaaaccagaaccaaaagcttttctaccggtggcaactcaatccggaggctaaagcttggacatattttgtcaactccaaaattatgccaacgttgcatgcttcatcactatactatgagtgttgtgtcatagtttatgctatcatggccagaatgacattcaacactggatgggtaattttgagaaatataaattgtgtctctaaaatgaagaccaccacgggtacagttcatagtgccctgattacagtattgtgctcgaggcagggtgtgcatatattagaaggagacattcttaaaccacccatttaacccatcctaagacgacattactatgatttccctccagcatcgttgacacccccagaagaagcacggaaacgccaaaagggtga

SEQ ID NO: 204236 - DNA, 758 bp, Cannabis indica
caacaatgtttttaacagaattttctcttcttcagtattcaattgcttactttatatgtatgacttcttgtccaattatataattctgatagtcctttccttttgaaatattctaaattcatcctttcataatgctttttgatttcagaataggttatatatattatatatgcaagacaaacaacaaacacaattctactatatgttacattaaggtgatgtcaggtgtgctatcctagtatattttgagcaacctatcatgagatgatttttgtctagctaaagattttttttgttttagacttttagtttatattggttgatcgaaatatacctatacaaatgattaacactgtactaattgtgattgatttatttcgtaaataagtcattgaacaactcttctactagcactagtcaacagtcgcattaactattttctgctgatgttttattaattgcctacgtcattacttttctgttgtaggtaccaaacttaagtactacttttctgttgtaggcaccaaacttaagtaccatcatataatagaggagtagcaagtgttgtgcaggattatggagttaattatttcagtgttgatggagtctaatccgttatttggattgttttccaaaataagcctcttactatgatactcaaaggtactattaagcgtagttggattggatgttttttttattgttttactctttactctttttagttatttttttccctgttgaattatgtgttttgc

SEQ ID NO: 204237 - DNA, 595 bp, Cannabis indica
aactacaaccaatacctttatacactctcgaaaccaccactcgcccaccttagtttgtggttgcatttgaactagtttaaagtggcccggcctgttttagttctcaatttcatttcttctagagaagtttcgattggttggcctgttatgggtggtgacaaactttaacaatttgctctgttttgcagtatgatgcttttgaaattggttttataactacagatgatttcacaaatgcggatattatggaagccacatatccagcccttaaacaaaggttatataatgattggataagtgacccggcaatcccaattgtcactggcttccttgggaaggtgttcttgctggctagttacttcatatggattcttttacatcactgtaaattattgcaaatgctaatagctcctcctctttgccttgtagggatggaggtcttgtgcagtgactacattgggtagaggtggtagcgatttaacagccacaaccattggcaaagcattagggttgcgagaaattcaggtgtaggccttgtttctacaaacaaaacatagtttaatctatttacttcactgacagctaatgctagttt

SEQ ID NO: 204238 - DNA, 1145 bp, Cannabis indica
ttttatttgagcctttaaaataaatggaccctaggcacaggtctaactcgcctatacccaagatcgtccctagacatcactagtacccatagcaataatccttcaaaaagtccatgtcatgacatgcttcttatattttacctttcaatttctaaagctaattacataacacaaatattaatgtatgaaaagggtcttatgtaagtcgtcattagtaattatagcgcacacacatattatatatataaatttacaagattctcgaaaggcaatagtgtatatatatatatatatacatgttactcttatattattcttggtctagcttagtgaccttttgggccttgctctttttccaatttataggagaagatcataaaagtctaaaatttgaccaaagaaaaacatacagccaataaaatattaatatattttaacttagatactattgtacatatatatacacatagctagagagagtactcatgtgaaaaattacaggtagcaagagcttcatatagttatatgtatataataggtacatattagaagagatttatatatagatataattgagagagatatataatatggaagaaaaaaaggagttattgaaagaagatgatgatgatgatgatgaatatgataaagatggtgttccacttccagggtttcggtttcatccaactgatgaagaacttgttggattttatttaagaagaaaagttgacaaaaaaccacttcgtattgaactcatcaaacagattgatatttacaagtacgacccctgggatcttccaagtaagattatttctttaatttcttctttttttttttttactttatattgtatatttatacatataatattatatatatgcgcatgtctcatccctatatataataatatgcatgcctcatctctctctctctctatatatataatatgcatgtctcatccctatatatatatatcaaagtcttatatatatatgataatcgatatatatatatatgttgggaaattatataattattaatttatatttatcttttctcaactcagataaataaagatgatcaatagaaacctttattagcgtgggacaagtatgatttattagttgttggtattaatttttaac

SEQ ID NO: 204239 - DNA, 1069 bp, Cannabis indica
ttaaaaaaatatatatttctcttatgttataattgattgatagttttgttctatgatagaggatagaaaattacataattggaattttaactattttaattatataattaagtgacaaaatagatcttatattttttaaaattgtacaaataggaccctatgtaatgattttttgtcaaaataaaacttaataataatctgatctagagatgttatgacaaaactggttacattttttcatgttagaaattgtcttaaagttggttatattaaaaaataaaattgttgaagattgtgtacagggttctttttttattattatagaaaatatagggtctattttatcatttaacaaaatagagagttcaattggtaacttttgcaaaatacaaggttcaaaatggtatttaggcttttatttgttttaagtgaagattgttttggtaaattttcactcttttataaaacttttcttcattttagttttgttctatttttttgtgcgaatcacctatatttttctttctttcttttctcctattttcttcattgagaaacaattccaagttttcttcctctactattacaaagtatttattgatcggaatggttggcaataatagaaatgattagtactcatattaatctaatcggatgaggatgaaaggaaaagtataaaatgttgcatatattaatgcaaccaggttattagttcattttagatgtttgagtgaaaatataaaacgatcaagtagacagttgaatgaatgggattcaagtcaaaatggaggcccaacttttttgaaaaggcagttagaaggtataattaatagctgctctttatttggataggcatctataggcatatatataggtaagctaggtgtttttgttgtgagtgatttttaaaaatggatattggtgcaataagaggttgagacttgagagttgagagagttatccacacatatttggttgtcgcgtggtggtggaattgtggcccttgcagcatgcaaacacttttgtaaaatacaagcatgcatgacatcaactttaatttatctcaaaa

SEQ ID NO: 204240 - DNA, 823 bp, Cannabis indica
catataatttatattagcctaagcaatatatataatagagacattatctatgaaaatgggtatatgtagttcagtcatgcatgatgactaaatttaagctcttttattattattattatttaattaattaattgaaaggaaaaaacttaagtttcctattctttactaaacctttagctataaatagagttacaagagagatttttttacattttgggctcatttggtacgccatataaagatcgtattgtattaaatagtaaattacactatatttggatagagcaatgtattgtattaattattacgaccaaaatttttagtacaatgtatgttgtattatttaatacataacaaatggtccgtattagcttgtattataatatttacaaaggattcggggtcaacaccaatttccggatcggacccggactcgaacccaaacccaaactcccgaacccagacccggacccaaacccaaactcctgaacccagacccggacccaaacccaaactcccgaacccagacccggacccaaacacggataaagacccagacacagatccagacccaaactcaaactcaaatctagacccggacttgaacttggtcctatacccacgacctggaccccaaaccccagacctcagaccccaaacttggacattagactcaaaggactcggaggactcggacccagactcgaacctgaaccttggacccaaacccggacctgcgacctggactcgagacctgggactcgaacccgagaccacggaccccgatcctagatctggaccccaaacccggacccaaactcga

SEQ ID NO: 204241 - DNA, 911 bp, Cannabis indica
ggataattcctttattcttgccatttatttgggaagtatcagtggaaatccctccaaccgtgggatttgttggcttaccaaaattaactcctgcattagtggagttcacaccagaggagttcacaccagccgaatcacccattgaagctttaccagaacgcagatatggtgatgccgtgaagttctgatgtcgtcgagggacggccttcatgcctataccataaggtttaacaatcaagtgtggaggagtatcaaagagtcggggacaggatctcttagagtgtcccatctttccacaaataaagcagaaggttggaacgttttcatatgtaaaagttgcataaaaaatattcctatcttgcttgcaaaacttcatgcatcgcttcaaaggaagatcaagagaaagagtgactcgaatccgaaggaattatctccagaccccagtaaaattgtttggatcagattctaggaaagtaccaatgtaattgccagcatctttagcaactttcattgtcataaaccggactgcaaatcatggatttgaatccacatataaagtgtgtttaggctcacagttctgggattatcaccatcatttagacgagagataattaattgcttgcgatcataggtccatggacttcctgtgatcacccgctgtatatccaactcatgataaaattgaagcagaaaacgattttgatccaactgtttggcatacatccccttgctaggtttccagagatcagccataacattttggaagatacaaaaatcagaaatcttacctgtgagcagtcgtccaaccaggcaccatctggtatcaatgaccaaatcatattctgcatcaggttcctcatagaaggtcttgtctgcttcctcttcttctagttgtatatctttccatcgtt

SEQ ID NO: 204242 - DNA, 1288 bp, Cannabis indica
tccctgaacgtggtgttttagatgtctttgagatccataggttctttgccaggatgacaggttgtttcctcaggacgattatcgttatgttgattgttatcagccatttaatataggtagaatgtgttatgaagatggatttttctgagtttttatcaccaagattcttaattaaagcaccaaactgttaacacaggttttcgttaaccaaataaataacctttttttgcaataaatattctatagaaataaatgaaaataaaagacactagatactttacatggttttgtagttgaaatctacacactccacgagtccttattattagggatattttctggatacaaaacacaatctcaatatttgaaataataagattttatctctcaaatttgtcgtcccttttcccatgtatcctgcccctatttataggaatataggttgatagttattctttttgggattgattcatttacaactatttattcacacatgggataatatctaataaccactcaaccatttttattttttaattttacaaacaaaaaacaaaagtgtgttctttaaattttatttttattttcatttgttgattttatttaagtcgggtctaggtccgatgccaggatcggagccaaggtcggggccaagggccaggtgcaaggtctatggctggggccagggtctaaggtctgggattcggattcgaggccagggtcggggttggggctgaaggattgggtccggggtcgaggtctaggtcatggtccggagtccgagttcgaggtgtggggtctggatctgggtttgggtttgggtctagtatccgagattcgggtcaaggtctaggtttaggtctaggtacgagtctgtattctcaagtctaagttggggtcggaggccaaaatattcattaagaaaaaaatttattttaagaaaattttgaatgtgacttttatttatttttaaaatttttaaaattttgattttcaattaaaaaaattaaaaaataaaaataattttataaaatataattttgaaaatatttttacttttttaattttaaaaacaaaaactaattaaaaatgttaccattggtgagtgcaaaaaaatagtcatttaaaatcaatagtgatttgtggttttatgtagttagttgtcgtttcatagaaatattgtcgttttctaaaacctaaacgacgaaaattggaccacgcttacaagaccaactctgtgtgagagaaattgagatggagagtaagggtttagtttagggttttcttc

SEQ ID NO: 204243 - DNA, 1357 bp, Cannabis indica
gaaagaaatggccaactctaacattaaaaccctttgcttggttttcatgatctctcttctttttgcagtttccatggctgaaaaccgactctttggaagtaagtctttaacaattaattagcaacaaaattattgggtcatttttaaaaattactatgtgtcttttcaaaaaaaagaaaattgagcttcttgtagtattaataatatgcattcatttattcattattcttataattattaaattttatttattttattaatgtatgaaggattcgcaagtggacatggaaaggcagtaccagtgctgccattaccatcgaccccagtgtgtaattcagtttatggtgttaaagatggagacacttgttttgcagtgacacaaaagttcaagctcacaaccgattttttcacttccatcaacccaaacctcaactgtgctgccctcttcgttagtcaatggctttgtgttgatggcacactcgtctaatcgatcatcttctcatttgttccaccaaattgggaacaagtttatcataatatcaagttataattaccttatatgaatgaggagagcaagttttgtttcaataatgattggctagccagcctatatatttatatataggccagttctaatcttcctaaatattatgattacttctttgaagcctttaattattttcatggcagtagtaaaagtggacgaataaaacttctttataaaaaaaaaaaaacaaagctctcttttaattttatgttatgatacgagtagtatagtactccaaagcataattaattaactttgccaaaaaaaagcataattaattaagctaatatatggctaggcggtttaaaaattttatggggcttgcggcttctcttaaaattttattaataaatcttttatttaaaaaataaaataaaatttaaatgaatttttaaacaattttttaattaagttccaactaattgaccttcattaagaaaaaaaaaagtatggctattttgtttaaacgcattactattgagcactatttgtgtacgattactaagaaggatgtaagtaagcatcaataatacattttttgacaattctattttattaactagctaattttgttaacaagtatattgttacgacaagacaaatgaaaccttcacaattaatattttactcaaaagatctataataatgggaggggggactttaaccttaagtgatgtattttcaaaagtacaagatttatagttgatcatatttttacaattgtactctaatatatttgatgcgaaaataacttctaaaaagtgacaaaaataatttaatttattgaaattaagaatagaaaaaaaaaaa

SEQ ID NO: 204244 - DNA, 2117 bp, Cannabis indica
gtatacttttttaagggtccattataaaaataccttatattatataataatagtttcaaaattgttgacgctcagaacaaaagactgccaaacatgtgtagccaataatgtatgaacaaatatactgaacaactctcatctcatctcatctttttgagtcttagtgccataataaaaaaaagaaaaaagaaaaaagccaaattcatgtgtatgaatgttcttttctcctgcaccataacttattcatgaaattaggaatttgaatcattagcaattattattgggttataatgtatattaaatagtaataaattatgtgaggtttttatagaaagaatggaaaatggtggagatttatgagtttgtttatatatggaatgatatgtttgtgcttgcccacatgtacagttgtactctactactatttgtctgaaaactagaatgttaagagtattttgaccaaaatatgaggaagttgggaatgctactttaatattaattttcattaataaaagaataaaaataattggcgtactaaaaaattaggaggtgtcgagcaagtgggccaatggcgaggcttaatttagtgggttataggagtgtttattaaaccgtcaatactataacaaattgtgacaataattattacataacacgtgtcgacccgaaaaaaactgtgacaataattattactgttagatttgatcttgtttgatgtttgattattttttttttcaactaatacatctatttaattataacatcttaataatgtaatttgttatcatagataaggctagaaatatctatgtatattctttctttgactaaaaaaaaaagtaaaattcacacttaatgtgagttttaattttttcacttaaatacgccagatttaaatttagctatttttatagtattatttttttatttttaaactatttttggtattttctatgtcatgtatatataaatttaatttttaaaattcatagttaatcttcagataaataaattttagaaaaataaaaatttcatttttttttcctctgtcaaaccctacgtccatcactcctcaacaacttcacctatccactttcgttcactagctccacatacattaacaaataaagtataataaaacaagtctcgattgctttttaattggattttgatattcacattcaataactaatgcagtctaatatttaatatctaaactaatctaattgtaattaaatatctaatttgttataataaaattagattggattggtttcattcaattagatccattccaaacccaacaaaactacacaaaaaagtaatattttttattattatattatttatcccatacaaaataaactaattctataatatagatgagtacattgagtatatgagtagatttttatctattttggtatatatatatatatgagagctttttagtttaattttttttttttttttttatgattgtataaagactacctgtaaattttagaaaattagtagtttataataccaaaaataagaatttatatattttattacaccacaattatttttcttatacacgtagtaagtaactatttaaatcttatttttaacaccggaaaactattcaaatttttttaaaaatttacaaatagtcttaaataactaaaacatatataattattatttaggtcgaaatagacacaaggtcaccaaaagaacttttagagtgtactacacaaatttctaagaatataaaattatataatacaccacatatatgctaaactaatagtgctacgttggaaagagcatcctcaaatttgcagccacattagacttgctctaacaacccaaaaaaaaaaaatctcaatatatacattgagaaatagagtataataaaacaagtcttcacatttgtagattcactaaaatatctagtacagatgagtatgtaccaattatagtaacaacaatccccatgaatatcataaccactaaaacaaccatttcatgattaaatgtcctgtaaatcccagatatcttcaagtagcataaacatggcattacgattgaagctgtcacactcaaaattgctcccaccaatgacattaggg

SEQ ID NO: 204245 - DNA, 766 bp, Cannabis indica
tagtttttagttttttttttttagtttaattttttttaaaaaaaaaaagtagtagatatggagacaatgtgcaattttgcatgatggccctgcctgaaatatatataaatataaatatatatttatattatatatatattcttaaattctttgttcttggtctaaagtgataccaatggatcatgacatatctatggccatatatgggtcgacctaatgcacagtaaaaaatggacccctattctgttgtgaatatataatccaagtaccaccgatttttcttagccatgaatattattagttatatatatacaaatggaccagaaattttatttaggtggagctaaagttaaaagaacaataagttgtgtaaatgtaaatatttatatatataagaaaaaggtgtaaatgcaagataattatattagaggaatgctaaggactctatattatactatctttataaacaatatataactcagtatgtttaagtatagttataattatactttttttattttttatttaataattaaaatgtgtcatctcattttacttattttttttagtactattttatttaatttctttattttttttacttaaattaatatgcaccactatgcatctttcttttaaatttctttttttattaataaatatgtattattttatgttatactaacataaaaatactaactcttcttttttattataattgtaactatttttaaattataatttagaaggtttacacatgtcactt

SEQ ID NO: 204246 - DNA, 621 bp, Cannabis indica
gacatcttagtaaaaaaattctcacatgtttagactaggtattataattaatttgtatccaaaacttaatttttaatattaactaaaaaaaacacgtaaaaacaaaactataaatgagttcttaaaatttattttaagaatttctttaattaggtgtaagagggtttatcgaaaattaataaataattttttttttatataaaaataaatacaatatgattttaatatgtattacatataatttaataagatcagtttttaattagattttgaaagtttctttcaataaccgattcaacttaattaaaatacaactgttcacttccaaatcaatctaattgtaactggatgtctaattttttgtaattgaactggatttgattggttccttgtaattggatagctttagtgtaattagatcataaatccgatcacaatcgttattgaaggttaggaagagaaaattttaatgtcaggacaaaaatatttgattacaattaaactcagtgtatcattatacattattttgcgatatactatatctaaattataatttaactaaataaagagaacgaccaataatttttaaaacactaaattaaattttatatttactctata

SEQ ID NO: 204247 - DNA, 911 bp, Cannabis indica
ctccgccaattctaccgcgaatgcgatatttacgggaccgtagacttcgtcttcggcaacgccgctgtggtcttccaaaactgcaacctctacgcgcgcaagccaaacgagaaccaacgcaacatgttcaccgcccaaggccgtgaagacccaaaccaaaacacggggatttcaatccttaattgtaaactagctgcggctgcagacctggtgcccgtccgatcgaatttcaaaacgtatctgggccgtccgtggaaggagtattcaaggactgttataatgaaatcgtatattgatgagtctgtggagcccgttggttggttggagtggaatggcacgtttgcgttgagtacgttgtattatggagagtatatgaatcgtgggcccggttcgaatacgtcagcaagggtgacgtggccgggttatcgggtcattaatagttcggttgaggctagtaagttcactgttggtgcttttatacaaggacttgagtggctcaactttactaaagtcccttacttttcaacattgggttgataattaaccatatcaagaattatagcacctatagctactactattctattattgttattattattattatgattgatttttaccttagaaattatattatttggttagccaaatattaatctcttaattgctttgtaaatcctagcaaagcatttacaaaagcaaagttgggaatgatccaatatatataggtatgaaattaaagcattatatttatgatgaagttgaatgagtaaataaattgtgctttttatagtagaatatgatgcatacttttgattgaaatatagatatataatatatgtggggtaaatttgagctttatgcttaaataaatccccttatgtcttcttatcaaaaaaaaaaacgaaaat

SEQ ID NO: 204248 - DNA, 567 bp, Cannabis indica
aatctaagaactgttttgaaacccaaacgaatcccctagacacaaatccccaatgtaatgacgatataattagatatgaaaattagcagataattagcagtttattagtaattagattattatttatgattatatgtgctttggtataaaaataagtcctattgtcagaaataggcattagtgaattacggagattttattgaattttcggtgtgacatacatgttatatataaaatttgatattttcatgttttatactcggtaatagtgaaaattcgacgatcaagaccaatagtgtcactctgatatggtttagtatcattgaattagcgagaaaagatttatgaatagttagaatattagagttatgcagggtattcggttatgactattttacccctagatttgaagataacttagaaactaagtgagggcatttttgtaatttatcacttaagcttattttagtaattattcttagcggatttttttttgtaattaagagttataatgttgaatattagttttacaaacaaaaattagaattaataataaaaaaccaaaac

SEQ ID NO: 204249 - DNA, 1279 bp, Cannabis indica
ctcctctccaacctgcaaacattcaaattttagtatctttttaaaaccatttcttccacaagtgttgaaaaaaaaagtacataacaagtgagtacatgctctcgcctgtcttgcaattcttgcatcttcctcaaggcctggctcagtggctctttcgggttgtcttcgaacgactgaacttcgattttcaggttccttagatctctgtagttgcaagcagcctcacgcatggtatctgcttttcgttcgggccactgtgggaaatgcttgaggacagccctttcatccaccaaggaagatagttgctcatcaagccaagttacaaaggcttccacatcagaaatcctcttgtgggctgcagattccacttcccttaccaacaagttgatgaactctgcttgcttttccacctctgatttcacctgtacaagttggtgtctattctctcatgacttgaactcaagatcaaataaatatgtgaacataatttgataagaaaagagtactactcacggctgagatgtaagttgatcggttttcgatttctccaatcatgttacgagtaagtgcaaaggctggaacttttgcagcactacttttgttctcaatgttagcatctcttctcgtcagtgaacggtagagctccataacttctggaacacgccgcactgccttggatccaactagtgatttcgaaggcaaaggtggtggtggaggtggtggccctcctaatgtggctgatgacactttgttctccttcactacttccttgaatagaggtggagaagttgaggaaaccgggcttggttgtggattaggaaccttggcaggttttcccttggtgaattctgattctgggaaatcttgcttttgatgtcttttctccattgctggactctgttgccctgataagctgaccaaaaacgatggtttctgttgggacatatcaatattgttgttgccatccatagaattatgcagcttcttccaaagcatagactttctctcatgattgtgcgctctaagagagcttatttgagctttgagacgagtcacttcttgtctgagctcatcattttcttttgccaatgaaccattgctcaccaaagaatcttcaagttgccttctcaaaagggcgatctctaactcatcgtcttctcgtggcattactctaaacctcagctttacttcctcacaagaatgacaaaagaggctaacagttacattgaaattgcttgcttaatctcctttctttattattgtatatgcattatatgtc

SEQ ID NO: 204250 - DNA, 882 bp, Cannabis indica
ttgatcaatggactgcaccagagctttcattcattaaagtcaacgtggatggagctttgttttctagccatgggtgttatggagtgggattgattgctagaactgctgctggtttagtgctggcggccagaactttgtccaagggaggcgatttgcagcctcatatagtcgaagccattggtatcaaagaggctttgtcatggagtaaagagaatggatggacaaatgttatagttgagtttgattgtttaaaagtcattagtgatttgcaaagccaaaatatatggtctctccgtatggtcatattctttatgattgtatgactttgatttctgattttgttgatgtttcttttaagtttgttaagcggtctgttaataaggttgcgtatgctttagcgtgatcttctctttctgagggtgaccgtcattagtagggtttctttacctcttgtaattgcatccttgattttggatgatttagtttagtaaagattaatcattactcaagaaaaagaataaacaaatctatataatgccaataaaattagataatataatatacgttttaggagtatttaaacttgtgagaagaggtattaggctatgtctacaatcacaaatataatataataatattctcattacaaattgtgcttgtaaactttcatcattctcaataaaatattcatataatttagaggtaaaaattttaattagtattattataattatttattattctaatttcttctcgtactcaaataactagcttatgtaataatatacattttgttaaaagaattaaaagtcatgtaatgttttttttagtcatttgttttttaaaaaaaaaaaaaaaattctatgccacttaatacattat

SEQ ID NO: 204251 - DNA, 861 bp, Cannabis indica
gtatcttaaacattgtaaaattaattacattataaaaactattatatctatttattttactaataagttatatgcaatacctactcatgttttattgtactttatggttaaattttcaatttgatattgaaggtaaggaaaatgttatattacagataaaggtaaggtgtaaaagtatcttaaacaacaagacaatataatattatttgaaacaaagttctgtagtgtaactaatttaattttgtgatatatatatttaagatataatttagtttcttaaaaaaatttaaaaatatatataaaattacttgataatatagacttatttagatactatctaataacatttaaatataaaatagtaatctataaaattaatagtatactaaactttgtctaaatttaaaatttagttatcttttgttaataatttataaaagaaattcaaacgttatttttaattatagtcatcttttctagtgcccaaaaaataaaaacctccaacatcttaaaattactaaaaaataggtcacaatgatatcagcccaaacaagtaatagtgtggctaaaatttatttctaatgttaaggataatatataaatactttttcaaaagaaaaacaaaaaacaaatatatttagagagagaaatgtataaattgaaatgaaaagtgacatacttatatatggtgggacagataatttaacaaaaaaaaatgtaatcgaaaatttcggtataattccattaatttgatctcagttatctatgtaattatatattattatcacatttacatatataattaaaaaatttccttattaaaaaaaaatacatcagttgattttgagtattttagtcttg

SEQ ID NO: 204252 - DNA, 1237 bp, Cannabis indica
tttttttttcaaacaatttgcaaactgtaaaaaaatagaatatgtctaatgttatacaacatatataaaaatcaagtccaataatcaagtagggtccctacctctcccaaatcgttaaactttgtccaaaaactgatcttaagctcttagtcccaagttctaattgtttagtctaatcttagatattactctcacctataccaccaaagggctaaataattatcatcattgcattcttcattcataattgaccccaacgacatataatataattatatttacagtttggagttttaaaacctcacctaagcagtgcacattaataattggcgacggtaaaaattagtgtagtggaaaatgtcatcgaaaatagaagtagtatatatcaaaacggccatctcgacgagtagatcacaccaatgccaaccgttaattattaaaacagtacacgatattaccgaaaatttgccggaaaggagcggagctacaaaaacattaccagaaaaagtagcaagttgggcaaaataacttagtgtagggtgttctcctcgtcgagttgagtctagtggtgaagacggctcgtcaaacggacaccggaggtggctgaaaaatccgttcaaagtttgaaccgccaaactttgacttgcgattctgggctaacgacggtaaaaggagtggcgccgcttaaggggctgaggtctccgacacctgggggtttgaatggtccagcgtgtggggctggacggtggctggagatgggtcgccaaagtcacgccggtgatggagttgtgggttttcttttggtggtttgaagagagagaaaaagagagattgagtgagaaagaggacgatatgggggtctgattgttgtttgcttttgtttttttttttttttttattatatatacatatatattttataataattatttatttattatatatatctttgactcgttcaaaatcgagtctttacaccatgttcttatatacaatgtccacaatattatctcttaaaatggtggttatttttgctcacattcttaaacagtatcggagtggacatggtccacttacctgcaagggatatgactctaatatcatattgagaattatagagtttcattttaaaaccaattagtgataagtatagtaaactcatagttttatatatagctcattactctaccatttattctaattgtacaatattatagcactaaaccaaccattcata

SEQ ID NO: 204253 - DNA, 682 bp, Cannabis indica
aaaaaaaaaaaaactacacattgtttagaaattaatgtggtgttatacttagagactatagataaattactatttgtttgactttgatttgtgccaaaattaatattgcatagtctttgtattagtaattgataactcttgcccaactagttgtaatattttagatgaatgcaatacatattgtcacatttttcatttgttgtcaaaacttaaaattttaaattaagctttttaattatttttaacaaataaaaatattttattaaattttgataattttagttttttttaaaggggcttatttatttttacacttaaaaacaatttttttttgcatttttacggaattctacatagaaactcatactgcaactagcgcagcaacctaaattgcaacaaaaaaccgtatagaaatttctattgcaactagcgctgcaaccactttagaaactcaaaccgtaaatttgaaaaaaaaataaaaaaaaaatagtatatagagtaattctcctttttaaaattacacctctttacttaaaaaatctttacaatttttaactatcatcttctatccggtagacttggtaaaagggccccgacttatttccagaattagagttcgaccgcagctgcccctttttgggggggatccagtacctgcgtcagtcaaattcaatgcattgtt

SEQ ID NO: 204254 - DNA, 569 bp, Cannabis indica
tacttggatggactcgatgtttctacggtattgttctcgatgagattctttttttttttttttttttttgtttgttgtacaagagcttcaaatttatgacataacaactaatgtaatttcacattatacgactttataggcactcaatcaaaataggttatatatattggatcaccatgattcatttattccctatctgaggaggataaacacaacacctacaaaggcttatgcaactcgaactctcctatttttggctaacgacggaacattgaggcctattgccatcgaattaagcttaccacatccagatggtgatgaatttggtgtagttagtaaagtatataccccatccgaagatggtgttgatggcaccatttggcaattggctaaagcttatgcagccgtaaatgattctggctaccatcagctcaatagtcattggtatgaaactatcaaattatgttgattaccacataaattttattgagtttaaaatattttcttatggacttgaatttttgtttgttgtacaggttgaatacacatgctgtgattgagccctttgt

SEQ ID NO: 204255 - DNA, 1230 bp, Cannabis indica
ccattagtacactggaaaaattctcaaaatttataattaaggtcaatatcaaaatttgacctcaattgtttagaactttttcctaaaaaacaatggaaaaaaaatagataaatactaaggggtatcttaacatgccaataatcactgcaaacggccgatattgaaatatagtgggtcataggatattgaaatatatagttggttataagataaaatttttttgagccttagaaaaaaaatatataatcttttttcttgcctgcacgttatatatcattattggtatattttaatataaaatttaacacattttaattttataaattagatagaaactgctaattaattataagacgttaataaataacaatgctaaaaaaataatatattggtcaataattaacacgtgtgtacattcacccataatttttggtgtgatattagtggttggacatatttagatagcgacaggggattcgtatcaccctttcacgaatcacgagccccatactttcaattatgcctcattgcctctctctctacaataattcataattgaattgaacatttttgagtgatgtccactccaaatgcttcttttctttcataattgttctaaagaaataaaaacaaaaaactttttaaatatatggaaattattttatacatcattttttttttaatttacagtttgcgttgcttcggtaattactctgatagttttgatgtgaattgttatgtaaattttagttgtaatttaagttacttcaatagttattactatataaatttctgtaaaaatataaaaaaaatgttttaaaatataaaaataaaataaatcctaaaaaaattaaataattatttatacgaacataaaataatatgaaaacaaaaatttaataaatttttttttttaattaatttggttgttttaatattgacatgtgtttataattttatgggatatataaataaaactttcttaagaaacttagaaaacaaattaaagaaataagttttttttaaaaaaactacattgaaataaataactagaaattataacattagattcatttaaataatacaaagtagatagtataatatgtatatatagatatataatattaattagggatattttgccaacttttgagatattataataagttgtacaaaattaatttttaaatatttttgttgcatgtataagtaatttttttttttttttgt

SEQ ID NO: 204256 - DNA, 1761 bp, Cannabis indica
cagtatgaatgagttcaaggggccgagtagcatgacgagatgacactgtgtatggtagtttgtgacttttccctatttgacaagcaacacaaaattgcaagtcttttaaagtacttgtgtggggaatagtttttaacattctgccaagaacagcagcattgggatggcctaatttttgatgccaaatattgacatcattatttacagtagagacaagagcatagtcagggcaaataggatgataagaagaagaaaactctttattgatgtctgaatgtgaattacattgaggcactgtttgagcagtgacattattacaaatgggaaattcactaggcttattgttacattcagacaaagaggatgtggtggcaagatgacactgcaggatgtttggagaagtcctagattcaccaagcacatacaagccatctttaacaggtcctttcagaagaactgccccagttgacttgtccttgacaaaacaacaattcttgtgaaactcaagaaatatatcattatcatttgtgagttttgacacactaactaggttctttttgatggcagggactttaagaacagagttaagatgaatatcaggagaatgataagaaggtaaaaaggcagaccctatgtgagaaataaagagttgcttaccatctcctacagtgagagttttagacctcgtgtaggtggtggtggactccaaaggttcagaaccagtggagacatgagcatttgcgcctgtatcagcaaaccaaacatggtcatctccaaaatcaggtaatatagcagaggaatatacctgagtttcatggggcatttcgacttcagtaagatgggcacgaggagaaggatttcttggtttggaaggagcccagtgtttatcaaaccggtagtggcaaactggtgccgaatgaccatatttcaggcatatttgacagattaaacgagcctggggtggtatgtagggacgattagtacctctgcccatggttcttgcattaaattcagaggcatttcctcgagcagctggtggggtaaacgggatgactggatcttgagtcaccaagtgcaagatttgcttgcattttaacagagagatcagtcatggcattatggtgctccagacgacattcatgagacataaggagggcttgaacttcttcaatggataaagaatcactacgggaagttatacccgataccacagggtcaaattcaggtccaagaccgtttagaagttgaagaacaatatcttgggagcttagagatgacccagcaatggccaaagagtctgcaagagattggactttgtcaatataatcagaaattgacaaattacctttctgaacatgggagaattgtcctttgagctgcaacagacgcgcacgagattggctagcaaatttctgttcaagtgccctccaaacggcagatgaagtgtgatgatttgccacggacgcaagaagctgatctctctttttccattggagatagagaggattgatttcacctgtaaccaaatgttctgtgggaggtacaccggtaaacaagatatcatcgagttcatgaccaagaaccgtaggaactacttgggatttccacgagagaaaatttgtgcgatcaagtttgatggtgagagatgaagacaaggaactggaaaagggattccaaattgggggagcggaagcaggggttggagctgtgtttcttggattgacaccggcagaaaccgcaggaccggagggattggaagac

SEQ ID NO: 204257 - DNA, 977 bp, Cannabis indica
aaaaaaaaatcatgtatgaaggagaagttatatagaattagagtaatccttcatttttctttatttgtgtttgttatttaacaccgcgtagttagtatctttggtgttagtcacttttttcttcgtctctgctacaaccttgttatatagtggagcttgttaagattctaattagatagatagtcatatagagtatatgtgaaatataaccattattcagtcaagttacatgatacctttgaatgtatgtaatagaaaaagtaatgcatatattatagttataaaagcttctattcatgtactatgactatgagatagaaatatgtgtagttactgcaatatcgtgtcgtttatacaataatatcaaaaggagaactatttatgtttgatgacaagtaattatagtcacaagataatatataaattatatatgatcagtaatgcatcaaatataaatttgtcttaattaaaatagctaaagtgagcaatagcattaggtggtctttaaatctttcattactagagatagtttagtaatggattaaatatagcctatagattaacatagtgcttttggattctgttcgaatgaattaattattagtttagcttgtttgttgaagagatctacaatttgattctcaagggcttttttttactgatcataaataaagtcatttttttttgttccgattttattttttgatttgtgctttttttttttgttatagtgttgtgcgtgtgtgtttttacatgacagcaagtgttgaatggtgataactatgaggtttagaacacttaaacaactaacttaactactttgacaattggcagttatttcagttaaatggacattaacctactgctatataaaaaggcattcaacaacagaaacaaaagagagagaaatcaagtcaaagtaagggtgatacacaaagatgattgagagctaatgtgagatgaattctcttcaagat

SEQ ID NO: 204258 - DNA, 904 bp, Cannabis indica
attttgcctttagcaggtagatcgaagtataccgtgaatggtcatctacaatacttaggaagtacctgtatccttcaattgaaggtatgggatagggtccctaaatatcaatgtgaataagatcaaaaacagtagtagaaaaagtttgattaaatggaaaaggtaattttttttgccttgccatatgacagatgtgacaatgaaatggaatagaagaatttgtggacaaatgtagctatttattgattttattattaatgagtttcgtggggtgacctaggcgattatgccattgatgtttgtctaagagaacattacaggaaatagcaataggaagtatttgttgctgtaagtaatagagattgccttgtcttttagctgtcccaatcttcagggtccgagaaggtccctggatataacattcattagtggtaaacatcattgtattagaagtgttacgtaataaagcactgacagatagtatgttaagattaaaagatggttcatagagaacattggtaagagtgaagtgactgttaatgattactgtacctattctttctattttaactaaagtgccattaggtaaagtaacagttttattagatggattgtgtgtgaaagtgttgaaacatttcttattgcaacagacatgatgggtggcaccactataaacaatccaagatgtaaaggacagaggatcaaagttaccagaaaagttgttgacacctggtgtgtcatgagatgtagaagcatctgtggtgggttgtagctactatgtcaacaaggatatgatctgttggcattgagcttgaatcagttgtgatggattggcatcattggttgtggaaatttgtagagtttgtggtggatttctagggtgagagttgtctagtttgcgatt

SEQ ID NO: 204259 - DNA, 593 bp, Cannabis indica
gttataaagtgatcaactctctcgtctttcatattgatacttgtatatactgtatgggaaaaatatattttaaaattccatcacatgcgaaatctctctctcttttttttttttttttgaattaaagtaatctttattagacagaaacattcgctaatacaatgaactgaagagcaaggagaacatcactgtcagcaaaaagacaacctgaccaataacaagcaccacgtgtcatacaatgcgcggctttgttagcaaaccgtttaacatgactaataaaaatctctttttaatccgctcatttgtgatattttacaagattagagcgcacttttaacacaatccttttgatataatatatttgtttgtttgtgaattgtgatataatatggagatataattatttaaccttacaaaattttaaattagtaatttttgtttttgtgagggtaaattgaagaaggttaactaagataacaaaagtaactacactattacaaaaggtaggaaggtctaattcaaaggacatgctaaaatgcagttggaaaacttctgttaaattaatttcattatagttaatagttcatttcaat

SEQ ID NO: 204260 - DNA, 1810 bp, Cannabis indica
tttattttataaaaagaaatgaattaataaataaaaatactttccatgttgtagaaagttaaaaaattaaaaaagtaacttggcttgttgcagaaaaacagagggaacggaacagaaaagatcttttccaaaaaaaagttgaaattctacaattacatcaatataaaattgaggattgaagctacaacaatttggaaaattacaacatcaaactttaaggtttgtatgttattatatattttaatctcacattgtttgtaataatctatttagattagggttaataatttagggataaattcttttccttgttattgtgtttcaattttttttatttcttaatcttcttattttattatttataaatatttagtttatctgaagaaatagaaacttaaaaagtgagaatttaaaatctaaaaactaaactattttgagaattgaaatttggggccaccacactatgaaattacattttttttggtcaatcaaataagtatatattccacaaaaaaacttacatcctagtaacatccttatcatagacctgctctctattacaaaagatcaaaccatattatatcatgtgtagctactttttttggcaaaatgcttttgatactacttttatatcataattgattcttttaacaattacatatattgtatcaatttttatgttccaaagaacatcattcctacaccaccaaatgtggtatattgtcgccgctaatattgctgaaaatacttggcgctgaaatctattcaattttgctctagccagccacttttgtcgtgttccaatgcatccacggtttaattttagcccaaacatgaacactcatgtggcaattaaagaataagtgctccccaattttcttatttagtccacaagttggacattcgtcatcgtggcatatgttgtacttaaacaatcgtgatttaaatgtcagtctatctaataccaccagccacaacatgaacttgtgctttggtatagacaatctattccatactttcccttgccaatcaacagtgggaaaagaaggaaaatgtttagcatatccatcttttatcaaatacatacctgttgtagtgtttggaaaagcattcagccccatcaacttgctcttcttcactttttccacttacttccagcaccagctgctggagggaggtgcctcataggccctctaatttccttctcctatatacattgtattcacccatttgacccacaaagtatcttggttagactcaccagcccaaacatatttgcctatagctacttcatttcattctttagttctcctaaatcccaatccaccttctttcttagtttttcacaaatcatcccaagctatcaaacttagtccactagagtccacccctttccaaagaaagcttctacaaattgaattaactttttgcagaactttccaagaaagaatcataagttatgacgaataagaatggatagcaattaaaactgaattgcataagacaagtttctcgagctccataccttaatcctttgtaccatcttctcaatcaagacctcactgtctgagactggtaattttttggcacaaatcaggatgccttagtagcgaaatggcagttggcttcttctaaaacatgaggcatctaccaccctttgaaattctttttcatccatataacaacgatatatttcagacttggttacatttggttgtaacccagatgtttgagagaacagctttagtccttggagcatacgatagattgatttaaaattaccatgacataaaagtaatacaccatctgc

SEQ ID NO: 204261 - DNA, 715 bp, Cannabis indica
acatatatatccagctgttgaaaaatgcctttctatactatagcttctttttttttcccttttcttaaagcatcaataattatatatcttcttaacttggtattctttctttcttgacatggaaaaccagaatctcttctctccacagccaaataactctcataataaataaataaataaataaataaaaatatatgtatggaataaaagcacaaggcacatgagatgttcttgaaaagccaagcaacgaaatttagactgttctcttctcttttttttttattattttttattttgaaaaccaaataaacccttttcgccagttgtcctatcattattaattaataattaacaatttttttaacttcatcaaataattattagttgatcaatcaatacaattttttttttgaagggatgatcaatcaataaaattaagagattatatataaatattaggaaaactgttcaattaaaaaaaaactttcatttatttatttaattacttccctacatagcattgaaacttgttattttgtcatgcatgcatgtaatccaaatcatttgaaaataaataaatatggtatgatatttgttcattagtgggccggcgtggctttccaattatcttattatttcaaaattattcttttattattgattttgactgtttcattatcaaatagagcttatatatgtatttcttatattaatt

SEQ ID NO: 204262 - DNA, 940 bp, Cannabis indica
atgttagtcataattttaatgttacatctcataaattagctaaatataccttatggctagaccattaactttattagttgaaagaaactcctccttttatttataatacattttcaaaacatgtatgcaatatggtattcttgaaaaaaaaaataaagtgctttaaaaaaaaagaaaaaaaaataaagatggttagaatcttttatcattattattattattattattatcaaggtaaatactattttagaccttaccaaattgaaccttttgttttgttaaatgataaaatgcaacttgtattttccaaaatggtacaaaacaaatagaacattgagcttaatttttaacaatttttttttttaatttaactactttgaaaatacgaacaaatacaaaaaatgtaaacaattttattataacacctttagattagattattattaaattttattttgacaaaaaacaattcatggtcctatttttatcattttaaaaaatacagagtccattttgtcatttaataaaacagagagttcaatctgtaacttttgcaaaaagtcaaaaattgtatttacccttattatcattttaaaaaataagccagtttttttttttttcttaacaagagctagtcagatttagttcaacttcaacctattaatttgatttagttagtttcattcattcgaaactgcattagaaaaaacaaataaaatgaaaattatagttaatattaagttagattagattagatcaaatcaaatcttgaccatgtggtgtcagtgtttgtgataataccacgtacttcccacggtttcggcgctataacgtttacgctccaaaacccgctttcttaactcttatccaacaataaaacccaaaaccatatatataacccacccaaccaacccaaccatttatattcccactcacattt

SEQ ID NO: 204263 - DNA, 993 bp, Cannabis indica
taaggagaatacaaatcaacagagatggccatggaattaccttccattgagtagtgcctaaagtcaataactcaaacccaaaaccatgattatagatgtgtatgactttggactgttttttacttagagatgaacactagagccataccacaagatttatgtgggcaatgagaagggcatgtaggaagagtagcataacacttggtcataatgttcattacaactaaggtctttacattcatatcatttactaagagtaaaccattacaacaagaactaacccttctcatccctgccataccaaagtttttgaccttgaaccctagtccattctcatccaattctaacaacttagacttgtatttccttttgtgggctggggttgatggtttaaatgttgggatttggatcaagattgaattggatttggtgtgaaagaatgaatcagcaataaatgttgcattagatgtgaattgcttccattctttgtatgagttccttaacttcataattaggtcatgtggaagtttggtcatgatatttggtataatttcctttggaatatactgaaatagttcagttgaatcctctttcttgctcttttccattattaattatcttcaaaaaaaaaatctatggagctgagaatatgaacaaataattttatgtatataaaaacaagaaagaagatttaaacagagtaaaactaaaacatacctagagattgagtgactctctttgaaaagtgaatttgaagtaagaaacgaacaaaaaggaaaataattataatttacgagttgaaattgatgggttgaattcttctaatctaaagtttaaatatgaaattttatatgatgatttttaatttaggtttatgattaggattaggattaggatttttaacctagttttcgctctagataattgatggttgtataaaaaatcctaaatatatatcttaaaatgtacattaaaaaaataatattaattttt

SEQ ID NO: 204264 - DNA, 807 bp, Cannabis indica
ggaataaattttctagattgagtgaacttccattgattagaacagatcgagctaatgagacaattgtcgatgctgaaactatttttgagtaccaaagaatatcactgcaactcttccaaagtgaccaaacaaccatgactttttattttggtttctaacgagacaactgttaacacatgatttttcatcaagatatttaatattttaatttttttgagaaattgaagaaagaacgatattaacacactaagaacaactgaacaagcaatcatggctgtaggaaatagcaatacttagattgcccctactccaacaactcccaaagtcacaaaaaaccaagtcaaaattgacctttccctctcttgtgcggattaagtgagtgcacatcaaaacactgccgtttaaggcaatataaaacatcttttattgctgcaaaccctagcagcacaaactcatttcttcctcttaaccctagcagtcgaagcacccttctcttcttctccttcattcttgcttgaaaccctagcagccacacccttcttctcccacactgaaaagcttcagccgattctcctttcttgctgaaaacttaacagctgaatcattgcttcagctttgattcttcttcttcaatccctacccgaacctacacacatgaaaaaccaatccaaaaccagaaaaaaactaaagaaaaaccagcagaaaattaaaagaagaacacaagaaatgatttcagagttccctctaaattagaggtacgtctccgtcaagtgaccctcgaaggtgcttgagtcttcactatcaaaa

SEQ ID NO: 204265 - DNA, 740 bp, Cannabis indica
agagtaatacaaattattttttttaaaagtttattaatacaagtgcatcaattaaaatactactgtagcaatattttattttataatattgcagtttactgaatttttttaaaaaatgattataaaattaatagagcttaaggaatcaacaaaacaaaataaaagagaagaagaacaagatttttacatggttgaggcattacaaagtcttagtccacgagtcaatattattagcttgaaaagcttttatgtattacacaagaataatattcttactcaagcttaagaaccataatttcagtcttagcttttgaattatgattttacaacccttcgcatgaagatataatctcctatttataggctagggtttatactgttagggttctcgtatgaaactagacccactgaagggttaatacatttaatattgactttgggctgaattaggaaagacctgattcgtaagataacgatcatccacaattgtagggtctatttaatgttgacagttgttgtgcgctgccagattcatacaataaatgtcaaaggatatagcattaagggaatccctaatttagtgggatcctatactagaggcatctacagataagccttcacttctggatatctcttagacagttcttagaggaatatcccacgagggtattgggataggacatattgggccttcttcttatggccgagaacccttcctggacttggacggtctggccttg

SEQ ID NO: 204266 - DNA, 877 bp, Cannabis indica
agctcatcaacagcaatatctaatcacactttgctgcattgattgagttcaacaggagaaataatgtaagatatacagaaagctgtcatgtgcattgcttgaaaatttatgaagaaatatatacaggattttggaagacagaatggaagtttagctgatcacgtgattaaggaaagtgaaaacttacaaataaataatttgacaaaactgcagtcgatttagggagttattcatttatgtactttgaataaggttttccaattctatatatatattcaatccgcatggggaatatttcatagtaactagatgctacaatggtaattgggaagggcactaatgaagagaaaaagatacagggagaaataggctttgaagcgaaagaaacagataaaagagggtagtgtaattgggtttgcagagcaaaatgtaattgacaacaatacgtacaagtatcatcaatgttgaatttcaacaacacataagggactccctttgtttgtgcctgaaatagttgtctcattcaatgttatattttccactaagtaaaacttaagaaaagaaaagctctaacaatcaagcactatataataaacaaatattaaaaacacaagttaccagaaacgacaaattaaggcagagatgcgaaaatccaggtcaattccataacgtgaatgaaaaaggtggagatataacacatttaaggtaccagaaacgaaagtgaaccatcctaccaccattaatatattacccaatatctatctttcttatacatagaaaacaacttcagctgatttagaacaacaaactttgagtcgtcatctgctgccgtgagctctcgcctttgcgtcgagttcttggagagagagagagagag

SEQ ID NO: 204267 - DNA, 2836 bp, Cannabis indica
atcaccatatatatatattaaatcagaaataataagatgaaaagaaaatttaccttttgatcagggtatccttgattcttttttgtatgttgtatctttgaggaactcacactgtagtcttccaatctttcattacacacaaagactagtgtgggctagtgggataaagtgtatacaaagttcttgttgaattctcaacacatgagtagaactattctatagtgatgatggagagaaaagattaatctgattaatcaattttagacttcccaaaaataatacttaccagtttttagttatacggtatatttaaataaaaattgataaatattttatttaattaattatttaaattcaaattatttattaaatcatctttaattatttgaataaatattgtaaccaaattctattatggatatttatttcctataattaattgagggaatttctcaaccatttgagagaatctctaaactaccttaatcttaaccatcagaaatatctataactacattttaaattcaaatttgaataaatatttcttttgagttaattaaccaaaaaataaatccagtggggacaaccctattagtgtgggcgcttatcactgtgctaggacacagtgatactggcgccacctatgtcttaacgagacatcggtgatattttttgtccagacaacttttatcatttccccagtttatttaattaataaaatttaaatataaattatttattacaaaataaataattactattttgacaaattaaaaaagattttttcaaacttccatatacaacttttatccctaccattgacagtgtttcaaggtggcaatccagggaccatagacctataattctaagtttcaatagtctagattatttattgaatctcgtcaatcaaataatcatgtttattaattccatgattactctactataaatatggaattgaaattttagtaattatagaattatatttactgaattttactgtagtgtccattgatataatcaattccagtgattaaccttccttgtataagttcataattagttttggtctcgttttacccttctaattacttctttatcctttagtactgttaattcactagtaaaagtataatttagatccaatctaaatttgagcacaacctttcagttctagaattaacacttgaagagaactaacattcgatcaattaaagaaagccaagatttcgtaattatagatcatgttcctaaccattcatattattagattcccgaaatagaagttgtaagaatcatcttctttgagaatctttaacgagtgaattaaagaaactaataacatgaacatgagttcatgattactcaggattcaggttgatctattattgatcatctttatgatatgaattaggtttttatggtaaataaaatgtttgataaagacaactcaattacatattggtccttgtcatatataatctctattacatacagcatcttcacttagatatcctagtacatcagtgatccaaatcgagattacttgcaccaaataacgggtatcagtaaactgtactagcaaccattgattaaagattctaaaactttaatatgttactgactgttttgttcatggctaagtggtcttaattcttcgtaaaatacaagtcaaagccttaagtatgaataaagaatttttcgatattaatatataaattattcaatataaaatattaataatttaacattcaagcatatatgaaaatgatcagcttatatttataaataaaagtgtctttacaggcttttcagggtataaaccctaacaatatccactttccctaaaactaaattggacatatccctcaactccatattagttatctgacccataaaatattttgctggtaacatctttgtaaatggatctaccaggttatgttccgacgcaatctttaagaccatcatatcaccactttctactatatctcttagtagatatacttcctctcaatgtgcttacctttcttgtggtttcttggtttcttggagtttgtcaccactccattgttgtcatagtagagtactagtggtttttctacttctggaactactttcaaatcagtgtagaacttcttcagccaaacaactttattagctgctttgcaagctgctatatactcagcttccatggttgaatctgtaatattggtttgcttaatgcttctccagactacagcttcaccaccaagagtgaatactgacccagatgtcaactttcgactatctttgtcttattgaaaattagaatcaatatatctagtaggatttaactctcctatgaaatatacaagcatgagatctctcattctctaaagacacttgagaatgtgcttcacaactatccactgttccaaacttggattcgattgttaacgactaacaatccatgcaacatagcatatgccaggccttgtacataacatcacatatattaagctcccaattgttgatgcataagggtactttctcatgtcctccatctcttgaggagtctttggacattgatccttgcatagagaaattccatgtctggatggtaactgtcctttcttagaattctcctttgagaatctttctagcaccttatctatataagttgcttgagaaagtgctaatgttctctgctttctttctctatagattttgataccgagaacatagcttgcttctcccaaatcattcatttggaattgttcggctaaccacttctttatgtctgataaccattctacatttttcccaataagtagaatgacatcaacataaagaa

SEQ ID NO: 204268 - DNA, 1709 bp, Cannabis indica
agatggatgtctcattatccgttatctatgtcatccttgggattatgccttctgacacgaaatggtttctcgtcaatacacaaatcaatagtttctacatccttgtctcactaaaaactgtacagtctgcgagttacaaatataccccattaattttgcatttaatgagttattccatttaatatttattgacataattatcaatatattctttgattcatattccctaaagttgacacgtgtcaccctctgaagtaccagccgaattttgggtataataattgccccttaaaaagtctctttttaataaaaggtactttttaaatgattactgagggtattttttgcacaatccattttcaaaatatgcatgccattgattttggcagttttgtggtttttagggacatcattagcattaatgatctatcttgtccacttctcctctatttctatccattagatcttctatattttaatcttacggttgctaggttcaaagtataaaacagtaaagaatctatttttcaccatttttgtctttttaaaaactcaagcttcctgagaatttgtatccaagcttcctgaaaccgtgcatgccctctttatctttgacattcttcctgcgaatttcctcagatttgcttttggacttcagatgttcaaaaaactcatcacaccattcatcacgtatccctttgcagaattttccaatacccgactactcgacttcatacagtaagtgtctcatccccttcttttttttgtttatttttatgggttatgattatctagcattttgtcactccatttggtttaccaattagggtttatgttttttgagtaatttttaggtttaggcataatttaggtttatcatattctttaagcctctagtttaataaatttcatccaagaattgggatttttcttttttgtagaaatgtcccaatctagttcagaagtttattctccaaaattcttagaaacagaatatcctaaacaattagccctcccattcaaactcaaaaatttccaacctcaatccaaattagaaatgaatgatgccataattagagaccatctgattaagtcaaaccaagaagaaatcgccagtcattataggcggttcctacaagagatttctgagggcaaacatcattttttacgagatgcagcctggcgcgaacccacaatattaacctttattccactcgtgagaccaatatttttacccaaagtcattgttgcttttgaaccaggtgacctagagtttgacattacgtctcctaagcctcgcaaatcaaagaccccacaggatcccaatgtcactttcaaggccgaacttatcgaattcaaggttaggtcgattggggcctacgtaggcggcatcttaaaatcctgcagcatcaagcaaaggaaaggttgtttcataaggtctgtggcacctggggaattcagttgttttcctccagaaagggtaatatgtgaggagtgcagtgggcctagcacgagtaattcctcgggcattggagcctagagccttgagcacatcaaggtcggggcggtccttccccttaaggattattttaaggagtactgtaactacctcgtgattaccccattccagttgaaccacatcaaggtcggggcggtacttgcttgacctaagtccatttttacatatacccttgtaatcaacaaccccg

SEQ ID NO: 204269 - DNA, 717 bp, Cannabis indica
ttttctactaaactatgtggtgatcgacaccctaaaataaaataaataatttttctctagtttatataccatattgtggagctcgtcataagctttaacatagtatataaagcatctaaatcaaacaccagagtgcaaagctttggctaaaatacaaaaatcaacctttcctaataccgtttaaccagaatttcagttggtacaaccctgaatgaactgaaatttcaattgtctaggcagaaaaacacaaaaatttccaatcttccaaccccgataacttggtccaatcaatcccaaatactatcaaaattttgagaatatcaacatgtcacataaggaacctattacatagcttaaacacaaaaattatactacgaatcaaaattttccattgttgaggaagctttgagttcaataactcaaacttactcaactcacaccacaacgactataagactctcaatcaatacttcaacactccaaaatcaatctataaaacaatcctttaacattaaaaacacaaacagaagctatatcaaataattgcatgcttgaacttgaactttaactcccaatacacaaggaaaagaagtaataggccttacctctatttgtaccaccacaatactctgaaatcaagctgaaaatttaaaaattttgtgaagaaaagggcttgctcttgctggttgcttagggctgaagagagagagagagaga

SEQ ID NO: 204270 - DNA, 1036 bp, Cannabis indica
tcaaactcactcctcaaatttacctctattatcactcgaacctctttcgttctatttttaccaatattttccacgacatcgacaaatttatgttcgcctgttaattattattaattaatacaaatgtgattattataaatcaaaatattaattaaaaaataataattaatatttattattattaccgaaaagaaactggtctgaagagcgtgaggtagatttgcatagggaagcattgtaaccttgttttccgagaccatctgagatttgactcaacacacattttcgacaacaattggcggcctttgcttctacgcaactgcaaaaccttgtctcagatgagttgatcactatttgattagcgacttttcttatttctgtttccaatttactacttctcctcaaactatcctgtaaatcaattaataaataaattatattagctaactaattaattataattctcacaaatatttatctaaattagctagtaaaatattattattaataataattataagtatagtatatataccaataacttgtgtttaagactcagccaaaaatcattatcctctgttgttaaaccattattattaataacgttatgatcttgatcaatatcttgttgatttttatcgagatgtgtgaagaacacattctcatcctgctcctcatcatctgaagacggagcaggattatttggtagattagggttacggttcgggttaggattagtaatgctaaaccaagtagaaatatagtatttaggcgctctcacggtagttccaagcatttcagccatagattatataaatatatatatatttttataaatatatattattcccaaattaacctctcccactctctctttcaacttattattaatgctatgattattaattaaactctctatacctttcaccctttttatactaataatttctttgcgtggatataatttaaataatatgggatgaattctaattttatatggattagtatattaattatttgaatttataagtgtaat

SEQ ID NO: 204271 - DNA, 1063 bp, Cannabis indica
taaatattatttttattctctcttctctttcaattatctctctttattccaagatactgtttaacaaacttaataacattaatacatgaaaaaaaaaaagtgtttattttatcactctttattttatctctgcattaaaaaaaatcattaaaaatttgtaaaaaaatagctctttttcttccaattgcaatacatattgttcagcaaacttaatgaaatcaatacaatctgaaatcaatagttttatggcgtaagtgtaagagagtaagagcttcaatcatctagctgttctatgaaatgcaattagaaaaaaaaagcaattttttttacaaagctttaatagtttttttttaatgtaaagataaaataaaaagagataaaaattcaaggtgcatttaattaactgaaattaactgtcctacaaataaaagatgacgaaaaattaggttgttttttttcctcaaaatataagattaattttagttgctagttaatttgttcaataaccaataaaaattttaacttttcctattttggtaatatatgtataacataaggacaaaaccataatcaccaccataaaattattctatacatatatagaagcatacataaccataaccaagaaaatagcttaacactaccaaatcaacaactaacccaaatacccaaagctaaactaactaaagacttgtcctactctttcactcaaaactatttagataaataagcaaataaaatattgtgatataccaccactccataacaacaactatagccacgtatcaaattcctccctttgaaggctttccgttacacttaaaaagcacaatcctttccttctcctttggtcgatctcctctgttgtttaattcttaattagtgttggaccgttttgagcctcttcttgtgtagatgaaacattggatggagtgaggtctcgtacttcatataatcgacccaatccaaatgggcagatgacagagtttgtggtttgtttgttggctctaacattggggcacaaggcctccaacgaaacaatttactgacgagcttgtctgac

SEQ ID NO: 204272 - DNA, 535 bp, Cannabis indica
tcaaaaaaaaaaaaaaaagtgtattattatcaaaatcaatatctcagcaaaataattgattaatgtatatacttcaaccttcttcttcctttaacttttttaatcttgaaatataatttgaataaaatattcccactataaataaatacgaatgatttttttttgttttttagtaatggtgcctatgcccatgccaaaataaattattatttaagttagaattttactttaatttgtattttgtagggttatattatggtagggtattaattataaatgcatagtagatgcaataatgttttgtatagctattccatcccattgatcgcggctcctaattatatagaatttagaaaaatgataaaagataccagtaatgtttagtacttttctacatattaatattattattaatctaattaagtattgagtctcacatagttcaatgtaaatatttttaaagagtatcgctaagtaatcgcaaaacgacacatctagaaagtgttaaacactgtctaatagcaatgctctaaaa

SEQ ID NO: 204273 - DNA, 524 bp, Cannabis indica
ttagagtctaagtttagtttaggttcaatttctaaatttcgtaatgcatttaaattctctaatggtattgaagtccctacaaataggtttaagtggatgtctttttcttaaaaaaaaaatctgatgtaaatgtaaccattatgaattatggaaaaaactttattgattgctacattgctcttaatgatggcccttcttgccacttttcgggtttttatggttctccaattgttactcaagaatttaacatgggaacttttaaagaagcttaaagacacagctccgttgatgccttggttagtcaagggtgatttcaatgaaacaatctcccattctgacaagcttgggggtcccttgaagaatgaatcccaaatttatgcttttttcgaaataccatagacttttgtggctttcaagaacttatttttgatggtgatcaatttacttggcacaatgacaatgttaatggaactaatgccaaggagcgcctggttacattaaatatagttaatcataattaattt

SEQ ID NO: 204274 - DNA, 645 bp, Cannabis indica
aactggttagcaacaatccatggtcttctgttcaatatcttgtccttgtcttctttgacgtcaaaaaagattccccacagccccatctccaaggttttcatgcgccattttcctttcagagtccatataccacccaaaatctgtttaaccctgctctttgggagttgtcgagagccaaatatctttgccaggacccctcctttagccacctctgcactaatctcaaaatctacttctagttcaagagtaacttcgtcgagaaattgttgtcgtagtaactcaacattgtcctccatagctaccatctcttccacgttagactctgtagtaaccatttcctccaccaactgttcttggtcctccaaagagggaatcaagagaagggacggagaagaaagaagaaacttacagggaaaaatctattctcaaagaaaagataagaggaagaaaaatcctcagctcacacacgggagcatttgctagcttgtttcaaccatttaaaataaaatatagggacattaatttaatttccattgaatttgattgctaccttagaatattatatattgggataaatcaacttacaaacaatatttaatcacatatatataataaattgtaatgacatatattcaggtggtttga

SEQ ID NO: 204275 - DNA, 1609 bp, Cannabis indica
aagacatggaataatttaaccaaatcataggcaacgtataattcgaaaagtggttgtgtcgattggggaaagactagttgtccagaaaaagtcctctttgaagggggtcttgtttggcaacccaacaatgatcttactgtcgcctgtgtgagtcctgagataataaaaaccccctatagcattcttcctcgcagagactgccttcaccgagtagatgtattctatttccatgggtgtggggcactcctagtttaaaattttgtactgaaccttcaaacttgcgagcatcctgtatgaaataggaaccaactggaatggggcaatttcgagatagttgaggaagtccttaaagtagtctcgcaaggggataattgctccagccctgatgtgttcgaggctccaagcgcctatccctatcaagccactcatactggccttaccactggtcccctcagatttttcgcaagtaagtcgttctggtggatatcaactaaactcgccaacaactaccgatctaacccgacagtttctcttgtattccataccacaggtctttaagatggtacctacatagtctccaatggctcgaaccttcgactcggttagttcagcctcaaaggtgacattagggtcctgggggtgtttgatttatgtggcttggaggtcatgatttcaaaatccaggtcacctgattcaatagcaatccttggtaaaaataaaggcctagccaaaggaatagatgataaactgaggattcaggccatgcagcatctcgtaagaaacgacatttgcctttagtaatttctagaaagaagcatctgtgattactagcaatatcatcttggtgggtttttacaaagtggcccctaaattttgcatcatttatctctaatttggacaggggttttgaaattctaggtttaaatgggatggcaagctcattgggacactctgtttctaaaatttctggacgataaacttcagaaccaaattgggacattgttacaaaaagaaaacaatcccaattcatggatgaaatttatcaaaccaaaagttggtaaatttgaaaaacccaaaggtctacggtctgcctaaaccctaaaatttacccatacacagttcaaccataaattgctaaaaccagataaaaagataaaggtacaaactaagaaagtagtgatcaaacccagaagtgagaaataaaaagcattcaagaaaatagagagagatgaatcacttactatttgaagttgagttttggcgcaatgaatggctgtacaatcgacgatgcaatgaacatcgtggtgatctttctgaatgcttgaggtcgagaaacaaatttgatgaaactcgcaagaagaatgttaaagatagagttggcatgcaaagcttcgaaaaatctgggtgtggtttttgcagaaaagctcgaaaattttcgagagtttttgaaatggcaaagataatgaaaaggtggttccttttttcgttttataccattaggttgatctccgtcagattaaggagataattgatccaacgggtaaaatttagaaggaagcagaaaatatggttattaaagactgatatgcctcgaaaccacaaaaccgcc

SEQ ID NO: 204276 - DNA, 881 bp, Cannabis indica
tgcctatggtccctctctctctcttcaaactcttaagaaaccctcactttctctccaattttcatgtttagtgtcaaaatatggtatgacgttaattgacaggaaataaataaacaaaaaatgatgcggtgagcgtggatcgaacacgcgaccttcagatcttcagtctgacgctctcccaactgagctatccccgctacattgactttagtaactttatttagttatcacaatttaaaaatttcttaattaggaacttttctaatgtattcaggtactactactactaacaaatttgcaatattctcagctttgagtgtaaaaataaatgaacaaacgaattttgtattaataaacagtataaatattgaatgtatagatacaatttaagcaactaaataatgtcatagcagcattcaagaaaccagtatcacaagtctgactctttcatcttctcaagcaaattgttcatttccattccctcttcttcttcagtcacacaccatcaaaaacactcctttacaaaagttaaaatgcttctgagtctgagactaattatgttaaaacagaatttaactaaagctaacatactaactcctaactaatcctttatcagtggtcttgctaatcatgcctcttctctctcgtctgttaaactgcaactcaacttcccatcctctccaattcgcaatcaaaggtaccacattttgttcgaccaaacacaagttaactttgtatacattgagaaaatatatatctatactaattaaatgttttctggaattcctctctaaggcaataggagatactatgacccaaataaaagataataatgagacattattataagtaaaaaaaaatgacctggaaaagattaatag

SEQ ID NO: 204277 - DNA, 1277 bp, Cannabis indica
ttttcttttacttttctttaaaaaaaataaaaaaaaaaaaaaaaaaaacttaatttttaaacattttcttcgattttaaattttggctaattaagttttttgtcactgaactttgatatttaacaaaccatacccctaaacttttaaagtcgttaaaaatgttcactgaactattgagattgttagatttaaagacttttatccaattttagtaaaaaagtttgatgaaagttcaggggacatgatttagtacatttcaaaattcgagagcatgatttggtagatatcaaattctggggagtatggtttaatacataaacaatcactaaaatagtaaaattgaatgaaattaaacaaaagtccttaaatcgaacaatctcaacaattcaaggagcatttttaacgaccttaaaagttcagagggcattcagagggcacgatttggtacatgtcaaagtttagggagaaaaaattctaattagccttaaattttaatacaataaattaatataataatatttttatttaacttaccaaacaattataataataagctgttaatccaaataaatccatagaaaacaaaatttgaataacccaacaaaaatataatccacctagggtccctcaatgttttggaaggtctaaaaagtctcaatttaattattttattcaaaaggtgagctccagaatgaatagttggaatagtcgattattttctaaagcaaggaagaggttctcctgaaagcggttatccaaattattctctcttatgctatgtcgtgttttagacttcatgtttccacttgtaagagaattgagagtcttatggctcacttctggtggggatctatgggaaacaataggaaaatacattggaaaacttgggataatatttgtcaatctaagttttcgggtgccttggggtttcgttctttcatccatcataatcaagctttgcttgctaagtaggctgattctcttgttgcaaggctgtttaaagctaaatatttttgtcagaattcttttcttacaacctctaaacgtcattgtgcttcctttactttactaagtttgctttgaggacgagatcttctcaagagaggtcttttatggaaagtaggaaatggcaagtctatctccactcttcactcttactggattcctggttggagatttatttcttttaaagataatgttcagcccccggatcccactatttcttatttcattaatagtaatgggtgttagaataaggatcgttactgaatttcttt

SEQ ID NO: 204278 - DNA, 1154 bp, Cannabis indica
ggtgtcaactggattaataaacaaagtggtaatgttgtctatcagtcaattaatttttaagtttgtaatttgttagctactggtggtggtggttcttgtaatgttattttgtagtctgtgaatggcgttgcccatgtgctagctacttctgttatgagtggcatctctgagatatttggacagatgcttattctcgttttttgtattcttacgtaacaattgatttggttctttgaattaaggttaaagattttacaaaaaaaaataaataaatgttcatataggaggaagagattgtgcgtccatttttttaattaaatatgcaacattaattttacaagattaaaataattttaaataaaaattatcctagtacttgttttctaatatttttaaaggtgtaagtaaaaattagtaaaatttcattagaatggtataattatagtaagatgaccaaataaaaaaaaagtaatatttattataatataaaatttaacttgagctatattttgtatcaaatttaatacattctttaatatgtactaaatttaatttacactacattatatactattattgaagtccaatttgatgaacctccactaaaaattgcacacatatatatatatatatatcatatgtataacattgtattggatatatttgtaaatatttagtaatattttataattattaaattatgtgagatacaataattaattatagtaatataatatattagtagttacacttttctttttaatgataggagctccacttaaaatgacaaatatgtatcatattttatgttaagaatttataaacaccaaatttaaaagacgaatacttttaaatttctataatagttaactagaaaaatcaattattctgattaattcctgttttaacaaattttttttgattgatgttaatcattaaaccaagcaaaataatattaaatatgtatattaattggcatttaattaatgttataaatatggtagcagtagttgacagtatgaagtttggaagcggtgtagccgtgttggggccatcatgatgataaattgacaagatattatattatctattttattactcatttaattcttttgaactaaactaacttagatttggttattatctcaaaaaaa

SEQ ID NO: 204279 - DNA, 1040 bp, Cannabis indica
cccgatgtcacctattctgtaagaccgattcattttttgttgacattgtttctattagggtttgcggaaaatcgaatttaagattttgcctttctagcaatctaacctagcatctttgaattggatgttattaaaatttagggttttcaaaatcgtgcaccattccataattttggtattattttttgtagaattttaacaacgatatcatttctaaagttaatttagattttttttttttttgtttttcgaaatggaattcattcaattcaaacaattacgaagtaaaaggttcatcgagccgcagagcttgatgaatacaaggggtgaaaccccaatccacatagcactaggtttagataacaaacttgattggctaaagtgtgagccacttgattggcttctctagaaacaaataataaatcagatacattaggatgttgcattaaacttctaatctggtgtagcagccctgcaatgtcgctacaactatcctctttctcttgaagtagttggatcgctcttaaacagtccgattccacggtaaagtttcgaaaaccccaccatatcccgaccatgagcccctctttaatggccagcagctcagccatcaaaggtgttagctgctgttgcataactttggcagccgcaaaggccactgcaccatcgttttcccgcacaactcagcttatagcagcacagccctctttgattctcagaccagcatccacattaattttaaaacagcccactgttggcctgctccatctcccctcttcccttttctgacacagcttgcttcttgccaccattcgcatcctgatatcctttcaaaaaaaacttccccacacccattcgcatcccaatataatattttatatattatatttttataattttagtggcaatctaagttggggcaaaatgaattctgtttaattacatagataaggcatatatatttaattgccgccaagctctttccggagcgcctcagaattgatttgtgtattggattttacaaaaaaaaaaattctagt

SEQ ID NO: 204280 - DNA, 994 bp, Cannabis indica
agcctatacttgtaactacgaaataatacttgggaatttgactaagtattgggcccataaaaatatctaagccccaaatctctctctcgggcctgagaagttcttctgccgccaaagaaaccttgccatcaaaaatggaggccaccacggacctcccctttctctggagtcaagaccaccatggccttcgtcgggcttcaaacctcgagccctaaaattctcgaagctcccttcgtcgttcaccacgaagttaagaaaaaatcaattaaacccacatttttctttccccacaaaccatatctgtaaaaatatataaataataataaaaaagagtgagaaagggaggtggagttgagaaagagtgagatgaagaaaaagataagaaaggagaacttagtgtggattttttattgccagagatgaggccagtggtggagatgccaatcgcaaaggcgagagagagaaagggaatcagacagtgacatcgagataaagatgagacgacttagggcaagcgagagaggagagtgactaggggtggagaaagggtttcgaggtcaatgttgctgtggtaaatgagagaagagatgaggatgcatgttatgttgaagaagacggaagaaaaaaaaagtttttaggattttaaaatatatatatatattttagttcttttagttttaaattatttttaattaaaattattatttggaccaataaagtttcaacacgtggcacttttgaataagttaacagagcagttaaattttggactaacggacttacaaaaaatatgaccttgaggactattactgctaattctcaacgttagggactaatctgcaacaaagtgaaccctttggagacttttaccgcaagcttcccaatccttaatcttgctagtgaatcgtcttcctttccttgacggtctatctctctctctcctatctccatctcgatatctcctatttttatttttatctcgactttgctaaag

SEQ ID NO: 204281 - DNA, 1010 bp, Cannabis indica
atataacgtaattaagtggtactagacaccactactactattgaacatttatgaataataatttggagtgaggttagaagaagcattgtgattgtgtggaaaatgaagttatatcctctttttgaccatgtagccaaatggggcagcaatacatcatgtgtggaatagacttgaataattaaagttggtcttcccacccacaaaaaccaaaccaaatcatattattgtattttggattcggtgtaatttattgaaataaaatatgtactaattttggtatttattgaaaaactaaataacattaagatattgtaggagaattactttatatattatgtttaattttttttaaatttaaattttatttcggtggtttttatgtaagttgttatataaattttagttataatttaagttgttccgtcagttgctatatgagtttctgtatagaattctgtaaaaatatatatataaaaaattgttttaaaatgtaaaaataaaaaagcttcaatattatatataaatacattcaaaataataaatttaaattaaataaatataattgataaaaaaaaattattattttgcctataaagctttgttccgaattaatcttgaatgaattttactaaaataaataaataaataaaatgttttgtgaatctcatatgtcaactaaggaacaatgcatggtgccaaagccaatcacggcgggtttctctactttccattttattcaatacatgccaaaatagttgaaacaaaatgttttttttttattattatttatttaattattttttttttttgaaagaaaagagtgtcaattattaacactaagagcaatgaaattaacaaaaggtaggagagaatttattaaataatagtatcttctataaggtaagactaaatactattagacgatgagctattttggttcgacgagatttttgcgatgtatccaaatttttacagcgtaaattcacgaataattctaatcactacgtcaa

SEQ ID NO: 204282 - DNA, 966 bp, Cannabis indica
gtaacaaaaaacaaataaaaaaaaaaaaaaaaaaaataaagggtaagcatcaggccaacatcggaccaccatcactatagaagaagagagagaagggtataataggtatgaatataaagtatgcctatctttttaattttagtaagcttgtgttcaaaaatttaatatacaccaaatgtatgcatataaattcaaatttccctcatagtattccattaatgattatgttatctagttaggggagttatgtcctacataactcttcttactgggcattaactcacgggtactctgtgtgcaagtaaaagaaaaaccaaacagtgagatgcgagctcaaggcatggattgtttgttagggaattgttacggtgttttggttttaattatttcgtttaaaattatgattcgaatagttttgtaaagctttatattttaaagattatgaataaattaatattttgtttttaaaataaggagatctcatacttagttgtttttcaataaaaaagttttttatgtctttatcctaaattattttatacgaactattgtgtaacatttcggaaaatcagggtgttacaccactattttatactatccatttcccttgatattctgaaaaaaaaattacctgtatgagagtgtcaatgactggaaggattgaaagcaatcctttgtcattgacatttccaacaaccaaatcaagaagtttggcaatactggcagcatgcatacttagaaattccattccaccgagaatgatgtaatcctcaattatattgacgctaacctggaaacaagttgtggtcaacgttatgtagaacaaacacacacaagcagaaacagtaaccaatgatgagggatataaaatatacaatcaagttattcacaaaacttggtaaattattctaaacaaagctagttattcacgaaagcaagtttgttgataagagcaagaacagatac

SEQ ID NO: 204283 - DNA, 2814 bp, Cannabis indica
taaataaatattacaagtgtgtcgtacattttaatctagagagtgattgttattttatttaataataaagtatgtagattaaatgtgataatatatattaaatgtgttgtaaataaatatgtaacctatagttttaatctacactttgtaatttacatgttgtaacttggagaggagttacaatttattgttacttgtaactcttttattgatcacatataattagtgtaacaaaagagttgttacacaatttaatttaaagaattcaaaattatgatgatatagttgttataaaatggattaatacttatttatgtgagagaaatgagttgttgtgtgtttaaattctaagtgtgatcacataaatactataaaaatgagatctttggtgctcatttggaagaaagcaagttttctatcaaaaaagcacattgttagaaaactctaaggcttgataattcctaaagttatttctatgttagtgcatagaaatagggaaaaataagcttttgacaaaagtgtgttcaagccatggcgattccactattctacactcaagattgtgagtgagtggtcttgttttttttcttcatgttatataacatcgtgtaatttatctatctcttctactattcatatatatagtgtacgtcgttgtaacatttatgtaattaatattttaatttttatagtatgttataattgaattataatatatcttaaatatcttatattcatatataaaatatatgacacaaattacacatacttcatatgtatatataatgaaagtataagtttcacttaaaaacataaattaattaatatttatatttgagtgcatatcaagagacccgtcggtaagaacacgtaaattttatcgttggtacggccatgtaaagaccagtttcaccactaggttctccttttctatcgaatagtaatagtatgaagtgttataaatatgggccgggcttcttaatacggtacgaaatcggcaattagctaaaaaggcacgacgagcatgattcgataggaaaaaaatatatgattaggcatgacacaaaaaatatgagcttaggcacaacacgacatgaaaaatatgagcttagacacgacacgatccgaaaaaataaaaatttaggcacgacatggcacaacaaactcgaaaagtatgacacataagcacgaatatattagcttgaaactataacacatcaaaatgttaaataatctaataataattacttatttaataattaaaataatagtaatattaaaattataataattacgattattttttatatgattatctataattattattggaaaaaaatatgaatataaaaataattaaaattgtaaaatacacatattttagtatttagttcattaattgtaatgaaaaaataaaaatataaagtattcataaaaaagtaaatgaatctattttagaaacggattggccactatacgaatattcgagcatggtacgaaattatcaaatttacaaactgtattgaatttatcttataaaattattatacgacaagacagaacccgtattttaaaaatacgacaagacacgatttatatttttttatggcactacacgacttatattttttataatctagcagaacccgtattttaaaagtacaaaaaaaaatatggaccaaattaacacaacgcgcacagtaattacagctattagtatcgactcacctcaccagctttggaaattgaacataaaatacatatttcccaagttgaaaatagatgttttggcaccaaactagcaaccaaacaaaatggacttttttgtcagctattgtttttatttcatatttttattttaaagtattgcaattaaatattagtgatttgatgcttaatcttttttattaacagcatcttataattattagtaatatttttaaataactacttgagactagattttttttttgaaacatacttgagactaatttaaataataataaaaaaaataagcatatgttaaaatttaaattataatatataaacgcttcaacaaaaaaaatcttaaattatataaaacagtataaccaaaaaaaaaccaaaaaataatattacctttttaccaattttcccttttatttttattaagttcaaacttttctttgattttgatttgatatattcatatattttacagcctcaggcctcacccaagataaagtaaaatacaataagagacacacttgttcattacattcaaactgaagctttttctaatttattttaacattatgaatgaaaaacagagaactcatgtacaaaaacaaaagtttgtgtaatttaatttaaaatctaatctaaaagaagcatgaaggagaaagatttggaggaaaaatcactcctttgatctgcaaatttgggacttttcttcctctaactgaagaacaaccctcattccaaaaccattcccacttacccttttcttcttcttctttttccttccaaacaatcattccagactcaagatctctgtacaagtaaattgctccattactgctcacacactttgtactaacccaacttccttttatccccaaaaacttctttttaagctcaaatgggaccttccccaccaaaacccaggtatcaccctgacccaattcccacacggatgcacaatcaccacacgtgccacccacgagggtcaatttctcgtttctcaacacaatagacgcgaattcaagctcactagccattggaactctcaactccctccatgtgttcgacgaaatgtcaaaacccattaaactg

SEQ ID NO: 204284 - DNA, 513 bp, Cannabis indica
gacggagaaggaaaacggaagtagggatattatggaagatggacaagctcctgaaggggggatagatggtcttgaaggtgaaggggttgacgagatgaggcagcagttccttgactccatgacgctggagcttgaggcagacgtggagctgagtgctgaggtaacaaggaagggggtcctggtaagggtttttggcggacgaagcgtagcaaggggaagagtgaaggagatactttcaaagatatggaacctggaaggacattggagaatgaagactttgaagtcgggtttgtggggaatcttctttgataatgaagctgataagaaggaaatccttaagaagaggccttggttagttaatggtgcattattgaacattagaaactggcctgaagatggcacttgggagaatacgaatatgaagatggcaagatattgggtggaggctcatggacttccaacgccatacctcacatgggagaatacagacgtcattgcaaggaaagtaggaga

SEQ ID NO: 204285 - DNA, 654 bp, Cannabis indica
ttttttacaaaaaatagtgtctcgtgtaattatcccttttcttttgctgacattgcctaaaaatctctctcatgtgtataacttatttgtaacctaagtaaatacatatcaatacattccaacttaccttaactaagaattccattaggtgtcgtttattgcatgtattacttgaaagggccccatgacaaagacattcaattctagaaaagaaaaaggaataatctatgctgttatcattaaaataaaaataattataattaaatatattccatagttcaaggagactaatttaaatattatatcaacaagaattacaaggtattagtttttcaactatatatatttttaataaataataaaatattattaaccacaatgggctaaaataatatcctacaatctaatcgaaacatctctggttggagacactactaaaattaaaattaaaaaaacgaactaaataatcaatctcctgatgcccagatcattcgaaaaaaaaaaaaaaaaactaaataaaagtacagataaaaagaattgcagcatcacaattaactttaagaacacctatattctatttctatcaccgctcaaacgacacaacagtagaaacagttgcaataggttcattcaacctcgtagcttgtagcactc

SEQ ID NO: 204286 - DNA, 930 bp, Cannabis indica
aaaaaaaaaaagtaaactttttaagaactcattaacacacgaaaagcttcatttgttccaacatatatattcctttccgaatcgattttgcagcagcatcagcagcagcatacacttgatgataaatacatgatcatattcacaacttttaagtaaaaagagaaagaaacaaggaataaaaataaagctcggtttccagaccggagtagcgcaacctgaacacaggacttgtttgacttgtatccaatgaacttgttaaagagaatcaccccggttgtagcagaggtagacgaacaaatacaagaccctcaaaattagatgttcgaaccgctcaaggccatcaccttacactgttcattcattgccagaagctgggcctctttcttgtcaagaagagctgttagtctatcgttctcttccataagcttctgaacttctacctctttctgtactttctcaccctctaactgtgttgttttcacaactaatctgttgaaagcaacatcaaacaatcccaaaaaacaaatgaagataaatctcgggtttgctaacaaagaatgtaaactagcaagatttgctaagttgatattcagaaacactatgcaagaaaatagatctatgtaaatcatatatgcagcattgaaaacatggaagtacaaatagtataaattataaccaattcaaacaaatggaaaaatggttgatcatcaagaataagtacaccagaaaattttcaaagcataccaacccaatcatgtgaatacatggatgattctcaaatatcaagatagagtgtatcaggtcattcaatcaatggactttacaagcaaacatacttaccgttcaaatagcttctcaattgtttgaaactgcttctctgatgaaacgagtgtttctcgtacagtaatgagagtgctaacatatgatttt

SEQ ID NO: 204287 - DNA, 2093 bp, Cannabis indica
acctttatgtcacaatataaattcctaatgtgtagtgtcaagtgtattagaaatatgatagttcgaaagaattttgtaaaagaatatcacttcgtgaagtaattttgtttggtgtattttttttcttgcaattacatatatgaccttgatttgaatattgtagagtgttctatttatatatgttaattatagttggaggagtagtttcatcaatattggtggcactttgcttgttatggactggtgtggtgaacaatgttgggtttcatgggcgtggaccaatcttaaatatggcaaccctgtcctccacaattggcatatatggttatgctttctctggccattcggtttttccaaatatctatacttcaatgaaaaaaccctcaagatttccatttgttttaatcggcaggtatgaaaaatgatatttattattatgttctctaccaataatacaaaaatttcaagaactagatatatatagaagatacattatataccctacatataattttcaaaatgggtattaaatgagaacacatgtaaattaagtttttagatagaagaatgtgttctaatgatctaggcaaatactagaggaatatatatatatgcttgttgtttttatattgatttattttattttattggatgcagctttattttctgtagttttctctatattggagttgcggtttgtgcttttctaatgtttggagactcaactcaatctcagtttactttaaacatgcccaaacaatttgttgcttctaaaattgcaatttggacaatggtaactaatatatagatacaactcatattatgatatatagtgataattctattcttattattattttaatttaaattatagttaataatttgtttaattacttgtatatttaaatatatgaaggtggtgaatccaataaccaagtatgctttgacactcacacctgtgacattgagtttagaagagcttttgccagaagcattaagagaatactacattgtctccatttttattagaacaattttagttttgtcaactttggttgtagccttgactgttccattctttggtaagtagaactaaacttatttaatttttaaaatataaatttatttatattgcatttaccaatcacgagctaacaaaactgtgtatcctcttatttatatgtatgcagctattgtaatgcaattacttggttctatatgctcaatgctagtggtaagtttattttctttcacatcacatatatataatcatatctcatacatatgtatatatatgatagtatatatatttttatatatatattatatagtactaaagggttgtagtgatttttcaatgcagtcttttataattccatgtgcctgttatatcagcctatttagaggaaaactaacaaagtttcaggtaagaattaacttatacatttttattgtacccatcttcatattttagtagcttgattgtataccttaaaatttcatgatgattagtgttaatttattttatatataacttttgtattaattcagattgcaggttctgttttcatcatgatagtgggaatgatttgttcttgtctgggtacacactcagctataacaggactcattcaacagcgagttacttaaaataaattcttgatgattataatgagcttggataaagtggctataataacaaagatatggaagctgttgattgaactaagagccttattctaactataaggtgtagtactgttttttttctagtcattttgatcatgtaatagttttagcagtactatataatagtttgatcaaaagtttttcattatcttaaattaagtctcttataattacttactactccatattgcttgaaaattttttacttggtacaggttagaaattaactctttcatacctattaatataagagggatttttatttatatacaaataaatttattatattacaaaaaaaataatgtaaaatatacataattatataattttataaaattttataaatatttaaaataaacatatatggttacgattttaacatgatttttaattatttttttttt

SEQ ID NO: 204288 - DNA, 509 bp, Cannabis indica
aaacaacatatattttttcttttttcccaaaaaccccccaaaaaaaagaaaaaagaaaatcccattatcttccatttttttttcttccaaaaaaaaaaaaaacccaaaagggtactgtctactgtgactactgtccttgtttaagctacctctttctctgaaaagatctcagtccaaaacttcgccagtgaatcaccatcgccatcgccatcaccatcacagtcgatcatcaacccttcatcactggaaccccacgcaccctccatctccgcctccaatccatcttccaaccaccgcttcatgctcgattccagatccaacccaaccacttcttccaagctaccgaaccccgtcatttgcgaaccaatgaaacctccgcttgtgtaaacgctcaccatgaccgacgagtcccggtcagagaacgaagacccgcagctttcctcgttcccatttatggttacgtaagatgacggcgtcgtttgaaaagtccccggcggcttgtacggatt

SEQ ID NO: 204289 - DNA, 1267 bp, Cannabis indica
ccaggttttgaagacaaacaatacccaagtcatgtctgcaggctcaacaaggccatttacggtctcaaacaggcaccaagggcctggaatgataagctccgaactactcttctcagtaaaggtttttcagcttcaagggctgactcctctatgttcatctatggttcaggatctcaactcattgtccttctagtctatgtagacgatatcctcataacaggccctaacactaccaaaattaccagtcttatccatgaattaaaccaagatttctctctcaaagatctgggtgccctgcattattttcttggtgtcgaagtagtgcgaaactcgactggtttctttctgtctcagtcaaaatacatcacggatatgcttctcaaattgaatatggaaggtgccaagcctacctccaatccaacaagctcggctcatgttcttacattgaccaatggcgaaccgtttgccgatcacacattgtttcgaagcattgttgggggtctccagtatttaactcttaccagaccagacattacgtttattgtaaataaactgagtcagtttatacatgctcccaccacagttcactgggaagcatgcaaaaggttgtttcgttacttaaaaggcaccattcatgaaggcattcatctcagacctgttcttaacatgtctctacatgcctattccgatgctgactgggccagttcgcctgatgacagacgttcaactggtggctatgcggtctttctaggggacaacatcatctcctggtctgcaaaaaaacaaaatgtggttgctcgtagtagtacagaaagtgagtttcgagctttggctaacacagcagctgaagtcaaatggctctgttatgttctctctgaattacacatccatttacctactgctcctgtaatttgggtggacaatcaaggggctgcttccttagctgctaaccctgtcttccacgccagatcaaaacacattgaaattgacctacactttgtccgagatcaaattttagccaagcaacttgaagttcggtttgttccatcaattgatcaaacagctgatatactcactaagcccttaactaaagaacgcttcagctatctcaagaccaagcttcaagtgtgtaccacaccgtttcgcttgaggggggatgttacactacaataaaactgttaactctgtttagttagttactagacagttatttctgttttctttgtaacattctgttattcagttcttgtaaccaactgtattctgt

SEQ ID NO: 204290 - DNA, 703 bp, Cannabis indica
ggttgtgaaccttttcattcctagcctttgaaatggtgtcaaccaccaccgaggcataaaggaatgtcccgtttaatactgacaccaagccaatcgaggccccaaataaattgaacccattcccaacacacctgcctacattgttcacatttggaatcaaaccccaaggagatgagtgccaaaaatagtatgccgagccgcatgataagaaaaagtgttctaaggtttcactcctcaactcacatagagggcataaatatcctcctgaatctgtctagccacaatggttttcacaagcagagcatccaaaaggatgcaccaccaaaacactttatgttttccaagaatcttagagttccagaacctcctactctaaagtaatattctctcctactatactatcactattttgatgtattttcttattatttaatattttttttttataatttcgggacttggagtgcctaaggcacacaccttgcttacctcaccttagggtcggccctgagagcttattggttcgatccctaattttgatgagatttatactaaaaggtctcagggcgagaatccattctcggagttggagatatatatatacagttgactttagagcatgtaatattggacttttttcgtaaggtcatcaccactttaggatcatagttatgctaccaaattttttgacatgatacgaaat

SEQ ID NO: 204291 - DNA, 511 bp, Cannabis indica
tttttttttttttgtgtatatttgtttattcacgtgcttttatgaattccatttagactgattgcttggattttgttttttctttctttttcctgatgaattatgggtttagtgctcaatgcatgttttgttttctgatattgaactttgggcggttaaattgaatggattattgcttactggttttgcagaggtttccaagggtattgggatcaatgttgaatgattctaagagtaagtgtgagagtgtgtctcatcagaatttgaaggaaaagaccaagcaccgtgtcgatgatcttcagagaattttttcaaatctcgagtccgctaggaaagacagtcgacctggggacatagctgtttttgaggagcaggtccatcagatgctacgagaatggaaagttgagctcagtgagccaaccccagcatcttctttacttgtatgttctgataacttagttcaattacaatgtcaattttctaaatgattgttcttttaggctctaatttt

SEQ ID NO: 204292 - DNA, 860 bp, Cannabis indica
ttataatattaccctttaatgattgtgttcttttaaaaactaaaatcctcaataaaataaaatgttaaaaaattaaagggaagaaacttatgaatttgtactaatccattacatctggaccaacaaaatcacttacacaatattccaagatagttgatctccatacataaataagaaataggtgatccatttccaaaggttgcactattatggtgtacactttttttttaccaatttagtgtaaatttattacttttaatgcaataattttaatgatttatttaactattttttttttgaaagaatactaaatttaacttgaaataaaaaatattttacttaaaaaatctcgcattttatgctatttaaaggcaattatgactaatttatatgtatattctcagcaaataagcataagttattttaaactaaattaaaaaaaaaatagaatgaagaaaaagttgtatgcaacaatttagtgtagattcaaaatctaacatcataccaatttagtaaatactttttactgtatttctagagtagaacaatgtgaatattctataccaatttgctaatttggtagaatagttcacccttgaagatgatctaaaatgcctattttgggaagagaaagaagaatagataaattcttgcatattataaattaatacaaggttgaatctatttttggtacagatagagttagacaagtaccaaagttgtacttgtcacgtgacatgaacatcttacaatagaaaagtaatcaaaattgggtcccataacaaaacataagtaaagagaagagaagaaaaaagatacataatattaatgaagccataaaaagtattgttaggtgatac

SEQ ID NO: 204293 - DNA, 516 bp, Cannabis indica
gtatttcaaaaatatcatattttctaggagtatgcataaaaggatcaaatctaattacaaccaacgaattaatatcggatattcaattattatcagattgagttggttgttatttttaaatatctaattgaatcacatcagatcaatgttgaataagatgtccaaaaatccaatactatctaacatcaagttgttgttatacttaaaatatatgtaaaactaggattacaatttgtgttttttatggggattaaatggatccaactaatacttcatctaaaatatcggatggatttaatccgattcaaaaaataatgaattttaaatattagataaatccgaactaattcaatagatatacataaaatacatttaatatatggaaccgatccaatctaatattctattgaatttaattagttcgaataattgaaattaattagatcatatcagttagaagaattcaacatccaatcttgatagaccttaaaccattaaatgtggtctaataaacac

SEQ ID NO: 204294 - DNA, 1613 bp, Cannabis indica
tatttaattatgccataaaaaaattagctcttaaatttttcccagtaatttctctacaactcttaattcttaaacacaatatttaaaaaggagattttaattaaagaaaaaaaatatatatataaattctctatgtgtagaggtggcaaatttgtaattgtaggagctgcgcaacaacacacaattctgactgaccgttaatgcttggagcgaaagaagttcgtcatctcttatctgcacaaaatagaacaacaacacagttttccatttccatacccatttatttctctctccatggcattctctgctactttctcacacagctctttcccacgcttctcttacttttcagacacacatagaagaagccctctttgttttctgtccgttagagctgttaaatctgcagaaccagaaaaagagaaaaaggcaccccaacccaaaactaaagaagatccttcaacatcaacttcaactgcttcttctactcctaagaagattctcaaaaaggaaaagcctgtctattcaagtcagaaaattcttttatctcattttttttttacaagtttcatgttacacatgtcttcctacttggatttttttctgcctttaataatattttctttctcttcttaacagtgaagaagggccaaattgtgagggtggataaagaaaagtatctcaatagtgtaaatgtatgtgcatttggagttctcaacctctaatctatctaatatattcatctataaattttaatttgtaaaatgcttttaattttaagcaaataataaaattgtaagactccaatacatgaaataaataataaataccatcctatttttagaaataactttgttatagctccctcaacacttgacacttctgagtaaatcaaactataattttatggaatattagaacaaaaagcatataataggtggtatttgccaacaagagacttagatgaaatagttatatatatattggtaattaatgttgagatattggcataaattgtagtatctatcagttgggcatccaccttactacaaaggcttggattatatatatgaagatcgtggtgaggtatatctttcctactcttcttactaattaactaatgtatagatgattaataaaatggttatatctttctttacatggtgagtgttcaaattagtatttgaatttgagtgaatgaaacctttgtcagatcttggacctacgcatcttcgaaacaggagagtatgcactggtaagagattccatcatttctatcttttactttcattttaatgaacatgacttttgtgaaacagagagtcaaatgttgtataaacaaatcttctttttattatgtgatcttgttgtttataaatgcagtggtgagtttaatttctaagcaatgattgttttgtaggtagcatgggttgggattccaacggcaccagcttggcttccaacggatatgcttattgaggtaactactaattagtgtttgagagctcagtctatctcaatgaaaggtagctaagtttgtgtacttggattggatggtgtcctaattagtgtttttatatatctttttgcagtcagagaaactcaattatgaa

SEQ ID NO: 204295 - DNA, 761 bp, Cannabis indica
gaattgcaaaaagaaattgaaaaaagaaattacattcttcaaatcaaagcaaccctattaataatgaatgggataaaagctttaagtttgaaattgaagaacctggatcttggtaaaacccgtggaggagttgaatgataggcataggtgaccaacacatagttgtattatggccgccggattctagacgtcgcatacatccggattgaagcatccaacctcagaaacctgagattctgatttactcatcgcagatctagtaaatggtgataatagatttctactcatcctgaatgaaagcattgtcacaaagaaacaaagagcaaaacaaaaagaaagagaagaaaagagcaagaaactatgcgttgtctctccctcttctcgcacaggatacacagcccaggtcaaaggtgcaagacggtggagggggaggacgacaatgctcatcgaaacatgttaacatcttcgctttgttgggcctagaggctctttaaatattataacaacaatgattctttgaaaataatagcactaatatttgaagaaatttacttttacaaatacacctttttaatacattattcgtgctaagccccaaagaaaattaacaaaaatcaccaatattcaacaaacatatttgttgaattgtctttagtgttcacttctttgctgccaataacatctcgaatgaaataaagttttatgttcaatatgttttgaacttttatgaatcacgggcttcttcattaagtgtaaatctg

SEQ ID NO: 204296 - DNA, 619 bp, Cannabis indica
tgaccgatgtacagccctaacttggagttttggagtatatccaaagacactccaatgttttagttgtgttatattttttattttacatcctcaagactacttgcttccaaaaacatatggaaggggcaattaggctgggcctgaaatgagatgagagcctatgaagtatgaagctgttactgtgtatgggctcttgggccaaaagctgttagcagaaagagaagatattaagctattgggcttgggagaggtattgggccgtatagctgctcaagagtaatggagttgggctgggctgaaatgatcttttgacaaactggaccgaagacatgggctaagcttcgtttctagctcaacagagtttgggcttcttaaacattttcagtttagcaccattttatcaaatttgtgaaataacacaaattatccaaaaactaaatattaccaataagttattcactgtaaattcataaaaatatttaatcaaaatctaattataaaacagaaacaaaaaaaaatgtagaatttctattaagagatcatcaaaatttgtggaaaagaataattattcaattatatatatggtttttttcatttacacaggaactagttcacttca

SEQ ID NO: 204297 - DNA, 597 bp, Cannabis indica
atccaaaagctatatatatatatttgtatatttatttataagtttcatacatatgaaaataatgacatatgcatgttaagggaatgaataattttggattattcaaaataataataataataatggtggatgttatatatggaagaataataatattgagaaatatgcaaaatctaaatctaatgagttacatacatatatataaacatacaaatataaatatatagggaaaatccagaaaataaataataacaatgaatatatttgtagtcacaaattgaagaacattatttctaaataataaacaacaattagggctatatatttttaacaaatccaactaaggtgtcggcacatttcattttcattattttaattaaatattttttttatggataattaaatggtttcttgttaaagagggtacatttatacattgaattaattatatatttaattttaattattttctgtaagagaataaaaacggatggatatccattacccagggacatgtgcattgagtctgagactgaacaaatacatgtcaactacagagcatatatatattttagttggttttttaaaaaaaaaaaa

SEQ ID NO: 204298 - DNA, 939 bp, Cannabis indica
atgccacttcagaccaagcgggttatgggtctaacagtgttgacttttgtattctattttgccgcttaggtcggctagaaagaaaggacttgtaataagtttgtaaatatttttgggatcccaacggtttaaaagtttaaaagtattacaagttttattttcattccgattaatttaaaagtttaaattctgcgctatttttgattagtaatcccgaattaggggattaggattccataagcattttgggtagcgtgcctaattatttaggttttaggtgtgagaaatttaatactaaacccgcccatttgtagatcagatttgattcggtttgagtttgggtttgaccgagtttttgacaggtataaggtgagaatcgagtttgggccttccattatgggttgcattcattttttcaagataccacttttttatttaaaaaaaaaaagtaagcctatagttgtaacaaaaagggggtagtataaaaggaaaataaaaaaaaaatcctaaaccttcattctcttcccaacctaagagagagagagagcaaaaaaaaaggagtcgtaacgccttgacccacaggggcgctacgtgtgtggttttacaaatttatttttgactaatcaattagtttaagaaatgtgtagtttaattaaaaactttttagttaaattaaaataaaatttttgtacaaaataccaccataatatgtggattccctgtttataaaattcttttacaacaagttacaaaactacagctattacaaaagtaacagtatatttccaaacatagaaaaagggttgatcctgcttcccggaggccaagacaccacgactgatatgtacatcgttgggggacctctgacccatggccgaacacaaaacctatcccccttacctgcaccatgaagcaacgtgagtcacaatgacccagcaa

SEQ ID NO: 204299 - DNA, 1068 bp, Cannabis indica
taggtttaggtacggcaccatctactgccgatgttcaagagagttctggggctacagagaatggcaataatacttcggggagagagcaataggaattagagaattacttttccttaagcagtttatgtaataccttctcttttgcttgtaatttatggttttactaaattacgaaggcttacatacttgtatctgatcttgggatactgcgcatagatttgtatgtcgtttggtggcaatgaaatcttatttttctctttgtatagaccctttcggcctttggccatttgctgattcctactacgtgacgttcaaaatctaatttcgtataacaaaaccccatttttggcaggccaaaccatggtttcattaatcttcctctttccctttaagcatgaagtttagatgcaagttgatgatacatttaagatttcttcagcatttctttctctagctagtgatttaagttgaacccatattttcctttggataatcattttagatattcctctagaactttactttcatgcatgtatggcttttagttatgatcgctagttagctttgttagcagaatattttagtatcttaatttgagattctccggatggatttgtttagcttgagattgagagaatgagagattaatgatttcaataagaattggattagaaaatactcactatttaactattctcaaagcactaagaaaatatgttgcactcttccaccaaagtccaattataaaggcaaagccaaaagtaaacttccattaaacttgtgactacatagacattacataacccatcagtgtagtttttcaactacatctttaaaacacaaagttttgacctatgaaggaaaaagaaaagaaaaaataaaacaaacaaggaagattttttctatcttcaacaatgagatcttactacaaatgaggaaaacaaaggtgatgataaatttggagtcatcaaacgcatatctataagctagcatattgccttgaacagataagcatagagtgagaaggggagggtcttagaggagatcacactactgaaaacttttcct

SEQ ID NO: 204300 - DNA, 676 bp, Cannabis indica
atatatatatctaacctagagtttttattattttttagtaacttctttgtgtttactaatttcgtaaagagttttgacaatagttcatggcattgattgttatatttacaaattaagtttataaattttcaaaaaattttaaataatttacaatatcaatattatagttcccgatattttaatttaccactcgtgttcaaaaattttaaacctattttcgaaatggtaaattattcagattttttcaaaaatttacagagataatattataatagcgaatactactatgaaaaaaaattattctaataatatattttcgaacgcgaagattaactaaatagttatatcagaaggttgtaattaacacatttttactattttttttatgagtgccgctatagatatttttaatgaaccaaatgtcaatttaatatcattgctacatggaagcaaattttgaaaatttatttattttgttgacaatttatattggaacccatagagtacaatatcctttttttaattatattttgttgtgaaacgtatatttgagattatttttttttatatgaaataaaaattaaaactacaacacattttggggattaattagatcctataaattcaaattagattctattaaatttggtggggattattttattttttatttttt

SEQ ID NO: 204301 - DNA, 1121 bp, Cannabis indica
gctggaccaagttaggtgagatgaattgtaaatatttgaattaccttcttcttttttcgtaaaggtagcttctgtctgttgctatgcatatatgccacaaggtgaataaataaaattgtaaattttacaacacgattatgggaccatatcattttgtatgctaaggggcaagctcttttgttcagctcagaatctaatgaaagcttgtaaaggtattaaattaatttcattactatgagctagtttttgggcgtcatatcaatcttttctaattttaatttctctgaaccgaacactgcattcatagaagaggtcccaattgagaggtgaaagattttttcctatcaacttggcatgtcgattcttagtgactctactattaaaggttattatgtgtggagcatgttgtcataaatcataatagctacctttgtttcatgcgaaagtcaaataaattcaacacgagttgttagttgcctatatcgctaaatttgatgaggttgttctgagaattaatacagaattatttgatcttttgaaatacaacatgcacatgaaaaggtagggttggtatgggttccattataaatttttaatttttttttaacttgtcattgtacttggcattggcatgtttgcttatgaactactttcatcagcatttcgttaattgtttttccttccaaagcataagttattattattatttttgaaaaaggagcataggattaggagcattcacaacagttttaatattccatttttaaaatacattatcaagttttttttatctattttacgatataattttatattataccatatatcaaattttttaaaatacattactaaaatttcactttttaaatttttttaatatattttattcattttaatttatataataaaattatgcacatatatctgtactaaaatttttttggtagagtataaattgtaaatttgcggtagtgtttttgtttttttacagttttttaaattttttaaaacttctattttagagaagaagctgttaatgtgctcgaagttattattaaacttttgttcaatatcaggtatttctaatttttgatggttcatctcaaaaaggaagaaggtat

SEQ ID NO: 204302 - DNA, 771 bp, Cannabis indica
ctatttcttgatgttctctttcttactttcagcttcaaggggaaaccagagaaaaagcttttcaacatcagtaattttttgaggcttcagctaggatttaaagtggttcaaatggaggtaaacctaaaaaaccttatcgtttgtattgttgaagttttgttaggtttagggttaagttgggatttaggttctgtttttctatggtttcggttggggttcttttctgcgtattaatattgatgttttgggtttgtttgagctatttttgttgattaattttggatttgagcaagtttaagtttaagaactgaaacatggctcaataatggtgttttgagtttctgtgaataattgctactgcttttacttggaaactgttcttggatgatattacaggtgttttggaaagtttagttaaatttagggaaaaataattaagttttgaggtttttaccttttcctgcagagaaccagttgaccagttctgtagaactgattaaccgtttctccaagcagggcccaaggaactagttcaccagtttgagaatctagtttaccgatttctgcagttttttagaccttttatttttgtgtttcctcagtatttggaatattaccatgctagttatcaataaagaaacctctagttttaagtttagatcctcaagaaggtttatccaagttgtttacccatttatgtgaatgtgacattgggcttccgtttagcacgtgttttctattcaggtcgaccaacacgcttgaatttgaaaa

SEQ ID NO: 204303 - DNA, 1163 bp, Cannabis indica
aatgtaatattatcttaattttcattgacatatcttgatatattatactaaaatcaagggtagtactatatatatttattggcttattacttcctcattatatattatcatgaaaataaaactatattaataattcaaggcataacattgagtttattgatcaactctcaaaatcctcaaaatatatcaaaaaccgttccacacatcacttttttccacattgttagctactttattttattctactccaacttttaaatatcttgttttaaatctagaaaaaagtctttattaggttctaatattatcctctctatatagtaccccatgtatataaagtcacatataatataataattaattacactatataggccacaacataaaaaatcattataacccaagattctataacctaattaaaaaaaatgcatactttattacttcaatacaattattgccccaccttgtatttataaattttttcatatattccaatagaaaattatttataataccccttctaataaagatctttttcttgtgtatatatataattatttcttgaagcatttatttaatgtggacataataggaaagtaatctactagagacactttagagggaacctatttatatgtgataattctacactagatggaaccgttttgaaaggagtgactttttttgatagagaattgctgaaagatattattactgcctagaatttttctcggtgtcatattgttattggtataattaagtatcgagtcttatataatttaagaaaataacttttaagaaatatcattaaccaatcatgaagcgtcatttataaattgagagattttaaaaggcaccagtaatgcttaacgccctcctacgtattaatatcgatattggtccaactacatataaagtctcatataatttaataatattgtaataatttttaggaagtatcgctagccaattacaacaatttacgtttaaaagatgctagctagacagccttaatgtccaataataatactcttataaattatataattttttttaaagaaaaatatatattatagctatgttttatatatataatgaagtacaaattaagtatatattcgatagatagggtggctctttttctatatatagttattgtg

SEQ ID NO: 204304 - DNA, 676 bp, Cannabis indica
atacaagtattctatgtaagttattcttcaaatttatttaacgttgtcaaataattatatttatatataatttattacacatcgtattgacttaatttttttccacaatttaatttaaagaaagaacgttgtcactttgtgcagtgaattgcatattccaactacaatagacatagaagtaaactcatgatgaatgtttagaatatttttcctccacgtaaaatgaaaaaagaattgttcaaatataatgtttacttttttaattttactatatttttattttttagtttaccttttacttgatgtattcttcttaaaataattaatgatatttcttgaggcatgtgaatctcaattgagttgtcaatgtaatttttgagattttttaaaatataaatattataatttttgagattgatatgagtaaattaaatattagttatataacttaatagtaatttgttaatttttccgatcttgtcaagtgtctcgatgttgataatagatggaggatagacccaattgtcatgctgcaccccctgattaagaacctgaggctcagcagcctgtatttctagtatttttatatgtatatatatatatattgatattgattgtgttatggattgagtttataattcttagattttttacattattattttttttattatta

SEQ ID NO: 204305 - DNA, 1007 bp, Cannabis indica
caacaatatgaagccaatgactcacatcctttaagatattagaaaataagttcttttgtagataagcaggtacactatctcccaaatgcccatcatatatagcaaatagtccaagttcatgtccttgcatttgaacaaatttggctacatgatagtcttccatgggatgatttgcttttcctttaaccaggctgaacccatacttgaccgaggcctgatggctcctgcccttcccggagctacatgaagaccgtcccccaacaacctggcatggatagtaaagttagggaaatgaaaacaaagtgcataagaaattgcagaagttgtaaacatcaaaaagagaagttggaacaaaagaaacaagctaaaaaagataacaggaactctacaggcagaaacacaattgagttgaagacatgttactaaatctggcgggtttgtttaccaaatcgattgaaaagatttcagcaatcacttgaaacattccataacatatgatgaacaaggaccatcaagacaaagaccatcattaccttctaaaatttccaacatattttacataaagcattcatttcacttggaattttcaaaactgctgtaaaaataggagcatgttatagatgatgttccatagatatcatgctagtttcactcttgaatacattaagaaaaaattcccgaaataggagccctttatgtagtaaaataacacaaaaggcaagacaagtcaaaagtggtatacatatgcatagaatgcacaaattggaacttgcctaaaattaggattgaatattataaagagaaacacataatagcatgatacaataatcaaaatctccttaaatatattaaagaattagaggaaacaccccccatatattcaaggaattatatatatatatataaatatatagatttataaatatatacaaagcagaagtaagaacacaaaagtctcacctgagaatagacagaattgaagcaacatagattatccataaaatcca

SEQ ID NO: 204306 - DNA, 540 bp, Cannabis indica
gtgtcatactgttattagtgtaactaagtacattgggttctatataatttaagaaaataatttttagaaaatattgttggtgccacctatagaaaatacttgacaccactagtgctgaatagcaatattctacacgatataatataagttaatgtaataatttttaaatatgtgtaaatttttcagcggcaaatttgtttacataattattttattgcacataaatttttacataatttttttatgtaattattttgttacaatgttcagtttttttattgttatcatttcagagactaatgctgcattcaatgtgtaaaggttaaaacttttgctgctaaaaatgaactaaataggaatttttatcaaaaaaaaattacaaaaaaatttaagtgcaacaaaataaaccatataagaattttcatcacttagaaatatacacaaggatctaaatgcaaaaagtgaactacaaaataactttttaccacaaatttccccatatccaataataaaattgactcaattaaaatatagatatat

SEQ ID NO: 204307 - DNA, 1247 bp, Cannabis indica
taaattataaaatattattaaatgttacgtaaatattactctttatttagatatttttatttccataattcttttattcatctcatccaccacataagtaacttcatttattatttttaggtttattgtctttctcaaatttatattttattatctttattgattgattttaaattcatatttttttttctttgtttttaatatacaattttcttgaagcaatacttttataaataaattcaattttagatagtttgataaatttaatatatttatatatatgtttaatattatatgtttatgtattgtatttgaatttagtagcatgctgcattagtatgatttattaacatgaactacctttttatttgttaggagagaaagacaattagattttatcaatcttattatttcttcttaactttgtgctatatagtatataagtttacaagaaatatatataatatatattggtgtattaacttgtttgagctaaaacatattatatgaaaaaatataagttaatattctttttaaccaaacctactaaaataattaaagggtttttttatttttacactttaaaacagttttttttttgtatttttacagaattctacataaaaattcctattacaattagcgctgtaacttaaattgcaacaaaaaattgtatagaaacccctattgcaactagcgctgcaaccactatacaaatccgaaccgtaaatttgaaaaaataaaatagtatatggggtaatattatctaatttttttttttactatttaataaattttcactatttttaaactattttcttaaaatcacatgcatataacattaaaaaataaataaaaatcatttgttgttattattttatttaaaaactaataattaaatcatattaattcgcaaagtaattacaaagtgcatcaaaaaaaaagaattttttttaatagaaaaaaataaaataaaattttaggatcaatgccaaacaaactttttttaattatttttttccaccactatttattataatcaatttgaaagaatatagctttattaaataagtatttcatattgtatttttatgttttccttcctaacttcaaactcaatcaaataaaacacatgtacctttttttttctttttcctttatgtatctttagtagaaaaaaaaaatggatttgtacccaactcacatagtttctttccattaaggtttttatttttattttttgaaaa

SEQ ID NO: 204308 - DNA, 1681 bp, Cannabis indica
gaaaatattacattataatattttgaaaataaatcgattaattttatacatattttaaaataaatataaaatttcgtgatgggataatactataatagtgattagtgaccaaaattcataaataaccaattatagagaaaaagattaaaaaaaaagctctacgatggtgatataacattttagttttagttattttcatctttattattattatatatatctccacggcaagaggagcttaaagccaagtataccatatgcttgcacgactctatatcgtttttttcttactcacgtgcttttacaccaactcacattggccaaagcccctcattattgtatttattatatacattttaacgaacaataatataaatattaaataatattcaaacaaactaattaaagatcttggctttgttcatttattttataaagaaggaacgaaaaagatagggtaaaggtaaagaaagtaggaagagacaaacaaattaaaggagaagtactactccctattcttttttgtgactaattaacaagcttttcttttaagttcatagttgaatacgctaagtaataagtctgtcactctaaagtagtaaagtgttatctctctagttctttcttttggatcacgtgcatccacgtgatctaattgaacaaacaaaactctgtaatgaaacggtgcatgatttctcgtttctttaattaaagtgtgattttactaattactacattaacgtcaatcaaggagccgtttgtctcttaaattaattaatctttattaaaaaaataaacacttttaacttaaaatgaatacatatatattattaactgttagtattgttaacaagttaaaattatcagttttttcaccaagcaagttagaccattatattgaattaatgatcttatactgttgttttgttcccatttttcacctcaccattattaatgttgccatcttatgttttgttgaatttattaggatacatgaaccaacacttttgttacaaaagtaagtaattatttattttgaaaaaaaaaattaattaattgataaatatatatatatatatataaaatataattacgacctcgattgaggggggaaaatctcaggatgatatgaagcagcaatatacatgtatgagtcatgatgagagtcttaaagttataatattatattattcatgcaaaattcactagtttttacgtaggtacaaacataagatctcttctccaatattattgttgaaaatgtttttatgagaacaaatcttgaaaatttccccataattataatttgcttaatttaatcatcgtcgacatatatataaattaatgattcaggtgatctaatcccatataatgatcaattcgcattataattgttgatatttcaacaattaatgactagaaatgggaaaaataattgaatgatataattgcagattgctcatttcatctctctgcaagtgcaagcgggctgctgtccacaatggaacttgcaccaagcttaatgtatgtttgacatcataattaaaaaattgttcttttgttttaaaacagaaattatatttaaaataattaagtttgtttatttttaaaataaatttaaaaataaagttacaaaaaatacaaagtttagaaaacaacaaattttttattttaattttaa

SEQ ID NO: 204309 - DNA, 771 bp, Cannabis indica
ttatgtcgcaaattactctaatacataagtcataatttgaagaataaaaatcataaatagtctaaatattataataatacattaaagcagaaataatactactaatcaaatttgaaagaaagaaagaaaaccataattgacatataaattggaaattttaattttcaaaattgttaaaagaaataaaaaaaattcttttgacgaccaattatatgtgtgcatatatatctaaacaaaaatattcaaaatttgaaccagaatattataatatttatcataaaaaaatattcaaaatttcaaccagaatattataatatttatcataaaaaaatattcaaaattgttactattatgtttttatttaattgaaaaattaaataaatattataataatacattatgtttttatctaagtgtcagtgacggacctaagatttttactttgtggaagcttatttatcataaaaaaaaatatatttatagctatattataatcactcttactaaatttatttaattttgtgaggacttttctactattttggctttataattattaaattaaaaaaaaatacatttaatttcttaaaagataatatttttgttagtggagactatatcttaatggttccatcccctaagagtactctcccaacacgcttctctatacccggccattcttcaaaatatatcaccaaattttttactttttttatttgttttaaacttttactattgtcacaataaaatacatcacaatacatcaccata

SEQ ID NO: 204310 - DNA, 825 bp, Cannabis indica
aaactgaaattataatctcctgttgcagttagagaaagggaaaactttcaatggtaaaagcctaaaacttcacaaggtggtcgtctgtgtataaatcaaaataattgccagtaaccctagaatgaagctctgccaaactgtaatgcctatactcgaacaagttcttgtattggtttccttcgccttttttggttatcgcatccatagttgtgggcagtttcttttcagatggcctactaccccatactggaagcaagacctagcttgacactcgtcctgatggcgtctcttacaccttggacattctgaataggtctgccaattctcgtttccaccacgacagaaaccttggttactttgaaacctcatattcgatcctatagctgacagatcattgggtcttttcttacgatcactagggtcattacccttaccagaaccagtaccagatgtctgcttccatgaatttcttcttgcaagatttcttttttttcgaatctggtcttctgcaccctcagcagcaagggccaactcaactacctgagcataggttcgaacaaatccaggttgtttggcagcaacaatcacatctctagcaatgtgttcttctaatccccgaatgaatttggcctttctagctgcgtcagtggccacttcatctgaggcaaactttgtcagtcgatcgaacttggtggcatactctgtcaccgtcatattgcactgggtcaaccatataaattcttacacttttactgctcggattgactcattatagtatttttcataaaatagggtcacgaaagcgtcccaggtcatgttattcag

SEQ ID NO: 204311 - DNA, 1409 bp, Cannabis indica
gttgttgtacattataataaacattttttcacaatacatagtttttgtttaaaatttctataacaatttaaatattacaataaaaatatatattttttttaatatagctaaaagaattattaaattatgtgacaatattttcttttgagatgtatgtacaataatgacataattatttgaatatatatgtacaaatatcaatgttatcacctataataatatctaatatttatatgggattttccaaagcctctattcattttgatcatattattaatgatgatgttatataaaaacattagaaaattacatattcaaaaaaacaatatataaattaaaaagtatgaatatttactagatttaatgatagtatatgcaaagcactcaagagacagattaaagattgaaaatgaaaggtgtcaaagaaaaaggcacaaaattgtgttaccaaaaagaataaggagatagaatgtaaaagatagtgagagagagaaaaaaagaaaaagatgaagaaactttggattatgactattgtctaacaatattccaaacaagtccatatcaaaatcaaaccctatatatatttatatataatggagggaccccattttttcaccactaattaattcatgcaatctaaaagcatacccaaaaaaaaaattataataataataagagatatttacagtaaaattcccataacacttgaaatttgacagcaaaaatattttattttatgattttgttacagtcgtacatctttttgactgttaagtatcaattaagtttgttaagtctcaactcggaaacatgtagtgatatatatttttagcttatttaatgcgtagtctaataatatatcgttacgtgtttttgagttgacacttgataacaaaagaggatacgactgtaacaaaattataaaataaaatacttttgttggcacttttttttaattatgatcatatgtgtaataattataaattttaagagagtttaataataataataatagctctcttccttaatttttataccttttatactttgtcgtataaatatgtttaagaattaaggaacatgacttttacttttcaaaactaatttaacttaagtgataaattaatcatcttatgaatatatataatatttaataatactatttaattagtgtaacatttttgtgatttggttaagaaatcataatcaaataacaaattcaacatagagatgaaaaaaagccttttaaaaaaagtatcgtaaatcaataagtaatggtgcttcaaactaattaagttagaagttttcttgttcgatattaaaattttatgttctaattttttaatagtacaataaatattcttagatataaaaaatctttcaattttttatataacatagtactttta

SEQ ID NO: 204312 - DNA, 1823 bp, Cannabis indica
acttgatatcaaaaataactaaatagctaaatatcttagtcatatcaaaaataattaaataaatagttatttttttcaaaactcccaaaaagctttctggaaataatatttttttaaattttattttattttcgataattattttgaattcggtatttatactaatgtgacagaatgatatttatgtaaataatttttttaaaaagtattttaataaataaaattaatttaagtataatatttaaaaactctaaaataataaataaaaaatctttaagttatgggcgaagataagtgcttagttgtgactcagttggacagtgtcggaaagtgtgagctcaagttcacgggcgtcggcaatggctgctgttacctctcttcttccattgaaatttaactctccggttatgtcgacaaagccccgagctgttcttgacagcgctagcaaaatgcgagcgtcttatggattgaagcaggggcagtctcgtctttttcacgagctcccatctgggctgaatatggagttgattgtacagaagggtgctgtagataataaagacccagatgataaatgccagacaagaattgataatccatctctgctttttgttcatggaagctatcatgctgcttggtgctgggctgaacactggttacccttcttttcatcacatggctacgattgctatgctcttagcttgttgggccaggttctttctctcatcttaccttctccttttcatcaaggctgtcaaatccgtttcttttcatctttaatgaatcgttaaatgattgattttcaatgttaattcaagtttttctattacattttgttgagataatgtttagaatttgttgtttgttttattaaatttgaattccaaaaaaaaaacagaaaggaaagaaagagtaagaaggagattgtttgtacgactcttaagtgtgaattatggtcacattgaacaataatgtcctgtctaaagatcaatatatgtctatacaaacatgcttgatagaagaaattttaacattgcaactattgattactacatctcactatagtactaagttggactttagtaatgaagtcacatgacacaacaaacaatagcaagattttttctgattatggtattctgatgctggttttactactcctaattgatcagggtgaaagtgatgcgcctactgattctgttgccggtacactacaggtatctttgcttttggtctgcaaggaacatgagttagttcgattttttattttcttttgtctcagaattgccatatcggatagagtgatattcttatttcctttctacaccaatttctgcagtagactcatgtaggtgatattgctcactttatccatcgtacactcaagtcaccaccagtattgcttggacattcatttggtgggcttattattcagtactatattgcaagtattaagaatggccgaagtttaggtaaccttctactccatatgtttgtaccgtgttatggttaaatgctcaagagatgcattttcagccataatttttggtaatttttgcaatgtgagtttaactgaattactgttatagaaatgacttcaagaaaataatatgtacaaaagccacaacacaacatagcacattaaaaaaaaatgcccaagacaaaagacctgaaactgaaagaactgcaaagagataactaagagtgtttgatcatttcaagtgcctcacaatccactttggtgctcttgatgattcctgtgttatttgtaataaattgaccaaggacactcaatgcatatgccaaatatagtctactatacacca

SEQ ID NO: 204313 - DNA, 1713 bp, Cannabis indica
cataaattttttgtgattaaacgtgacttttagtcacaacaaaaagttacttatctacatttagtcacaataaattataattttttgtgactaatacttttagctgcaaatcttgtactcacaaacacaattataatgataatttataattaactacaatttttttttatatttaattacaaattttattgtgactaaaagaaagatttaaaatctacttactcaaaatcacaattaacatctaattttcacgttttccataaagcaatttgacaaaaatagcattcatcccagtattacgtgtacgcactccaaattcaacacttttatgtttgtaaattctttttacaccaatttcactccaagtcctcctgaattcattcaaacctgaaaacacatcaaaataaatgtaaacctacacaaaaataaacctaaacaaaacctaatttttttttttattaattaacaacaaaaagtgagtcaaaaactaacttatcaatagtaaacacacgtgagaaaatatttattatcacgttatataatataatagcctcttctaatcattaagccacttcgagcatgatctaatttatttatttttattttttgaaagaaatgatctaatttaattaatttacagtttttaatcaacattttttgctctctcattgtttaactttttctatatatatatatattaatacgatctgtatatgtccattttcgatgttttgttttgaagaattgaaaaggatcatgggatttttacaagtggccggttacgggttgggtccatgtctgtgttcgaatcttggtcttggttcgggtactctagatttgggtccgagtcagttcgggtttgagtttggctcttggatttgagtttgtgtccagtttagggtttgggtctcatggtctcgagtttaggtctcggactcgggttagggtctcaaggtctcgagtccgggtccgatctttggttcgggccttaggtccggtcccagattcgggtttcttgtctaggtctgggtcctggcttgggtttgcgtcccgatcttgggttcgggcctcaagtccggtcccagattcaggtttctggtctaggtctgggtcccgggcttcagtttgcgtcccgatcctaggtctgggtccaggtccaagtgctaggtacgggtgacgggtctcgggtcctaagtcctggtttgagttcgagactcgggttcaagtcccaagtcctggtttggatccagattcgggtctaggttcgggtctcgagtctgggtctgggtccaagttcggattcaggtttgggtcctggttcggtcccgagtttgggtctagattcgggtttgggtccaggttcaagtcctgggcctaggtcccaagtttgggtccgggtccgaatttggtctcgggtcctgagtgcgggtttggatcccggagggtctagcatgggtttgggtcctaagtcccatgagatctgggatcgagttcagggttgagtcttaaattaagtttttttaatatattgaaactagatcggatcagatcagatcttgaaaaaattttggcggggcgaagcaaatctgatccccaaggcaataagtatctgaatgttttgaatcagaagtgatccatcagatcagagctccaaccaaataaatctttgtagcatgcctacaagagagaaatgtgtagagagagagagagaga

SEQ ID NO: 204314 - DNA, 2104 bp, Cannabis indica
gagagagagaatttgaagacctcagaagcagaaaatcggcgagcgaagacgattgggcgagagaaacctatctctctactgcaaattgcgggaaacccatctttagtttccatttctctgaaattttccattcaattttcgagagagagaatacagctttactttggtagaacaatatagaacaaataataataataataataataataatggaattggagagtgacctctctacaatagttgccaagtaaaagtactcgaatatcgattgtttaacactttaacacttgtctcattcactagaatattaatatttatttttagctctaatttttttttttaatgttatcactacaaactttattttattttaaatttattaaaaaaatatttaaaaataaatgatattatatatttatctagactcaataataaattttatacatgccttgtttaagacaacaacacaatttataccaaaaaaattagaaaaaatttataaacattaaatactttaaaattaaacataaaatttataccatttaatttataaacttaaatattattacttatatccctatttaccattatacgtttagataaggtgtaattttctactatattagtggcataattttctaagtttatgtaaaacttgctttgtccaatttttccttgtaaaccaaaagtggtagctttagtgccacatatgcacccgattgtgtctctctaatctgaattttctgtaaagtttttgaaaatttcaaataatttataatataaaaaataatttaaactttaaacaactatgtagattcatcggtgcctactacatttttgagtaggaaaaaaacaaacaacacaatagtctattgcacatttaaaagaaagtttatttaaatccagaactctttcaatgataaatcctcttacaaaatgtaacttttctaaaacaaattgataagtagctactacaataatgaaacatttaaaagagaaagaaaaacaaaattaaatttggaagacaaatccctacaaaatcaagtcttgtgtacttttgtttttgtttttgatttgtttgtgtgtgaaagtatagctataataataatcttcctcctccccaaaatgatatgcctttatgtaccataataattcccagctcctttttacaactggtccatcttcccttaccttcctctttttccatataactaagaaaatttaaaaggaaagtaacacctctacatggaagattaccagcaactgtaaccaaaaaaacactaatataaccaatacaccaaagaattacgagccgagatattacattcgttggagtcaaaatcgcgacatcatatcattatatgttaaagaaaaacaggctaggctgttcttctagtcaaccgaaacaggtgggagttgtggtcagtttttttggattctgatggtttaaagcttttttttctcaactatcttccttcttctgtacaggtgtgtattattcctcatcctcggcaaggaggaaaacgagaagggtttgaacttgtagccatcaccgtggtaaaacttgttctgaaattcaacccagtgtagacgtaaagcatgaagaaaagcacttagtgtttccatcatgagtagtatgaatgcagttgcaaaggcgaaaaccgttaacccaactagacggatagcaaaattgtcgtacctgtcgttatcaagtgtaatagcaaattaatgtcaatagcacaggcaacaatatatgctcagttctcaactgaaatcggtgaacaaaaactcctatactctagtcgttggcccgagcacatagtgaatattactagattgtaaatacccaaaaataattgaattggtacgtttcaagagcaaaatgaacagagcaccaaatgaaatgaaatgaaatttaaactcacccccaagctaggaggaggactttctcatagaatacagttgaaagttctgagtgtgccaaactgtaaaacaagtaacaaatatcaagtaagaagaaatagatcacagagagagtctaatttgtaagaaaataataataattcatatccgaacctcaaagcccaaagtcgaagatatgagg

SEQ ID NO: 204315 - DNA, 1670 bp, Cannabis indica
ggggtttttttgtgttagggtttcggatgtttaagtcctactgttttcttctcttttgttttgattttatttttcaattttcttttaattaaattttgtatatctttatgtttttcatttaattgagtgattttgtatttatttttattttatttttatttttagaaattaaatttaggttttttttaaagagagaggggtttatatggggattaatgccatagtagcattatttactagtggatcctgccacgtatgccaacttggcactaaaacggagcctgggggataaaatagtgctgagcaaaacagaaccacagctcaatgggttatgccgtcgaaatttcagttttggggttaactgttacaaatttaaaagttaaggtggtttaatttagccgccaacatcccttatttctataatgcgaatatgtacaaggaaatgtgttacttttatgagaaatgttaaaggtactggtggtacttaacgtcatcttatatgttaatattgttattggtgtaattatgtatcgagtctcatattatttaatgtaataattttaaagagtatcactatccaattataaagtgacacatttacatggtactaggcattattatacaataataatgttgtatttttatgttctcttgtatgaaaacgaaaatatcaatagttttatatttgcagtatacatatataatatttggatacattattaattatttaattccggactcattaatttgtgactaattaatcccaaaatgttagataacataaaagtacaatacaattgaccgatttgaattcattcaaatatatgaaactgatctgatcagaaactggtttgacaaagttattattttatatatgtctgatttttacagatctctagagcttcattatatattttgtgtgctggcctttcactcattttgggcatataatacaataataacaataatgatacttcaaattgttgacttttcagcctatatattcatattattactagtaataaaccatttattcatttcatattataaataaagttcgcctaagaaagaaaaagaattacaaaagggtacaaccagacccgtctttctatatatatatttaatacaataaattgaaacactccaaaattatcaaaaacccagaaattttacaaaagccgatttaaaaaaaaaaaaaaactatttataaaacaaatagaaatttctttatccaaattacaggtcatctccttgtttcattactcaaaatttcacaaattattctttaattatgtaaaaatgtaaatttaaataaataaataatttatcagattttgagtggtaaaactgagaaaatatgtaatttggagacatttagctagatatatagttccagcaaagaaagaaaaagaaaaaagatttagcttatatagaataacaattaatatatatctatattgatataaaatagttaataaatttatataatctagggattttgcttctgtgtgtagatataatcagtatgagctgcaagtgttcttctcattaagcactcttcttcctcaactccctcacaactaatttcctcctcatgctctgcttcattattaatgacctatataacccaataataattaaaaaccctgttgaaacgtaaaccccatatt

SEQ ID NO: 204316 - DNA, 999 bp, Cannabis indica
gtgataataaattagcatactcttgttatatgttggagcttttttttggtaggactatttgccgctattttttggaggttaggaactaatctgcatcaacgtgaacttttggaaattttttgcagcaaatttcccttaaaataattacaaatttgttagacatatttaattataccaaatttgaaagttatttaacataaataacaacattcaaagtttaatcatcaactatattatatatttattacttttttaatgggtaacgtaaaccttaatatacttaccattttaattgaattactttatttcgtaaaactaactatttatttctttatatatttatatgaataaaaaaaagtcctaaagacagtgactgttttggaaaaaaactaatatgattatttttgtttttgtttagaactagatactatttttataacaaattttgagtttatattttggtattagatacgatatggtgttatttatttaaaataataataataaaaaactattagatgatgaaaattgatatttatgatgtttatgatagatgatgtctttgttttgtttttaattaataccatttggtatcttgttgtgatacatttgatttaatttaatacaataaaactagtattaaaatattaataataagtatagtattaaaatattaatatttagtattcacactttcttttaataatatattgatatataattcatactatttaatatcatattaaaactatttcaaaaaaataatcatattaaataatttggtatcatatcatttactgcttattggtatcatataatttagtactaattagtataaacaataatttgttataatatgataatatgtagttttgtattaattaaaaaaataattactaattagtatttaaacacttaagttaccaactaatgagtattcaaaaatatatgttccatatatataaaaactaattatttgtttacttttcaattttattg

SEQ ID NO: 204317 - DNA, 645 bp, Cannabis indica
aggacaagtctcccaatgcaaactcttgcaaattcattccacacaaatcccaaaattgtttcagccaaatgtttatatgtttgttaaacaggaaaaagaaaacagaaattacattgcaatggaaaagtaaaaatggctctaccagctggcttctcaattcctttcagccatcacaaagtctcttaggcacttgagtctcactcggctccttctcctacgtgctagaagctcttgcccaccttcagctacttcccctttgtcgactgatgaagccgaagactccacctcttggtgttgagaagtgagcacaatgatctacccgttctcttatcttttggtccatcagctttgcatcaattggtattgggccttattcttggactttgctaacacataacattaaactaaattataagattggaccagtgtattaaattactatattaaagaagctaatattttaagatgttcaaccttaaactaaatcataagatgtcatacccaaaaaacagaaaaaacataaaattggtggatttgatgtatatataaaaaaaaatatctcaataaatggagatttttttttttctttttgtaaaaaaaaaataatgaaagggttttctcacaaaactaacatacattgttaaa

SEQ ID NO: 204318 - DNA, 1119 bp, Cannabis indica
aatagtataatttgtagtagtgcgactagagtcctaagccgtagtagatatatattcattatttacgtgattaaaaataatataataactcttatgttttataaagaaaatattaataataatcaaatcagtactactcaacaagattaataatatccacacatttatgtagtcgccgaatagataaatttaataagtcaataaattacttttgaaatatctgccatccttcattcctcatttttaattactattacatagctaatttaaatcatatagattatccattcaagcctaaaaataaaattagttttcaatagaaagtttgataaatagaataaaactaacctaggaaagaatttcttcctcaacggtaccatcctcatccactagcatcaaactgagttcctgaaacaggagaaaatagggggtaagcttataggaaaggaccattggtttaataaaaattcatgcatggttaacttttaaaaataaaataactcaccaccattataaaaatgtataaacaaattagaaagaccacaaataatcacaaaataaagcttaaaatgcatatcacaccgtcttctagacccctaactctcaatacctatcatacaaaactacatccataaccagctagtcgcacctgataactaccatatataatatcagggctcagatttaacttccagtatgatctaggtctttcacatagaggtgatcgagtgcataagtaatctacctatgatgacacagagactagatcgtgaaacaacaacatgcacaaatcatgcatgatctacatatctcatcaatataaccaaaaacaagtaaataagaataacaaaaggacatattccctttcattttagaaaattttgcagcaaaatgactgtatttcaaataaagctaaaaattataacctgtatatatatttgtacaaaaatatatttggcactcagtgccccatagcagtcagaaaaaagatgcatattaaatttttaatttatctaatattttataaattataaaagttagaatatgtgtaatgttattcaacacaaataaaataaagtccaacaataaagttgagttccctacctctcccaagtcatt

SEQ ID NO: 204319 - DNA, 906 bp, Cannabis indica
cttgagtgccttctccaccaaaatgtcgttatggagggtctccttctgctcccccgcttccttaactttcttgagcattccccatatgccaccgtgtttagcaacaacatatccttgatcaattagattcttggataggcaaccggcttcagcagtaatctattctaaattttaacacaacagttagcaaagaacagtggaaaaaagagaaataaattacaaggtatagacttaccgaggttagagccaagcccatgtcctggacttggtatattgggttggaagaagcacaggatgcgaacctccttgtggggagttgtaccaagtctgcagcgaagtgactcaccatttttgaggcaagaggaaccaatgaagaccccaataagctagaaaaccagtcggtcatcgggtcgagatttaaattccaaacctggccagagtattcccctcgaaatgggccatcttgagtctcttaaagccattttttcaaaacttctgccttaacatcctctttagattgctcatcgatagcgtaattgtgcttggcaatccagagctggacgcgttcatcgtctgggttggtaggagtcagaggaatagtaggattggctaggaagacaacaaccttaggagggatcccagagtcaacgctttgtgaaggggtcctaaatgatttggttttttgaagggttggagtcgacaatcctactcttccatttctggtctagcagggcaacctcctcttcctcctcttcaatcaaaatgacctctggctctgcaactgtttctttagtggggccttcaagacgtcaccaaaaacgttaacgaaagtctgtggctagaacccaacggcgtgttcaatgaatccaacataggcaaatagtgtcgatccactaagtactcgac

SEQ ID NO: 204320 - DNA, 616 bp, Cannabis indica
agcatttgtcaaaccaaataacatcaccaagaattcataatggccatgtctaatctaaattgcaatctttccctgaagctagtcaaagaagtcattaatttttggctctggatacttgttcttaatcgtcagcttatgcaactcccagtagttaatacacatataaaagaatccacacctcaaatgaaatttatttttgaaaataaaaatgaattctacaaccacttttatttttcaattttaaaaatagagaagcaaaagcatgttttgtaaattttatttttattttttaattttatttaagtcatgttcgggtcagggctggggccgaggtccaggtctgggagttgggattcgggtacgggttcgaggctggagcggggtttggaacccaggccaggaaggggtcggggttgggatccgagtttggggctaagttcgggttcgagttcagggtccaggtttgaggtacggggtcgaggtccaggttcggcttagggtctggggttcgggctggggtcgagtctgagtccaaggtcgaggttggggttcaggttcaggcccgagttcgggtctcagtttaagtccatggccgaatttgaggtctgggtttagg

SEQ ID NO: 204321 - DNA, 840 bp, Cannabis indica
taattttttattataaagggcagagataatatatttaatatagcttgattgattagcaaaattttatttgagtactatattagtattttatttactttatcaaataatgtgaatatatagattttgttaacagaacttttttttccttattaaatttaataaaaaaaaaaaagtcttcctactctctggctaattagggtttagttcctttgagcattgtgattggggctatggcagagaggtccaagacccagaaaagggggcggccaaattaactgtgttttttgtttttattttaaaaacatgttttttcattttaaaaacaaagaacaagatgactaatttgaaaaagtgaagtgagaaaattaaaggataaaaaagaaagtgaagtgaatgttggtgaaaaataatatacaaaataaattatatttttttttttgaagaataataaattatatatttaagatatgttattagtgttttaagattttatattttaaatttatttaagtaatgatatttttaataaatatatcacaattatatatttttcctttttaattaattattaacaactataaattagaaaaaataaattaaaatagaagagcaaaataatagatatatattatatgtcacttatatatttacaagtgatcatcacatcttaaaatttctataataatctgctatatatataaatttataaattatagttatattatattatgatatatataaaaatataataaaatagcaaagtataataatatttgaaaaatgctcacacatatattcctcatccaccttgatatatatatattattatttattgatata

SEQ ID NO: 204322 - DNA, 626 bp, Cannabis indica
tcgcagttaagctcttgttcagtagcctccaaacacctggtggtgccatctgaatcactaataaccaattgcttttcctcagcacaggagccagctgcaagtctcaaacattctgggccatgacatgcggaatcgccatttgcaagctgttcattagtaaacaggagtaagcaaaggctaaattaagcctgttaaaacattcacagcaccatctacaatatatttgacaaatgataaccataaaatcttacatatataaatccccaccccattatacacaatacagtgataatctaaaattattgtaaaaccatctaaataaaattcccacacatcataagggtctaatcttcactccacctttagaatatctttgttttaaaacaaagctcccaacctaacaatttagggaccagaaaattataacaatataagcgacacctgaatacatgattagttgtgacatatgaataaagtcatttcacccaaggcaggtgttcaaagcaagttaatctttccccattctaaataatcatttactagtataacttaaagagtgatgggatagagatacctctagtttatttgaagaatttgttttgttctcttgaaagtttgtagaagga

SEQ ID NO: 204323 - DNA, 543 bp, Cannabis indica
tagtcatatatgcttctatttccttttttttatagaccagtgatgatactatcatgaaagccactactgtagacaaattcagattatttatgagctttatagaatcaaatatttggcaacacatcagttttgctttaataatacaaatttatatttacatctctatttatttcggtatttaaaaaattagactaaaaaattactgaaacaaaacaaaataagaaaggtatttgtatgttataatagtttaaaattagtaaattttcaaaagattttgagtactcgtggaaaataattgcttaaatcttactttgggcacggtaaattattcagatttttttaaaaatttataagtgttcttcaatagttaaatttttttcataaaaatttataagtgttcttcaatagttaaatttttttctaaatgccgaaatagatagagaatctatacccttatcaaaaccaccactctaatacaaaaatttcatacatttatataggcaaaacatattagcaaaaatcatgaagtgtgcaaggtgaaac

SEQ ID NO: 204324 - DNA, 1484 bp, Cannabis indica
tcacatcgtttaaaaaatcttttaagtgttatctatatatgaaggttacaaataatattttagttacatttatttttttagtctaagaatttttttttatcttttgtactattgattactatcttttagtttagtttatcctaaagttagtatgatttattttctattgtcatcctacattcactttagggagaaaatattctatcgatacaataaaataaaatgtaaaaactttcataaattcaaaaataatatgttaaattatttctttctattaaagaaaaaaaaaagtctaaataatattttaaaaacaactaaatcatcagtcacaagcccaatttattaatttagaaacggttatctttttcttttattttattataaaaaattcatgcaatttctttctaccatttaatatttgtcacaaaattgttaactttttaatacattttaaaaataacaaattatacttttaatttcagtactattactttgtttataatacacacatcaaaatgttacattttagaatatatcgctccataagtacaatatatataatttacaaaagttgggcaacattgcgcgaagcgcgacttaattcccttgtatattaataaaaaaaaaaaaatataatcaataagtaattcataagcattttggcattatataatggaaacaagaataaagactaaagttcctaaggaatcaccaccatactcactcaaccttataaaatgaataaataaaaaacattacttcacaatacacatatagttacattaacatgtatacgaatgttatattatcatataattaataacaactttattagcagccaccaccaccaccacagccacctcccccaccaccaccaccacagccaccgcctccgcctgcagcagcacctgtcataatagaaatattattatgatggtgaccaccaccagaatgatatttcgaatgtactggattattcattttcttcttctcttggctccaaatgcagcccatatatatatatttgcccagaaaaccacgaaaatacgtattaatttatagtaactctttagtcttaattaaagacaggattaagaattaataatataaagcttgtccgaggttaataacaaacacacaacccatatatataactaacagaagtttctttgaaaattgatattcatcgtaacttttcaggatatagcaatgtgcatatatgttttaattaagctataagaaaagtaaatggcgtgagcgtgttgcgtgtgtaaataatacattatctcttccatctttgaaatttgattactaatttctcttattttgaaagaaataatactaactattggtcaacacgtatatgtatagatggagatttgaccagtttaaacttcctggtaatatatgatactcgaacacgggaaattgataaacagtatacattttatattgtttacttattattattatgtctacatttt

SEQ ID NO: 204325 - DNA, 533 bp, Cannabis indica
gcaagagccctgaattcactctctgtactggacctagcaacaacctgttactttttgacaaaccagaatataagatttttgccaagaaaaatgacacatccacttgtagaacgtctatcatccacacaagtttcccaatccgcatcagaatagctttctagagccatatcagtagttggtcaaaatattagaccatctgaaattttacctttgaaatatcgcagaagatgtttgtaggcctcccaatgacaggttgtaggtgccttgagaaattggctgagcttctttactatgaaagtaacatcaggttgagttaaggatagatactgcaaggccccaatcatactcttttacactatgacatcagagaatggttcaccttcatttaaagacaattttgctgtagcactcgtgggatttggaaagcttttggcaccctccatgtgaagcttgaccagtagatcagtgatgtacttagtttgcgatagatacatacccgtagaatctttgaaaatttcaactcccaaaaaata

SEQ ID NO: 204326 - DNA, 1248 bp, Cannabis indica
tatgagccagatcaatatgatacacacaaatttgaagcactaactggaatctctcataagcggaaaataatctatttattatttagggagaaaatcattaattttctataatttgttagtcatattttaagtgtgtgcaatcttctaagaaaaattttcattggttcaattcatgtgttcttgagagagatgttactagctaggcaggtattggtttatgacaaaagcctaaaatagagcttggaattctacggtaaagctgtatacttttcctaagatgtcatgtttataatttcttacttttgtggtatttttgagaatgttaattcttatacagacaaaaataagctcttgcaaatgattttaaatggataaaatatccgagttattcaaaaatagctgtcatatgttccataaaatacctcaatagattatgctaataaattttatgttcttttttattttgtttaggagtttttgcttttagttatggcgaagattaagttaataataattcctaataaattatggagaattgtaaaaagtacttaaaattttgaagaataaatatacaaaattttaaaaaaattacataattatggaggattaaaataataattacaaaaaatagtaattacgtagattcattttttttatatatataacaaaaatttactactcactcttcagctaaaaatttagagaagagtactctttactcttatagcttcttgtatgttgaaaatctaaacattctatatactatatagtcaataatgtccctatctataatcaagctcggcccaaacggattaggtctgtgtttaggatttacttagttggagcacaatttttttttctttataaatttatatatatttttttaaagaatattacatttttttctaaataaggtccccaaaatttattttttctaatgacccattatatttcagagccaaccttttgtataatcaatgaaattgattttgtgccatatcgttaaaattttgtgctacacttttctgtttttatttgttcaattctcatttgttaatatagatatgttactagatattagttttaggagtgtttatggataatttcatattttgaatctaattaaattcacataatagttcaaatctaatttaattcaatctgtaaaaagttggattcactaacgcattaaggttgtgtaacaaaactttgggatcacaatatggtatctttcacttatttaaccta

SEQ ID NO: 204327 - DNA, 992 bp, Cannabis indica
gagtttttgacactaaatttaatattagtgtcatagtgtgataccaaatttagtatcatgcttggagatgatctaagtatttctctctaaatttataaaataaaaccatattattttattttatttttttgaagggaaacaaaaccagattatcatatgaacaaaaatatacaaattgtggtgatcagataaaatgtatttatattagttaaagaaaaatgtatttatattagttaaagaaatgacatagcagcaaatcttagatggattatgtctccttatcataagttttaattaacaagaaagatgtatatttttgcttcaattagatttcagctaaatttattaactataaattactaactatatagactaaacaacaaaaaaaattgtttatcaataataaaataattcaaacattaatctaaacccaaaataacaattttattttataatttcatttgatttatttgtcgtattaaaatatcattttaatttaaatgatttttttaccatttaagtgaaatagattgccttataatcatattatacatggttgtggatttgccaagaacttaaatataaaaccctacctatgcctttcttctttgcataatgagccaaatttgtgtattaatacttgtttcaacccctcgtaaattaatgttctcattgtccttttaagtaaggacaacataccatttttttaagaacaaaacattttttttacaacaatattttgtttttgttaaaaaaaacaaaggacaattaattaaataattcaagaacctccctttccactagattacattcataatcaaggctttattttctttcaaaattgagtataataataatgacttgaattttaaatcaagtataaaaaacatgtatctcaccttaattaatttaaaacaaaatgctatcttattatgcgtacctagtctatttaacattttgatttttatttgctatctttttttttaaaaaaa

SEQ ID NO: 204328 - DNA, 357 bp, Cannabis indica
tttgttaagtgtcactggagataactgaagtgtatactaacgtacatgtaacagaatttgtgtgatccacgtaagattaaaattgtattaaaatataaaaaattaaattttaaaaaaaaaaaaataaaaaatacattatttattaattatttttcctttttcctttttcaaaccctcgaagccccagtcgacgaccctctcttctctcaaacctatgttgtcggtgtttctcttatcgaactcgaagcccatataggtggcgtttgctcctgtgatttgagccacccctcctcacgaatctcatcccaacagaacctaaatctatcagttctgagggttaggaagcgtgttcaggaa

SEQ ID NO: 204329 - DNA, 2031 bp, Cannabis indica
taaaaaattcacacaagatcaaattaatatagctggatagataaaaaaaaaatgagttatcaaacttactctttatgtcttattttccataaataaaaaagctaaacatattctcttccatatataaatcagttaatacaaaaatatgaaagttaaatacacacctcaatcaaaattataaaatatttttgtcaaataaaagatgctaaaaatagaaataataaattaagatatctcaccaaaattacattttatttgttttacctcacatttttacattagttactttatatttttctctatatcatttaaataatatatttttttatatctttatcaattaaaataatataaaagtaataataaacagtgataaataacactttatatggagagggaatataaaaaaaaaatgattacccaatatttttctaatttggttaagcttctacttttacttatagctataaatataaaataagtacaagctttgttttacttttaccgtttggaaaactattatataaagatctttttttaataaaaaatattttttaaagtgtttcaatatcattaaaaaattactttttgtgagtaaattattttaatttgtagtttctcaaaagtcattttcggagaagctacaaataccttcttccaaaaagttttttaaattaaaaaaggatttatttttttatttttattcaaacaccgctagaacgacttttgtattcctaggatttttacctctgaactttaacatataccaaatcatgtctcctgaacttttaaggccgttaaaaattctccttgaattattaagattgttggatttaaaaatttttatctaattttagtaagtaaagtttaacatgaattaaagtccaggagacatgatttgatacatgtcaaaatttgagtagcatgatttgatagatatcaaaatccgaagagtataatttagtacagggacaatcatcgaattagtaaaattaaataaaattggacaaaaattctttaatttaataatctcaatagttcagaaaaattttaatggccaaaaaagtttaaaatatatcatttatttttagtagtgaaagttcaggaaccaaaaatactaactaatcaaataataataatttagcatgataagttatatcaaattaccatatatatatttttatgaaatatcaaattatcatattaattgaatatttttttaatatttgtatttaccaaaataatttactctttcaactgttattttttattattatttttggaaagctctattgacttttctttaaaagctattatcatttaaatgaataagaaaaaaataactttactttttgtccacttttgtagaagaataaaatgaaaaatacattcattatatattattgtttttcaataattattaaaattatttaaactttttcttttcaaataacaaaaaatatctaaaccttgtggcactggattgatgtatttttcttttttaacaagactgaaagtagtatttattcatttaatggaactttcaatttatttttttatccacatgtgttacatgttatttaccttctaatctctagtctctgcctcttcattttccaaagaaattaacaaatattttgtcttcctatataccccactataaaagtcttttaatgaaagtggctacctacccaaaaaataaagtgaattaggggtgaccatataatttaatctaattttttttttctcatttaatccaatttaatcagtcattggattaaaaaatatcatccaatccaatttaattagatttcaaaatccaatccaatccaatccaattattggattagatcaggtttttaattggatatctatttacacacttaaattttaatattaacttaaaaatataatatgaaaaaaaaaatatgtaaaaactaagtatcaccttttatttaagtttaatatttcattacagatactatcgttacaaatgtaatgtagtcaaaaattttaaataattaaaacaac

SEQ ID NO: 204330 - DNA, 1819 bp, Cannabis indica
tatgttatgtataataaattagtctcttatttttattattctctaaagtcgtttagtacgccgtataagagtcgtattgtattaaataataaataacactatgtttggattaaataatgtattatattaactattacgaccaaattttttaatacaatgtatgttgtattattaatacataataaatggtctgtattagcttatattacaatatttacaaaggatttgcgatcaacaccaatctctgacctggatcagaacccgagcccggatccggatcccggaccccgatcccagacccggaccccgacccgaacctaactcggatccggacccgggacgtggacccggacccagacccggtacctgggacttggacccgtagttggtgttggaatcgagtgtattaaaatatattataactttacacaatcaattaatgcaagttaatatcaaacattgtattgtattaaataatattaatacaatacaatccaacacaatccaacacaatacaatacaatacattacaatacggcgtaccaaacgagccataaacctaatattttgcgatgttcttataaagttttcttttgtgagttttctaaaaaaaattaattttaattctctccatctctataccattcgattatatctgttaatttacaaattgtgagttttcttatatctagcattttgttatatttataccattgtgttgcctaaaaattatatcttacattcatgaataaagatttatctttttgtaagttctttaataatttttttttaaatattttcatccttatacattttgattatatattttattttgcttttttctatagactagatctaacatcttctttttctctagatattttttatgtttgtctaattttttttgttggagtaaaggaaaaattttatacaactatcatcaaaccatacatactgtagcagctaccaaccagcatacaaacttagaaattgatgtgatattgtttggtttctataaaagtttttatacaatatataaatttcataatattttttattaacttctcatattctttaggtaccttaattgttgggagttgggagttggaagtgttttatagattttaaaatattattttttttaatattttttttaaaattatcttgataccgcatttggtaaatagatttcacattgcttttattatactctttttaatttatcaacaaaaacattttctctttctcttattttgtgggaaaatatcatttaatttaaatttaaatatgaatatgattaggtatttatttaggataattaatttttattacattataaaacatactttctgaaaaaaaaaaattataacaataataaaaaatttcaatatataaataaattaatggtaaattatttgaataattgttcaaatctatatatatatattctatataaaatgtagctatataacaaaattattggtttatgagaaattataggtgactctttttttaagtttttattaaaaaataatatatttttttggctgaggttaaatggaaattgtcatttatacgattgagatttgaagcttaaaatcccaaaaatacgattgacttttctccctctttcacaatcagacgacatcaaatctgtgaaatgctcctttgatctccgccacttctccctcttctcctttgacattaatatgaggttaaataatattttttttttggcttgagtttacattcgattgggtttattgtgatttcaagcttccgattctgatctgtgaaatgctcctttgatctccgccac

SEQ ID NO: 204331 - DNA, 786 bp, Cannabis indica
ttagatgattaatcttgaattggaaatgccacgtgtcccccttcttgaaacacggataaccgtttatataaattatttactaataggcaatttatgttttaatcatctgaaaattaaacacaccataaaatttatataagacaccataaaattttaatcatattggttttatactttttatcaaatctagaaagttaaaaactgtagaattttgaataatcataataaacaaaaaaacacactttgaacaacgataatcccatcaaaatatgattttagaaacaaaaagtaatttgaacgatgctttgcgatgatcccaccaaaacataattttaaagctcaaaattaatgtgggaacaatgtcattcaatgctcatatcaaaatataattttagatgtccaaaatgacgcaatgataaaaaaaaacttgacattcagagtaaaaattgacgcaaatcaattttcttttgatgattttggcataacttaggtttaaaaaatgctaaggcataacttttcaatcatattcatttatcagttagggtgatttgttttttgtttttccttttttcttttgatacattttctcgagatctacacattcaactagtgtggaatcttaaatttagtgtgcgtagaatctcaaattttaattatttgtcacaatctccttaaacaaacaaaattcgaaatttaaacgtacacatctcataaaataccaaaagtaatataaaaaacaaacaatgacatccaaacaaaaagttctcactaaaagttttatcaaat

SEQ ID NO: 204332 - DNA, 1400 bp, Cannabis indica
ttactatttttttttattaaactttagactagtaataaaagaaaaaaaaatttaaaaaaaaaaaatacctaaaattatatttttctaatatataaactatacttaactaaattatattaaaaaattttgtttttagcttatgctcagtggcgctcactagacgtaaaaattaaaattagaaataattaataaatagtaatatattagatagtaaaaaaaatattaaaatataatactactattcattaataaataataaaataataaataatttttaactaaaaataaaaaataaaatacatatttgtaatgacttaaatataagaatttataatatataagagctaatatatataataaaaaataaaaagataaaaacaagtgaggggacctagtgtcccctctagacataatatgggtccgttagtgctcatactcttttttattaataaaaaaaaatatacatatgaataaattatatttttgaaatattttgtttaaaaaatatttgtatatataaatacttgagaaaaatacattaatatacaataccttttacaaaagtattaaattaaaaataaattataactccaaaaaaaaataacaaagtatgtaaaatatataagtgaaaattaacaaaaatatcattatttaagatagggaattaatgttgccaaaaaataaaagtttaaggactcaattttccaaaaatataaagtccaaggactacttgccaaaatttacatgtatattttgggaatcaatttactaaaaaataaaatttggagactataatatgctataatctatataatttatggacctataatacaaattaatcagttagttaggttatgagtacattttttattattatattttgaaaaggaactatagttattaaattctgtggtgttaattcaaccactgattgttggaagtgatgggtaaaagatggaagtatcacaataatatataatgatttattttttaattgggtcgaatgaagcaacaattatatacattccaaaagaatatttgaaagagtaatgttacaaaaagttgggaggtgaatatatactctatgtatttaatatgttttatcattgttgtcttctcattgagacaataataataattataagattcaattttatgtagctacacctataaacaccggcctatatattcattctcacaaacccagtaacaaggtataaagagaagacacggagaatcacaataataacaccactattttaatccttaatactcttataactaattaaatttgttccaataaaaaaagatgtttgataacatgtttagccaaaagtggtatggttaagatttgcttcatctaaacttattaaaactatatatatgcttttccccttttt

SEQ ID NO: 204333 - DNA, 878 bp, Cannabis indica
aaaaaatattcctacatgtccaacacttttccattaaagaaaaataataaatcagaacttttatttttaacttagattttattgtctaatttttctggaatatatatttttttatgtaaatgtaagttgcaacttttacattgcggcccataaattacagggttaggcctgaactaaggtgggctaggcttgtgcctagggcctactcaatctaagagcacaaaacaaaaacaaaaaatattttaaaaataagcatattttaattagtaatttttgaaaatatcgtacattttttaaaaaaagcaccataattttgttgttacctaaggctcaataagtctcagggtcgacctgcataggtgtctttgttattataacctttattattatcttttgtgaaaatagtaatatttgaaggggtatttttgcaacaaaaaactttataagggataaaactaggcaaatacaatagttaagagaaactcttgttataatcatatttgttgaaacttgtttttgaaggcttatgtgtatggagattacaactcagaagaatgtgttgctttcctagtgaacagccacatgaaagatgtcactgtccaatttcacaatgtttcatattttttgcctcataattccattagtattttaccagattgcaagaacattgctttcaatactgccaaggtaagtaacaaaaaaaaaacagaaatcacttcattatcatttgatgaattaatacatggatttttaactagaagaacttgtgacagattagtgcacagtatggtgtgagaacaatggtaccaaccgaaaatttcgattcgaaactgagatgggaagtgttcaaagagactgttccaaactttgacacaact

SEQ ID NO: 204334 - DNA, 1654 bp, Cannabis indica
gagatgtgaatatcacaacgataattggtcacagtaccaatgaatgcaaaaatttgaagacgagatcgaaagcttgatccggttgggtcgatttgtatgaatggattaagaaccggctacaccatttcaacctggtcccagtaggaggcccgttgcctgaaggggcagcagggggcgcacccggagcaccagcatccgttgcacctcctaggggagctagtccctcaacaggtccccgggctcccaccgagccctaatgggagagtagccatgatctctggtgggccccatattgggggaaccaccagaaagaattaaagcgctatgctggggccatgaagcatgatgaactgttagaagtcacccagcttccagcataaaggccccgactcatggatcagcccattactttcacggaagaagacgccaaattggtgcgcttccctcatcatgacactttggtcatagagactcccattgccaataaaatcgtggcaagaatattggtcgataatgggagttccgtgaatttattgttcaaagaagccttcacagccataggcctcacggacagggatttgtcccccataagctcccaactcacaggattcaatgggaccacacttatcccaatgggaaaagtgagactgccagtcaccctgtgcccggatacccctcagagtacttttaagtactacacctttgtggtggtagactgcccaactgcatacaatacaatccttggccgaccggccttggttgattttggcgcaatcacatccatcccgcacttgtgcctgaaattccccactcaagaggttggagtaggaaccgtaaagggcaaccagggagaagccaagcagtgctataatgtggcagcgcatttgccggtgctgtgctccgtgagggtatcgagccaggattgggagaagaggatttgggatttgaaaaaatcatagaacctatggaggacgtcgaagaagtacaagtgtgcgacctcgaccctaccaaaatcctctgcctaagaaaaatcctagatctggaggagagagacaaaaatcgttgaagcattgagggcgccaaagatgttttcgcgtggttccaaggagacatgaccggcataagcccgtatgttattacccatgtcctaaacgttaatcaagatatgccgccagtacaacagaagcagcgtccccttgacccagtaaaagcggacgccctagaaaaagaagtagacaagctactaaccaataccctgattcgagatgtgtactacccggaatggatgactggtgctgaagccaaatgggacatggcgggtatgtatagactttaccgatctcaacaaggtggatgccacctccgggttcaagctattatccttcatggacgcctactccggctacaaccagattaagatgcacattgcagatcatgagtgcactagcttcaggaccaataagggggtatactgctacctggttatgccttttggattaaaaaatgctggtgcaacatatcaaagaatggtgaaccggatgttcaaaggcctcttaggatgaaatatggaagtttatgtgaacgatatgctagtcaagtccaaaccatatgtgagccatgcggacgatcttgcagaatgcttcgaagtagtccg

SEQ ID NO: 204335 - DNA, 957 bp, Cannabis indica
gatggttgtgatcatccccagaaggtcgaattgaatcttgatcggctaaagtcagaacctcgtccaggtcgaacacctggtcaatcatcggaaaattcgatggtcgtacgtttgaatttgaaaaaaccaaggtagccatatatatatatatatatatatttatagagagagagagagagggtatggtagatattcgatgagattgagagagtaatagagatcagtggaaatttgtagaggtatacatataatagcgtggatattaacgcgccattattttttttttttttctgtacaagatgatggttacatcatagagcattatatataacgataaaaacattgagaaaattgactcattcaattcatttataagaccatcttggtttttttttttttgttgaggaagacataaatgtattcaatcaaatcagcttacagtagtatttaaaaatttaagaccaacatcaatttatacacgaacaattattgaattagtaacagacttagttagtgtatgtagtatattatttacataacacgaaatggtacaacaagaatcactaccaactaatctcggatcaataataaatttaaacgtaaaatttgaatctggacaattaatttataagactatctttaattttactttgcaataactataatgatttgttttaaatattacacctaagtccaaccaaataataaataaattttacttaaaaaattttgtattttatattatttatattaataacttaaaataattaatttataatctttatatataaataaaattatttaataatttttgttggtttaaaaaaaatattttaaaaatataagaatattccgttaaatttaacgatgtcagtagagttaattttacaaatatataaatattaatatatcatttgtaatatttttatttttaatatttagaagtatattcaactc

SEQ ID NO: 204336 - DNA, 1503 bp, Cannabis indica
caaaagaattgcatagagttcagaagggatatcacttttcttaaacatacaatcaacataacatcaaaaatcacaagaaaatgcacaactcaataacaggcggtcaaaaatgagtttgttatcgaactgtgtgttgttgtttgacactatcttttgtgaaagtccatagcaacagttgttattcttcactaccaagtcaaggactttctttaatattaaggtagccaagggctctgcttcagcccatttggggaagtaatctatgaccactatcgcatattggacaccgccttttcctttaggcaaggagcctatgagatcgattcctctgacagaaaatggacaagtgacacaatccattgaatattcgatcattgttggtcaaaagtatcattgccttaatatcttttttgagaggctttacccctcagtgtggtagccacaaaaaccctcatgtacattagaaggggcattgagtagctttttctatacatttgtcaatccatgatgataaagcgatgtacttttattaacagtttcttagcttcatttaggtttgttgggagaataccttgttctaagtattgggcaatcgaggtcatccatgatggactattgttgattgagaatagattttgagtcttcagtgatgcttggatgagagagatattcaacaggaactacacttaaagcgtcagagtccgttgtactagctagtgtagctaaggaatctacatttgcattctgttggcgtgcatacttgttggatggagtagtgcttcagctaggctaatagatctttagcttttctcaagtacgctatcatcttcagcgctcaagcttggtattctctaaggatttgattggaaacaaattgagaatcactatatatctctagtgattcatctttgatggctagtgctaatctatgtccctgtaggagttttatactttgcttctatatttgtagcggtaaatccaaaatgaaacgcacagtgagcaagaaatccttcaagaattacttggatgagacccactcctgagccatgctcattggaggacccatctacatagagcttccaagtaggtctagaacccgctgcaatctcaagcatgtggttctggtcttcatagaccacggggtcgtgttcttcaaggcgaatgcattcaaaaataaaatcaactaatgtttggcctttgattactgtgagaggctaataagagatttcaaattgaccgagctctactttcaatttgtgtagatgtcatgatgcttctggcttcatcagaacttgcctgagtggttggtcagtcaacactctgattggatgggcttgaaagtatgtccttatcttcctagaggccaatactagacagtaagccaacttctcaatggggggttacatagacttggccctgatgagtttcttactaacacaatacactggatgttgtgtcccttcatcttcatgcaccagaacaacactggttgcatgctcagtg

SEQ ID NO: 204337 - DNA, 1390 bp, Cannabis indica
cctattcaactcaattggtcccaatatccatcttgattcacttgctaattttccttgttcatttgatagtagtttttccagttgtggagttagtggcgagattccttcaacatttgagaatctacaaagcataaaaaaattgtaaactgtttcttctatgtaacatcatcatgatatgatatgatttaaaaaaagttaaaaagtttgttgtgatctaattatgacatgatgatctcttatttaccagttatgcatatgataatgaactcacaggcaagatacccgacttcataggaacttggtcaaatcttactaacttgtaagaaaagttgaactgaataaatgtgtattaatttgttgtaatagtattgcaatgtttatatttgtacattaacaatggttagttacttgtttgtgttgatgcagggtattgctagggaactcttttcaagggcccataccatcaaactttgtgaatctaacttctttagtacaattgtgagtaacatagctcaatggatatctgactataaaattttaaagctaatgatctcaagtgtgaactatacatatgtaggcagttgaatgatgtatctaatgcaagctcttctctctcatttatcatcaatatggagtctcttataaccttgtaagtaaaatgtttaaactcataatgtatagttcttttggattacaatcaaacaactcacaattataacctgcagagaactgagaaacaatgatatcactggctcaattccatcgagtattggcaaaatcacgcaattgaaacatctgtaagttcattaagggactcaaaactacccaacatgctctatttcctaactatatataaaattctacttttttatttgtagggatttgagcttcaacaagttacatgggcagatcccagagtctcttttcaacatggattcacttgtttatttgtaatatatacttgtctctctctttaattgcattatatcatatgtttaatagtagctactattatggaatttatcaaagcaagtaattctgtttcttttaatcaggtttcttggaaacaatagtctaaatggtacattacctcggaaaaacagtttatctcttctcaatatgtaagttcatatttatgatattttagtatgtttagcaagattcatggtaactaattactggtgtactatattaattttatgcctgcagagatctatcatacaataattttgtgggaagcattccttcttgggtcaacgatcaacacaatttacagctgtaattcgtaaatttgttcttttacaaacgtttaattttagtacttttgtgttatgttcattcttgttttactgtatagtaaagacttagatgaagactaaaactagtattt

SEQ ID NO: 204338 - DNA, 579 bp, Cannabis indica
ttagtcggtaggaaaatttcccatcgtgtggtgtacgattgctgtaaggcattttgtcggaatatagacacgtgttgctcaaaggtttcaccttttaaagttgttgcctagacaagtctttggtcaaaaaggaagctttagagacacgtacaagcactaccatggtctaacgcaggggacaagatctgatttagtgttagaacatatgcaacccttgccttgagctctagatgagacacgaccaaataggtttcaagaccatcaggtcacaaccttcctggatcaaactaactcgctaccctcctagaatactcgtatcttctagggactctgacctttttaatagcggatgaatagtaggattctcaaagtctttctgtccttgctgatatggaaaaccttcagttaactcttggattataactccttctgtgatgctaaaggcggaatgtacatgctaattgtgcatagtctgaggtggcacctttatgtgattgcaacgtaccaggcatctaagaatacagataacatttacccccaagctctcgggactcgtgcgtgttgggagcttacagcttc

SEQ ID NO: 204339 - DNA, 1144 bp, Cannabis indica
aaaaaaaaaaaaaaaaaaaaaaaaaaataacctaacccccactaaataatgtagctagctcccaacagtttcaaaaattatatgaggttcatttttacctctcctttaaatttttacaaattaatttttgccccaaaaaattcacatatatatatatttttcatttttacctttacattatttttattttattcttataaaatttatattttttatatttatctcacatagattaattttattcttactaaatttataaatttcgtttttatacttattaaataatgtagctggttctgtcactgctggtcaaaattattataaagtacaacaattttataatatcatgtaattcgagatatttagtacaattatatttttatttattattgaaaaagattgtttattttgataggaaacaagtacatggtttcttgaagtatttttcatggagttttgtttggggactattcaagtggttttatagtgcaaatgaagaagaatgtgggttctcacaatttccaacttttggcttacaagcttggaaaaacacgtaagtattcatattcatataaataagtttatacttaatacaacaaatttgactattttttgttcttttttaaaatatcatcataaaaaataaaaactaaaataataataataataataataaatatgatttttattctcaaattattatcactattagagtgtaaactttaaaaatttcatattgtcaaaaattaattctcatagtgagatttcttttagtttttctcctatgtgacaaacagagtaacaaaaaataaatattttttttcttcaaaaaacacaatttgaaagtgataaaatttagaaaaaaaatacaaaattcaaaaccgcacaatatttatattagataaataagtaatcattatattcacatcgaaactcaattacaaacaaagtgattaaaccacaaagtaacaattaattacaagctcatatgaacattcccactcaattttaatctattctattaaagctatgtatattcagatattataaaaaaaaaagaataaataataacttttacaacaaaagaactgtgttcctactattccatacataataataaaccaccgttgagattatagaaagg

SEQ ID NO: 204340 - DNA, 2243 bp, Cannabis indica
aaaaaaagtttaaaactgtaatatgacttaaaaaatgaatttgatatttttaaaacaaataaataattatttatgactaatttagttttaacaactaaaaaaagtgaagtgattagttaaaatggcataagtgtaataaaatatcaaaatagttttttaaaagaaaaataagtgttttaatttattgtgtaatttttaaaaaaaaataaagaaaaatgagtatttttttacatcaattaaacataacattaaatgagtgagacccattttaaaagccaattctaatttcctacaatacaccatattttagtggccatgaacccctatttatatccacaaatataatgggacccattttatttttatattcctaccgatagagtatttttttaaatccccacagtagtataagaaaggtaaaagaaaagaaattacacatatgtaacacaacaaacatatataatatataagacaaaaagaactctcactcacaatcttgagtgtaaattagtagcatcaccatgacttgaacaatgtattattaccttttttcaaaagcttatttcttcattctctaaccactaagggctcatagaaataactttgagaattatcaagccttgtattttctagcaagtgcttgttgatagaaagctacactacaaaaaattttacttttagtcacaacaaaacttgtactgataaaaataaaaaaattgtgactaatcattaccacaacaaagagctttaggggcagttattttttctgaaaaatgaaaaaaaggacagcaaagggttgttcatatgcaaaagagttgtaaaccccttatagcgtcagttatttagaaattactgatgccatagggacatgataatattaacacgtgtgtcctatgacataagttatttccaaataaccgacaccataaggggtttataaccctccccaatcatttgtcttcctcattcgacatctcctccttaatttctaaaccaaagaaaaaccccaaactccctgccaaccaccaccactacaagaaagagcgttttgctggcagaagtatgagtaagtcactagcattattttgtcagcgagcttttacgatggaaaacggtgtcgacaataatttgtcagcataaggtgttttgccagtaaaataccatacctcaccgacaaaactttttatgtcggtaaattaattggctgacataagttcccgctaataatgagctcttggctgaggagtcattgatgacgttttgtcagcaaaatattccgttggcaaaactttcgtgccaaatttatttacctacgaaagttttttcggcgcatcttactttgccggcaaaactccccaataaaaaaatattttagttttgctggcgagatatagtttaccgacaaaatatatttttttaaaaaaattatatttatttatatataataaaattaaaataaaagtaaagtaaatttttaaaaataataataaataaatataatctgatttatattataaaattgaaattatctaaaactacataaaagtatcgttagtttgtaaaaattaatattatttacactgcaaactaaaagataaaactacaagtcagcaacgtcgccgtcgtcgtcatcaggaggggtaggttgtgaagaagtcctagcgtcaggaggccgaaatggtggaatcggtagaatcggaagcatcggggcatgttgaatcctagaacaacactggccagatacatcatttgttgttgaaattcgctcatgatttgattctgagtctgcatcatttgttgatgccactcgttctgtgcttcctgctcttccaccctttgcttcagggcctcatgttatagtttcagttctatttttatttatatccatctacttctggtaactaatttttcagtgactttttcggcaatggtgacttttctagtgacttttccggcaataaaaattttttcggtgacttttccagctctgatgacttttctgacgacggtaactttttcagtgaaacttattattacaagttttattaaatttatcaagtcttgtattttctaacaagtgcttgttgatgaaaaattacactataaattttttttactttagtcacaacaaaatttgtgactaaaaataaaaaaattatgactaatcattactataacaaagagcttcatgaatttaacatttctctaactatggttataaaagaaaaagaaaaaacaaaaaa

SEQ ID NO: 204341 - DNA, 1053 bp, Cannabis indica
attattattattattttgaatggtcccaacccaccatcaaagagaaaacctctaagaagggaaagaggaaaaaaaatatgtactcattcgttacttgcttcatgcaatataagagattgaacacaacgagggacatcactaaaacttatagtgtccataattagtacgaaacacagttttctaaacattctcttccttaatccttaaccgataaatccaaagttgagtaactcttacaactaaaccttcaattctcttagctccatgagccatttaatagggcacttagataccgattctgctcccaaaactaattcaatgacaaatttaattttccggtgagtagataatccacacaaatcttctggaaatacatctaaaaagaaaattcacagacaagtttatactttcagattcgatcgtaaaagcccacctagtataaaccactttaactaggaatcttatgcaatctctgtgcattaggtctttagccttcagagctataattccgggtatacgagatccttgtactatacccacaacacaactaggttggtactaacaggttcgaacactaccattttctcgcttacaatcgatcattactccatacttgaacaagaagtccattcccagaattatatcaaagtcacacaattgtaactcgatcaggttggtagttatctcacaaccgtcaatctaaaaagataagaatgtaatccatctagtggacatcatcaactctctagatggtaataggattctaaaccccgaaacataaacatcgagaggtttatgaaaacttccatcattctacttaacatataagagtgtatagctccaaaatcaaatatgtagtgccttgtcccgcagaaacgccacgtgtgtgcttttattaattagtttataataacaaactatcagtttaagaaaatgtgatttaattaaaaattttaataaaatagcttaattcataaccaaaacttttcttacaaaataccactaatttcgggaatctccttatttataaacttttataccatattgcaaaac

SEQ ID NO: 204342 - DNA, 1174 bp, Cannabis indica
ctaacatagtgtgctttgaccaaaggccaaaatagtgtcatatattgcactatccagcgaggtggttgcttctctaccagagggtttagttgacccgttttagaaactttcatcacagcatgcataaataatgaatgcaatcatacaagattgaaccaatacataactaaaatatttcatagagtacatttactgacctcatcacaatatgattgaactgggttgcgtgaccgggaggaccgtctaggctccacagagttacaaatcttcgatctgggttttgaaagatgtcgttgctgcaccataaaagaccaacaacaaaagattacaaacaattttttcttttaaaaaatagagactgaaaacgttgtaaacaaaacactaccggggacttcttctcagaatttgtaaggtcagataaactttttgtgatctttgcaatacccaaatccttcaaccaccaccaaaaacaaaagtgaggaatattatatatagatcaaataaataaaatgaaaaaaggagtgtgagtgtgagtgtgacctcaaatctcttcttgttttcctcaaggcgttgcttgcgaacctcttcgtaagtgttggaatcgccattggaggtcattatcatgagtgagaactaaaaccaccatagaaatggaagagtgtaaaatatagagttaatagtataaacatgtctttagatcacctcacacactattagtatttagtattacttactgcctaaaacgagttgacttgaccgcccttttgaatttcaaattctttctctccctctttcagtctcaccctctctctctagtctctatatataatattcttttatttactttatattatacgggtcggaaatactatcaacgacgtcgtttagtcttctttttttctgctttttccttctttcaactttactcgcatttttcacagcccaaaaaaagaaaaattttactcgcatccatccaattctaactttttttctcttaatcctatccagagtttaaaatttaaatttttaattagatatctaattacatatttaatttttaatattaatttaaataaatttcatccttacaaatttaatgtaattaaaatttaatataattaaaataataacactaacaattaataaatgaataacaattcaaaaaaaaaaaaaa

SEQ ID NO: 204343 - DNA, 553 bp, Cannabis indica
ttgtatggaagtaccaggtccgtaaacagtgggtgttgtgaacgtagatgctagaggaaagatagttggagcattcatctgtgaagtttgtgttgtggaagtgtttgatgatggtgctggaagtactcaataaacctcaacataagcatcttccatatttataaatccttaggctctggataagaagtcagataaagaatctaccattttcttttgaagttcccccatagcaaggatctaatggttatttctaatgttaaagccaccatcttcatatcatcagtaaccttttttttacaacgatatccatcatatgttggatatacttcttgaggctttctcctagttgtttcttgatgttagttaaagaaccaacttctaggttggaatcctttgctagtatgaattgtttcgtaaacattccttgtagatccttccagttacaaatcgatcttggagataaccttttccactagtcctccaccaactttgacagagttaatgaaaagtagatgcattttgcatcatcactagcttttactacttgcatcat

SEQ ID NO: 204344 - DNA, 703 bp, Cannabis indica
cttgagttttgttttagggatttcaagatttggcttaaagggtaaggcaaaagaaaagtgaatttcaagatctaaaaattctaggttttcaaagtcaaggtcagagagatttatttttcttactttaaaaaaagagaaaactaccttgaaaaaactccacataatttgaaataaagaaatctagagttacaaagatcctaaaaataactaaaatccccagctaactcaaatcagattaaaaaccctattaaaatcataagtttaagaaacgaaacatatcataaaatttacatcaaggggataagaaaaacctaccgtgatcagagattgatgatggatttgacgaagttttccctaaagctcgacggatccaagggaaagaaatgaagtgtttcttgggttttgaaaaaatggttgtaagaaagtaaaaaaaaaaatagtgaagagaccaagagggcatacatagaaaagtgaaaagaggaaactctgatttctgtacttcttcttttcttagaaaatagtgatggaaatggtgatgagggatgaaaatgtccgtcttttaacaatattgtaagcaccattttattaaaagaaaatttaattaagggtaattcaacttacaagttagttgaaaagacaagaatttattgcaaaatccatgattagctctttattaggaagataaaaatcgccaaagaaaaaa

SEQ ID NO: 204345 - DNA, 565 bp, Cannabis indica
ttttttttttgtgtgtatttttttctttctcttttttcgaatgaggaactagacttatgttttaaaatgattttcttgttgtttattattaatattattttacaaattaaattagatgaacttcgtttgaaagagtttaaataaccaaataaatggatgtgaattcatatatgctttatatgaccaatattttagattttgtcgtagagtctttcacaaataaacttagtagatatcaaatatagagataaatttatgtggtttattttgtttgtctgtccacattttcaaatttcaatattgggtttggaccatacctcagccatgaatatctatgtttcctaattactggtgcaccaccaaaatttttcctttttttttttaagtagaaagtgtgcaccactaaaattaagttattattatcctcaaacttcttttatagaaatatttaaatgctacaaatattatcaccatgtaaagagtttcacagtaaactttcatttactacttcttgtttgtattttaaatttaatgagaacatgaaaatgaacttcaaaatatgtca

SEQ ID NO: 204346 - DNA, 1898 bp, Cannabis indica
atatatgttgtgtcgtgagtacgtacgtatataattgccggattaataacaattacaattctaactcttatatgtatgtatcactcaccgcaccatgtaatgcatgcatttataataaatcaaaaatcatgatgactatacattgcagtactacaccatatattgttcagtttcaattaatttactgaatgactagctaataatttatgacgtaatgtatatatctcctctttcaagtatacggctcatgaatctcagcttacatataatatataaatgatgaaatgaattaaataattatttatttctattcatatacattgttttgaagaagtcggcaatgatcataatcgtgttaatattaccatgtatatacgtgtgatagatttgatgacttgggtatgggaacaccgaagagttgggagtgtcggtacgtatataatttcaatgtctacatttatacacgggtggtgattatcattaattaccatttataggtagttttagtatttttgacatataaataaattgtaatatatatattttcttaaaaaaatagtcaaattaaatccttaagagtaaatctagttagataaatcttaagagaaaaaagaggactaataaataacattgatcacaacatccgccagtactgcagtcaggtagccaggccacaaataacaatcatccaaagaaacagctaacatagccaaagtattaactactctattagtaaatttaggacaataaaataaaagatatatcattaaaaattttacaataagcagtagtatctgtgatggtcctaatactgttaatagctttgattacattcaagcagtgggactccacaatgatgtttgtatatccaagtcttaaacaaaggaacaaagtagagtaaaagcccctttgacataacttttgaaaaatttaaaagttactttttggtaaaactattataaaattatgtttgttaaattgttaaaatatattatattaaaaaatttatagaaaaaaattacagctaaaagttaatgttggtacaacttaatttttataaaaaaaattatttttattaaaaggttataataacttgtactaaaaatatatttacttatttgttatacattataacaaaataaaaatatttaaatttcttattttttttgttttgtttttaaagaaatatatttatattttatatttttaattttaatattaacaaaccacatcaacctagagtatcttttttatttgagtttcaattttttgtacatgtgatataatataatttaaaatgctataaattatgtttatcagatgcatataaatttatacttacggaaaaatataattaaaatatatagaaaataaatattttatataaatttatatatttattattataataaattaaattataacattactattatcattataatagaatctgaataattcaaagcatcttaaaatttataatttaccaaaacacttatctcaattttttctataattatgctacaactattttttctcacaacacaaccagaactgtttttcgccacaatacaactgtgccaaattagtcttgaatgctcaaaacttcagcaatgactgtcatgatactaccataccaagtatagtgcttaaagaataaacagacctagctgagtctctaataagtgttcacgctctattttttctaaactccactatccaagtttgcgtcacaattgtgttcacaagcaccaagaccagatttctgtcacttttcattagttgatcggaaaaagtgttggaaatacatatatatatagatatatgatcttattattttcatgtaaattatcatataacataaacagttattttctataacatgttatctaaaatct

SEQ ID NO: 204347 - DNA, 1586 bp, Cannabis indica
attaaattatataaaatttaaaaatattgcacattaataacatttaataaattaattattattcaaaacacaacattaaatttataaataaaaatattaatatactaaaaaatacaaatataaataacaaaatataaaaaaaaaatactaaataagtttaagacggggtcagggagtgccatagtagagcggaattttttttcaaaaataccgtgtaagttttatactatattctgagttaagttttcactgttattctacggttgttttttagttgttctactatttttttaactgttctgttttgttattttatattattttataaaaagataaaaaattcccaatgagtttaattgtaaatttttattcaaaattctatatttttataaaaatttctaagaaattttttaagtattatattgagaagttttatttacttatcacaaaataaattataagaatattttattattaatttttttttttattatttgtgttaatttcaatacttatttttttatatataattttttaagtcaaattttatataattatctattttaattttttttgtcataatatttaagattataaattaaattagaagaaaacaattagtgtaaattatatatatatattttataaaaaataaaatttgttaaaataaattaataaaatatctttataagtttttcagtgcaattaaattctcttatctgataaagtacatttttcaaatagacaatcagctattctagttggatggcatatgtaagtacattctgatagtaatcttcatcatgatttttttctataatgtgtttacggtggagttgagtataggggattattaacctgagaagaagcaatgtttccgttgacgaagtaaactaaaagacagtcaatattttggggtgtgcgtgtgggatccactactcctcttcacacatcacttaacatgggctaaatgtccgacggtataaaatcgctttcaagatagtccttagtcaatgtgagttgacacgtggcgttatattagaatatgccgcgtaaattgctgatatatatggtacgtacgcagtcaattgaattagttcaagccggcatcgtttctagaagaaaacaaataataaaaattaaaaatcattcacatttctcaaaatgaattaatcaaattatcatttaatttacatttcttgatgttagatctattatttttataaatgagctaatatgcaaattatattatcatgtatatttcgagtgtatagaataagtgactgtgtcatttttcttgtaggattcttttttttttgtttggtttttttttttttttataaagtatttttaaagtttagtttttttttttttttatttttttttattttttgttatttttattagtaattttcaaattagtaacgcatgtatcaattaacgaaacaaattagatggcttttgattgtgaggaatgaaaatataaaaataggaatgagaatgagaattacaataggaatggaatgaaataaattaaaatgcaataaaaaattaattaatttttttactaaatcttactattagaa

SEQ ID NO: 204348 - DNA, 593 bp, Cannabis indica
tctctctctctctctcttcaatctcaaaatcacttctcgaaaactaccacttcaaaataataagtgttgtggtatttatagattagtgataaggatccctaattaggtggctaaggatgataagttgttaagttagttatgacttaattaacaaacttataaactcctcgtaaccatatctccacgccagcttaagttaaagctcttttgaatgagaaccacgctttcgaacaatggatagaagcgggcgctgaagggacttcatggataggaatagcgacagctggagtcgactattcagaactcccttccaggagagaacaactagtcatccggaactcctttctggaggaagactagctttccctggagactccttcaggatggacaagttagacttttgggaacgcccttctgaatgatatctaacttttcgtaaataaataacatttggagacctatttatttggaggaactatacaacaaattccacctagtttatttaaattaaaatatgatatggtgatgatgaaagaatgcagctattatgcttggtattccaaatatctaagtatactaacttctgatattga

SEQ ID NO: 204349 - DNA, 608 bp, Cannabis indica
caatatataagaatacgtttattgggtagtaagcctctccaggcccttcttaatatgcctttctcaggaatgtttttaaatgatattttcctaatacaagtaactcaagcatcatcaatccacaaaatccacagaaaatcataaattttataaaataaaacatagcatgtattaaaaaatggtccataatacaagatgaaaaatctgtaacaatgagtctcctaacccatcccaagataattttttaccatggaaagtgccaggaccatacactcctgaaaaccaccatttatttccatcatccacttctatctgaattttaaacataaaaatctcatactaaagaataaataaccttaattcttctcaagtcccaaactataaaaataccaccagatcttcctaccgaaggcaaaacacaccattctttgtatatggatattcaaatacttcccataaactttatttcttcttataaaaatataatgtcaagactaatctcacaaatagcttctttcaccccacttctcttagaggctaagcggatgactctgatattccaaatcagaatcttcatgatgggtctatcttcttcccactatcatcct

SEQ ID NO: 204350 - DNA, 861 bp, Cannabis indica
tacaggtgaaatgataattgagaggattgaaccgaaaaaactctattatatatcaaacacaacacagtggcagtattgtaatatttgtacttgggctgtatagcacaacctacagttatttcattccttgtatctccttagttgcaccgttccctactctccagcttattattttttccgttcagacaatctcctccgtctcaatatttcatgtggtaaccttctttcttatatgaatctttcatttatatttaattttgatctcctctgattaatatcataaaatttaccgtccaaatctcacaccaccattgttagagaactgcttttgttagtttataatttataaaatgtttaaaattattgaaagtataatctatttaggaatagctaccatctgtttgataaaacccttcaatgagattatagatcttgctagtgtatataaatatctgtgtgtttgcgtacgaatttgaagcttaaaaatttctgggtatgaatgttattgatagaaattatatataatcaaaaattctagaaaagaccatgaccaagggatgagtctgagataactttttgtttatttttaatctttttggatattatttctctgttgggtacgagtttttttttcttactttaatatatgtataatgttccattctaaatcaaattacattatgctcaaatttacttactattttccatgtataatcatactggaagtttgctagaaaaatttaagcaaactcaaatcagtactcttgctgtaatagacattctattggaccattagttgcgggaggatttcaaggagagcttgtttgcaagtaaaattctatttgagatttcttcggttta

SEQ ID NO: 204351 - DNA, 1217 bp, Cannabis indica
ccgtataagaccttttattcgttttttagttcgaccttatgggcctttttcagtacaatgtggccgaccaagcggcctttaaactttgttatattttattttgttttaagacaactagctagtcagacaacttttaatcccgaacttatcgtgctttgttatctttttattttaaaatgaatattttccattgtttttgtaattgcacatgcaaacttctatatttttgaacttgttatttacctatgttttgtacaagtatagttacctcccaagtgaccgagcagacttatgactcttggtcacttgtattgcacaagttcatctttcgtctatttggcttttcggttcgatcagatccttggtacatggtaaattcataacttgctataaagaaaaataattgacacaatcagaatgatgataaatatcgttattcatttattggtctgaatgattttattacaatagtctcatgtgggaaggagattataactctacgggcaccattgcttcataaccgtaagccatagcggatgttgtctgcccggttgctattttctctgttgttcggtatgaccacaatacttcaggtaattcctctagccaattccctttggcttcttcgagctattttttcatggtgtccttgagtttcttgttgattgccttgacttgaccatttatttcaaggtgtgccactacggagaaactacatatgattccatgggtcgcatagaaatctgtaaatatttggctatcaaactgtttgccattgttcgaaacaattttgtgcggcagtctaaactaacatatgatttttttgaatacgaagtacaacacttttttttgatgtaattgttggtaagcgctcaaactctgtccactttgtaaaataatctattgcgacaactacatattgtactccacccttacccttgggcaactttccaatccggttgattccccatattgcaaaaggctaaggactttgcatctgtattaactcattaggatgtgctcgggggatctttgaaaatgtctagcatttataacatttctttacgtaggccattgaattttccatcatggtttgccaaaaatatccttgccttagtattttctttggcaaactttgcccgctgcgtggttaccacaacatccgtcatgtacttcagagaggaggcgtgcagcctcactactacaaaattggcttt

SEQ ID NO: 204352 - DNA, 548 bp, Cannabis indica
ttgtgtcaaactgacctttaatatcttaattttagtttttaacatatttaatcatgaatagagaagattaaaacatattattttacatatataaaataaaatttaattatttattatattaatatgatgttgataattttaattttttttatcttatgacattttgaaaaaggattttacactaaagctaatccaaataaaaggaagtaatccaaataagctaatccaaatgagaaaggaagtattttattttttttttaatcaagaaagaaataatcttcaataatttaatatttgaatatttttttcaaaataaaatgtaatttaataaatttattaatattatataaattaaaaataataaaaaatatattcagatcatatgtttgcatgttaaataaataaatgcaccctaagtctaatagattatgttaataaaaacttaatctaatttggattgattgatagaggaatggcaaatgttaatcaaatacaactgaataatataataatttagtatgtagaagtatatcattagtagatgttgt

SEQ ID NO: 204353 - DNA, 553 bp, Cannabis indica
tttttttattaccaagaaagaaataatcttcaataatttaatatttgaatatttttttcaaaataaaatgtaatttaataaatttattaatattatataaattaaaaataataaaaaatatattcagatcatatgtttgcatgttaaataaataaatgcaccctaagtctaatagattatgttaataaaaacttaatctaatttggattgattgatagaggaatggcaaatgttaaccaaatacaactgaataatataataatttagatgtagaagtatatcattagtagatgttgtaataatattataaataaacctaacaagattttcaaaattaatttatcattgaaaaagtcattggagcgtcattatcaccctaaattgttggaattgacaaaaaaacaaatagtgacaaaaattacgagagttgtccaaatttatcaataactatacacctacaccctcttcttctccttttttttttttttaaaaaaaaaatattttgatatataaatatatgaataatatttatagtcgttggaagtaaataaat

SEQ ID NO: 204354 - DNA, 573 bp, Cannabis indica
tacttaatcaccttgcatatattaatggtatctgataacagatttagttaaagacttatagatatcaaattatatttctttatcattagctcgtaaagtcaaatgaccacctcaaatatctataagtacgccaccagttgataaaaaaagagtacgcccaagaataattagaatttcttagtcctcttccatgtccaaaatcacaaatttgttgtaaatatgaatttatctacctttaccaatatctcttcaattattcctctaggataggtaatggaacggttcactaactaaagagtaatggttgttggatttacttcgatatttaattcgataaagttctttgtgatcttagagcaagtatcaaacttatgccattctcactgttcaagaaattgggataaggaatggtgaagcttccatgttctttcactttctaaggaaatttcttttgaagggtggcactacattcttcgttaatttaacactttcaaaatcttaagagtcgttttttttttgttcatcacttcttccataaacttcacataatttagcaattcttaataaacatca

SEQ ID NO: 204355 - DNA, 926 bp, Cannabis indica
taaaaattaggttaaatttgtcataaaagacagcatgtggttacgaaaagtataaacttacgcaagtgcacgtatcaagcagtactcacacatatgaggtcgaactacaaggaattaaaattaaataccactaaattagacttatatttccatttggttaattgaaataatttggaaagaaaaataataaaaattgacagaaaatttgaagaaagcaattaacgttgttcaaatatagatgaggaatcttgtttcaattacacaattgttaatgctatttactattcttctttctttaagtgatgagataaattataaaaataaccctaactctactcagatcattaaggtcctaaactatatatcatctattgcatctttgagatagatcaatcacgtatagtttgcattaagaaataatctaagagtcacacaagcgatgtgagtactctcgtttcacatcaaaatccatgtttgttcaattagaacattcctaatattcaccttttgagatttcatataaggatcataaatcatattaaatgtgaccaatctaaaatatgtattaacacaaatatgaacaaatcacaaagattcaaaaagaagaagaagcaaatcacattaacaaattggaataaaatcaatcaacattcattatatctctaaattagaaaattagttcataacttcaacaatcaaatccatgttttaactaaaaataaaaattaagatacaaaattaaaaaaggaagagaatgaatctagatggagaacttgatcggatagtcactctcgctttctcaatcatcttcttttgtttgtaggattctatttgttagcgcagattttcgttaactatatttgagcctaagtcgtgataaacttgtacaggaattaaaagctagtaaagaaaagataagaacacaa

SEQ ID NO: 204356 - DNA, 1406 bp, Cannabis indica
taatggtaatagtaataataatgccaattagtagaacatgtccaagatgtaatatttcagatgaaacaatttttcacgcgttggtgggctattcatgctctcaggcttgctggacctatgttgcacctagtataagttattggaatgagactagtttctttgactggctgctggttttatttaacaagggtaaggatggtgtgttggaagaagttgcaatgattagctgggcaatatgaaaggcacgaaatgagtttctttggcagtttaagacttcctcgacaacaacttttgttcattcagcaagaacaattcttgatcaatttaagtttgctcaattgagaaaaggtttatccttttcttcatttattgatggaggaaaggaaacagagtaatggacttcaccagttgttataatgagatcaaggttaatgttgatgggataatctttgaacaagaggaacattttggtatgggtgttgtagctcgcgacttttctagtagaattattgaagcttatatgacaggtgttgttggaaaagtacaaccagagattgcaaaattgtggcattaaggaggctttgagctggactaagaagcatacgcggcctcgcgttgtccttgaaaccgacagtctcttgtgtgttcaagctatttctagttgtgccactcttccttctcagcttggtttgttagttaatgactgtcgtgtattactttcttctaatagtaatgttaatttacattttgttaaccgatatgtaaataaggtagctcattgttttgcaacaagctcttgtttctttacaggttgtgttcttcaaggggctgattgctccgctaaagtttgttctattgtaatggatgaaatttcttgttaataaaagtgttgattttattcaacaaaaaaatagtaatgtaataagaatggtaatgagaattgattatgatatttgatttttttattagaatggatattagagtaagtgataaattgataaaattatccccactttattttttaaaatttatataaagagagggtattagcaggatcagccttagacctaggcagggtaggccagtgcctaaagcccacaattattaggggcccaaaataaaaaaaaaataaaatgtctcattatgtttttatttaagtaaaataaaatatattataaaacaacaaatattcaaatttagttagtttgaggtgtatgacaaattacaatagtgtgagtttggatccataacgcgctcttttttaatatattctcaaagtgaggtcccaaaatttaaatgacttccatatattcataggttagccttcgtagagtcattttaattttgcttttatggagattcacttaaatgatataatcatcatgtaggattttctatcctaaatc

SEQ ID NO: 204357 - DNA, 735 bp, Cannabis indica
attaactttttatccacacaatgaaagagacttagtacttaattactttaatataaagagggtttgaagtgttgaactttatataaataaataaaaccaaatattaatttagggtttaatttttaattccctatatgatatatatctaaatctatatcgaaattaaccaagaacaaatatctttatcagaatgaaaggtccaggtttgaacacatatgtactagtcatagagtttggactaggtggactaggtgggtctatatatcttgggaccaagtttattatgtaatcaccgtactttatacattatactcaaaagtctagctaatagctataatatacacctatatatatatgtacatatatcaatatcaatttagcctgcccactattttgaaaaaacaaaaagctgtaagaaacaatacagatatttttagagaaagtatacccgtcttcaattattgtactgtaaattatataattttagttatctttactatatatataatttttattttttttatctttaatttgttgtttatatgtagaatgtatacttacaaaaagatacccgatcaatgctcattgaactattactttactagctcaatcaaactagaaaaaatgaattggataagtatgaaactaaaaagtattaaagagagattcacacacacatatatatatatatatgtatatgtatgtgtcatgtgttagggaaaaaccaaaaaaaaa

SEQ ID NO: 204358 - DNA, 645 bp, Cannabis indica
atattagcaaaagtttaatacctgaagaatatgagaattaagcttgagactgcttactggttcaacagcaataacctggtgaacaaataaatcactgtgtatattaaaatactgaatcaagaatcaaaccaaaagggcataaactcaatctatcacagaacaaggataagaaaatcaatcaagcaagattcccaataaagtgaattcaaattgggattcacaaaacaacccatctaaataatatctcaactaaatattgctactttcctttaccagcaaatttccatctcaaattgaaagtaaggaaagaacaaaacaacacacatccacccacacacacggtacatccatacatcgacaacaaagctagaatttttttttttttttttcaatcaaataaacaatttttcctgaaatcagaaaatggggaaaattttgaatttgaaaaaaagtgaaaaattagacaaacctggagattacagagggagatggtggtagcgagtaaaagtaaaagagagagaaacgaaaagggtttgagtgatgctgcttctgccatggctcgtcaatggttggttttccaaactggagattggaatttatgtaagctaacttgtagaaaacgataatataagaaaataaataaat

SEQ ID NO: 204359 - DNA, 497 bp, Cannabis indica
gatgttatgggtaaagtggcctcatgtgcaactaatcttgaagaatggggcaaggaattcactgagaacttcaaaaaaagaattaatttttggaagaaaaaggctgctcatttcaaaaggggcagggatgatgcttctttatctggtttcaaagaagccgaaaaacaattatttgaagtctatgctcaacgagaagtcttttggcgacaaagatcaaggcaactctggcttcgtgatggtgaccaaaatagccgatacttccatactgcagcaactactcggaggaggaacaactccattactaaactccaaagttcaactggaacatggtgcgactgggatacaagtttgagtgatattattaaagattattttgctgaattatattgctcctctcctgggaatttttctacggttattgctcatattggtcctcgtttcgattcaacaaaccaatgattattgtcaattgttacggaggaggaagtgaagaaggc

SEQ ID NO: 204360 - DNA, 1171 bp, Cannabis indica
ttaggtgtatatactattaattattatttagaaagacaataataattatttacaaaataggtaattattgtatatatattaattaaagtttaaatttattattagtaatagtaaacttaaaataatgtacttaaaaattttaaatatctaaatacccgattttagttttaactgtatcttataattaaacaagataaatcgcagtagtgaacatttctttgtttgtgggaaaaaccatcaaattaagaaaaaaaaaatgtatttttcatatcaaaagtattaaattttcatcaataatataaagtattatatatatatatatatttatatatacgtaaatatattttaatatatatataaatataaatatattttcagtacaagagtatatgctaaaataaaatacgacattagaagcgtatatgtaatcatgtttagtcacgaagccgaacaaattttagattgttacaataaaatattctgaagaggtatgattttaatatacacatatttatttatttattatacactacaataattaataattgaagattaataccaacttttataatttatttttcaggaaaataataaatatatattgaaaatatttctaatgaaatgacaactaaatgttagatattataaatttaagttgatcaagagatgaagactcaaaagtacaagaatttcaatgtaggctatattaaatgtaaaaagttactaaatcttttaaattataaattacatataaataactaatattttaagaattagaataacaaatgtaatattttaaaataattaaacatctaatttgaagaaataaaatttataacttaggtaatatgtaaaataatactttcggtaaataaatatatacaataaaatttataaataatatctatattattatatcaaatattttaaatagaaaaaatacatttacaattgagatagtggtggagggaagggggcatgtggggtcatttgccccccttaattttttattcataaattttttttagtattttatattttgaccccataaaaataatttttttcatctttgtccttacatatttttatatttatccccataaaatttatatttttcactttaattctcacgtatatttctttttattcttatagaatttgtatttttttt

SEQ ID NO: 204361 - DNA, 696 bp, Cannabis indica
catctctaatagagggctaaaaaagttcaaggggcatgatttagtacatgtcaaagttcggggggaaaaattgctaattagctaaaattatttaaatgaataaataaaatattaaaaacttttaattagtaaaaattattaattagtgacaaatgagtaaataaaaatataacattaattatggtataaatttaatccattccatattttgtgcaaaattttacttaatttttagcatgtgccaaagtacttgacacaccttttacactattattggagcttcattattttgaatgagctaaattatgggtagtaatacaccacttttatagccctctattagagatgttactttaaggtgcttaacatcatactgatatgatacgttataagtggttagcagtttcccatataaataaaaatgtgtaagatccgatattaaattgcaacgtatatcacctcttgtagtgcttaacaccttaacgtacctcttattatttatcttctaaaaaatatcttctatctctaatgtagtcttgcagttaggcctcactaaagattatatttaaaaaaagtgagatttcattaaatacactaatacagtaggtgtttttttttaactagaaaaacatatacagttaattaagttttattattttaaatttgcatttattttttcattaaaataaaattgaa

SEQ ID NO: 204362 - DNA, 1435 bp, Cannabis indica
aattaaaataaaaaatatttttagaaaattttaaataaaaaatttgaaaaaaatttcaaaaaattttaaaaaaaaaattaaaattaaaaattaaacctacaatttttgaaaaaattaggtttacaaccgactttaaatatcattttacaaaatttttgctaaactacttttaaaatttaaaagttattttaataaataaaaattaaataaaaaattagaaaagataaataaatatctttttcaaattttaaatgtaatttaaataaataaaataacaaaatttcaaaaatcagaatggagagattattgatgactactctgctgttgttaagcactttgtggatcatttcacaagctttatggggagtgctcgaccagcagttcagccttctttcagatgtcttgactttggaaaaaagctcacttttgaccagcagttggccttaatccgtcctttctctaagaaagagattaagaaagctatgttcagtattccaagcataaaattgcctggtccagatggtttcagttcagaattttataagagaatgtggcctgccttaggagatgaattctgctcagccatccataacttctttgtcaccggaagaatcccagatgccttgaatgaaacagctatctccttgatcccaaaaaatgatgccccctctaatgcagttgattataggccaatagcttgctgtactactctatacaaatgcatctctaagttgatgagtactagacttgctgaggtgttaccgagcttgattaaccagaaccaatgagctttcattcaacagagatcgattgctcacaatatcttgatttttcaggatcttatcaagaattacaatagaaagaatgtttctccgaggtgtgctttaaagattgatttgagtaaagcctacgatacggtggattggaattttttggaaaaatggctgattgctcttagattcccagataaatttgtgaaatggattatgacatgtttgaaaggaacctcttacaacctaatgatgaatggaagacttcaaggcagattccaaggtaagaaaggtctcaggcaaggagatccgatatcaccactgttgtttgtattggtaatggaattccttacaagaagacttttgcaagaagccaatgcccctctgcaaaagcctcaagctaatcagcctctgctttgcggatgatctaatttattttgcaaaggctctatgcacgttgtgagtcatctgaaagctgccttggatgattttagtgaagccacaggtttgtctattaattatacaaaatcaaacatctattttgggggagttgatacgacaaccagaaatgagattgctagactgtttggccttgaggagggtactttccctctaaaatatttaggggtgcctatgagacctacgaaatggagaatggaggactg

SEQ ID NO: 204363 - DNA, 1061 bp, Cannabis indica
atttaccaaattgaaattccaattccaaaaaataaagagaatagttctaaattttgtgaccatttattccaacaaaaatatacgtgacatgcatgtcatccccacctttccctttatttttgttgcattatgcaacaatactatttgaccacaaaaagtaataacatattccacaagaaaaagaataatagtaaaaataattttgttatattttggttagaaaggcctttatgcatataaatagaatataattgattctttcaataatgtacaatttcaggttataagcagagcattgggaggaaaggtaggaaaatctcatagtggttgggatttggggataagaaaagtgaatatagtgaaagatttgccaccattaatgaccaagttattattggatgaagatgaagatgaagatggtaataataatcaaatgattatgccaataatatcctcattttccatcatagaatgtcaccaagatgaggttttagaggtaccaataggtgctaatgtgattggttactcagaaaaaacaggagttgagatgttcatgttggaatctcacattcttggaattcaaggtcatcctgaatacaccattgatattctcaataacctcattgatcgccttcttattgatcaatttatacaggtaattaataatttttagaggagtgttaattataattttttttaaaaaaaattttgcgtttgaaaatacatgctgattttttttaatagtgttgtttgttatagttaattacaatattatttgtataatttttttaaattttgaatagtttagaatattgacaacaaaatttttgatatttcaattttctatacatgttcaaaaaaacttcaaatataattctgacactgtaaactattcattatttttcaaaatttatagaaaaatagtgttataactataacgaaaccaccataaaaacaaaatttgaaaaaaaataaacctatatttttgaatgcaaagattgtaattaattagtactcctctaacctaatactttgtgttattattattattattattatta

SEQ ID NO: 204364 - DNA, 533 bp, Cannabis indica
atattgtgaaatgaagggaagtcttggcagtatgtataatatgaagtgtatcaatatgaaacactatgtggcattctttgagagtaggaatggcacctcacgaaatgggtagtcatcggtttctagcattcgtacaacatgactcatttttggcctcttttctgaatcaggatcaacacatctaagggcgactagaagagcgtgttttaaagcacgtgtcgttggtttaacttctaggaatggatctacaacctcctcagctcttcttgtacccaccattacctttaaccactccacaagattaacctgtaaacacattcatgtttatctgtttagtgagaatcagatagaagtgccactcaagcaaaacacattcagatttaagatttcgatacctcattagcagctcgcccatagtccacaggatccctaccagtaactgattcaagtagaaggacaccgaagctgtaaatgtcgcttttctcatttaacaagccagtattagcatactctggtgccacataactgaaatt

SEQ ID NO: 204365 - DNA, 821 bp, Cannabis indica
tatatatctattttttttatgtttctaatgaattagataactagtgatgccataaaagttactccagctctcacaaatgttcgtcgtaacaagatttgatctgcctaagatgtttcttgtttctttggcactggtgatcctaaggatgtaactagagatcaaataggcgtacatgaagattcactagaagttcatcatatttaacaccaacaaatttaaggcaagaacaccaccaaatttaaaaccgccaacaaaatcaggagatccatcattgctaccaatctattgtcaagaacaaacattcactgaccaaattctaagaaaattttcaatagggtagtagccttaggatatttttacacatctttcatatgttcttaatgtttttccaagatgaatgtactaaatttgaccatttcatcttcgtgaggggatgtattaggagttaaagtttagatgttagttagttttgttattgtaacaattgggtagttagttacatttaaatattgttttgtttatcaagagatttccctatataaaaattttattctcttgtattcataacacacaagtatcttataatactcattcaataagatcaatcttattgttcttaataacttcacatcctttattgttttttccttcttttattatataatttatttatttatatatttatttactaaaagatcaatgtttaaaaacaaaattataaagaatcaaaatacatggtagaatatatgttgtcatatcactactataaaaagtattattcccgtcagttctcaaatcagttgttttaggaccgctattaa

SEQ ID NO: 204366 - DNA, 777 bp, Cannabis indica
atttaaagaatgtgaaaacatgcaattataaaggtataatatcaatctacaaatgtggactaagtctacttttagttctccaacacaaaataagtaatactaaagaagtaggagtatgcgttaatgagataaatttcccctcttctgggagaaggattgcgctaaaagagatctcacaatattagaaaagggaccttacatatctagtaaaactatggtattaacataaaaggtgcaaatacacacccaaccaacgaaaataaacgcccaagcatttaagcacaataaattcagaagttatattcatttataacctctgtaattagcactcctattatcatttgtatctgtttcattatagctagattttgtaagcatcacctactacctacaagtatgggcatctacgtctattcaaatgggagctaatcataataaaacaatacaaagagatctcttcaaaagtgaactaggaaggttaagcggaccactacaatttctttgtctatttacatactcgcatacattttatattatattatttgagtacaactacaaaaaacttgacttttaatcacaataaaaattgtgactaaaagtcaaaaatatcatgactaataattttagaacacttttttttttcatgtaaggttgtgactaaaaaagtttaagttttagtcacaataaaaataatgttgatgctaagaatcacttttagtcaactaaattttcatgactaatagatgtccacaattagtcataaccaccatttagcca

SEQ ID NO: 204367 - DNA, 749 bp, Cannabis indica
gttatacatttatacaaacaaatgaccctgacccacgtggtgatttatttttattttttttcaagaggtgactaaatttgttcttttgtagagcacattgagtgattttaatttatcaacaaaagctttccttttcccaagtgtaatgcaatagaaaatgacctttttttggaggagattcccatgaagttttatggactagttttcagaaggtgtagctataagatagatcatagatggataacgactcctttgttacttttactagtttgtaattggagcatatacacaaacaaaactaaaccaaactctttacttcaataatggctacatatatttctttaattgttaagaaaaatgaaaggcatattacaaaaaatatattgttttttactacattagtttttactattttagtttgagtttcactaaacgatactggatttctttgtcaatattggaaaaattattttacataacattttacaaaggagattgttttaagtacccttttgaatatacaaacttttattgagaatatgaatcttgcttgacctgtatatatgttaaagatgtaagataatacgaattatttattttcacaatatatataaggtccttctagttcaaaagaaaaaaacgctagaaaacaaacacagtaacaagattatctttttacttttatttttaatcgagtaagtgtgaaacaatgagtggatattttaatgtatcaaaaattcctgtacagc

SEQ ID NO: 204368 - DNA, 1254 bp, Cannabis indica
tttacataaaaacatacaacatatacagaaaaatcgtaattcaaacaaaagataaatcaatcaacggcttcatttccaaatatataagaacaggcaatgaagaatcgtcaggctaatcgaacactatgaacaatagtcagataaagattagatcaagctagaagtgtggacataccggcttagtctgtgaggagaaagaatgaggaagaaaaggtccgagagatcgtcggagatgagataaagtgagtttggtgaagaaagggactgtaatttgcggcttgcctaaaaccctaatgtggggtccatgtccaaacataagaagtcaatttttaaaatcataaagataaaaataaaaattaataatttatatctgcaatgggatgataaatcttcggtgaggcttgatctcatattttacaacttctcgtacacatgcacacataattaataagattgttgttgtttggtattttttttttttttggaatttatttattttttatagaatatgaactaagaagtgattggaaaaaaaaaatgcagttatttatgttcttatgtgttgtgaagttcgtataatgtaataatgtgcattaatgtataatgatgcagtaatttataatcggtagtggcattttctctaagtacgaataacttattatcaaactgaatggatactttgccaaatcatgtgttatagaactcttatcacaagctacatagaatagaactactctcgaaaatttaaataataaagttataacattttcaaacagaaccaccaactcattaaaaaaatcattctttgttgataattgttattagagagttaaagtttcagcttgtaatacaaaaatactacttaagaaaaacaaacaacaccaagaaacatgtattagaaaagaaaatccttcaattaaacttaataggctaatatcaaatttgaacacctaactgaaaaactaaaaactcaactacaaaaagagaaacgaaatcttgactaaaatctacagagaaccaatccatatcaaatatgaagacttaaaaagattttaaaatacttatttgtcaaaactgaaaaatcgttgaagtagaagtcatgagcacaaaatgaatcgtttctcttacttaataaccatacgacaaaactactttaaacaattaaagacaatttataataaatgacacaacaaccgtaaaagacacaaaaaccataaaagacacaacaaaatccataaaaagcatcaaaaacat

SEQ ID NO: 204369 - DNA, 847 bp, Cannabis indica
ctaattagcctttaaaaaataataaataaatccaataaaaatagctcatttatatttacatactttagcaaatctagagtcttggaaaaaaaaatcagagatttaagcttgttccataaaattaagtttgtataaaaaatgaatatttttaatatattttttcatatttaaataatttttaataaaaataattaatttttaaatcatttaattagtttaaaaattttagtttctcttttaattttcttaatcatttaaaaggatttttctattattttaatatctgaaataattttttaagaattatcaaagacaagttagtatttaattttaaacgataaagtaggacgaaatcttacaaaagaactaaaagtctgtaaatgtaaaagttcgagaaaaaatattaataacaagtagtatattttaagaaatacgacctgatagttggccgattcaagggtgggacagcaggggcccacgcccaaggccccccacctaggcctaaaaaattatttaacaaaaaagctccaaaatttgtttcataaaaatataatattttgtacttttactattatttattaaaaaatatattcattttactaaaaaaaaatgcttaatttattttttaaaatactacatttgatattttattaagaaaatgactaaattatattttcaaaatacaatattttagatttttattttttctatataaaaataaaaaaaaacaaaaaaactacatttatatatttttgcccaagcctccaattaactttagacggacttgatattatcaaatgttcaggagacaaaaatattattagaaaaatttgcaacaaaaattctt

SEQ ID NO: 204370 - DNA, 915 bp, Cannabis indica
gaaaatatatatctatatctatataaaaaattagtttggcattgtgctaacaaagggcattttttttttgtcttctctataaattattattagaattattttataaatatacaaaaatgaaaaaaaatataattttatggatctgttgtttttttacacttttacgaattttatttatttattttttttacaaaaatagtgttattttttgcattgcttttaagaatatttattttcacgttgttacgagaaagcaacacaatttgtttttactactatatagagtgttatttttttattatttcaaaataatattattttaatgtcgctgtcacgggaaaataacatgaaaacaacattttacgttaaaaaaaaagtgaaagcctgtaaaaaaaaaaccgtaaaaaagtaaataatattaataaaagaaaagtcctttaaaatatataaaaaaatatctgtaaacatgtaaaaaagtctattatgtgttagaatacagaagtgtatggtttagaaagtagaattagatgatcgagtgtatggttctatcttaaaattaattgaaaatgaaaatagtaactcatgtattttatgtatagtatttaatttgtgagactttctaatactatcctatgtccatagtaaaattcatcttttggtatatagcacaattagtatatgctaccaatgattaacttttacaattgctagtcataaaatacgtatcataacatttagatgtattaagtttcttaaatttatccattgtatctcttttaatttcaattatagccttttagaagggtcattcaatcttatcataaccttataattgtagaaaagtaggtaacatatgtaccctattataatttatactagctaggtattgccaccactttcatgtttttgatagtt

SEQ ID NO: 204371 - DNA, 597 bp, Cannabis indica
aaaacaaacaggttatttttaattgtttatttttctgtatagttttgatgagtaggagtactgtttgttgagctctaatgtgaaaagttaagcttagtcacaactttgagctaaccggagtgtggcagttacagttacaggttatgatctttatatttttttcacttggatcttttttctttttttctttcttttttttttttccctcagtttatgtttctcacaattttttgtttttttttttgtttttttaaaatttttttattaactttacttgagcttttcttttaaaatatttacatgctatttactatttgagttacttatgggttatgtcttaaaggttttgatcttgaagaacctggaagcccagaactgaacttcactctgttttccccctcaaaactttcttttttatttttatttagtgagaaacttccttttgttcttaccataattataatttagccttaaaaattttctctacaaatttgggtcaaggggtttttgatgttttgatctctatagttctttggtttttttatttttgtttgataatcaaatgttagttctttcgtttaagtcttctaaactttt

SEQ ID NO: 204372 - DNA, 1017 bp, Cannabis indica
tagatgtaagttgtatttacaattactaatttataatctcactatttggtttttttttttgattgctttgaatttgatcttgatctgtaacatcttactaagaccccatacgaatatatgatttgattgttttgtgggggttagaaagtgtttttgtgtttcagttcatatgcttgacgtgtttgaaagtgggtatagctgagtagtgagatctgagggaatttaaactgggtattttgtgaagtagggataagatcgtacctaaagtcgtagtctttgggtggattgagagagagtaatggcttgattgattgtgtattcggtactgattttaccattgtgggagcttaattaggacccactgattgtaattttgtgcaaattcacgtttttttttttattttcttaattttgtgaaacttttattaaaaaaccttcaagatttcactttcctgatacttatttgctttgatctatgagtatgattattctgtcactctcacccatatgctaatactaagcttgatatgatattcttgattgaacttatatcctaaatttaatagtgattgttgataataatgtttgaagaacagatacttattcatatattactgctcatttgtttgatattcattatgtgaaacaagaaaagtttatttaaatagaaatagcgtgtgtaagtattggtcgatggagcattgacattgaggaatatgtccttgtagggagaggatagagtagagatatatctgttaggtaccaaaaacaccattcgactgatgaccaacttttttttatcaaaaaaggaaaataaatagtgaacaacctttgattagtttttttttttttttaaattcttttttggatagtatacttcttcacatgatcaatttcagtttgtttatcaaattttgctatttaacactttcaaaatgtcaatttaaacagttgaacattgtgatacctttggtgtccaacaccacttgaggtggtaacttgttagtggtcagtgat

SEQ ID NO: 204373 - DNA, 1247 bp, Cannabis indica
gtagcttttacaatatagataactatcgtcggcgaaaaagcatgtgagaaactcgaggcgcaccattggccaccttacaaccgtgaataaagccatgattttcatacttacgcaagagagatgagagaccttccgcacatagtatgaacaaatatggcgagagaggatctccttgacggatccctctagacgggattataggacccatttcatgacagccatggatgatacggtaattcgccgaggtaacacaagccattaacaatcctatccaccttggagcaaatcccattttcatcagaatagcttccaaaaatggccattcaattcgatcataagccttgctcatatcgagcttgagcgccatgaatcccgttttccctttccttttacgctttaaataatgaagtacttcgaaggagaccatgacgttatctgaaattaatcgaccgggaatgaaggcactttgtgagtccgagacaatagcatccatgtaaggtttcatcctattagccaacacttttgttatgactttatataagacattacaaagagcgataggccttaaatctttcatcgtatccggacatttcttcttaggaatcaacaccacattggccattccacaagccgaatcaagatggccactatcaaaaaaccgctgaacaaaggatagaacatctattttaatcacattccaacatttttgataaaaggccggagtcataccatcgggtcctgggcttttatccgggtgcatttggaaaatcgcctttcgaacctcttcctctgaaaccggtaaactaaactcttcattagccaaaataggaacaattctatccacgctatcaatgacttcagaacaagctgaaccagtagccgagaatagagttgagtaatactccactataacatcttttaacccattgtcccagtccacccaaatcccatgttggtttttgagtttagagattgagttattcttcttcctcttgttcgccataaggtgaaaatatttactgttatggtcaccttctttgagccaaaattgtttggccctttgtttccaaaaagtttctctttgatcaaggatagtcgccagctgatttttaacttcatcatatctattaatagagacggaatctcttcggctcttcagcttgttaagttcactcttgcaccttttgattcttgtcttgaaagaccctgtaatttctttaccccagctactatctaattttcctttt

SEQ ID NO: 204374 - DNA, 1591 bp, Cannabis indica
agtaaaattaatctattcggtgaagaaaaatatcgattcaaattgaattattccattctgttcttcacttttgctgtttcgtgtgtctttgtgtggggaaagcctttctttattccccactatcatcatcatcagcagcctggtacgaacatgatatgatcgttttcttattatatatatgtgtgtgttaatatctatcatgggtttatttttgttgttgatatattagtaaaatgtcttgtaattgtatatttttcaatataaattaatatcacggccaaaacagggaataagagagtcgaaattgaagggagtggggtgaagcaataacactaacatgccgtttaagttacggacacgtgttgagaatccgagacatatataaaaaaaaaaccttaatctcaatcccatgtgctatagtacaacccaatttttttttaaaaaaaaaaaaattaaagtgaaggtaattgactatatatttagtttaatgttgtgtgtacatatatatataggtagatatagctcaaaagagctaagagagcaacaaagataggaatatgaaagtgatagtggtaaaaagcaaggtatcccttttctcatcagaattttcagaatatatgtatttataggactatatatatatatatctacacatctgaatatgagtggctctgggctggaacggaatgaaatgaagatggaggcaagactttgtatagccagatatatgcatatatatcatatatatgctgagagcagcatatatgtagtgtcgctttctgtgttaatatatattatatataaaaataaaaaatatgattccttcttggagaattttgctgcaattactgttgccagcctttgtactgtgagtctgtgagattataaagattataatcatcacaataaaagataatagtaatgaaaatattattatatattgacagtattcgtacttttttttaacataacgaaaaggctagctctacatgaccttggttgctacgtacataacaattaatatatacctgaaattcttcttcctcttcttagttagactatcgtttggatgtttatatctcaattagactaaatggttgtttttttttttttttaaattttatttttattctgaatttcatggtttcagtattaattaatatagtttgtggataattaatggttgtgtaagatactttttagagaggctaattaattaggttgttctattgtgaactttaatatatatcaaattatgatttttgaactttataagtggttaaaaattttctgtgaactgttaaaaatttacaattgtctatgtaataaattgtttcttaaattttaatatctattaaattatgttcctcaaacttacttttttttattaaaattagaaaatagtccttaaatacaataattttaatagtttaagaaagatttttaacgaccttaacaaatttccaaacataatttaatatatatttaaagtaaaaaaatcttaattaactttttaaaaattacagttaagagagctagaaatagagtagataaaaaggagtagggaattaggcgtttgactaaaataata

SEQ ID NO: 204375 - DNA, 1840 bp, Cannabis indica
actacaattcaaactcaagtttgtattggcaaaggctatgtcatttaaggaagactttcaacaagcaaagcctagttacaacttactgtggaggtatattccgagcagggacactttataatagcttgttacattataatcaagttgagtataaaaagacagtttgggatggtttgagcattcctaagcatagatacatactttggtaggctttaaactcccaccagttgataagagacttatatcaagatttcatattcctattgattctcttgattgtccagtttgtggcctggagaaagagagtaattcccatctcttctttacttgctatttcttaatcagagtggtgagttctactttttattggttgggttttcccaacttggccattgagttttgatagtttgaagaattgggttaatagcacaagatcaagccgtgtggcttctagtgtgtgcactaattgcagctacagtgcatggtatttggctcaaccgaaataaatgcttttatgagaattcttcctatacaattgctcacatagtgaaagaaatcaagtttatgttgcaatagaaatttcatagtgttaaaggaaaaaagatgaattcctgtgaagaataattaattaatttcttgaatctcaaactaagtgttaggagttaatgttttattatagaggctttagcctatgttattttgtttgattgtaattagtttggttgattagtgaattttttttccttaatcaacaaaaaataagatatattaataacaccatatttttgtactttttttttatatacattgacacgtagcagtaaagtgatgcttccacaccataattttatacagaaatataataaaataattgaaaaaattctacaatgcacccttagaaagaggtctattgatgcactatttatctgtttcaccatttaagagaaatttatagtctaatttttttttatggtagtctacgttttagttatttacgacatcctccaaaatttaaagaaattcagagaaaagtttaacacacaaaaattagggttcaaaaagtatttttctcatgcgtataaaataaaaaatatctctggtgtaacatactatttgaaccctatttttagcgtgttaaatttttcccaatctctcaaaattttataagtatcttaaataactacaacgtattcgaccagaagaaaaatgagatgaaaaaaattctctcagatgccaaaacaaaaagagagtgtgttagtgaactccttttaaggggtgcattgttaagtatctaaataattagttttaatagaataggaaatggaatagttataataataaaaaaattgagatattgacgacaaaactacctcaattttaaacttttaatacttaactataaaaactgattttttaacgacaaaacctaccaaactcatattttgttttgttctttatactttcatccgaaatcttctgttaagtgtcacggtggactgcctacgtgtacacaagagtacacgtggaaaaaatttactgattcacgtaattttaaatttaaatataataaaaataaattataaattataaaaagtaatttgtaagaataaaaaaatagaaaacatttttgtttttttcttcttttttttttcttttcgctttcttctcgaaccagaaccccctttcttcttcttcttcttcttcttcttccttctactattaccatcactacacaaccaccatcccactacaacaattgtcacacctcaaccaccattatcaccatcactgtcccaccattaccatcacccttattaccaccaccaccagtatccccacc

SEQ ID NO: 204376 - DNA, 580 bp, Cannabis indica
ctagctatatttgatatactttatttccacttttgcttttgggcttttgggaaaagtggccgattactcttttatgttatttctcaaaacatttgtggcccattttgaatttgggaatgatgagctttgaaggaatttctttctttgttacagattacacatatatgaggatattttcttaagtaccaaaaaatgacaaaacaaattataaaaatatagatctacaatttctttttagcattttcactagattaatttttcttttatttttaaaatactgactgttgtttgtatgtttctttcatcagattccgtaaaaatgttatttttttttttctaaaaagttcataaattagaattgttcataaaaatgtacattgttttaccattttaattactttgtataaaaattcaatatatacataggtcatgagctctttgatagtctgggatgatatagaaaaatgacataattacataaaatattattttttatatttttatacgttgaaagattttttattatatatatttatggtatccataaaaataatactaattaacaagaaaattacataaa

SEQ ID NO: 204377 - DNA, 1159 bp, Cannabis indica
ggcataaatacttaagtttaatcctacttgtaaattaatacttaagtttaatttttgacggtaataaaatttatgttatatttttaaaatttctgcaagtagctcgtcgtttagtgtcaagttaatggctacgtgacagttcttgattgctcaaagtcatcattaaattttaaattttttattgaaaaattaatttaaataaactaataaaaaatgacatgtggataatgatttgtaaaagttttgattatataactcgtatattattaacataattaaaaattaaaaataagtatttatttgtaactgaaaattaattttaaatatttacacgtaaattgctttaattaaaaaatgaatatggcactataaaaaatatgagacaaaatagaaaaaagaatacacaagtcaatatttttttcatgtatttatttataatgtttggtagactatgatttctcatcttaggcacatggaaatgagaagctatcatgttgtggattaggattgggaagatgattttggtcattgcccacatgggttcttattacattgagtaagttaaaagaaaataacacaataaatatagtttcttttggaaatataaagaacaaaaaaacataattgatggaaatttttaatttattaattgcagaacaatcaatttcaaggttataacatgagaaaataattatctttggatgtaatttatcttttcctagtatttgctatataataataggaaaaatattcttgtacatcacgatcgtccattctcttatctgtttcgacatgtaaaataatttttggtttaatatatattttttttataatctgttatatttattaagattaccttaaaagttttataaaattcaaatattttatagtgctgaaaataaaatttagataattacttattatacgtataaaaaaataatcacacgcaataaattattttgaattttattttcaattttgtaaattaataatatttttttgaaaatttataggtaattctattaattcatagtacaaagtacactattaatattatgaaggaaaaaataaattagactttttcctaaatatcgaaataaatagggagttagaagaatataaattttaaagaaatatgtatgtgtaatgataatggtaa

SEQ ID NO: 204378 - DNA, 859 bp, Cannabis indica
cgttaaaaattttaattctcatcactgcttattcttcatcggggattagaaggggaatcccctaatggaggcgaggaatcccataataaaaaaataaagtttataataaaatttttaatataaaaaaatattaaactacataaaaaattaaaatattacacattaattattattcaataaactaattattatccaaaacacaatttataattcataaaaaagatactaatatactaaaaaatacaaacataaattacaaattataaaatattattagaaatataagataaaatactaaatgggtccccgtaggggcgggaagcgtgattctcgtccccgccccgtttaacattcgggaacaaaaagtaactcccgtccccgccccatcccccattcagacggggaatccccaccccataaggagctagtccccgcagggccccattcgcatggagaaaatgttcatccctactcatatattgatctcaaatttaattataaaaacaatttgcaatttttgaaatttcatttatatatattcatgatagaataaattaggggtgttcatcaaaccgctcacaccgcacaaaccactcgcactgcagaaaaatgtaatttaaaattctttgcggtgcggttgtggtttgtatttttactaaaccgcgcggtgcggtgcgatttgcggttttgaatttaataattgctgttcaaactgcaccgcactatatattatttttttcatataagggcaaatatatgtaatatatgtgtatattatattattttttagagacaatccaatataatgatttgatgattagtatatgttatgatactaaaattttaataagattttttt

SEQ ID NO: 204379 - DNA, 1424 bp, Cannabis indica
tgtgataagatgaaagctctcttggaatataaatatatttgttaactgaacagacatggtttgttctagaaaatccaagaatttatattcttgtagctggaaaatctgggaaggggatgtgcttttgagttttgatactattgacttcaaataaataaaggaaaatgaaaaataagggactgtgaacttgccacagaatactataaacaaattgcacacaattcaataagacatttatacaaccaccctgtctatgcaagtcattttttactttatatttataagtcaaattttaaagaagattaaattaatctgtcaaaattttattggaccttatatagcgcccgaccctgatattaatatgaatgtcaatggtttaaggttttaaatatgttgcctagcagtaattttgatggatagtacttgaatttccatggtatccagatttagaaagagtcataagtgtgctgtcattctcatttgaaatagtttcatttttgttgatgcatagtactaatcttaagtcctcttattgtttcttctatgttagtttcttgaagtaattttgtttattgattcgtttcatctggtgacagtgcacaagctcattccttgtatgaagtcctctgggggagatttcttgttggccttggaataggtgtaaacacggttctcgttccaatttatatctcagaggtactagtttatatcattcttgctgtatttactgttaatcgcaagtttccaatttgcttttgtgtgtgtgatgtgttatattttaatattcttggtaaatctaagtgatcttagcacttttctatgttcttattttatattcataataattaattctgctcattatgttaaaaaaaaaagtcatcacaagtgttgtgtagaattataaggggtaaagaaaagtaatcaatattctggaaaattgatcaacatggatttttatgccttgcttgtcaattattggtttcaaaacattctgactgagatttggtttgttgaatggcacttattgtgaaattgttttacatttacttctcttattaccaaagtaaagtgcgatgtacgttgagtttcctccttggtttgttttttgtcatattgatgcttgttattgcttcaaacttttatctacatactataatcatttatctgatttgaacggtacacgttgcaggtagctccaacaaaatatcggggttcgcttggcagtatatgtcaagttggaacatgccttggtattatttcatcactatttctgggccttccctctgaaaatgatccacattggtgaggttctttctttctttttttttttgtggttatctggactggacaatagatgatgagttgatattaaggactaattttcttttctccatttataaattaattgcatgtttagctatgtg

SEQ ID NO: 204380 - DNA, 837 bp, Cannabis indica
aagaaggaggtgttgttattaagcatatgctgtgtaatgatgatacagctgaggcagccatgaaaattgtttcaccttaattgattttgcagattaaaagaaaatatgtgaaaaaattatgattgtaatgagtaaaaccctaaaattatttatagggaaaatgaagttaaatggctgatttttggaaggattttcttcaggatggtttggtgttttgttgaagctgaaaaagaaactgaattttttatattttgaaaaaaaactgtaaataaactctcttaattacaaaaattaaaaataaaataaaaaattaaaaaaaaaattaaaggacaatttcttggcctcacaatgagagtgagaaaagggcccacataagactgtttcatcagcaagccaaagtgagaaagaaaattgggtctctttctatttcaagtttggaacagtttttctttattcaaaaaagtttggtacagcttctttgtttttttgaaaagtggaatgaatgccattaaaacaggcaaaacctcattcatatatacctaaaacatttggattggataccaataatatctaatatcacttagagatggtgcattacgattgattattctttaaaaattattatattaaattatatgcgattcgaaacttaattgtattaatagcgatatgacactacctggtgccttttaatatttttcttcaagcaaccaattttcatgtagtactaggcccctgaaaatagttacaagtacaaatttggtataattggtttatttaggagtagtttggccttaaattcaatgctatgaaactcagagtttagaaaggaaaaag

SEQ ID NO: 204381 - DNA, 1502 bp, Cannabis indica
taataataataattaattaaaagtctctaattttattgaacaagctaataatatagaaggacacatatataaaattcattgtcttaattaattagtgaaaggatgcacattttccctaaaataataataaaaaaaacttctattataaatattagaaaaaaaaacttttgaaattgtaaaggaggaagattatgtgagagcacaagaacaccatattccacattataaatttaaatgctaatattgaacaattttttaaaatatgtctttatttaaaaataatatataggaatatatgaatatatctttcattaaaaatcactttcaacatgattagtttattatatataatttcattccttttttcaatcatgatttttaatatatagatttaattatataattatatttatttaattactaaagttttactataaattaaaattagtaaatataaatataatataaatctcacaaattactgatacaagaatataaaacaaaacacaatcatgatttttgatatgatttttaatatttgtttcttaattttaaaaaatttattttttagactatgagaataaatttatttttttttttttgttaatgtttaaaatttacgtatttgattaatgttttcttaaaattatttttagagatttttttttacttgaaagaaattacttcaaccccacacttcgacacaaactcgaacccatctcgacttgaacctagcctcgaccctagaccccgaactaggtgttggccttggccctaaaactctgaactaagacccgaacctgaaccccatacctaaactctatacttgaccccagaccctggacctaaccccagaccccaaccctagacccgacctcagaccctggacctaaacccagccccaaacccagaccttagactaagacgtaaactccgaaatcgggtcccagaccgctgacccgagcccaagcttgcaccccaaagtctagacccaaacccaaacttgcaccctaaagaccgaatccctcaacccaactccagtcccataccagagtatgtgagagaaatataaaaaagaaaaataggaccaaaattattttttagataaaaaagattatgatattttaatttttttaacttagtttttaaaaatttagctaaacactctttaaatattttttaaaatctaattttatttttaaaaaataaaaacagtttctaaggtatgaaattaaatacttctttaaattaaaaaatgaaaattaaatttaaattaatggtataatttcaattttttcattttattttattggaaaatcaataaatttagggctcgtttggaacgccgtattaggtcgtattgtattgtattgtattatattgaattgtattttatgtaatatttttatgtaaaactatatgtggtattaacttttatggacacctaaatatataatattttagtataaattaaagtttaacataatattatataaaaatat

SEQ ID NO: 204382 - DNA, 1522 bp, Cannabis indica
gaggcagcaactaaaataaggtcagcgatgacttgaagctaatggctctccaatcaggatgggctataggttccttgctatagggggagatgcaaaggaataaggctgaaacattgagcgagtttatgttcaaagctcaaagcataactaacctggaagatgattatattcaagcattcagagttcctccagcaccaacacctacaacagccactctaagttttgcctctcagactccttccctagccttatcgcttccccaatctcagttctctccaaatgtctatggacctaccgcatctagccttgtccctacgcagacccatttctctaggtacggggcagcacatactggatgcagtgtagttcccagacaatctaaatctaaagtctcgaattcaagtgttgggcattcacaaggaaaagggggaggagagagccacaatcaaaatgattcattgaagaaacccaggaaagactatgatccaaaatataccgaatatacaagctttatagacactcaggagaaggtctacaaagagacatgcaatatggtccattatcgaaagcccctacgcatgtcaaatggcagaaggaataggcgagaccaaagcaaccaatttaagtatcacaacgaaaagggtcacactacgaatgcgtgtgagtacctaaaagatgagattgagctgttggtacaatctgcacacttggagtaatgggtccgcattccaattatttatctcagacagggggtagtcaaaagacacatgatgcttcccaaatagcagggcaccataactccttcgcagggggttctgtgccctcaagatcagggaacatctttacctactcttcctacctactccaccaactccgattggagtaacaatgttggctcctagaccaggaaccccatatccttgtgagatagctccaccacctatggatgggcacgttgcaactatatttggtggaccccatctcgttcgaagtacccgtaatgcacaaaagagatacttaaaggaagtggagaaggggaagtgtgtgtttgttggtgtagtctcccgcgaagcgtctgaggatgatgaatcttccgataacattcagcaaagatgatggtaaaaatgtttgtttccctcataacaatccattggagatcgatgcacaaattgccaacaaagagagtttgcatgatcctggttgacaatggaagttctgttaatatcttgtttaagttttcattccaagcaattacactcactaaggcacacttaactccatgccatatgcaattacacgactttaatggcaatgccttgatgcccctgggaaaaataaaaatgttaatcaccctcaagggagacaacgaggatagtgcatttaagcactcacccttggtgatagttgactgtcccacaacttacaatgccatattgggccgactaactttggtggactttcgtgccgtgacctccatctaacacctatgtttgaagttaccatgtgataatagatgcttcga

SEQ ID NO: 204383 - DNA, 849 bp, Cannabis indica
aaaaaaaaaaaaaacttagtatatgggtaattccccaacaatttattcatgcttatcttccattggatgtatagcataataataaaaagatataattgtgtaagataaatacataatttattaattaaggaaaaccaaacaaattttaaaaaaatgaatgcgtacctaaagcagcaagctcaagagagcttctctgtccaataacggcagtatcaatgagactcataagaggaccacagatccaaagcccagcagcaggtcctgtaaacatcgcaatctccttcatctgatcccacataccttgattacccaacaatccttctcccgtaatctccgcattttccaccgccaacactcctccaccatcttcatcaccaaaactttcttctccgtcggaaatttctctgccggctccggcggcattgcaaccgggaagtaaacgaaaacggcgaccggttaatctcaaactcggaagactaagaggagaggtactagtggtgttgccgaagcgagtaggtagagagagaattgaattactgttcaagtttgagaatgatgaagaaagtagtacttgagagtgagagcgagagcgagagcgaggagtgtgtagaagtagccaagggttttggagtagatgaggttgttgaagaatcattttcccgggaaaatgaaaaaatctacgccgagaaaataattggtttaaaagaagaaaagtgtacggacgataattctacaggttggagaagaaacagagagattgaaaaatgtaactaccggagagagagtgctttatataataaaatattaggggtgcgtttgaaaagaccaatataattggatttgtatgta

SEQ ID NO: 204384 - DNA, 735 bp, Cannabis indica
tagattattcttaaaaagagatttccaatgctacttgaattgcgtcatttagataaaaattgagcgagtatggccaaaatactgagcggtgtgtaatgttgaaaattcggcaaaactaatttgtcagtcatcatgttgtcgcaaatgtccacatgaagcctagaacttgcgctttttgagtttttcgcatattttgagattctaaatgatgtgaaagcttttcttagttcattctttgactctggcaaagttgttcactgtctcttgaaaattttactcgatgcgcgaaagagatgtctgagtgatcatcgattgagactagaagacgaccgggtgatcactagtgcacgtaagtgtcagtgaacttgcgtgtgacacatgtatatgagatattgatttgcggaagcatccaaatcttatattggcggtaaaataagatcgatgcccgaaacactgagctccaagttaatgttaacttgggcgcccagtgtggtgtctggtggtgcctgggcgttgaactaccacttggatgatattttcttctaatttcaagtcttaaatctcattttgggagcaaaacaagaataatgcccaagatagaatcacaatcaaatcgcgtggatatgtcaacttgagcacccaaggcacacttacggggataccggatattcatcgagccttgatggcttcattttctcctgaaagcactcatatcttcattgttgacaaaaaata

SEQ ID NO: 204385 - DNA, 1033 bp, Cannabis indica
ccttgacacgagagaaaacatcttcaacgtagctcactcagtggtgccatatcataagccttatcccatgagaaaggatattagcaaacaagacattaacaagttttgtcgattccacaatgattatggtcatgacatggaggaaatagagttcctcatcagacaaaacaacccccatttgaagagatatgtacgtcgtgacaacaaccaacccccacggcaacaacaataggcggctggagatgaccaacaactgttacctccccttgttgcgggtcgtttagatgtgatatctggaggaattcatttaactgggaactctggaaactctcaagaaaaatatgctcagtcccttaggcatgagtcgagtgacgatgtgttggcaatccaagagcgagttcccaaacaacctcagtatgaatatgaatcaatcacattctccgaggatgacaccagccacgttcgatacccacacaatgaccctttggtggtagaagtactattcaccaagaacgatgattgatactggatcgtcaattaatatcctcttcaagtgctcattagagaggatgagtttggggacaaaggatttggaaccctgtgaacatctcctatatggactcacaggaaatggtatggcatcgactgagcttattaagctacctttgactgtgggaagaacccccaggagtgtcactattatgcaattgcttgtggtattggatatcgtataaccatacaacgccttgattggtcattgattaatggtgaaaaatatacatttagtaagcttaaagtataagataaattaaaaaatagcctttttcttataagtattcatttatttggaagaaatggcgatttctagaactctcaagaggcatgtttcccttcctccgtccggtacccaaaatgggtttttggtccaccctctacggtggtgtggtggcagttgggtttggaatcctctcttttgctttcatcatttccctgctctgagcattaattgggaaattaatgcttctgatggtta

SEQ ID NO: 204386 - DNA, 3010 bp, Cannabis indica
tatgggtcgtgtcatgttgtactaatattttcaaagggtaggcccaagcgactttatatttttgtatcgtgctcaaattcgtatcgtactttgctcatgccaatctacttttcttaaacattccaaccttgtttttatatctaggctcaaattagtgctttattttttcattattttttttacaattaatgagttaattactacattatatgtatatttaattttatagttgtaattatatttatataaattttcatcaatattttaacaaaaagtacgtataaaagttaataaaaattattaaaatgtgaatatttatttataaatactaacatttttatatcacgcactctataaataaattaatataatattatagttttacatattttaatagttttaattataaaattacaatattcagtattatattaaaattttattatcattttaatttatttatattgacaaatacatatatattattaactataggatttttctaatgtttcgtggcgtgtttttcaagtttgttatgtgtagtattttttaagctaatctatttgtggttacgtatagtgtcttttgtacttctcgtgtaatatcgtgttttattatatattttctgtgctatgtcataataatttataacatcgtatcgtgtcgtatctaaactcatatttttttaaatttttaattgtgctcataccttttgaaccagtgtgtgttaaaaaaacttaatcggtgtatttagtacactaattggaagtggtgttagacataaatttgaagtagtatgtaaggattgatagaattggaaaaagagataaataatttttgtatgtgtcagccaaagatagctccatggggaacctttcactgcaaatttctgaagattccgtactccttcttaacctaaactctgttttcccctaccacttttttattattattatttgtgtatatacatatatatatatacgtgttcattttgtccatacgtgtgattttgcatgtatatctacgttatattattattatttaataaatttataccaaaaaatataaatataaatcatctaaataaaaataaataaaatattaattacactctgttttccaaataataaatttatatctttactaatattgacagcgtattaattatcaatttaaaatatatgtatcaaatactcaaccacatttattgtaaagagaagataaaaaaaatctcaatctcatttctaatttttcttttgagattattttacaaatataaaaaaaaaaattacaaaaatacaattgtataaaattttaaatatatttttacgattttcataattttatttacaaaaatatatagtctttctatgtcatagtaattaagacgtaattatggtaatttctactatttgatatattttagatataatttttcttttgaaatggcagaagttttagcgtttaaaataatgtaattcaacgttaaagtcgtttgttgaatttttagaatgtactttttgaatctgattatttaaagggtaatttgcggtcaaactctttatatttttatatttgctaattgttttacggtttaaccccttactcaaaaattatggctatactttttggaatcgacaatcgttttgctctgtagtcttttcgtctattttgattgttaagtgcaaaagtaaactgctacggtgtatacacgacaaatttttattaatccacctaatattaataatttatattaaaaaagagttaaaatatttaaaaataaaaataataaaaataaataatatttttttctttttcttcttcttcttcgttctttcagaactcaaaccctcccatcccacgaaccccaaccaaaaatcgaaccccaatccaaaaatcaaacctagaaaaactaatctcaacccaaataatttacatatatatatatatataaattatcccaacctaaaaaaactcataccccaatccaaaacttgtacgtaggtagatatattgaatcaacaattgaatattcgaaaattgtgtctcatgcaacctatatatattatatataagccaaacaagagaagtggtaaaagtaaaattctttgactgcaaaaagtgtatatatatgattaaaatgagacactttatttttttgcttaaaattcgtattattctgatttcattagtataaatttaaacattaagtttgaaaagaatatgtctttaattttactaaatctgtgaaactatacaaaatttcaaatttatttattataataatgtacctgcaccaccaatgtgtagccctgtggcgcatgttagcattatattggataaaaatactacataattttattttttttgaaaaatgaccaaaaagttcaatgctattgctacattaagatttaggtgatgcatattttttaattttagagatttaaaaactatataatataaataaataaataaattaatccatgtacaaaacgcaactgtcaccattcggctgttaccttatagattgttgaaacgtcgtcgaacccttttaacttccatttcaaatttcgaaatttaaaaccccaaataatttcaaaataacataattataataaaacaaaaataaataaaataatatgaaaaatcatagatttgtgggtccacgtcacctttcagtggcccaaccaatcataataaaccacgtaggaaaacagttggggagcagaaaatgacttttgtgccggctcctctaattttttcaatttattattatctaatatttaattattattgttttttttttaccaagtaaaataaaagagaataaaacgtcaaattttagaacctgataatatacgtatttgaccatttataccattcttgtttcctttgttcctgtttttgtaccatttcgatttgaacattatccacttttatgaaaagacgaaaatacccctactattgcatcgatattacgagttgaccatctcacgtgatgaatattcta

SEQ ID NO: 204387 - DNA, 949 bp, Cannabis indica
catccacggaagacactatggcactccctttcttgtagggtataagagcaggagagtctctaccatatagagccttaaaggggggtacttttgagagatgaatgatatgaagtattgtaggagtactcggcccaaggcatccgttttgaccattggttgggttgctggtatgtgaagtagcgtagatatgtttcgaggcaacgatttagcacttcagattgtccatcagtttgtgaatgataagcggtgcttctcttcaaagtagtgccttgtagtttgaagaggtggcgccaaaagaggatgaggaagagtctgtccctatctgatattattgattgaggaacatcatgtaacctcacaatttccttcttaaagacatcaaccgctatgggggcagaaaatggatgcctgagtttgataaaatgggcatacttagaaaggcgatcaacaactacgaggatcgtatcccatccgtcagaccttggaagcccttcaataaaatccatagtgacctcatcccatacttgagccggaagtgctaagggttggagtaggccggctggagatgcggtgagcagcttgttttgttggcagatggagcaacgttggatgaattggtgcacgtcctcccgaagtccttcccaaaagagtttggcagccactcgtttataggtacccaaaatgtccactaaacggggtactatggaattcagcaaggatttgaggaattaaagttgacttttttggaatgactaaccgattattgtaatgaagtaagtcatggtgcacatgaaaaccatgatgtgtcttgctgcctgtgtttatatcttctagtaactgtgtaagcaaaggatcaactactatatccttggctaatgcaggtcaaatcgtccattccgtagtgaccatggcatcaaatgtggccacatctacttgtctagataaagca

SEQ ID NO: 204388 - DNA, 967 bp, Cannabis indica
  modified_base (23)..(23): a, c, t, g, unknown or other
ggattgtcacgtggcaattttanattaacaggtacctacagaagtttcaaaatgataacttaggtattattaccaccaaaaattaaacttatttatgccgcaaattactcttaaaaatatttttttttattaattatgatatatatttataataaaaaataaaatattaattttgatgtaatgattaataaataaataatataaaaaattgttaaccactcacaacacgagtatgatgttgagtacctcatggtacccgataacaatccactatttttttatcataactctaaaaatttgtcttcgtaaccctaaaacttcctatttagtaaataatttgaacaaaattagatttaagatatcattatgtttttttttttaaatatatgttgttatttaataaaataaaagaatcgattaataatttttacaaaacacgagacttaaaatagtatttactcataattaaaataaattattttttaataatgatattaataattatttttagtacatgtgtattttttttaattatcaaaattagtaaaatgatattttaattcattaaatttcttaccattatctatatgttatactcattggaataattattgattaaattaaattagaccttacattatacttttcataaatatatttatttattttgaactttttgtttttttagactccacacatattttgtaaatttgttcaaaatagtcttcttccttatttttcgaatgattcaaaattgtcttctaattcaacttttgttaaaaatattttttctcttactaacgttttgattgtttaagtattgtatcgatccttacaaaatcatataaaataatatttctaacaatctcttactagaaaactatttgtattcaatttaacaaaaatgatggtgaggatttcatttaattttagattctaactacaaacaaaaatttgtactaatttc

SEQ ID NO: 204389 - DNA, 775 bp, Cannabis indica
atatatatatatatatatatatatatatatatgtatgtcaattgtagaaacagtctggtgtaagttgaccccatggccatgacatgtgtacccaaaaacaatatattgagaggtttcattgaaggagaagataataacatgcatgagatcatgagtagttcccatactttaggagagaagatatatatgcccacattattagttagtgccaattaattcatacaattttattatttactataattaccattacctacgttacgtaatattctatctctactcctttatatatgctaattacctttttctccttcgtttatataagaaaaaaaaaaagcatcttgatatcatgagtataactataatatatataaattttacctatatatattatgcaaaatcataataataataataataatgcaagcctatatagtaattactagtaggcaatgatgatctcaatattattcccgttaagaatatggaaaaacaatgcagggtggggtttgtttccagagaaatgaaaatgcaataatttcattttataccaatcaatatatatttatatatatataatattacccaacttagtcctgtataattaattagcactgctactccataggctatacatataggctttgtcaaatctcatcataaaattgagtggggtcaaaacccaaattattaaacagtttctccactatatatatattactgtataatatcaaccaattctagactctaaccacaaatttcaaaaaaaaaaaaa

SEQ ID NO: 204390 - DNA, 876 bp, Cannabis indica
tagtacatatacgacgaacgaaacctttgttctctcgttttgacaaactttcttcttttatatctatttgtttttatttcaactcgaaacctaacgatctaagctctggtagtagcgataacaaatcctcgaagaggaaaagcttaaggtataaattaattacgttttaagctaaaaacgattggttttatataggggctttgtgatttagagtggttatgaaaattctgacttcatagaattgttctttggtaactatgagactagttttgctgtttacttattgaaattgaagtaattttaagttaaaaatcgagtttggaactttttaaagtttagtccgaacgttaatgacgttttttattttagggctcgattttaatttcttacgtaaagatgataatatttatagtatatataatacaatacgacctattacggcggcgttccaaacaagccctaaaatatcatatcggtatggtgttggacaatgtaagttacttggttactagatagcaattaggtatatagtgagagcgggaaaaggagatcattgcgtttccatgcaaaaaatcaggtgtcactcccccactcctcctcttcctctctcactacacaactccttaatttccttaagctcttctcattacccagtttctttaccataatctctctctctctctctcaatctgacaccttactacatttccctatttaggcttctcagaagttccttttctttggcttcttcttcaaagctttttttttctggtcatcaacaatggagggtagttctcgagatagagaattaggccgccaaactggttattacgacccgacgacccggtttggttatccgggtcggtatggaatacg

SEQ ID NO: 204391 - DNA, 833 bp, Cannabis indica
tcttcaactatatatattatgtatgtgcaatgacacgtttaaaaactagttaatatataaaaaaaatgtctatttaatgatattgttgatttaacgatttttttaagaaaatagatagaatactaacgttaaacgttaaaaaaataaataaatattaagaaaaaaaaatgttaagaatctattacgattgattgatgattaagatcagatagtcttatacgattgaagaccttatgatcaaatggtcttatatgattaattgaggattatagctcattcgttctctcacctcattctgactccctttgatccaagcatcgtcctcaagaaaatcggatcctaatcgccgcaagcctggttccgttaactggtggtacatcatcacctcaaccagagaacaaaatgcggtcttggaacctgaagctgcttcatatcatcctagaatgcggtcttctccagcgaagccctcattcaaaatgtttagggcttaattctttctgtcaggttggatgaacaaaaaatttataagaatcgatctctacttctttctgttatattattatatgctcaattttacttttgcttaaattactaaggaatcaaaaagaaaattaatgtatagatttcttttcaatatggaaagaattgtatattattctaaagttaaccattattgaaatatcctaagatgtctcttaattttatttccatatatatatatgcacatatatatgtacttatatgtttaatgaaagctcagctatgccagaattcaaaatttcaatatcttttaccatttttctgattcagtatatgttaacgcagatttttgt

SEQ ID NO: 204392 - DNA, 703 bp, Cannabis indica
aacattcttttttcttattaaaattttctattttgacttgtccatagctagagtagatatgtatatttatgttcatcttaaataatttgttgtcggagtataaataatatttcaagaagatttttttaagagaattattttatatattattttttaatttattaaattattttggtagtttttaatttgagttgttattacaatttaagttgctactttaattgttacttggtttttttatataaattctcgtaaaaaatataaaaaataactattctaataaagtgtaaaaaaaaaaaaaactttaatcaagaaaacaaatcatctaacaatatatatatataaacacaaatgtttaaacatcactctactataaacctgctctgaaaaagagcatggacctctaactgatcattcatataataataaagagtagccattgatttatatataatatgtattatatataatacaaataaacctaggatcgatagtaattaaacaataggaagatggttaaatatataattcttttccaatatatatgtagtgagacataaactaataatttatagtttatagagtactctacaatatgcatcatcatcatcatcatatagcttttgttcttattagttacttttctaaggtagtgattgaaagtgacatcaattttgtaaaaatatctcagcagaatttatta

SEQ ID NO: 204393 - DNA, 539 bp, Cannabis indica
ataatgttctattaataataattcaccataaaagaaaaagtgtacaaaaaaattatacataaaaaaatccacaaaagttgttgtaaaaaaagttatacaaaaaaatgattataaaaattgacaaaaaaaaaaataaaattaacaattattcataacaaacaaaattacattaagttttacaaatgtgcattgaaatataatgctaaaaattgatgcaaatatataacaaagtctttttttaccaaatatattataacattcaattatctcattagagatgttcttaattgtaaacttttatataataataaaaaaattaaaattataatcgaagttaataaaaatatatacacattaataacaaaaatattaagacacacattaaggtgtcaagcaccacaaaaaatatcataccgttagctcctacaaattttaatttaataaatgatgtagaaaaatgttaaccaattattatgtatgtgaatcgatatggtattatacactttaaggcgccacatataaataataatataagaaaa

SEQ ID NO: 204394 - DNA, 1821 bp, Cannabis indica
tttttttttttttttggtttcctttattccttagttccttttgttgtctcagtcgtggggtactcctggttctgtggggtagggggttggttgagagttgaggggtttggtgaggttggtgttgtttggtagcttgtcttttctttgtctgtttcaatggctttagttaatgccaccaactcctccactaatagaaagtgttattcttatgaggaagcttcagtcaagctcagtccttgtgcctcatctcaacaggcattatccactttttgtcttcttggaaaagttgtggccccgatggtagttaatgaggccactattattgactttgtggaaaaagtctggaagtttaatgtgactgtggtagctttgaatgaaggtgctaacaaccataactgctttgagttgggatttttaagcactgaaaaccgtacttgggcccttgatcatggtccttggtgtgtccaaggttacacttttatcttgaaagcatgggcgccaaggaaagaaaactttgacttgtttgaatatgtgagaacctggatacacatttataatctcccaagagactatttctttgttgtatatggcaaaacattgggggccaaggctggcaaagttattactgttgatttggacgaaggcaaactggctctatgggataaatcactcaaaattttgattagcctgaacgttaatcttcccctgttttctggatgttattttgctctggaatcgggtatccaacggtgggtacaattcaaatacaagaaattgtggatattttgttataactgtggcaagttgggtcatcaaagaagaggttgttctctttcttctccagtcacggtgtccagtgagaatggggttcctttccctatgtttgggccatggatgtctacggattcgtcatacctggatgtcttctcgggtgccaattcattcactccggcttcgtcttctacggccctggcaggcactggtttggttcgtgctgggaatcgactgttggccatggagtctggtatgaagggaatcgttcgacgaagctctgaatcgcacggtgatggcgacgggtcgtagctcgaaatagggtgtgggttcccaaagctctccctgcctcgcgcatgccagaaaattccattctgggtaataccgttcatggtggtactatggtcaatagaaagaatactgaagtcttgccgttttttaattcaaataacgctgtccaaaggaagacttttgggaaaggtaaaggtttattagatggggctgatgggtcggctctctcttctaatgggccgatttcaaaaataaattactttaaggatgaagcttcttctcgtgggctttttaaaagatgcattgaccccactttatcaattcatgggaccgagcccacattggagaacaacgaaactgttttgcctctctttaaggctagggggccgtgtgatcctattgggccgtgtgggctctccaaaggccttcctggacataaagataaaaatattgctagttgtgaaaggcccaccaagactatttccattgagagttctacttgtggtcaagaggtgaattttcatcatgatgaaactcttgccttgtccaatttttttcaagcacaagaaactctcttacatgagctcaagaagtttggaaacctggacttatatgagattaaagccataggtggtgatattggggtcccaactgcttcggagattaatgaaagaaccactcctttcaagaagagaaagtttgacggggcctcggcttccctttgttctcggccttcgaagcttcctcgccaccatcctg

SEQ ID NO: 204395 - DNA, 601 bp, Cannabis indica
tatataaaaaaaaattaagctaactaattaaaaaaaattatgtttgtgcaaagatttacatttttttataaagagaaaatttacatattttgattaatgtattttaacctattatctatttggactacatatttaaaaaaaaaaaaattaaattatggtatgtatgtatgcttgtatgaggcttcacctactacaatgctttagcctgggtacattagcattacttctttcttatattgtctgcgcctggtacaagtcattgattgtcatgagtctcggttaactgagtttggtattgtaatctttgatatctttcatatttggaatatttttatgctcatcactttaaatcattgtaaaatagtcaataatacaaaagctcatcctttagctaaaacatatataaaaggcatctcacaaaattgtacttaaatgaaaaaaaaaataataagaagcaaaccttataagcttttttggatcatgaattcatgattcccaatttacaatcattcaaattaaattcataatatttttccattaaaatcttaccatgagactaaaagaaaaataagagaaagagaagtcaaaaaaaaaaaaaaaa

SEQ ID NO: 204396 - DNA, 1300 bp, Cannabis indica
gtcttgtctgagcatctcaattcgacttatctactactttttaattagctaaagctaaaagtagggagtggggttaatttagatgcatctccaacgactttcaagtatttagactctagatttaacaagagaaaccaaaaatttgtttagatttttagagatttttttttaacttcattccaaccatgctatctatttcagctaatgtatattatctatttaaacttctattatgacaaaaggataagtttgattaaaaatctaattaaaaaatttgagaaatacttaatgagcttgtttagctaactcctttataactctattttggagagtaaatacaaggtggggttagagtgcttatttcattccctattatagctaaaaagctattatagagattagaaagcttttggagaataatagggagtgaaatataaatagtaacattccaaccattctttatttctctccaaaatagtcatgaaagggctagttaaatgtagagagctacttaaaaaaaatcatgtcatttttaatagtttttttttaatcaaattttatcagtttttttttgggtaaggcaatcaaatttatcattattattaatcaaattaatcattaaatatgtatgatttaataaaaaatagaaacccaagtttataaaaaagaaaaattattacaaatatgtgctaacatagagagtatggttggaatgaatttgagaaaattaactttccaaaatagctttttaacacaaatgttgtctatattgattcaaagctattaaattttttattatctatttaatactcattttatatactttcaataaaaaaatgacttttatcgatttttcgagttaatttgcacaattgtataaacacaattgtaaaaaaatggaccaactcatataaagtcaaatttggcacaaaattatcaccatccactccattagagattgatcaagatagctaaaatttaattgagtaatgttaagaactttcacactattataacatctcccacagatggtagttaaaatttttttttaaaaaaaaaagtgaatgttatatttggtttaattgttacaatgatgctttaatctttttatttaaattaactaaaaaagttaacaatgtcatttaatttttattatataaaaaattattaataaattttaaaaaaggtttaaattaatataaatgactttaattaatgacaaaagagtgaatagaaatgtgttagagcctacgttgtataggctcatgtgtagaccctaacattatgcatatgaggattg

SEQ ID NO: 204397 - DNA, 660 bp, Cannabis indica
aaaaaaaaaacataaaataaatacacattaatagtaataaaaaaaatgtcaatgatttaataaaattagtattcatataagtaaaagtagaaattaattacctctaaggttatatcttgcttagttgcatgagctctaaggtaaccaaactctgaaatccttcttaaactccaactcttcacctgtaaattattactcatcacaatcaaattattaattacaagattattgttaattatttttcgaaactagtaaacaaggaaaactatcccgcgaatttcactaatatagaatgagtcaatcatctaatttagtatctcatcgaacataaataatatattgtccaataataatttattgattctaacaattgatagcagagttcgcgatttaaatttctcaatttaatagatgttaatttactttggtatctaatcgaataaaaatggtgatattgttcgtccattaatcaacaaatataaataatttcgagaagtataccatcatccaataatcgaaaactattgattctagcaactgatagcagagttaacaattcaaaccacatacatgaccatttgagctatctttctcgagttcaattaactatgattaatttgaatagttcagagaaaaggacttacatcattagggaacttg

SEQ ID NO: 204398 - DNA, 1175 bp, Cannabis indica
aactttaaattacatatagagcattatatcaatttcaaatcaatatctattaaaatttaaggcatatcgttgtacttctattttgcaagaggacattagtataaaaaataaaaaatctaggcagaatacatgatttacaaaaaagtaaaattaattagaagcaaaaagagaaaaaaaaaatatatgaggcaataaatagaaaataatagaataaaatgatgctttcaattattaaaagaccgcgcgaagcgcggatacgttgcctagtttataataaaacgatacatgttgaaccttttgtattcttttgctcgagaatcttgtgttatgtcagattataattttactgagcttaatgcttcggctgctcttaaatctattgtacttactgaaagttaatgaataaatgatttccatggttcaaaaaaaaaaaaaggttaagcacaacatgttgcattattcgggtgaggttcaaactagggtttggattaatttgactcggattagggtttgggttaatatccactgcgatagaggtatttgagtcccaagctgcccaaaaaatttcctattttaatttatcaataatatttttgtaatttttttagatttattaaattgctcgccttaaaaaaaatctatccctgtcacagaaattttctgtcccgtccttgataatgcatccaaccgtgagattgttgtcttttttatgatattttatttttgagatttttattttattgactgaatagtgtaaaatttttattttaggtttacatgttaattatttaatcgtgttgttaaaaatatgggttgatacattatttgtcgttttagcagcccatatagttagtaatgtatagttaatggacttaacatctatgtgaagtttaattgaagcaaaaatgtgatattttctagttaaccaaagtcttcgatggggagaaattagggaggtttattactatttgctaagtcctctttttaattctataagggaaatttgaattattatgcattttttaatacaaaattggtttggagaacacttagtgtaggtaatttttaaaataggacaaattttcaaaaaaataccaaaatagccttgtcaaaaatcccaatccctttctttctcttccactcaaactctctctcggtcccatttttccttcatg

SEQ ID NO: 204399 - DNA, 602 bp, Cannabis indica
caataagacaagagaatgtcgaagtactaatttcccttgaaatgctttgtttatttgcatttgatattttgaggaagtactaattttattttgtactcttggctattgggtaatgggttttcagtggaaaaatttctcaatcgttaatctttagcttttttttaggtattttgaggtttggaagcacaattatgactgagtagttgttattcccttttgcagacaaaggcaagatgacaaatgggaacatgatctttatgaggataatgaagctcaagtttcaagtatggattaaaataatatcacatgcaatgcaactgaaaactaattaatgtctattgttggttttcagtatgtatcttatgttgttttgagtttgactatgtgttaatggcttatgaagatcgccaaattgattctcgagatcttcgtttgaagctccaaaggaaaaatcaacaagcatctgtaagtggaagagggtctcattcaggcgtgagagatcttcgtgaaaagctttctggtagtatgcatccacagcctgtaaactacgatccacataagccttcactggaggccgccaagccaaccaggagaagtgttgc

SEQ ID NO: 204400 - DNA, 929 bp, Cannabis indica
taacatttttgcataaaagtacacaaaattttagcaacttttatcactctaaaatttctattttttttatcatcttacaatataatctttgtattttttaatttttaaaaaattattcctattcctaatccttaactacttataaacttattaaatttttttaagaaaatttcataattcaaactcaaagtccaaaaaacaaaatccatacatattacatagtctaaaatccaaacaaaataaaatctatgccatagctcgtagtaatagtttagggtaaaaaacatatatatataaaaattggtaatagggtttcgagttttgtgttttcaaaattcctaaactcaaactcgacccggtgccgaattgggttacacccaaacccgacccctatttttgaaacccatttttcttgggtttcgagtcacgtggatttacaaagtaagtgtaaatgtgactcctagtgaagatcaccattctccactgcctaacacccatataacaactacacaagagccaaaggaagccaattcttttaagagtatctctaatgaagatgtaaattgatgatctattattaaatataacttttattaaaagtttactctaatgatgtgccaaaaattgatctaaaattatcacttaataaaacttgattcaaatttaaattataatatgatgcaaaatttatataacaaacacattacttttatatttactttaatacattgataaatttattattcttaataaaaatattaatttttacatgatggtctaaattaatttttacaaaattgaagatttgagttgtcttgaaatttgtgattaaacatagaataaggggtaatgtgaagctcaacctaagttgatattatccactaaaattagtattgaccaacaaaaaaactacacacatccacctaaac

SEQ ID NO: 204401 - DNA, 732 bp, Cannabis indica
cacttatattaattattatatatatactgaatgcacatatattacagacttatactccaaatatatatatatatatatatatatatttcagtccatatatatttattagttttttattggtttttatttaatttgttaataataaaaaaatctaaaaattattttatttaacatagttattttttaaagagactaaaaaaaatactacgttgttataatatgtgtgagtgatttggataatttatattatacttaccatattgttaccaattattaagtcataatagagttttaataattagataaaatattttattttggtataattaaattcaaataaaatagttttaaagaaaaaaaaataacataacaaaaaataaatatatatatatatatatatatatacacaaaagataatgtggaaggaatcctaaattaattttcatatattcttgtgtaaattcctcaaacatccaatatagacatttttgtaaatgtaatcatcactttttgagatagtcatataacaaagttgtagcatttggtgtgtatcaccttcagtcaattgaaatctctttcttaattttattgtcatatatgttgaccaacacactatcatgacccatatttgtacctcaaaattccacgaagagttctgtgttcgaaattaatttttgaatgagaaatgctaaaaacgatcagtagtgcatagtattttttttatgtgttaat

SEQ ID NO: 204402 - DNA, 702 bp, Cannabis indica
taataatagattaacctattttcttataccttcaatgttgtacgccattttttttttttatattttctattataatttattaatgagttaattattaaattatatatatttttttacagttttaattaatttaatataactttttcaatttgaaagtctggtatgcgattgactattttattgcgtttgggtggatcacgttccgactgttgagggttcaccggtgaagcttgtggtcgactgtgtcgtcgacggtgtaggttcggctggaatgtgtgtacggtttctctccagttttcgtttggtttatgcgatcgactggtgttgcatttttctgttttctccaattgtcgactgcttggctgcgtttgtgataggtttgttgcgattggattctcctattttttctgtttcgtttgtgatttcactggtggttcttctccaaagtatttgatcgtttttgtttcttatgttttgtgactgagttgcggctgggttcttcttcgtgttttgggttgtgtcgactgtttattgttaattctgggtgctacgttttctttggcagcttctctttcaaagctgcgtttgttttctttctgcaattgtgaatggacaggtgtgctgggattagtttgtttgtttcttgaatctgtgactggattattttcacaattttttatttgtcgtttctgcgtttgtggc

SEQ ID NO: 204403 - DNA, 908 bp, Cannabis indica
tatattttagtctaattttataaaataaaattcaataatcgtgtataaattagtccaaatttaaaacatgttaaaaattgtatcaagtttgacataaatataaaatgaattaaatttcttttaaaaaaaaaaaaagaattaaattttacactacaataaatatatttttatttactcttttgtcactgatatgactagttattggtaagcatgtttacttagagttattattatttaatcattaatttaaataataataaaaataaaaattcaacgcatttggtcatatttttttaaaatagttttcaaagttttttttaaaataaaaacatgtttaagaaaatatcaaccaaatacaaattatgttttgaaaacttaaaaaaaataatagaaagaaatgtcaaatatattatccttaaaagtaactttttttaataatatattaagatgatatatttataatttagagagtattaatctttattctatagaaggaatctgaattggagaattgaaagttaaaaatttattctaatttccatctatcatgcatttctctccttcaatgttctttctctcaccaaacaaaaattttatcatctcctcccatctatatatagcgtcttccctattttctctactcactcacccatcagctatccataatgtaaaatgacgttcccatgtttatgcatatgaaattatatgtttatttatttatttttttatattggggaggaaatattcagaagacttctttttttttgtgagtagaaatgtagaaccactaataactaatctatgcctatgatcacttataaaattatatttatggatttgttataaagtcttacaatgataatgtgtgaaaagataaataatagctagaatatataagatgaatgggc

SEQ ID NO: 204404 - DNA, 1272 bp, Cannabis indica
agccctgatagtgttattggatacgcattctacatctggtgtttatactgttccactagtaccattttttctaaaaaaagatatttatattttttcaatacataagtatgtcataactataggttctcaaaaacttatcaaacatatttcccaatgttacaactttacgagctaccttctacctgctagagttactcagtttttcgaattacccaatttttttgctttaccagagccaaggtagcgtgattggatatgacttatgtgtgatgaggttagagtttcgaataggtgtacgaacttttaaaaaataaacttacctgagatagttacctgatgtcttagactaactcggtaaattacagttgacccaatttatcacttcacaatgttgggtgttgttggcgttaatggatatgtgtttttgtctgatgttcatttattttaaaaaaataattaaaaaaaaggctcaaaactctagtcttacaaaacttattactctattctccaattttatagctttacgagtcactttctttcttaaacgtacatgacagagttaaccggttacttagaactgcaacatttcatcgctttacaagagaaaaggcaacgtgattggatgtgccttctgcgtgacgaggttaaactttgtcaatatgtggagttgtttttaaaaagtgagccttacatgtgatagttacctggtaacttagagtaacttgctgaattacaattaatccaattcatcacttcacgatgccaattcattttcttatctttattagatatgtattcaacgtctgtttttttttttttacattattcaactagttccatttttttctaaaaaaaaaaaagcacaataaaagttcaatacgtatgtgtatcataactgtgggcagacaaaatcttattctccctattctaacgttacaactttatgagtttcctaaacataccctctatagttactcagttactttgaattaccccatttcattactttaccacaaccactttctttttttttttttttttttgttagaaatgtgttccacctataggagcttcttttcaagtaatgtagttgcacaatttttgttagggttgcatgaattaatagggtcttatgggagagattgtacatgtttttatggtcttatgggggagatcgtataggttgttatgggaaaggtcgtatggagtggccaactgtattagattatagatggcttgaccacgtgtatgttgatattttttctcattgac

SEQ ID NO: 204405 - DNA, 710 bp, Cannabis indica
tacagatttgtcttggtaaatagggtataagtaggtaaagttttaagtttgtaggtagtagtatgaatttaatatttgtttttagcggtataaatactaaatatttataaaattgtaatttttttttcaatttcgttagtatagactctattttgaatttttattaaaagaacattaattagaagtaactctatatttttttgtttagatccaataatttagagttcaagtcttatgtgtcttaaaaataaatattaaatttatgtcacttataaatttaaaactttaaatatttgtgtcattatttacctattgtaggattaatagggaatggagtaggatggactggacaaccgttttggggtacgatgcggttcaggtcattgtttaggattactacttaaggaggcatccatttctcaaaaatgctatttcttcaacttacataaagtctattttttttttctctaaaaatactattttatatacaaattattaaggttttattgaaaaaaatgataaaaaaataaagaatttatattactttaaaacttgaaacttttagtatttgtactactatttacttttactttttctttaatgagttttaggcaaaaatttataattttattgccacacaatttttttacaaaaatactttctttatataaaacaatcgtaaagcaataaaactgaacaattaaaacaac

SEQ ID NO: 204406 - DNA, 823 bp, Cannabis indica
ttttgctctgttcttcactaatagtgtaaagtttgaaggagatccgatcagctaccccagtaacatgatcccccatagacaatggttgagtgacagtaggggcctttacttgggcaatcctgtaatcttcaagataagaacttaaccacacaacagtattattagaagcaagtctttaccaaaaagagttttattcctactatcccatatgacccacaaaattcccaacacaaaccccaaatcatccttattcagcacctcaaaagcattaaaaagtaaactttaatatcacaaagtttattatttagatagaaacttttaaaaggagactcacaccaaaacttactaactctgaaacaatctagcaaggagtgtgtcacagtttccttgggacagttaaaaaaagaacagttaaggctagggataatgcgtttgaaaaagagattaaaagcagtgggaagaacatattggaaagcgcgccaaataaagtgttttatttttggagggatatgcaggctccaaagagtagtccaccattttttaactgaaaggaaatttgaagaggaagggggaagagaagccacattagcataatgataggcaaatttaacagaaaacacacctgaggaatgaagattccatattaaacagtcagggttagaaatatccccaataggtacttgaagaatttgggaaatggtatcattatcaaactgattgttaagtttttccaagtcctaattccccaactggttgataaaatagttaacaatatttagagggggatgaaaattattcttatagtgaatagttttattatttg

SEQ ID NO: 204407 - DNA, 1048 bp, Cannabis indica
ccaagctacacaagaggctgcgatgcatgtacataacttgttggctgcctttgaagaggtttcaggtcagaaagtgaatgctagtaagtcctcaatattttttagtccgaacactaatgtgagtctccgtgaacaaatttgtggtactcttggcatggttgaggcgactgaggatagtaagtatttggggctgcccaacattattggtcgtaacaaatctgctattttgggattcttaaaagaaaaagttaagaatcgtatcaatagttgggatggaaagttgttgtctcgggcggggaaggagactcttctaaagactgtggtccaatctcttcctacatatgctatgagtgttttccttctacctttgaagacttgtgatgagctccaaaagatgatgactaagtattggtggaagacttcgtctagtagggggcggggcattgtttggatgaattgggaacgtatggccagagacaaaaagtttggtggtatgggatttcgtctcctacatgagtttaatattgcaatgttggctaaacagggatggcgcttgttgatccaaccgaattctcttgttggccgcatttataaggcaagatactttcctaatggcgacttcttatcggctgaactaggtgccaacccgagctttgtttggcggagtatatggaattctcaatctgttgttcgccttggtgctcgtcatattgtgggtactggtttgcaagttgatattctttctcacccttggcttcctcacaatgaaaatccttttgtgactacaactcaccctggccttattaatcaaccagtctcttctctttttatggttgatagtaggaattgggatatcgatcttataaaagatatgttcaatcaaagggacatgaatctaatttttaagcttgccaattaattaatctgctgttgaggatttttggtcttggcgtggagagaactctggtgtagtttttcagtctaaaaacgcgcgaatacaaagaattcttgaagatcaacgtgaacggcgtgtctggtgcaataatct

SEQ ID NO: 204408 - DNA, 752 bp, Cannabis indica
cgtacgctttttggcttcttcttcttttttcctccctcaatcgaagaaaaaaataatgaatcttatgaatacctgtgtaacccatgaattctctgaattttgagttaaacatacaattatgactatcatacatctctctatctgtatatatatgtcgaagttaggttatttatgcaactaaaacattggggtttgattaacatgttaataggacattgtcagtgaattggaaaactcgatttcatcactaaattctggctggtgtattaggagatttgagttttcactaatggaagtgatgatctttatataattcattgtatgtgtcaaatttttttttttttaattttcagcttaaatatggccttgttcgatgctgtgttgcatcatttattttggtttctaagttatttcttttttcccattgtgcttacggtttggtttcattcaggctatttatttcgtatttagaatgctgattttccattcaagtttcacctggaagcattggattggattgggtgttacatctgcagcatatttcttaccttataaacaactcgctcagatggcgaatccttcttatactgatgatggggagcttttggatggtgggtttgatatgagtactggtggagtttgtgggtatgtcttcttgatattaatatatttgttaccctatttttgtttttggtttgtttgttgaagaacatgactgatgtaagaacaggaatattataaatagcaagtgc

SEQ ID NO: 204409 - DNA, 2046 bp, Cannabis indica
ttcattttaaaagatagagcactctaactcattctcttcattgtaaaaatctgagtagaaagaccctcctccaagataggttggttttcttcaatgtgattagagaaaataatcttttttcccttaatttaatcatattctctacattgttatatgtatcagactttttaatgtaacttttatgtgctgtgaacagattttggattgtaacaatggtgaatatgctgctgcaaaaacataaagccaatcacttgaagacatgcacaccaagtgtttgacaaagtgcctctaagaaactttttctgtgtttagttttgttcattgaaatttcctttcaatggtggcccatgtaacttgttctcgtttaatctcctcttcactattcaatttggaacatttcacccccaacaacccaactagaagtattctctgtcattttttctcatctaaaatttcacctccaacaatccaaaactctaatttatctctagtcaattgccttatacatacattcaaactcactaaagctcaagcctttactatctcagttcctttctcatcacttaaatcccctcataagcttcaatcagctcacaaacttctcctagactaatggtttatcagaaaaaaacattcaatcttggaatctaagctcaccaacgatctgttttctgatgttgataaggtactcagaccaaagctccaagctttggggaagttgggaatggatggttatgatttgggcaagttcattcgaagaatccaacggtattggcacgaagcttggagaagaagttagtgccaagcattgaaattctcaaagacattttgggaaatgatgcaaaaggtaaagacttcatgagaattttaagaagtagatggattttgtgggcagaccctcaaaggttattggctaatcgcgcttttttagagagttgtggcgtcgttgggcctcaactcgtttcgttattgaagaaagagcctcgcgtttgccttatgcaagaaaccgagcttagagagcttgtttgcagagtgttggacatgggagtttcgctcggttcaaccatgttcccccatgcactccatgcagccgggggcctaagcaaacaaacgctcgagaaaagattcgagcttcttggtaatctcgggttttccaaggaagaatcattggaaatgtttagaagagcaccacatttgcttagaacatctaacaagaagttggagtttggagttgatttcttcttgaacacggcgaaattcaacaagttaaggttgattcgatcgcctgcgttgttgatgtttagcatggagggaagggtgattcctaggtacaaggttttggaggttttgaagatgaaaaagttgtttaagaatggtcctagttttcatactatgttggtgtgttctgaggctcagttcttggaaaaatttgtgttgaaattcaaagatgatgcagatgaactcatggctgcttttagagatcataataagtctgaattgaattcacatgaataagaataagacttagaagtttaaggatttatataactgaaaatatttatacataaaaatattttctcaagaaaaaaaatatcacttataaattatttttagcttccccttgaccgagaatataagatttgttgatttttaaattaatttttatttaaattagattgattacaagagtcttttgttagccatgaagtttaaggagtgttaattacaattttttttttttttttttaaatctttgtattccaaaatacatattgaattttttttaataagttttttataggtgtgttcattatagttaaaaaattattattgtaaatttttgaaaaattctaaaataatttatagtatcaaaagtatgtttaaaaatttgttaaacacgtgtgataaagtataatataaaaaacaaactataaattatttataatttgtcaaaactttacatatcatattgtaactataaccactatgttatatatttcttttaaaacaaaaatattttagaacacgatttgagatataaagata

SEQ ID NO: 204410 - DNA, 884 bp, Cannabis indica
agatcaagagttgactcttattttggaaaataaaaagagacgcatggatggtggagtaaaaggtggaagtgatgatgtggtaactgatgtggagaatgatgctgttatggagaaggagattgatgatagcgttgggccaaaaaacttattaaaggtgggtcttggttcccaagcccaccattcattatgagtcttatatcttagaattaccatgggcttgggaatccatgggcttttcaattcataaaggaccttatggtccaaaagaaacccaactttgtgtttttgtgtgagactttgtctaggaaggatgttgttgaaaggcttcgtgtgagtcttgattttgaaggtgcaatcgcagttgatgttcaagggaagagtgggggtgttgctatgttgtggagatttactgaggaggttcaggtgcttggttatggagttaattatattgatgtgtctgtcaatagtagtgacaatggaagatggagacttaccggcttgtatggggagccaaatagaagctttagacaaagaacttgggacttgatacgaaatttgaaagaagagcaggggttaccttggtgtataattggaggtcttaacaatgtcacttctcaacaagataagagaggtggtaatgcatatccaaattggcttattaatgggttttgcgggatgttggatgattgtggacttcatgatttggatttggaaggatactcatacacttgggagtgtggccgtggtacggacgagtggattgaagttcgaattgatagagttattgttacccaacaatttcttgacatgttccctactgtgaagttgattaatttagaggtatctacctctgaccactgccctcttcttttagtccctgttaa

SEQ ID NO: 204411 - DNA, 1127 bp, Cannabis indica
taaagtttctatacctctcaaaagtaaagaaaaaggtcaatcaaaaaccaatgcgtcaaaaagaaaatcatctagtgatcccacttatcaaccatctcctaaaaagaccaaaaccaaatctattcctgtcccattagcgaactcatctccaaaaaattcaacaaaaagatccaaaaagaaagttcctccaaaagcccctatctcaaatgtccacccatcgtctattcaatgatttgttgatgcctctaaagcgtttgtatatcaacgttggtttggtagtcgtgagttatgctttgaacaactagtggttctggatgactttcctgaacttgacgcgttcttaagaattaggaaatgggttcacactgtctctaggttgtctgcacctcatcccatcttaactcgagagttttatgcaaatttagatagaactttcatagctgaaggtcatccaggttatgtgagtgtatttgtcagcagtactcgtattctttttagtccttctacaattgcatgcatcttaaaagtttagtctgtcaaaactccaacctatgggaaacagtttaatccatatcaaactatgatggggagagtgctaactagcaagaatgactatcttaaggaaaagcaggatatttttgctactcatttaactgcattctatagggttcttcatcgagttgctttgtacaattggtttcctaactcacatttttctaatcactattgatatcgaaaagcttatgtatgttgtgggaactcatgtacccattgatctctcatttttgaaaggattctcaaagcctcaaaaaccactggtactcgaaataaacctccgtttccaagtctcatttaacaagtgctcatggtcgctcaacctccactaacaacccatgattatcaagttccaaatccagttcttagtaaaagttttttatcatttattcgcaggcagctcactttgactactcattcaacctcaaagatgaacaaaggcaagttgtaatgacagcatttcataatatggattagtaaaggcaattagcactaattactgatatttttatattatttgtgaatttaaattatttactggtcgcattgctagaaatgggcattaaagttat

SEQ ID NO: 204412 - DNA, 927 bp, Cannabis indica
taaagcacaattttgtagtagtgctagattatgataaaataaattccaacaaaactttccctgaacctagtcctcttccaagttagctaagactttcggcgacctcccgcgattaaagagacttgagcgataattactttagttcatcatcttctatcttttatcacgtgtctctatattgcaacacgtataacaataataacttttttttttttttttttataaaactacttctgctttctactttgattttgactttaaaaactaatagttttatttgaaaattaattaattatgagagaagtaatttaaacatcttagagatgatattattatgtaacactgatacattagaacctctataagaaactctcaaagattcacaaatcatacccaaatccaaccctatatattatgaaaaaacattgcataaactgttagttatttgccatgctttatttgttttctttccttccttatttagtctaaattaatgaaaatagtcatgtgatttgggtcaaggtaatttgacttttagtctaaattaatgaaatgtgttttgttttttggtttaacattttttaaaacattgtgtctgatggcgaagaagaagttattacataaaattaaaatgaagaatacaaataatttgtttggtaatgacaaccttaattgcgcaacattcttgatatattttatctatgtgtacatacccatattataagcagcacccatacattttatattaatacaaaaaaccaaacaaaaaaacagatatctatattttatatacatttaacgtataaataaatcaagttaagtccacttcgaaacaatttttcccaataaggtgatgaccagccctgaaatccagcaggggttactatgctgaatggactttctcatctaaaaatatgaaaaatatta

SEQ ID NO: 204413 - DNA, 2066 bp, Cannabis indica
  modified_base (5)..(5): a, c, t, g, unknown or other
gatangtgcccgatggtacacgattttagctcatttctaggctcttgagttagccgatgtaatgggggtaaaattgggtttactaaaattatcccattttacaaatttcttaaagttttaaatagttaggaccaattttagttcctatgacataaaaatttcaaaatttcccttctcttattataattacacataaacataactaataaaagagaattctagcatcaatagatatttagagcatttttattagggataccatctatagtttctaaaagtattactttttatttactttcatccatataaaatttgatacattttcttataaaaaatactctaacaatcttaaaagttgtctaccatggtctcacattacattaagagaaatattaaaaagtaccaataatgcttaccaccttcttatggtgccaatatcttaattggtacaattaaatattgagtttcatataatttaatataataattttcaaggaatatctctaactaattgcaagataacacgtctaaaaggtgttaagcaccactgatgctcaatagcaatactcttacattaaataaataactttttctaataaaaaataatttttctcaacaaaaaaaaaaaaaaagaaaaatgttcaggcccttttggagtgctagtagattgtgaaaacaagttattttagtcactatatacttccttattcataaaaaaaatagtgctaaactagttccctttaacacttctcttaattacaattctactatttagaaaattggaattcctactaacttaacaaattatactattttgagtaatttgctctataaatatttaaatttaattattagttacagataaacatttaaatttaatttttgacagtaataattacttaaaatatatttctagaacttccgtaagtacttaaccgttaagtgtgaagtcattatctacatgttattttcttattagtatatttaaattaattttcaaataaaaaatagaaataatgacgttgaccaatcagggactgttacgtagtcattgacttgacacttaacggtttggtacttacggaagtttaaaaaatataacttaaatattattaccggaaaaattaaacttatgtatttatctgtaatcgagaattaaacttagatatttatgccgcaaattactctaatttttattttattttttattaaacgaaattcttctaaagactaattatgatttttgccccttgaattttgacacgtaccaaattatgttttttgtacttttcaaataattaaaaattctccatctgaactattgaaattgttcgatttaaagacttttgtctaatcttattcaattttgctgatgtgacgattgtccgtatactaaattgtgactctaaactttaacatctattaaatcacacctcttgaattttaacatgtgccaagctgtgccctcgaaatttttatcaatctcaatagtttgaaagtagtttttaacaatttgaaaaattcacagacataatttgatatatattaaaattttggagaaaatatccaaattagcctcttccaagttccaaatgtctcctccatctttggcctgttgtgaagctggtaaagctaacccattaatggaaggtggtccctccaaattcccaatttcatttcattgccttttccaattactgaaactccacttctctctctctctctctctcctattttcttactactgtttctttctgtggcttcactatgatgagccgttacatctccaaactcaccacctctgctcaccgcttcagaaagtttactcctttattcgtatgttatcatctttctctattgattctgtttacaattcaattcattcagtttcaagctttgatttttatttacttgttgaattcatttatctgaaactttttctgggtatttgagtttttgaactcctgagcttaatgttcatttgggttttttttagggagaaaagggtttatctcaattagtagctattttatttattgactaagttttatgagtaaaagggttgt

SEQ ID NO: 204414 - DNA, 913 bp, Cannabis indica
atacatatgaaccaataacaataatatcgatctttaattatgataaaaaaaaatataagataatattattagtcatcatgctaggcttcataatgatctcttgatctctctctctctatttattatttaattacgtacaaggaagacgaatatcaattccacaagaaagctaattaaattaatactgaaaaaataaaaaaaaaaaaaacaaaaaaaaaaccaaattgaacaaagtaaagttatggccaacattttggcagataaatacccctaagacaaaaaaaaaaaaagagtttagtgtatatgttcttgatttttccctctccctatcagctattacctatatataaatatttaaattgtgtgtgtcatggaatctcaaatgcgtcacgtaagaaaattcttgtgatgttgtgtttgttactattattggacataattttaacttaataataaagtcatagcaaagcagtctccagaaactgtagatcctcctcgctccaccaattctctaatgatgagtccccaccacttaaccaagtctcgttttgtgcatttacttggatatccggcccatactggaatgacccacccgaccctgttcccatcggttggccgcattcggtaagatccgaaaccgaggagagttgtgcctctgacgtatctgatgaagacccagacatgtcgggcattggtttcgggttggcccagtcatagacttgggtgttagatccagtggaaacgggcataccggctggagatgggtcggatcgacccgattgaatccgctcaactaaacggggaatccaaacataacgcatggcgtcttggaattgcttactgttgacgtcacatttgagttgcttagcttgcttttgcactctggttcgccaatagttcttgatctcattgt

SEQ ID NO: 204415 - DNA, 1359 bp, Cannabis indica
cgagtgcgtaaatggttaaaaaccctggagccttcgcatttccggcggcgtacttacgaagatagcctccagaagcggcttcgcttttcaaaccatctaataaagtgctaagattatcaaaatgctctttaacgttagaagacgacacgtttttgttgttgaacaaagcgtaacttggggtaatctctggacttcccaacaaggacctattcgagtaacgtaacatgcagtgttcgtacacacataatgcctccttctggttcgggcagatgtctttgagcagttgcgtggagttgttgaggcaactccggcagaaatcgggtgtgatgtctccgcggcagagtccaactgcgtaaacttggtctgagcctttgccgtaggagagattgtaaaagccgtaaccgttgtcgttttgggatgtgggaagtgtggtgaggaggcgattgaggtttgcttggtaggtactattgagggtgtagttacctttgctgttttgacaagaacggtatacgaatcttgacggttgggctgtggcttgttgagcaactagaaggaatatattacacacaagaacagagatcagtaaagacattatcgccatgtgtagcgtttttattggtctggtcgatatgtcttgctatagtaaatgaagcctgtactaaaagtttccaacttgagattcatatagtttattttattagcttaattatattaataattatctgtaaattacggactctctttccctggtacttgcatttctcattattttagtgatctattttcaattgataaaattaaaattaaatcacaatatatatatttcataatatgtcaaacttgaaaattgataaaattagtataataaaatattgttcttactattatatatttgaacacggtgccgggttgacttagttttgagtaacaatgaatcaatgatatatattttgactgattggaatggaacggggatattactttgaaagttgcttaatatgtagcttttttttatatatataatttatttttgaagatatattatgatagtacgagagattgtgacgggagtatatttataaaattataatgacaaactttttttttaaaggatcaattgaagaactttgaataataattgaaatgaaatgaaataaacaaagacataacaatatcttatcttattgtgaaattaaattaaataactttttcctttaaataagttaacttaaacaaggatcattacttggattggtatcggtcttgtgcttgggcccttttaatttatttattttagttcttttaggtatattagggtctgcctaatggtatgttagaaaagtctctcaattgagtgct

SEQ ID NO: 204416 - DNA, 1329 bp, Cannabis indica
attatttatctaatatttaagggcttgattttattttaccataaaaaatatccatcatataataaactacaaatatatatataattaaatatttaatatttttttattttaataagagagaattttacttgtttgtaggctccttttacagttgggtgtgatattagggcaatggacaatgttaccttaagtttgcttagcaacaaacatgttattgctgttaatcaaggtacgagttttgtcttgattctccgagcattattattaagcattagtggtatctaatattagtatgaggtgatatcttaggagtagtttgtatttttttttaaattgtactaataataatataacatctttaatattattagagagactggtacggtttaatagttttattctttcggattttatacaaaattagtatgaaaaaattgttttctaatcaatttttttatttttttaagaaagaaaatttaaagtcatataaattgtgttttaaacagacaaactaggaattcaagggaaaaaggtcaaaaaagagggtgatttagaggttggtatttaatatattatattttgatctattttttctttatttgactaatacttttgtacatgttttcatttaataattattgaaatatatttaaattttgaaaagattattaaaagtaatattcataaaataatgagtatattttattaagtaataataattttattatagaaaagagaaaaacggtgtacgaagcaatattctttatatgtcgattaaaaataaagcaatttaattttaaaactaactgataatgaatagaattatttatattcgtataaatagttcaataatttcacatattttcaatgcgggacactattttaatagcgaaaaataattaacataacaatttataagtttggagtggtccacttagcaaaaacaggataacaattgtgttatggaacagaggctcttcaagtgcaacagttacagcttcttggtcagatttgggtctcaatccaacaacacttgttatggcacatgatctttggacggtataaatactacatacggtgatacagttcttatctgttttggcatacaaaataattttttaaattttttttataatcatgtgcgtttacaattatttaagacaccttgtaaaacttatgagaaatttgaattaatatacaatatataaaaaataaagttcaaccaacctatattttacatgcgtgcaatagactatttaaattctatttttttatgttgttaaattttttttgaatttctcaaaattttaaaagattgttttaaataat

SEQ ID NO: 204417 - DNA, 1401 bp, Cannabis indica
caattacataatcacacctcttcaattaaattccattttatattccctttttatgaaaacttttaacatggtatatttttaaaagtacattgtaaatttagaaaacaaaaatgttaattatttagaaggcatgaaacttagatgggtcccactctttgttttccatcatattttcctctctttctatttctctactttaccaaacaatcaaaattttcacctattctttcctattttctctcttaattttgccttccttttttcacctctaccagaattgttttgaacaaagataagagtttgaaaggaaaatgaagaagttatttaatgtacaattagaaagattgaatccagttaagttgtagagaaaagaaggaatatgggatcaaagtggtatgtaatataaaacatattaggctcatttggtatgttgtattgtattgtgttagattgtattaatattatttaatataatactatgtttggtattaactttgtgtaaaattataatatattctcaataaactcgatcccaacactgactacgggccgagtctcgagttcgggtcctgagtccctagatctagatcgaagattgaggttgatctcggatcttttgtaaatattataatacaaattaatacgaattatttattatgtattaaataatacaacttacattgtattaaaaaataattaatacaatacattattttatctaaacatagtgttatgtattatttaatacaatgtgatccttatacgacctactaaacgagcctattatttgttatcaaaagattggcatgacacaacaaaaattggacagaagccttaaatttgctaaatgaacacataagaaggattagccgcaaattactcgttattagaaaatgaaaagggtactaatttgctttttgaggattaagaagctagagagagctataatcataatgcttattagttttcttggccccaaacaaaatgaatatgaaacaaaaacaaaaatcaattgaacagaataaggtctagattttaatataagagaactggttatgatatgttgtcatatccatcaaaatgaaaatcaacagaaaatacaaagcatacatatatgtaaaaaactactgtggacacactataatgacatttcctcatattggcaggcagtgttgtgttcacataaaatgttgcctaacaagacatcaaaaaaagcagagagatttctgaaagagaagatgggaactggtttgtacaaacttttgttctagccacggtcacccctcaacaaaataaaccgttctcagtcgaaagagaagacttccaacacctaacacttcaaagatcaattcataaagttgctgtaagtatatatggatatgacaagaacatcatgtaacc

SEQ ID NO: 204418 - DNA, 967 bp, Cannabis indica
ttgtcctcaaggtggaaatcaggaaactggttgtgaatgacgtcgaaatcttcccaagtcgcttcatagtccggcagatgcttccatttgatgagggcctgaggactaattttgtgagttcctgggcgaatagcaagcaaagattctggttcaagtagccattcaaagtcttccgtgagacctggagggagcagcgcgcagcaatgaaacatggaacacggggtgaatggtagcagtaggaggtaactcaagacggtaggcagcagctccaatacgctcctgaatggggaaagggccaaaaaaatgaggagctagcttctcgttaagccgcttggcgactgtgcgttgacgataggggcgaagcttgacatacactctatccccgacctgaaactgaacatcccgacgcttgcggtctgcttgagccttcattcgctgttgtgcacggagcaaattttccttgagtagaaccaacacattgtcacggtcttggagcacattctcaactgcagaaactttggtgttggtttgctcaaaacggagctagggaggagggtctctatgatacaaagcacggaaaggagtcatactggaggaggaatggtgagacgtattgtaccaatattccgcccaaggcaaccattgaacccactgtttgggttttgagctcacaaaacaccgcaagtatgtctcgagacaacaattaaccacctgagtttggccatcagtttgtggatgataggaggtactatgtttcagcgttgtcccttgtaaacgaaagttcttcaaaacaacttagaaaagagtggaatgaaactgaagaggctggtaacaccaaccggcccctaaacttgaggcatccatgaaccattgaataacctccaccatcttggccttgagctaaatctgaatcacttcgaaagcgtgggtctgctgcaatctgaacttgtaaatttgggatggatac

SEQ ID NO: 204419 - DNA, 769 bp, Cannabis indica
tagtcttgccctaaatatatatactaagataatattatgtatacttaattatatttataatttttattttgattatatggatttttaattatataattattttttttagactgtatgcccgctttgaaaagaatttcatgacctacaattgagaacaattttgacttctacctgttaagttttttctatattctatcacgaatggcatcaaacaaccggtcttattatgctccgcaaaataaagaaagcctaaatacttctcatggcaatcaacccccttgacactcaacaaatcaaccattttagcaatttcaaaactcaaaatattttggctaaaataaacaataaacatgtcaaagttaaccaattgattcgaggctgccccataccagctcaaaagttgcatgaatcttacacaatacacattagaagccttgaaaaagaacaagttgttgttatatgaaatttgcggcaaaagtatctaaaaagtttactatgatgcagattagtccctaacctaaaaaatagcggtaataatcctcaaggtcacatattttgtaagtctgttagtcctaaatttgatagatccgttaagttattcataactgacacgtgttaagtcattattggtccaaataataattttaataaaaaataattaaaattaaaaaaaattaaaaatacattttaaattatatttttttttctttttttctccaccctctactacctccagccacactcgacccttcttgttcacttctttttt

SEQ ID NO: 204420 - DNA, 512 bp, Cannabis indica
aactaatacaaagaattaaaataccaagtgatagaaattaataatataattttacttcttgtaatatattaccactcctgtatcatgttcttctaaatattttattttattaaaaattctccataaattatttttattattgagttttggtacttcagttacttttgtccaaagttgacgttgtatttattgtgtaagaacccaaattaacttgagacgtatctgtatcattgctttgtgtataatttacaatatatatatatatatatatatatatttttttaaaaaaatatataatttggttaattccaaagaaaaaattataaatttaagttttaggtaagtgttaagtaagtgtagctatatagtgtgtgtgtgtgtgtgttaattgggtagacaagtttgaataaattgtacctacttacttactacctttgattccatggcatggactgattaactaactacaactagtaatagcaaatgcttgttattttccaataattaataat

SEQ ID NO: 204421 - DNA, 759 bp, Cannabis indica
aattaagcatttatattcatttgtttaaattaattaaatatacgtatctagctaatttatttacatatattatatataacaggtttaacaattaacagtaattttaaagtaaagatatggaccacatccacacatggcaaagtatttatgtttttatttattatctaattctcctcaacggtcgtcattttcttgttttttttttttttctttttaattattctccattattatatatgtattgcattaagctaagcatctcattcatttttattgtttaatttatatattttataaagtttttgcatagctcagtacaagactgcaaagagatttattgttgtcttgtaaaaaatttgttgacatttgtcttattttagaatgctttattattttaattaaaatatatgttatatataattacaagaccaaatgaacataggtataaagaattttgtcaacgtctctgattttaatatggcatattatgccactggcccactaatagttagccgttgtaattgaaagtaataagtttgaattctacacaaaaatggatacaaattcaattttattcatttattaacattacacataaaataatacctacttttttaaacttatcaaagtttttaatcataccactcatttcttattatactaatttcaaccaacctaaatattcaaaacattctactcaaaatgacactccattattatctataacttaattttcttctaagtattaacattttctag

SEQ ID NO: 204422 - DNA, 1166 bp, Cannabis indica
ttgatattagttggtatattgagaagttagttaaagtgttcagctgtacaattctgttattgtacaattcaattattattttcaattgtaaagtctttgaccatatctctttgtatataaataccaaaggtctttctcaactcagctgagttgagctttccatatttccattgtttactctctctcaccttcatctttcttgctcctggtttagtttttggctttctgtgttctttcatggtatcagagccatggctaccggtcgaccagaagctccagaaaatctgcaaccaaatgaagctccaccagctgcactaccaaacaacaatttgcttccgttgaatctaagactcgatcgatcaaactacacgctatggagatccttagttcttgcagcagttcgtgcctacgatcttgatggacatctgcttggaacaattccccaacctcagcgaaatatggcaggtaatgctcctaatcctgcattcaatcagtggattcgtctggatcaatttctcatgcactggttaatgaattcgatttctgaaacaattcttgctcatgtgataaactgtcaaacttcggctgagatatggacgatcttgaatcaactttttgcaacaagatccagggccaaattgctccagatccgtgggttacttcaatccacaaagaaaggatcgctttcgatcgatgagtatttcttgaagatgaaatagtatgccgatgccttagctgctgcagatcaacccctctcgaatgaagatttgattctttacatactcggtggtctcggatccgagtatgaggctgtaattgtgaatctcacttctcgaaccgacaatccaacacttcaagaagtacaatttatgctgcactctcaagaaatgcgaataaaccagttagctgccgattctttaacaaatattcaggccaactatgccaacaccaccacaaattctcacaaccgtggtggataccaagggaacacaggacgaggatatcgtggtcaaaggggcggcagaggatatcaaggcaatagaggaggcagatgaaacaaacccatatgtcaattatgtggcagagcaggccacactgggttaaaatgtttccatagattcgatataacattcactggacctccccaaactcaaggcacaccctcc

SEQ ID NO: 204423 - DNA, 889 bp, Cannabis indica
attgtgagcagcaaaattacacaacttaaaaagttacatgacaatctattacaaaccaaaatatagctatcaatccgccagaaaatagtatttccaatcatcactttaataacaatctctgaatcgctctcgacaacaacaaaacgatgattccacacagttgctgtgtctgaagcgctagcacacaagcctccacttcaccaattaagggatcagaataagcaaaactcttggaagcaatccacatccctattcccacatggtctcaggccaacgctataatacatatcgacccatttcccactttgccatcacaattaattttgattcaatcctcaggagaaggggaccaaaagggggtctcatcatcaggagtaagccaaagtaaagaggattcataatctgcataacagtaaatgataaaatcaatatcatgtttgatgttatacaaattattattgtgtaccttatcatttcgagcttgccaaatggtgtctaccacaatagaagcaaaaagaatcacttctttgacaataacctcactcttagagtgaagatcccaaaggaattgcatccagtcccacatgcgccctttggattccagtaccagaatgaaaccccaagtagatgccctccaaagatgagaggtaaaatcataatacaaaaaaaaggtgctccatagtttcctcacccaccccacaaatagggcaacgtatatcactaacaggcgatctcttggcacgaatagctcatgtcaagagggcattagacaaaatacactaccacaagactttgtgacgctccagaattttacgattctaaagtttgtttcacatggcaggggccacctcgcaaggagggcacaatcaagagcttgaactaagaggtt

SEQ ID NO: 204424 - DNA, 522 bp, Cannabis indica
aaaaaaaagttgcaaaaatttagttcagggtattatttttactattttggaaatacaaggtctattttgttatttaacaaaacaaagggttcaatctgtaacttttacaaaacacagggtctaaaatgacatttacactaaaaaataaaaagtagatttatagtgtaatttttactttttttaattatattacaattttccatatataatagtctatctttaaaatcacgcatgaaagatagatgttgggacattaatgagctgctacttcaaatcagaaaattacttttacatccttctcttatgggattatcttttatttttagagagccaactatgtggctcacattttagctaatcaagctttgttatctccaaatctaactagtactatgtggattggagttttacctccttgtgttcgttaagctttttgagctgatgagtcatttttttttgtaattttttgggttaatgaatgaattttgtttataaaaattaaatatggattagaaaaaaaaa

SEQ ID NO: 204425 - DNA, 776 bp, Cannabis indica
acattttataagtggagattattccatcaattgagataaaataaaaaaaaagtttgaattagatatttttgatacaatgtaaaaagatatttttgataaattttgtttaaattaagtaactaaataaacataaaaactcaaatttcccttgcattattggccatttgatcaaaataatagtttaatatttttaaaattaaaatttttttttttttagtaaccatcaatgagtgatacttattgagaagtgtttcatatatatgattatagagcttaatcaatataagcttaccacagtatttatataagaaaaagtgtagcataaattctcaaaaagtttaagttgatgcaaatataagtccccaacacctcaaaaaattgtgataatatagtcttcaagttcgatttttttgtaagtaacattggtcctcattttaacatatatgttaattgctttcaaaaatgtcacgtgttgatattaaattgtggcataagtgtccaaaaattttagtttaacacagatagtccccaatctcgtaaaattatggtgatagtccccaagctaatccttatcacatttctttgtgtgtgtgtgtgcaggttaacagtagatctttggcgactaaagatggaccagcaaaatagatgtggcgacaggatcggaataaggtgcaacaatttaggggtttttttttggcttaattagttttctggggtcgtaggatgaggaagaaagtggagatgaagggatgatatggtcactgacaagtctccat

SEQ ID NO: 204426 - DNA, 1310 bp, Cannabis indica
cttatttctttccatttttgttgattttcatttgtttctcatttttagctattttgttttttttattattattattatttatttccaatattataaagtgttagattagatgggactgtcttattcttccagcattcctcagaggcatccagaagaccaataatttgcataagattgaataaatcttaaaatatattaaaaatattataataaatcaaaaaattaaattgttatctctcaaatttaactaattatgtttgtttattttctttaattttaaatctatatgtactaactcaacataatttttcatttatacattatttcagtttaaaaagagattgagcttaatttagttacattatcttttaaaaaatatatatatatataccattaggtggatgcaacgcaaagtaatataatatgaggttctttccttcttggatttctaaaaaaaagtttaagagtggagaaaatatatatatatatatttttttttagaaaagatacgttcattcataaaacaataagaaccttagacctcgtagtcgttacaacaaatatttgtaaaaacagtagcaacatcaagggatccataaaaattctgggtaaaattacacttgccacattatgagtcataaagttacatgatctagccgtgaaacaaaataaacaagtaatgaaagaaggaacaattctcttacaaaataaagagtagtttttaatttcccatctgggggtccacaccgttgagggtgttgatcactatctttgaaacgatttccaccaagataaactgaagtcctttgtcctttgcaacctcaagcgccaagcaaaccgcaactgcttcgccacaaagagcatcaaaaaagtccaatctggtcgtaaacacccaaaccaccctgcataggtagtctctagcaacaactgctacacacatatgctcccctccagccttagcatcacagtttagttgatccagtcttggggggaggtttccaggtagcggggggttcggggaagatgtaggaataatagaatctctgtaatttgcataagaatgagacatgatcatacattgattcacattatccattctgttgttggttcctgcttttcaaactcaacaaaaatttcacccagtcccacatacgaatccttgttcccgtaacggggaagataccccatgggatagatcgccacaggtggaatgccgggttgcaatgaaggaacaggtgctcaatagattcttcctcaacaccacatattgggcaagagctgtccacaatatgaaaatgtttgagtaacac

SEQ ID NO: 204427 - DNA, 1860 bp, Cannabis indica
aataatatatagaataattttccaaataaaaataagagaaaaaatcttacttcactattgtgactattttttttttctttctagagtttgatgtacacttattttattttcttttattggtttacgtttataaaaactatttgcaattatataatcaaattaaataaaaatggaaaattgattttagtttcctaataaaaaaaaatagtttaatcaataagatgtgaaaataaaaattgacacaagagattatttataaataggattataaaaaaaaaataaaaaaatatgactccaatccaaacttcattttccttaactatatgatatatttatttatttccatattaaatatgtttacttaattatataactcgaattattctaatggaatgtaattgttataaatatatatatatatataaatataaaataatgaaataaggcatttatagaaatagaccgaatcatattagctgggaagtatatctatacatatagtttattttagttattaattattaattaaataataaaataaagattaatgattgtatcaaaaagattaatttcaacctgttgcgtgtaaatatttaattatttagtgtattatataccctcttgattttgcttctgatgcaatacattacaccctctttttttatttatttattttattatattccactaaaataataataattagactattaaataaaattaaaaaggacatttgtgttaatgtgtaaggaaaaaaaaagcatatccaatactaaatttaaggattcaaaaccaataatttaaggataatttatatccttccttgaccatattataaaatataagtactctatatgtataaattatgttatatattaatttatatataaaattatgttatatattaatttatataaaaaattatgttataatatattttttgttgatataatatttgtgtggggatggtggggagcacgtgatgttacttttcacgcatgcaaaaaaagctaagtgaaattttattttttagttttattttttgcaattgtacccatttgcctaggttttattataaatatatataataataaaaaaatgagagcattataagttgtgttatttttgttctggttattatgttattattattatttttagtatgtaaaagattattatatggaattattttaaaaatacatacaaaaaattaaaaaaatatagtcgtacgaaagtttatatatatatttttttacaattttaagattttatttataaaaaatatgaccttttgacttatttttatgttgtactcttattattttattgttgattttttattatttgttatgttatttttacatgatttttttttgttatttttataaaataccataaaaatatcaaaaagaaaaatcaatgaaggtaaatgtgtaatttttttactaaaataatactctatataaattaatgtttcatatttttttttatatacataatttacaatatttaaaaacagaatttaaattttaattatacacatttatgaaaaattatatacatatttgcaactaaacatttgaacacaatttttttttgagaaagtttatttgaacacaaattaaaataaggagaattatcttatatactgtttttttaattttttttttcaaatttattgtttggatttctaaagtggttgtagcgctaattgcaataagagtttctatacgattttttgttacaatttaggttgcagcgctgttgcaatagaagattttatgtaaaatttcgtaaaaatgcaagaaaattattataaaaataagtaaattattaaaaacacaaaaaaaaattactctt

SEQ ID NO: 204428 - DNA, 1093 bp, Cannabis indica
gactactcttgccaatagaataacctccgccgctgacattgatttgtcccgccaaaccacctcatttcgggcataccaaatcgcccaaagaaccatgagcaattcttcctgggccgtggatgagtgttgtagcagaatgtggctaaaccaatcccaaaaagactccatagacgtatgactccaatttataaaataagtttccatttagaaatattgaaggagagtgaaatttctataattactttttctttccataaaattaaatgttatttatatcgtgaaaatcacataattacttgaagttaatttaaatggccatattgaaaatgtgtgcgttttagatggggacagttatttgactcaaaaagaaatatatttataaaattctatcataaaaaaaaattagtgaaagtcatatattgtaacttaatttacactaagcctacaaaaatataattaatttcacttataacaatatttagctatgaatctacattattggacttaatacaattatatcaagttttttaaaaaacaatcatacaattgaaactacaatattataaatatatacatagttatatactatacactaattgagcttaacatatatgcttattcatcataaaaacaatactataatgatgaaaaccaatttggtacctttccaaaaaaaaaaaaaaaaaacacaatttgatggctgctgggaaaagaaaattatggtatcatttatttatttctttcaccactttttctaagaaaagtagcataaacataaactcctgaaaatatcaattttgaaaaaggataagttgaaaaatgcctcttttattaatcaattaatcaaatttacctataatttttatttatttgaaacatacctctttttatatgtattgtactcaaaataccctgacataagagagtcacatgtagagtatcttgaagtgacagggacaaaattggtacaatatttaaaaaaagaggataaaaataaaataggacgatataaaaaaggtataaagtgtaatttcctctttttttttttttaatttgaaaatgactcctcacctccacatacaattctccttat

SEQ ID NO: 204429 - DNA, 1064 bp, Cannabis indica
ggcagccaaggctgctgcaccttcattatctacctagatcacaggagcagcaggcaaagtgacttgtaattcagtcagcaaggaacgaagccgcttgatttcagctgcagtgttggctaaggcacgaaactcggattctgttaatgatcttgctacaacctgctgctttttagcaaaccagaagatcaaatttgacccaaggaagatggcataaccaccagtggaacgtctgtcatcgatgcagcttgcccagtctgcatcggagtaggctgcaatcatcatactgtcgactggtttgagaagaataccatctgaaatagtgccttttaaaaattggagaagcctcttgcatgcttcccagtgaatgtgtgtaggtgcatgaatgaattgagacaatttgttgatgatgtaggcccggtcctcaatcatagtgcattattcaatgtgtggagtgcacccaatttgctgcgataaagagtgacatcctcaaaaggaacaccttcagcaagagataacttttgtgcagtagaagtgggattagcacaggttttagctccttccatatttacttgagtgagaagatcggttatatacttggtttgagacaaataaagaccttcactggttggatgaagctcaacaccaaggaaatagtgcacctgaccaagatctttaagagaaaaagcagagctaagatcagtaatgagtctctgaatgagagtagcattaggacctgtgacaagtatatcgtccacatatactaagagaataatcagattagaacccgtgccatagacaaacaatgatgtatctccttttaaggcaacaaatccccaatacaaacaaagtagacttgagtttgtcattccaagcacgtggggcctgcttcaagccatacaatgctttatgaagcttgcacacatgtgttggtttagtgggatcttcaaagcctttgggttgagccatgtaaaccgtctcataaggtacaagtttccaagtccttgggatatagagctcgaaattccttgttcatagaggcaaaccatcctggttgttttagtgcg

SEQ ID NO: 204430 - DNA, 917 bp, Cannabis indica
aatcaataaataagatttttactctttaaactataacccttcactataacccttcaatgaaatttttttcttaaattatagaaataattacaaattttttctttgagttgcatttcgttctaattttttaagattaatttattaatataacaataaactatacgtataattatagtaaagtgcatatttaactaacttaagcactatctatataattattttcactcaattttgacatgaaaattatttatagagcaaaaccatgcaagtatagaggataaaaatcctattcatttttaacatttttaataagagttttatcctattcaaattttaagataaaaattctattcatttttattaaatttatttgtaaactaagcacatacataattggggtgtattaattttaatttttaatgaaaccaacctgcaaaatgtaccacaaagaagagacaaaacagtctgttgcaaggaaaagacctccaagggcccattctgattgtgatgaggatagaagttgtgggggtaaattgggtattagagaaagttcttgtataattggtgggcctttgtagagtgtcacaacaaatgctcctgatatggacactattgtccctaagcatttagcttggctacttgagcttctccaatttacactctccatcctagaataatcacccattttaaatttcatatttatataaaatatgatctatttggtaaaatagaaaacattattacaaagttatatctatattaagaaattagagtgataattacaacttcatattactttttaattaatttttgtatccaaaaatataaatgaaaatattcttttttcataacaatagttgttataattacaatattatttttataactttttaaaaaattttaaataatatataata

SEQ ID NO: 204431 - DNA, 671 bp, Cannabis indica
tactcactaaaaatccaaaatttaaaaagacccaatacacaatttggatcacaaaaccataaaaacaaatcaaaattatttaagataaaaactcacactttaacttcgccttgaggagtacccctcttattgatatcacgaccaaagagattagctctcaaaacgtatctcgaagccacagggatcaatttaacggtgatgaaatacccaataaggctaagagccgcattgatcaaaatggaattcttcaactcttgctcgatcttgtaatgatggaagatcaggtaaaagtaagggagaaagaagaaaagtgaaagaacgagaattacagctgatttgggtggtgaaatttgaaactcatctgaagtggatttcttctgtgtgttctcttttggctgtggtggctctgtggttgagctttgtgaagctctcttccgagttgccatggcgggtcttcgtctctcccttgttttttttttctcaaaacttttgatttttttttttttgtaatgaaatgatttttttgtagtaatttttttggcgtgtgattttcgtttgtttcgttagttgaaccaattagatagtgacaactcagcaaaatgggttgaagcctgtacagtttgccacgtaatcataatttacacgtggctggaaattttgaaaagagaatt

SEQ ID NO: 204432 - DNA, 1398 bp, Cannabis indica
atactcttcatgtaactctcttaaatcaatgtattttgggtactaacatatagaaagaggtttgttttaattaaatataagttagaggtaaatttggttaattgataaatgaaataagtattttcaatttatccctacaaaaaagacaattctaatgtaacatgaaaaaaaatttaataattttttatgtattttgaattttattttactttattcatattcttatatttttatttatgataaccaaacactacttaaaaatgcacccatatatatatatattcaatgtaaaaatactaatactaacatatttatgagtatttagactcatagtttagctaatatttaggtccatattttacacaacaagaataattcgagtatagatatgatacaatactatctatatttttataaggatcgggtctttatttttaaaaatggactatgtataggtctaaatttctgcctaaccttttaattatgtcttaacttttcttgaataaaaattcttcccttcataatttttttttatgtaaatcaaaaaaatttaattgtatgaactcaaaagctaattcataatttcttccattcataaatacaaatataattgctcactctcattctttactgtaatggattaattgtaatttttaattgtgaaaactgaaaagtatctttttggttatattaaaaagagaaaaaaataaatatttcattaatactgaggagatatttatttcttagttttctgagttattaatgcacgaattctttctttaccataacatgaaaaaggataaatttggtaattttgattagaaaaataaaataaaatataagttaattacaatcttttttttccaaatatacaaaatcatgtttttaaatttttgagggccttaaaaatttctctcaactagttgtttgatttatagaattttattcaattttaataaaaaaaaaaatataacataattttatacatgtcaaaattcgagggacataattttgagacatcaaaatttaaggagtattatttaatattgggtaatttacggtataaatatctaagtttaactctcggttgtaaataaatagttaagtttaattttttatggtaataatatttaagttatatttttggaactctataagtacctaaaaattaaattaaggtatttatttaaaaccgagaattaaacctaaatatttatgacgtaaattatcctaaataatcacatcataagtaaaattaaatgaaatttgattaaatttttttacattaatattctcaatagtttttttttttttaatttaagtgatataatttaatatatattagaatttaggggaccaaaattttaattcacctaaaatatacaaccaagtatattt

SEQ ID NO: 204433 - DNA, 869 bp, Cannabis indica
ttcactgcatgtttttcaacacaagattttgaagaggatttctttgttcattcagttagaattttttttttattatggttgatgctattagttgattctgagctctaatttcatcttgcccatctgtagaatcagtatttatgtaaaattgttaattaatgtgttattgctaaaaaattgtttaggccgcactacaatgtcaacatgacagcagttcaagttggtcgtactttcttaaagcttccaaacgatgtgtttgagataggcgacagaaaagggacaataattgacagtggtacaacattagcctatcttcctgaaatggtttatgagccattagtaagtaaggtatgagaaatgttggagttttatcttttatgtaatttgaaattttttggacactcaacaaaattattcaaaaattgttcataattttccctatttcagataatatctcagcagcctgatctaaatgttcatacagttcatggcgagtatacatgctttccatactcagaaaggtgagcaatggatgccatttgcggaatttctattatgaatgtgcaacaacaagagcactagtttcttattgaataaatatatattattttaatttgttttatagatttaaattcagcttttcttgtgaagttttgttcgattgtttgagatttatcatctttgttatttatagtggttgttagcgcaaatttcttttcttgttcattttctgattggaaaaatttcttttttacgttggttttctagtacgttaccatgactggggtctagaatgttttatgatttgttttaggctctcattatgctgttaaatttttcatattaaggaattaaattctactttaagc

SEQ ID NO: 204434 - DNA, 617 bp, Cannabis indica
gcgtcggttatgacatcgaaaaaaagagtacataaccgacgtaaataatcagtggtttagcgttggttattggctgacgcaggtttagcgttggttcttagagaattagcgttagttgtgaaccgatgcaaaatactcactttttgcattggtgcacaaccgatgcaaacttacctaaattaaaaaaaaaaaatcagacataataacgggctttgagcccatttaagaaaaccctaaccctaaagatttaatactcacatcaccccaatcgtctcccctatttctaacattctttctttctctctcaaccctcgttctctctctttatttttgtaagtcccaaatcgctcagcccaaatcggagacaagtcaccgtcgctcgcagtggaaacccgcaattactcagactcgtcaccgccacaaaccgttcaaaggtaatttctttctctcactcactcttctctccttcgatgtctctttctttctcctatggtctctctttttctccttcgacctctctttctttttactgtctatgctatctgatctctctttttctctctcttgaatttttttgtaggcagtataggggtgtggtggtggtctgatgggatggt

SEQ ID NO: 204435 - DNA, 1305 bp, Cannabis indica
gtcttctgctgcctgcaagggatacctaaatagtaagtaatgattttaagtctaaaagggtccatagtaacagagatttcatggatggacttagttattatttgatactgtgaaacttcattggatatagatggtgagaaaaagaaaatcagtgttttaggaaaagaaattcagataaggaaatgaggaatttcatgttatgtatgcagtggctccatcagcacctagtgtctaaggttttcttgaacaacaggaaacaaaagaacaagtttacctccagagtccacagcaacaatgttttccggaatattagtcatagtgaactagccatttgcaaatattaaaattgtcctcaaaagagaaagagtatacaatttcctttccaaggaaaactaaatgtcatcaaaacacagtgaattacaagaatgttattgaatgtctattcacaaacaaacaaaaaattgaattgaaaaatgcgtaattgcaaccaaaaatagctatcatgtgctattaatcagcagtattttttttcaacctaaattttagaaagctaactggaatcatatacacaatcaatgtcagtctgaattagtagctaagatttataggataatagtagacaaatcatgctatctcaagcaatgtaacaactagcaaccatgtatcaacaaacctgaatagagaaggcatgattaaataagggaggttcagaaagatgatattattgggtaagtaaaactcacagtaaataagtgcatccatttctattttaaagagtgtctaggaagaaatgcatcagatttttcttttcattatatgggaaatgaaatatcacctcctgaagtgcaactaaagcttcggcctgccaacgtgtgatttctggagcaaattggttgctgatctctcttacctagaacacaatacagggcttgttaaccatcagcattacacaatcatgttatttttcaaaagtcaaggtttacctcacttatttccttcttttttaaaatttctgggaaatacaaataaaaatactagattcaacaaaacgcaacactgaaaaatgatagaaaaaagaccaaacaaaatcataaatcatctctccaactaatcaacatcaaggaaaagtcactgaatcccttcaaagaaaaaccaaagaagaagcccataattaacctcttcaaaagaaaatccttatcttcagccagattatcgctatgctaattggtaagtgctgaatgctgatttttaatcagtgttttattttcccttgcatcttttcaaatataaatatatacatatata

SEQ ID NO: 204436 - DNA, 609 bp, Cannabis indica
tggacaatttaatatgttgcttcaaactaatctattcatgcttacgtgttgtgctatcgggcgtgtcgtgccgtatcgtgcctaaactcgtacttttttgtgtggcagcatacctaagcccatattttttcactgacgtgtcttgtcgtgcctaaatacatatttttcgagtcagattgttctcgtgcctctcgggctcatatcgatttcatatcatgtcaaaaaatctgattcatatctacaacactaagcataactgtgatcctaaagtgatgatgaccttacgaaaaagtccaatattacatgctctaaagtcaaaaaaatatatatctccaactccgacaatggattctcgctctgagaccttttagtgcaaacctcatcaaaattagggaccgaaccaataaggtctcagggctgacccaaaggtgaggtaagcaaggtgtataccttaggcactccaagccccgaaattataaaaaaaaatatattaaataataagaaaatacatcaaaatagtgatagcacagtaggagagaatattactttcgagtaggaggttctggaactctaaaattcttggaagacataaagtgttttggtggtgca

SEQ ID NO: 204437 - DNA, 597 bp, Cannabis indica
tcgctagctttgattcatccgacgggatgaggtttggtttggccaaaattggtgttattaactgtacggccaggattaccaacgatattactttaagagccataatatattatttatggtggttaatttttttcttctaattaaatggagccaagttatgatatttatagtggttcgtatagggggctaatgatgaagctttttgtgattgtacgttatcacttgttatttagctaaaacgataccttcatgtacagatcgcctcctaacagattaaattaaggaatttgatgagtttgattttgggaattaattagttgtgtgttggaagagtacttgtatgtgtcagctaaaccagattttgttactaagtgtgggttgtgattgtgaattgcttgtacaaggcttggtggattgtgttttataaaaacagctaccttccaatatttattgtttttattttgatattatacattgtttaacatattttatcacatagaattaattaaatacctaacatattggtggtgtacatacgaattctcctattaaaaatttgtgtctgtgttaaacataactaatttaatttatattaaa

SEQ ID NO: 204438 - DNA, 793 bp, Cannabis indica
ttagtgtgtaaagaaatttatttcgacacacaatatttatacacaacgatatctaattagttgcaaccatacaatttgagtgaatattactacccatatatcctttgttgatatataatttttattataataatatgacaagaatcacacaaatttagaaattgttaatgcatgtattgattagaacaaattcattacttatgccattgcatgcatgtgtacttgatttatgtgtgtttcctaacacataattattaattaattaaaattataaataacgagcattaattaagccaaccgtccacgaccaattcttgagaaatatatcctgccatagaagtttagagaaaattatcttactaaaaaatttcacaatataaaatttgtttcttacttttctttgttggtttcattactaattaaattcctcaccattatttttctctgctactcaataaatggcactgatttaatagtgtgtttttctttttcttcgctttctgtggtcagtaaatggcactgagctctagcaaaaagaaataaatgggcactgattgcgctgcatccaaatattgagtaaagaatgagattgattttacgatttttggctttggcagtgaagtaattatattaataagtggtaaaagagaaaataaaaagatagtatttattttggtgtaaatttagttaagttatattttagagttattagaatttttgctccttgaaatttgacatgtaccaaatcatgctctttgaacttttaaagtcgttaaaaatgcctctgaactat

SEQ ID NO: 204439 - DNA, 2183 bp, Cannabis indica
gaataacaaactcactgacagtaactaactgtcctaactaaactcaaccaacatcaacagtattatcactctttaacactaccccctcaaaactgagaattgaaacatcttcaatttttgagtttgtgtcgaaacacactgaaccggttgctggaaatagatttggtgagcccgtcagcaatttggtcgatagcaggaacatgtctgatgtcaacaagctggtgtagaattttctctcgaacaaagtacaaatcaagttcaatgtgctttgttcttgcatgtagaacagggttggctgttaggagaactgtactgagattatcacaccacacaataggagcacgaggcagtgtgatgtgcaattcagacagtaaagaatgaagccatgttatctcagcaaccacattagcaagaattctaaactcagcctctgtactggaccttgaaacagtatgctgtttctttgaagaccatgctaccaggttagagccaaagtaaatggcatacccagaagtggacctcctgtcatcaatgtctgcagcccaatctgcatcacagaaggcaacaatttccctgtttggagcttttgtaagatgcaaaccatagttcatagtgccactcaaatacctcaagattctcttaacagtcacccaatgagcttgcaaagggttatgcatgaattgacagactttactcacactgaaagagatttctggcctggttattgtgagatactaaagtgccccaacaactgacctgtacagttgtgcattctcgacaggatcactcccataagctgatagtttcagtccacttgtcatgggagctgaggcagatttagctccttgcatttgagttttggccaacaaatctcttatatattttccttgagagagatgtagaccatctgtggtatgtttaacctcaatgcccaaaaagtagttaagttctccaagatccttgagagaaaactcactgtttaggttggtgacaagttgagaaatgacttcagagttgctccctgtgatgattatatcatctacatagactaagatgatggtagtggactgaggtgagtggtgaatgaacaaagagtgatcagatttggatgagacaaagccaaacctggacagggactgatgcaacttgtcaaaccaagctggggcttgtttcaggccataaagagctttatgaagtttgcagactaggttgggagatgtattgatctcatagccagggggttgtgtcatatacacttcttcttgaagaacaccattcaagaatgcattgttcacatccaactgtctaatctcccatccctgagtcagagtcaaggttagcacaacacgaatagtgacaggctttaccacagggctaaatgtctcagtgaagtcgaatccaggctgttgatggaagcctttagctactaaccttgccttgtgtctaataagagtaccctctgtatcctctttttctttataaacccacttacaacctattgcttgtctaccatgaggcaatggaacaatggagtagatattgtttctagtgagagcaaggatctcatcatccatagcatgtttccattgtggtaacatgagagcttgagcaactgttgtgggaatggttgacacactgaacacttttggtttgtgaatgccagctttggcctgagttgtcattccatgattgttttgaactggggggacaccagggacactagactgttgtggaggctgaatgggagacttggttggttcagggagggaaacagaagtgacagtagtgttgacaggaacaacatgctcaaaaccaggtggtatagagggtgtgacagatggaatgagagcctgagatgatgaaatatgatcagatgcagaagcaggagaatgagatagagagttggatagatcagaattagactcagtgactatggtagggatcctagaggcagatggaatgttaacaggaatgtaccattcctgaggagaaatggtttctggtgtaacattggtttcactatagggaaatttttgttcatcaaagatgacatccctagagattgtacatcctaccatttagatgctagacatttatatcccttgtggtttaggctataacctagaaatgtgcatggttcagacctaaattgcatcttatgtttgttatatggtctgatattg

SEQ ID NO: 204440 - DNA, 1180 bp, Cannabis indica
gagaagccaaagccaccaccaaccccaatttacgtgaagccaccccatgtggtgaagcctaagccaccaccaaccccagtttatgtgaaacctcccccaatggagaagcccaagccaccaccgagctacggacgcaaccctggacaccctccggtttatggaaaacccccgagtcctagccactattgagaactgaggatcgatcgcatgatgagtaattaatcatcatggcatatgtgattgagagagaataattaatactagctagggttgatttctagaaaaataagagtttttttacgactcataatcagggtgcatttctctagagttcaattacgtatatttaatcgtctcttccatttttcatatatatgcttttgaattaatgtatttgtatcatcaatgtttaatatcgatcgatcggtttatttatccttacaaatattttatttcgatgtacgaagcctatatctatatatactacactataaaaatatcaagatttatgaactaaaaaaaattgtgattcttatgttatattatcaataagtgttgttagccataaaaatcacaatatatttttactaaacatgtttgtaaccacaatttattattaataaaactaataatttgtatttaaatattatcttttagtgacaggtaaattatgttttgtagcaataataaaagtaatatttagttacgaaaatttatcttgtaataaaaaattatcagtaaagatatagcatcgttggtagtgataatctcttactttttcaatataatatttcaaagagttgaaaatataatatttcaaagttcttcgaattataatataggctaattatgatttttgttccttaaactttaacatatatactaaatcatgtctcttgaactttgctggctgttaaaaaattttcctgaactattgagattgttagatttaaagacttttgtctaatattattcaattttactatttcagtaattatttattactaaattaaccatgctcttcactttaatatctaccaaatcatacccctcgaattttgacatgtattaaatcatgtttcctgaacttttatccatgttagacttttttttactaaaattggataaaagtccttaaatccaacaatctcaatagttcaggtgacatttgtaacgacct

SEQ ID NO: 204441 - DNA, 2426 bp, Cannabis indica
cacaaagattcattgatccaaacttcccaatcatgtttgcaagctacacaaagtcttggatggcctcaagcatgccccaagagtctagtttgacatgctaaaatcctctcagcatcagtcgagttttctcgattctaagtcagattcaagcttatttttcaccaagtcaaatagaaaattacttcggcttctagtctatgtggacgatattttaataaccggtgaagacgatgtgcaattgtcatctcaaagctccacaacaggtttgctttgaaagttcttggacctattcattacttccatggttttaaagtgattagagactttgtcggtattaattatagtcaaaccaaatacatcaaagatcttctaattcacaccaacatatggcagattccaagcctcagtcgacaccaatgtgttccaacaccaagttatccctccattttgaaacccctctagatgattccacaaagtatcaaagcaccattggagcacttcagtacttaactatgacaagacgagagtctcaatgattcggaagaaggctgcaagcttctgccacccaagagtctcgaaagcttggggtaaatattatttgtgtttttggacaaagaatgtggcataaaatgaggagtaccatgttaaacaatcactaattaagtttaggaaaagactaagcatgtgagctactcagagatttgtcccacaacatacctccatgtgagacccggaggccttatcatctccctaggacccagagaagaccaagctcaacatatgtccaggagaaatctagagggcgctcgaagatttgaacacggacaccaattgctcagagaaagcaagacgtctaccatgaagagagactcaaaacgctctaacgacgattatagctcttctaacacagaattagatcttgtcccctgtgtcagactatggtagtacatgcaccccacatctgaacgtacctttttcctaacggtctatttagccgccttcttctcaaggtgaaaccttttggcgacacgtgtcctgtaccaacaatggtcctcattatctagctagctgcctctccacacgagcaaaaaccttcttgggggcccaacaatcagttctttacatatattttaccccaatagtgggctttctgcaaaaaccctaggcgggtcatagacatgtccatactcaattcaacctatgaatacccctgaatttacatacgaagggggtcaaaaaattaatagccgaaactttgctaaaaaatctctaagctttcttcttctccaaaagaaaccaagagaaccagagttagggtttattgtaaaaaccacttgtgatacattatacaaccctaaaaggcaaatacattgactcgtggactaaagatcattaatgcacaaatcacgtaaaaccacttgtctaacttacttactgttttatttatttcttaagcttataattaactagtttctaaaaatctcgataaacaaatagctatgctcgaaacccactcaatggagacccattatgatttttgccattttattttaaataaagtcttgaatataaatctatctttttccaatttattatttaatttgatttaaaattatttaaatactaattttaatttaataattataaataattatcaattaaaatataatttaaatatatttattaatttaacacacaaagtttcataattaacaaataaattgtaatctctcttatcttctcaatttagctcaatcttagtaaaaattctcaaacttgacatagttagtttttgaatttcaattgattaaataaattaatcaattgagtcatcaagatgatattatcacaggcattatggggatcatggacctatgaaatcaagctcccaataagttgatttgaaatttactgagtagattttctaacttattaattcctcgtgactccattatagacttataattacactcttaattacatagaacactatatttttaatatacatatgttatgaattatccattgtttcgattagaataattaacggtcctctatagatggtctacatcgagtggggacaaaattactattttacccctcaataaattttatcctttaaacacttagctccttgtaaatgatattttagaaaactattataattctgaaaatgagtactccaccattttactcatttaaccaagctcaaggaaagcgtcgtttcattgctaaataattataaaagctatagatgtccatatctatggttaacactcccactcaattaaactaccagattcttaaaatgtaagtaagagttagaccaacgagtaaattggtaacaaaaaactcaaaaaactcaagcaatacaattagtttatagcataaccatcttaggaagtagattaaattgatctaagatc

SEQ ID NO: 204442 - DNA, 1050 bp, Cannabis indica
ttttaacaaccattcgagcttttagtaataatgtcacctaaaatctatttacttaacaaataagtttgagtgtcaaaagaagaaaataaagaatgttaccctgcaataagaatgtttagcataactgtagcaccaactgcaataccggccaactctcccacctattaaaacatacgcacattcttattaatttgataagattaattaaccaaagaagtagttaaatgagtatatatatatatatgtaccgcgcgcgtgtcggtagcaacagcagtaacaacgaacaagagattaaaggtaataacaaactcgagcacaaaagcctggccgaggctggtggaaggaacagtaacgccaccggacatgaaaggatggaacacagctttgagaagaaaggaagcacagatggaaccggacacttgggccaagatgtaaccgggcacgtgggcccaagggaagtggcgcagagctgcgaaagctaaggtcagagacgggttcaaatgggcccccgagatgtggcccgtcgacagtatcactatcatcaccgcaagcccagcgcaggctgcgttcccaatcagagtctctgcaccgttgtacttttggttcactattggccctgctgttgctgcgaatatcagtatgaacgttcccacaaactctgctcctagctgcatatacacatattcttataaataatgtaacaatcatagtccatccatggccctgtaaaattaatctgtttctataaatatattaatttaatttaagtgtaccttgcgagtgagcgagacattaggagtggggaaatcggtgaggcaagagtgaggctcaccccaggttggggcgctcactggcaagcacttgcatctcggcatcgatttccgatcatatgataatgagtctattctgtatgatgatattaatggagctggagtccctggagtcgccggagccgacgctgccgttggtgatcctatctctgtttctggcattttttttttctaatgttatctttgatgagactatttttttttttttggttttttattt

SEQ ID NO: 204443 - DNA, 513 bp, Cannabis indica
agagagtgagagatctacctttaatatgtatttctatggcaaggtgttcagcatgatctgtggccttgattatagcaatatgtttaagttctgaaaaatattattactcaataatgaaaattcattgtaatttagtttgtcacacaaacaaataatactaccaaataaaataatttatcaagaattcatattttttcaaaagatctcacaaatataaataaaacataaaatttcaacttaaagagaagaaaaataatataattgcttaatcatctatatggtccgtgtggtaagaataaaacataaaatttcaacttaaagagaagaaaaataatatatttgcttaatcatctatatagtctgtgtagtaaggcagaatagttgagaacaccacctttttagcactttattaaaaatgctctaaatagacattattgatttgtaaccttatttttttacttgaaaattttatgaatgcaaggtattagttgagaagattaaaaaaataaaaaa

SEQ ID NO: 204444 - DNA, 916 bp, Cannabis indica
tagcatgcattttcttcaccattatcacaccaagagacaacacactattgataaaaggtaaagttctatccttaattaagacatatatagattgtatttgcatcaaaatttcttgaaacatcatcagttgatttgacatacagaaaatcttatacttaaaaaaccaggaaaaactatagcagccatagcatgtcagcaaatcttgcaatgataatctaccaagatttctctcttaaaaataaaaaaattagtacttatccttctgcaaaatctaacccttgtgagtaattcttattcaaaagctaagcattcaaatatcacaaaatttgcctataagaacacttgaataacaaactaattcaaaataaacaaagctttattaaacacacaaataactcatctaaatgcagagtaggaaagaaaagaaaagaaaaaacacttaccgaaaaaactatgccgaaagcccacaagtactcgaccaagaacccaagccaatcccactgttcaccttcccaaaagtccttttcctcacccggaagcttgggcaagaaatatccatcatcaacgccattaacggctgagccagtagcagcagcgttttcgagaagacccatttggaggtcagccgttcgattaatctcttctagttcttggtccctggtggtggtggtgcttctcctgttcttgttgccatcgacccttccgcttctggaggaaaacttcttggcagacactgccacgtggaggtttctggacgagtgagggaagataaggtggcggcgaatagggaagtgggtgtagttgggatttttggtgggattgccggagaagatgattgaagctccactagtaccacctccaccgttgggtatggttagagccatgagtggatgaggaaaaagataagaaagcatat

SEQ ID NO: 204445 - DNA, 1182 bp, Cannabis indica
aaacaaaacaaacctcataagaagacaagaacgacttgtcaaatattcattcttctaaggatgttatagatatattaacaaactttaatcgcaaaacacaaaatatgcattccaaaattttaatcacacaaacataaagaattgaccgattatatatatactcgaatcaaatgcagacaaaataatttaatggaagaccatattaatatagggatgtttttaataccagatgttaggaacactgtaaatcttaattaagtcctaattaattcatgacaatcaaataatagaatatagattagcggaagcgtaccagtatctatagaatttacctttaaatgatttgatcttccaatttgcatcaaaacttttctctgaaagtttttctcttggtgatggggatacaagagtaaaaagatacgatacaaattaccgtttatattaccaacagacaaaactattggtaatatttattgactatttctatttgacccctcatcaaaatagaaatcgtccttatggtatccacatattaaaatcatgacaatcattctcttaagtcataaactttattctaaaatagaccaaataaatttgacttatttatttggtgacccaacacacattttatatatacaattgtgaccctaataaatttctaacagtatttacaatacacctcgggtgcactaatgtatctttatttatttcttaagaaaaaaaattaatttaattttttttatagttgtttattttataattatttaagatattctgtaaaattttgcaaaatttaaaataatttataatattaaaagtagtatttaaatagtctatttcatatacgtataaaatataagaatcacacgtgtaataaattatttaaattctttttagtgtgttaattttttttcttaaaattttgtagaatgttttgaataattacactatgcaccatcacaaaaaaattaaactgaaagattctcccaaatgtcaaaatatataaaattacattaattttaagggtgcattttattaagacaaatttagagtataaatattaatttgttgagtttgttactaataaatactttgaaatttaaaaagaacaatgaaaatattttaattttttatttttgaaattttattggtgctcactttattgttattttttttaaaaaa

SEQ ID NO: 204446 - DNA, 406 bp, Cannabis indica
atatgcatattcatctttaattgattatatgtacttgatgcacgcccttatgagttataactttgtctctgtctttatatatatattggtcccatttataaaatgatctaccacttatttatacctctttcccgcctaagtaattaaactattttgatataaatattgtaaattttcatatatgcatgcataaatattctaaaagaaaaagaaaagagtcaatacactcgagtgcatttgtaaaaatattactcatgaaattaatatcacaaattttaaagaagaatcccactaatacaactcacacttaattaattaaatagttcatttttcctcacaaatctgaagataagggccaccagtactacttgtaattccatattattattattattataattatccc

SEQ ID NO: 204447 - DNA, 1036 bp, Cannabis indica
ttttttttttttttgacttaaaatgttactaataaatagtatattttttcggtaatgtttatatataattaagttgagatatttaattattacatacctcttcttttgcgtagtgaactctgtaagtttcttcctttgtaagcccttgctcaaattcttcataacaaatcaaaagttctttataaaacacttgaaaacatcctggattgagtttatcaatctcatttatgtcccacctaataaaacacatatacttaattagaactaattagtatatatatatatagagatatgacaatatgtatatatgtgtaaattctttgataagagtactacaagctttgctcttatcgtatgggcaatttctttttatttattaacttatctgttaataggatggtgtacattatgcactatatataagcatctttcctatttttagaaattctaaatatttgcggtactcgaaattcagtttatattaaacattattttctacattgaaaatattcagaattcttgaaaacaaacatgacacctattgtaaactgcaataaacaataatgtcatgcataaaaaaataggaaacactcttatgataaaataaatatgtatcaaaccttttaactgcatcagttaggagtttaagttcttcaaaagtaccatatgaatcataaatgtcatcagctattgtggcaaaggaaataattttgaataaaattattcttgccaaatagtattggggttcataatagactgctaatatccaaaggtatagttccacactcctgtctcttgaaaaagggaatttgtgtacgaagtctgattctttccaccacctaattataataacatatgatacaaagatgtaatagagttttagtaattaaagcaatcatgctatatcaaaattaaacaccaaataatttgtcgatatatatgtatatgaaaatatttatgtttttgtctcgataacaaaagaaattcccaattatatatttgttaagaaacgttatagttttcatcaatatttaat

SEQ ID NO: 204448 - DNA, 1692 bp, Cannabis indica
tttttttttttcaattttttattgaagtattgaaatttaaagcagccccaaaaggcccaaaacatatgcacattgctcataaaagtctttcttcttttcttcttcttcttctttttttaaatgcatttattgtccctgactgtataccttattcctttttccttaatgccagttgcaactaaaaaatttattcatttgagtttacttccaattccagattgaaatatttgattagcatgttggcacaaattaaggtggtaatgtggtaatatttattcgagcaagtaggaccaaaatttgggctctgactaaatcaaattatatgtattttttaacttttatttttattcatcatcattctttagtattaaaatatattaattatgaggtattgcagtagtactataatagagaatataaacgtctgacaaaataaagtaaaaatagagagtaaaaacaagacagagatccgatatccattaatacaattaactattttattttgttgtgaatgtatttgataccaccaataatatagaactatttattaatattagtgaaacagtagtagcatgaagatcttctcgatattctttactaaaaaaacgtttctgcttttatgtaatatttcattatgattattaggtacctgtaaattatagggaataaataattatcacatgtctacagttgtgcaaataattccataatcggtattcttccactcactatgatacataatttttaaacttatattattcatttattccttttcaattttaagctaaaatcatcaataattcttttttccttttttaaaaaaaaatgtgaaacactttagactatttctaaaaaaattaaaagaaaaaaaaagtatagattgataaactaatgcaccacatgaaaaatattcaaaatttcctaaatcatttgtgtctttcatctttatgttattcttctttggcaaataatttcactatcataaaaggaaatagtattatcccttcaaatcattataattttttttaaaattagttattttttaaaatgtgttacttaatttatttataatttttattttgtaatgattaagaagatgaaccgtattatttatacatttttttagtgtagtttaatagtaatacaatttaccaaaattttaaaggtcttatagattcaaagtcaatcttttttttcatctctcccacaatattgagggggctttccgcgttaattatacctaatcattaattattaataatttttttaaaaaatatatattattttaatgtgattaaatcttaatttgtttaagtttaatttttagttacaaataaatctctaaatttaaattttaacgataataatatctaagttatatttgtagaacttccatagatacttgctagttaagtgtcaagtatgcaatgtcgaccttgaagtgagactaaggacccacactttggccaccatttttttaaaaaaattaatgtatagttagtaataaaataaattgtaatactcataatattaaatatcatttaattattgagagtttaaataccaagaacctcaatgcacgtgtcagtttctaattgattcagactattaaatttttattttttatttaaatatattattaaaaataataataaattggtatttacactctaaattattcaaaaaaagata

SEQ ID NO: 204449 - DNA, 573 bp, Cannabis indica
tcgtactgatttcatgtctcatggtaaaaaattcgactcatatttataatactactttcctgtcactttattattttgggcaactccaatgaggaaacccaaatttagtgttaaatcaacactaaaatgatactattttaacactaattttttttccaataactacaacactaaaaatatataatttattattatattattttattaaattatttcacaccataatatgtatataaatataaaaatttaatcattaatatattattttaatgttaaaaaagataagtataatttggtgtagtctatagtgttacattaaaaatagtgggacactataaactcccacatatatggaatagcatttagtgtttcattagagcaattttgtgtctaaatttttcaatttttaaaattttagtgttctattggaaaagtcctcaaaacaaaaagaaacagatttagttttatcgagaagacacgtctatatcaatttgtttttttaataaacacgtccaatgtgtaaataaaaaataataagatttattgttacgaggaagacacgtcagtgtataa

SEQ ID NO: 204450 - DNA, 1150 bp, Cannabis indica
atagaaaatcaaattttcctaaaagaacaacattccttgaacattaaagtccaagaaaagaaaagaaatgaaaatgatgatgagtgaaaaaggggggccacgtgagcacgtgcgagttgtcacggggcccaatgagtaaatcatgtgcagaacagaccacagtacactcccacgtgaggaccctccaatgttttaattaattgcagactcataacattaatatgggagggggaccacacacacaccacttctttaattaactcttcacaacaattactccaaaacaccatcaattttaaaaaactatcatacatatcaaaacaaacaaaaagttatttttataaatagagcattgttaatagtggttgcccaacaccttttatatataggtagttattttattattggttagcgatattatttgaaaattatttttttaagtttatatatatagaacctgatatttaattgcaccaataacaatatgataccaacataaatattaggcaccaataatttttttttaacaattcttgtatatataggctaaggacaacaaacttgaaaacacaacatgtaagtacagataagattagctcgaaaatatgacacattaaaagtctattaatttaattataataacataaataaatatttatttatcaattaaaatagtggtatactcaaattataataataattgtaattattttttttatataattgtgtaattattattaaaaaaaatataaggtaattaaaatgataaatacatatacattttagtatttagctcattaattataataaaaatataaaaatatgaaacataaatttgagcccacatgagaaaataaattggtctatttaagaaaaatagaccgacccgaataaagcacgacatgaatctgagcacgatacgaaattactagagacctgtaagtcgtgtcgggcctaccctaaaaaattattacacagcacgacatgactcattatttttttttatagcacaacacgagactttatctcatacattttataattaaagcctaaaatatatgagtcaaactaacacacgcaaatatttacagatatgggtgtaccaaatatttttcctatatttatccgtactccacaagaaaaaaatgag

SEQ ID NO: 204451 - DNA, 756 bp, Cannabis indica
catcccatattaatattattttatgcactaattttgttcttattacccctaataaaaattattaaatagaaaaagtttttttaattttaatttacaaatatttttattatttttaaatattgttcttgactattgactaaaataattgaggtcattttttttgctgaaaaaataatgaggtcattgcttgtagtatctgacaatgcgatattgtttccaattatagctaatattccaagtgagaagaagaataaaataaataaaaccatatcctaaactttattattcattagagaaatatcgctattagtttttagtacattttacatgtaaatattgatattagttcaaataaatatcggatattaaataatttaatgtaataatttttaaaaaatatcattgtttttctttttttgattaaaataaaaaaaaaaaaatatcattattaatcaattacaaaataacacatctagaatttacaatgtgccaaattccactaatactgaatagtaatattcaataatatcaatccaataaaagacaaaagagtagcagccgttgaaattgaaatatatttatatatatataaatatatatatatgtatttctacattagataaaactatataaaaatttgaagttgtgattgcaagaggttccagttacataattaatataactaattatactttattggtatatatatcatgattactgaagatactaaatcaattatacatagttttttttttt

SEQ ID NO: 204452 - DNA, 589 bp, Cannabis indica
atatatatatataattcaattctgactacaacaaagctgaatatatattattatgatcaattgatgatcaccctgctgttacaaatccactatgttgcccacatttatattttcatgcaagcattaatattattgttatttggtgctttgaagtatactcaacatcacacctcttataattagttaggaattttcaaatttatatattattaaattaaaatatgtaggaagtataacagggtttgtaacatgtgccttagcatttcgctttcatgcagccctttaattagaaaagtacaagtcatattatatttggtgtgtgtctatatatatttatgaaaatgagccaaagtacattttgaaataatagtaggtttgaaagggaaattaagtggacatatttcaatgaaatgaaaagaaaattacaatgtagctagggttcggtatagcactatatatgctccccaaatagcttgcctaccgacaaatattggagaaattgacaatggtttatttgtgaagtctctaaaaatacatatatagcttcctaagttgttctctattatttttttattagacaaattattgg

SEQ ID NO: 204453 - DNA, 788 bp, Cannabis indica
tttttttttttttttgttatggacaaagaagttgggtttttttttctttttcttttaaaaaaaattaaagttcattaataaaagaatacttaaaacatggtcattacatataatgttcattgcaatagttgttacctccaacataccaattaagttctgctgatacactcaattagccacattatggcccgtaaaattacaaaattaaaaaatacaactcaaaattatttgaattataatttctcttatatcttataattttgctaattaagtgtatgggcagtttttaactaatacttatgttgaggtatcaactatgtaatgttcatgtggcgtaagttttcttttattaataaaagctaatttttcttttaaaaaaaattctttgtccataaaaaaaaaatgattccaatcattcatgtggaaatggattctccaacattggttaagcaagttaaacataatcatgagtatttgtcttcctggaatgatttgacagttagaaataagatttgttatctttgatcacgatgccttttatatcttatgtaccacgaatacaaatattttcgctcataatttcacttgaatgggattaggagtagataatgaatttattttttttttttttttttttttttttttttttttttttagttttttttttttgaagggtaccagataatgaattatgaatattccaagtcaatttacaatcttagtttttaaaaactatttttttttttttttttaaaaaaaaaaagcctcttttgcttgatttctcttgt

SEQ ID NO: 204454 - DNA, 1449 bp, Cannabis indica
atcataagtaaccaaaaggttaccttaaaatgcagggaaattttaaaaaaaggaatttcgggattagttttattccgatattgtattttaaaattagatggtgttcggtttgttgtaatgtaatagtaatggtaatagtaatggtaatgtaatggaataaaaatagtaataggaattgatacaagtttgtagttggaatgaacattgtaatcaaaattattgtgcttggtttggtataagaatgtaattgaataaaatgtgtaaaataaccttattccttttattataaaattataaaatattaaaataaaaatggtatgtaatcatttttattaaattttttatttttttttgtaatgaagtgtaattgtaatgggaattacattagttttggtatgtaatcttcattacaatactcatgtaataagcattacattgtaatgcattaaaaaagttaaaaagaaaaagcaaacaatgtaataaacctattcatcactattaccattacaattgcaattacactaaaccaaacattaccttaaagtattttttaattatgtcatattattgtaatggaaatttattaatttatttttatagtcatcttatattttacttatattttttttaaaaaaatcccatttatttttggttaaagtaacattgaaatcctagtttcatcacttctctctttccgcctccagctagtctctctcttccatattcgcgcggctccatgctcctactgaacggaccagctccagtcgtccaccgccaaaacagatgccatattcggactccccaactccctaaaccttgttaccctactctctctttctctcctcctcgcactccctcgtatgctttggctcatctaattcgtcacaggatttggctgttgttcctactaattttgttgtttactatgaagttgaactcgtctccttcgttaaggtgggtgtcatttgcactctcttcggtgtctataccaatgtttctgcttgccttcacaatgacacttagaagagatttgcttaatgtgtgcaggaaaaggaatcttgggatatgaacacacaggagaagaagaaaaaggaagaaggcaatgccttgttcaaggctggtaaatatgaaagagcctcaaaaacatataagaaggtatattacagttaactagatacatatttttctacaaactcctttaatcatgccctaattataacacctttttcggttaacaggctgtgagtatcgtcgaatatatatgattcttccttcagtgatgaagagaagcaacaagcgaaggtgctgaaaatcacatgtaatcttaacaatgcagcctgtaaactaaaactcaaagattataagcaagcagatctaccacaagactgaggacgagcttgaagaactcgacgttgatcgattcctctcgaagattgaaggttctgtttt

SEQ ID NO: 204455 - DNA, 1943 bp, Cannabis indica
gattaatgtttacatctttaaaatgaaaaaaaaaatagttaagtctaaaaatacgtgacatacgaggtcaacgattgaagtctatcctgacccctaacatcttaaacgcataaaaccacttcaacttccaattccccatattggaaatcgtgtcctctaccccattaatctcagaattggcccatttactaaagcaatagaagccattatcatgaccaacactttttatatcgtaaaaataattaaaatcctcaattgtgggttctcctcgcgtgtattccatatacattgtgtagaatccaaagattaagcgattactattgggtgtaagctggaaaggggaaacatcgtagtgcgtcaagatagcctttataaaaagatgaaaaggaagcatcacaccacaatgaagaatgggaatcgaaaccactacattttgagtagggataatcgcaggattagtgagcagaagatgaggtcgctgcattgacatagattttgaggtagcagtatgaattagatttagtatctaaatttttgttagatcagactttttaactcgcgagacgaggtcctcacagaaaaaaggctcgtctaactcagcattgtccactaaatctgtttcgctgccctcatcgtccgcatcatcttcgacctcgcaatcgggtagtttgatgtccactcccattcaacttccacgtctggggcaattcgcgaataaccgaaactatacactgtagattcactatcttgcatgtcttaggtgattggtttcgctaactcctgtaccatgcgatctatctcaccggtagatagtgagccttctcgggccctaccctcaggaatcttattgtctgatagcgaggtgggtacgacgctatcgcttttatatgggattcatcggcaaaggccccctctctagaatcatatctctggctgtctgataagttgctcatctgaaagatagaagatctttttagcgtggtgcgagtgaaatttgaacaaaaagtgtcctcacccaaataataagattgcaaaccaaagtgcaacaaaaaactaacagtatatctcaagaaatagttgggggtttcctagtatcctaagggcatgggactgtatgaacataagttagaggaaaacaactattatttcaagaactcagatagttttcatatcaatcaaaatgcatatggactgaaacataaattaaacaaatcgattgacaacaaatatagtttatatagtttcaacaattttaatttagtattttttttttgaaatgaatcaaataagtagtgttttacttttccaagcatttgctttatattggtttcaaaaatttcaagttaacttcaataggccatacctagaatacatattttgattatagcaaatagtacataacgtctagtacactaattctaattatagcactaattagaatcaatgaaattggaaggcagagatatgtttttttaattattattattattattttaagaaaaagaagttttcattaaaacaaaaaagcctgtgcccaaaacaatcagatcgatcaaagacccttgaacttgaatattgataattatccataaacactataacacaaaactacaaaaagctcaaaaaataaacttaaaataataagaaagaggtcttctttttgccggctgatgttcaaatctcacatagtgaattgggtgacaattctacaatagtccgctgccaccctacacacattcaaacaatcctaattcaaataagaagatgacatctcatcaactggataatagagtaagatcaatttgttgatagaacacatattatatggctctcctaggaattggaaaggtttatgttaattttgtgtagttgttatctgtattctcgaatgctggtacctcacaatcgcaagtagtctaatattttacataaaaaaaaaaaaa

SEQ ID NO: 204456 - DNA, 1229 bp, Cannabis indica
atatttattttttattagtatatttgaataaacttttaaataaaaatataaatttaataatttggactaattaaagattttatgtggcaactgacttgataaaagttttaaaaatataatttaaatattattactgttaaaatttaaatttaagtatttatttataactgagagtttaatttaaatatttacactgtaaattactcaaaaataaactatgtatatctagatcttagaattcaaaattaggaaccatatacttatataatataatatatttgtgactttttaagctatagtggttaaaattggtgcatgttattcatcactctatttaacaagtaatctatatattaattaattaattaagttaatcaccaacaaagaaagaaacaaatgaggttggtaatcatttcttgtacggatcattatttaatcaactagtaagattatgagattaattaatattaatgtataattattattattactagagaacaccaacaatatattatatatataatattaaccactatacaaaaattacatgaattttctcacacaatatataatttgtatacatttcgtgtatgtttgagtttctttctttcacacatttgaaaatgaaactacaattatataaatatatctatatataaatatttatatatatattttagaaaataataataatagagagctcttctcacaccacaaacaaaaaaagacaaacctaatttgtcaatttatttttctttttttaaaaaaatccacttgtgtatttacaaattaataaatcattgttatttaaatatataaactattttgttgtaagatttatatatataattaatgtgaattagttgaacaagtctgaaaataagagagatttaaggcgtgagaaagagtttcacgtggtagctgagtttaataaaagtcgtacttataatttgtcttatataatataacttctaataattaattactaatttatatatatgtatataaatataaataataaatattaccaaattatttttatatttgaaaaaaatgtgtcatgcaaagctgtatatttgtaggatatatatctgatcactatgtatgacatctttcccaactttttgtaaatacatttctataattaattatatatataaatatatattggtatgttaaatttttcaaatttttgtagaattatagttgtattttttttttcttaaaaa

SEQ ID NO: 204457 - DNA, 794 bp, Cannabis indica
gggaactgaaaaattgacaccaaccaatttagtgaagatataataaagaaaatctccaaaaaatactattaattcctgctataccgaatggcttggatagcttattttattttttgtattacaattttttagaggattgtgcaaatttttaatatatattgttaattattttttttctaagagaaaacgaaaataactattaatagtaataggtagattggataaaatccattatatatacatatagttcaaagagcataataacaataataattatcaactaataaaggaaagaaaactctaacagtaagctgaaaggatccaataaacaccatcatcggtcaagcataagaaatgtttgaaatatatgaggtctccaaactaaatgaatatttgacagagttcttaccaattaatgactatcaactaataagttttcaataaaaattagaatataacaacctcattatttatatcaagacaaataacactactataaccatgttgtgatgcttaaagattgaaatacataataaatgttgaataaagatttggagagaaaccggtaatccttccctattccttgttaattgttcagacactacattttacactttcataaaataaataaataaataatatatgtaattaactgaactatttaagatatatttttgatgctatataaattatttaaacttttaataagatttataccagatatctaaaataagtataaaagtatatattgtcatataaaacaccatataacgcaccattattaatacatctac

SEQ ID NO: 204458 - DNA, 946 bp, Cannabis indica
taactaagagtatatttgattctaatctgtttctaactttcaaggtatggatatggctattctaaacctgataataacaagcagagaattatcataataaattgggtaattgtctagtgattttttaaagcatcagtgatgccatggtctgaagttgaggatgccatgccatgttatactttgaagtacaatgactaggcaaaacccttttctaatctacattaccctctatgtcttttatgaacctgaagtacatattgattcaatatatatttgtccattcttgtactttgttttttttaatttctggattgacagtctcactgggctatctattcttacagtatatcatgtgtatttgtattcacattaatgcatattgtttgcaatgtgatgggtagtctagcatttgcattgaagtttcttttttggtatagagaaaatattatgttttactcatctttgttttggacttcatgccatgcaacactggtacatttgggagtagaaaataataaatttactgaatcattgatttattattattttttgtcacattggattgtgagtttggttcacttgttgacaccaattcttatggacatttggcaactatcaaaattttttggacaaaacatgagcctaagtagaccagattttttagtgtggaatgtgtttattagccaatatcattgtcacagagtgaggaagtggctgtttatatgttattgttttatttcatttgattagtttcaattaaggaatctaaacatgggtgctaacatccaagatatttaacatgaactttgacagagataatttattcactttcagattgctcataaagttggcgatccgaacatccctcgcccatggagtcgtcattcttcaaaaactgatgaaaaacactaaagatgggaataaggtttctgctataaaaaaatct

SEQ ID NO: 204459 - DNA, 1029 bp, Cannabis indica
ttaaaataaattataaataataaaataagctattactaccaaaactatcataatattattggccataaaattatgtagggtgatagaataaggttgagagaatcctagtgatactatcatttactcagcccctaaggttgaggaaatgatctctgttcaaaataaccttttaaacttttacctcaacaactacgaaaatattgatgcttgaacatactgaaccttgagttactcattcaatgaaagtgcagcataattaattccaaaagtaaggaatactgactgaataaagactttgaagtacaagccaccactatgcctgtgttgttgcgtattatagcaccaatacctatagtattcgtatgctaatcaattgatgcatcaacattgagtttaaattgtcccataggaggactaacccaactcgaggtagaactgcacttattcccttgctgaatgttaatatttttccgacttccactaaattcctcatgaagcttatgaattcgtgagacaacaaccgtgggtgaaaattgctcccaaccatgaacaatctgtgtgcgctcactccaaacatatcaagcggcaactaaaactaattcaaattcaacctgagacagcactatagacacaaaaagaatagtttgttgaaaggaagtttccaaagagaaattttttaggaaactaaaataaagcagcttccaaacttttctaaaaccctgacactaaaagacagcatgcccattagactcattgctaaagccacaaataagacaattggagtggggaagaatagatcatttttggagcccttttgaagtcaaaagtatctcatgaaaatctctccaattacaatttaatactttgtttggtaaatgaagcttccaaatttttttccaccagattgaaaattcatccttagaaagagaagtagcagacaaatttaactgaaaagccacataatatccacttttaacagaataagaaccatcttgcgtatagtgccaaatccaagagtcttctttagga

SEQ ID NO: 204460 - DNA, 841 bp, Cannabis indica
ctataaaaaaaagtccatcaaatggaaataaatgtatgttttagtgaaaatataaaagaaaaaaaaaaagaatcacgagtacttagtgtaaaaattcatttttctctatgagtttgaaacaaaaagattatacactaactataccatgaaaagtaaaaatttgcatatctcaaacaaaagttatagttaattttagtaaatttattaattcaattttgtttattacataattcaaattaagttttaggcaattaggaccctcaaaaattgatgacatgcatatattaaattacgtctctcgaattttttagaccgttaaaattttctctgtgcgaactattgtaatagttgtatttaaggactatcttctaattttactaacggactcctaatgtgaatgaaagttaatggaggcacaataggatacatgtcaaaatttaggagcataattggtacatattaaagttcaggagtacaatttaacacataaacaattcgtacgttaatcaaattgaactgaattaaacataaaccttgaatctaacaatcacaatagtttaagaaaaaattttaacaatctaaaatattttggagtatgattttggacatgttaaattaaggaaaaaaaattctaatatttactgcaatttttttaagatctatatactcatataaggcttagtctattaccgtatatagaaataaggaaatagtgcagttatattacaggatgcattttaaatgcacaaaaatatgtaggtcaaatgtaacataattataaaatcaaatatatttttttttattcaaattcgtaaaatatacaaatttaattaatatatat

SEQ ID NO: 204461 - DNA, 620 bp, Cannabis indica
attagcgtgtggtgtttaacaacacatggacccttagcagtgttcttagtgaaagtagtataatttatgtaacaagtagttttcctaaactaatagcaagggccacatgagaacatgctagaccaagcgaaaacagattatagctcgaaaagtaataatgagaaagctagcttatttgtggtgctggacaatatatatgacaaaagatgttcaacttgtaaaataatatatatacagaatgtgaagtgtgaaccaccaacatttaacgtgtttgaacttgtaaccaacacacctaattatgtttatatataaatccgtgaagagatgtgtgtgtctataaatatatataaatatataaatatatatatttgtatgactaaagaaaaagccatgaaaggtagaaagaagaacaaatcaaagaggctttatcaaataatgttaaagaaaagaagagatctgaagcattttcattacagattgtcacgctattcgagtcttttacctttttcttatcttttttttttttctttctctttcgactgttaaagctcacccaatccaaccccaccattgaacaccatacttttaatggcctgccctatatatatatataatcctta

SEQ ID NO: 204462 - DNA, 1171 bp, Cannabis indica
ttgatcaaaacaagagtttctctactcaacatcctcaatcactagctcattaaatatcttagatttgtatcataataggaatacaaatgtacatgtttacaagatacacatggcatactttttgcgaataccaaataatcaaatacttttctcatatatcttcggtgttttcattacttccagctatttaaaaattccataattgtcgattatcataaacagaatttaaggttgaaaaaaatggttattgaatgttgatagtttctaagttctaacatttcttataaacaacaattgagagtcttcaagagttagtttttgtatggagatcagcgtgagcagaatcataccatgtgtaaattgcacacccaaggccaggaaatagattcaaagaacatatatagattctaaacttcaaaatgaatcacacctagacaagagatactcttcacaaataaatttcatcgagttatacaagtccaagggtttgcaattcagataactgatatggaaactttcaagattaatgaaataaaacaaaatttaatctaggaacgagtacttatatgaaaaagaagagtaattgaaataagttattgagtttgataaaattattgacataatgtgtataggaaaatcaagggtcataggtaggtgatacctactttcttttctgcgacaaagattatcatttattcattaccaaagaaatttcatgcttctccaaccgtgaaaagtgaagggaaatttttaaaataaatacatgttctaattatgtacttctttctaaaacatcaaatacaatatgctactttatttttttatgatcaattttacccttcaaatctaaatttattaagcttattatgacttgtatctccactctccggttttccctgctctttagtggatctctccatagtttttttgaagctaaagaggtcttaggcagggagatcctatgtccccattactttttgtattgggtatggagtacttaagtcggattatggttaaggttggaaaaaaaaagactttttgtttcatgacatatgcaaggatatgaagttgaatcatcttagctttgctaacgatgttttactcttttgcaatggtgactacaagagtttatattacatgcttcagggcctgaaaacattcttccagttct

SEQ ID NO: 204463 - DNA, 722 bp, Cannabis indica
aaattaatatttattgttaaattatttagttttcaatatctaatatccatctaattccatacatatatatcatgattaatgccaatgaatattttttaaaaatatatattaattgctatgtaccaaaaatgagataattttcttatatattttatttcacgttttctatttgtttcacattcctttatgcacgcttctccaataatttatatagctgaatttaatgaataatgtttttattttttattttaaaaaaataattaagttgcaaaacgtaagaaataattttatgagattatttcatcgtacattttgtttagttttacgtaataataaaattaattattattttagggtatttctataacgtaccttttaaaaaaaatgtacggatatattttttatttgtttcagtatcaaaaaaatattttaattattagagaccttcacattgataataggtaaaaattaaatatcatatataagatgcatgagctactcttctaattctcaattgattttgagatagaaatccatatacctaatccaaaagatgagctgaaagactcgcttgtgattcgaagatatagtgagccaaaaagactattgcgaaccaaaaagccactaaaaataatttacaataaataaaataacattcaaatagacaatttcacatgtttattgtttttcagtgtgcatgttaaatttttttgaaattttac

SEQ ID NO: 204464 - DNA, 876 bp, Cannabis indica
ccaattttgtctataacttcatacgggcctccccagttttgtcctaagacccccactcttggctcttgagaggcagggaacactcttcttaaaacaagatcacaaattatgaattttctactcttgattttggagttgaaattcctggcaatttttttttaatacatctgaagttgtacttgtgactgttcttgaagctcctcaattaaatccaaagattcttgaagtagagcgtggttctgagttgggtcgtaggtatccctcctatgtgtaggcactatggatttaactaggattacggcttcatatccataagtcatggagtacggagtatggcctgtagaagttcctcaagtagttttgtaggcctaaacaactcttggaagttctttcggccagtgtgctttataagcttgaagcttctattttaaagtggtctttagaattttattgacggcttccacatgtccgttttcttgaggtcctgccacagtagaaaaagctcttgattatcttgtggatgtcacaaaaatcagtgaattgatcattatcaaattttttttagttgtcagacaccattttgcgtgaaagttcgtatctgcacactatattcttaattacaaagtccaaggccttcttggaagttactatatccatgggttcagctttcacccacttattaaagaaatcaatagagacaatggaaaatttgactcctcccttaccggttggaagtgatcccactaagtctattccccatactacgaagggccaaggactattcttgagggttatctctactagtggggaccttagaacttttgaatagtgttggcattgctcacatttgcggacatattcagtacaatccttctt

SEQ ID NO: 204465 - DNA, 901 bp, Cannabis indica
tttcccgttaatttatagaggccagctagtgacccggaaccccttaattaatattatattatttcactactactactgcttaaaaaaaatgtatatattattcactattcatgatataatgaataataattacaattttttcctttttggttttttccaattggtcaacaattatagctagtaaaataagataaagaagacagaaaagaggtgggtattgtgggacctacgtgacacatttttaattaatgtattaactaatctcagttttttcaattaaaaatataaagaggcaatagtgcctattttaaaatcattttttgaatcgtgcctacatatatacaacagcttctctctttctggagttttctagcgaagcatgccatcccttcaactgttcacagattgttctggtcccaatcaaagagattttcgtccacccaaatagttcatgtggtggtttagtattctcttttctcacgtaccgtcatattttcccccatcttttcataaatgtgagtaataattgctttcaggatttttcttcttctctcttcgcacgatcatttaggtgttaatagtttcactggctagcacttaacttttaaaatttaaattttcacaataaaaactctaaaatcgtgttcctttaacaatttcatatttttgtgttaaatatgaaatataccattttgaactgattacgtatgcattcacgtagacacagtatatatattgcacaattttattaattaacgtaaaaaattatttaaaaaaaattaaaataaatttaatttaaaattaaataaattgtaaataaaaaaaataattttcctttcttttctttttctttttctttcttctcctttttctttctcatctgttcatctctctctctctc

SEQ ID NO: 204466 - DNA, 846 bp, Cannabis indica
  modified_base (815)..(815): a, c, t, g, unknown or other
atataagtatatgtattaatatttttgcccctcattaatataattgtttgatgtcacctaaattagttgtcagttgggattgttactttttttggtatgattaccaaaagcctcttttgaagacaacagagattgttgtaggagatcttctaagtaaacccgtggctaatttttcttctcctatttgacacttcctttgatggcttttttcaaggtcaatattaatgcaactttagatgtgaaaggaagtttctttgacatgaacatagttatccgtgatatttatgggattgtctatgcctcagctaattggcacatgattggctattttcaaattgaagttgttgaagctcttgctttttcgtaatgtgagaatccaatgtcatcgttttggtataaaaatgttcaatttgatgctaatttgatgctaattgtctgaatgtggttaataataagattacaataaattatatagtgaaaatgaaaaattatgcgctgaagtagttcaaaaaataaataaatgttatatttatttcaaaattttcgtaaattgtgtttttaatattaggattaaactaaattttatttaataaaaaaagtgtaatgtaaaaaaaatcaacaaaaatattccattttttttttaaaaaaaagaaaactctaaaaaaaattcaaattacaatgaatgcatctaaggactaagcctagaagctaaagaaacattattgtaatacttctcacctgagaagcagggggcaattctctcaattccaattggtcattgcgcaatgtttcgggtaaacttgtttgcggtctgngaaagcgatggtttctactctgttaaaaaat

SEQ ID NO: 204467 - DNA, 788 bp, Cannabis indica
ttaaaaatttttaagttttttttagtttttttttttttagttattattttagtttggtttttaaggttttgtattgttgtttcttaattatattctaattataaaataaattgactacaaaacgataagataggagagaaaagtgtaacagaagaaaaaaaaaaaaaccgaaggtgtaaaattaacaaaccttcattaattatatagtccttttaattttcgatcctcaattaataattaaattaaaaaataaattatagtttatacatttctatgtataaaacacaataatacattagattgaccaaaatacaaattctatgcattatagaaatttaatatattaaataaagttatataaacaaccaaaactaaataaatggagaagaagaagatgcataatcaaatagttgaaatggaaaaaaaattattgacacaattgttgtaatataatcctatttaagattaagaggatgtatttcaaaaataatatgaagaacaataggtgtataattggaagactagtattatactgatgatgatattaacacataagttaattcaaccactgaaagttaaaacagatcacagccccagtctatacttggacgccgccaatcataaaattccaaatttcatataaaagaaaaagaaaaaacaatctcttaatgaaaaagtgttcttaacaataaaaagagaagtggttgcagctgatgataaacccgaaacagcatagcttggcctgctgcgtctcatcgaacgaggctttttagaccagtggaggatat

SEQ ID NO: 204468 - DNA, 780 bp, Cannabis indica
ccaaattaagataacgagcttgtgaaattaaggtaatagtgataattatgaccacaaacttagcaaaagttcactagggtacttatatattacatataattagtattattatttttgttttccttattaaagcctagttacttacatctactgtatgtgttttggaattttttatccagaaactcaataaattcaaagttgattcaatgctagaagccccaatatatgtagaaggctgtatacttgatttgatgagttaggaataaaaaccttagctgtacgtaaaggagatggaatcaagaggatggggtggagttgaccccattatgccaatccaaaatatatatatgtgtatatatatacatgtatattatataagttttcttatatatgtatatgtatatatatacatgtatattatatgagttttcttacattaatagaattgtttttgattgtgttataaaatcaaccctaaaaaggagcaaaactacctgaatcaaattaaatcattacctaaaatcactaagaatcaaaatagaagtaggatgaaactcaagatttgaaatgtataaatgagattttgagattttatacaaacaaaattagggaacaagtgaaaaagacaagaagaagacgaatcaaaatacctgaaaaatgttgagaggataggaaatttgaggccgaggtagaattagtctcgtggagaaagaggaagtcagagctacattcttatcgtgctgaaatagatatgatcttatgagagagcctgagaacatt

SEQ ID NO: 204469 - DNA, 775 bp, Cannabis indica
ataaaaaagtattatcgttttttcaaaagaaaacaaaaaaaaacatataattctaaataatttctgtttggagtgtgggcttttaaatagtctctagtttaagcccagtcataaattaggtaatgcatgaataataggcccagcccacccacaaaacattcaccattttccttctctctcttcgattagatcagatcgccattgaccttcttgtgctctctggtcaatgccatctagctaggaccattttggtgaattcttttagaatttagagtaacactatggcaacacaggtctctttagaattttgttttgttcataattttttttggtatttgggttatgcatgagcatttaaaaatacacacacatttatatattatactttgtatttatatatggactaattgaatgaaatttatagtgactaactgttgatattttgtgcagtgatttcaactaaagaacatgacacaaaattgttgctaataagagcttgggtctcctgaagagtgaagattaatgaattagttttagaaaatacttattgtagtatcttaattctcacaaataattttttctcttatattattattatggttgtaaacttgtaagagtactcttttattaactttattttttttttttgtagaaattttattaactttattaatttatataaaaatatattttcgtgttggtatcaatatattattttctttaaataataagaaaagtaatattgtaatcatgtgaaactaaaagaataatgata

SEQ ID NO: 204470 - DNA, 512 bp, Cannabis indica
tatagagataaatatgtaatatataggtaggttacgtcccttttcaagtacgtgtactcaactcatctatagattgaaagaaatggaacgatagattggtcactgttaatatccaaattgtgagagtatagtggtgaaccactatattattatttgtgttgccatggtccaacattgtcccaccaatccatctaattaaccccaataatccaaattggtacgggtccgtgctagctctacctccatccatctcttaaccactttttctttaacttatatattattattattattgttattgcaatcacattcacaattatgtgcctgacacagacgatttcttttcatgtgttctaaaattaatgaaaaagaaaaaaaaaatccactacaatacatgatgaatatcccaccttaccaaaatttccccaatcgaaaggtacttgtgaaaaaaaaaaaataaaaattagtggtaccggccgttgtttttgctaatattaaggataatatgtata

SEQ ID NO: 204471 - DNA, 700 bp, Cannabis indica
tttttttttaaccgatataagttgaaataacaaaaagtattgaagattcaattttctttaatttataactgagacacctcaaattacacacttcttaaattttatgattccgtaatttcaatcacttaatgatatcatacttaacaatatataatgaataatataatttttttttaaccgatataaattaaaataacgaaaagtatgaagatttatttttttttcatttataaaagttcattgtctatcctaagggcatgcagagataccttaggagaactaggcaataaaatcttaatataaaaaaaaaaaaccctaaaactcagagttgtaacttccgatacaccaatagaacacccacaaaataaatatcaaatatgtaataaaatataaaattttatatatatactgtcactcatatttttctgatgtaaagactaggacttatctgttatcctctccattactgaaggtggctacaatacatttgatgtattttcattaaatcatactgaccttacaaaattaaaactagacatatatactagctttacaaaaataaaactagttttacaggcctcacaaaaccaaaaactaattatactgacattacaaaactaaaaactaatcatactggtcttacaaaactaaaactaactatactggccttacaaaaataaaactagttatactagcctta

SEQ ID NO: 204472 - DNA, 1028 bp, Cannabis indica
acatgtacgtacgaaacaacttagtcttcccttataattttcaacaacctctccactcctatacaatacattatataatacatatatttatatatgtatcactacaacaactcaactccatgcagtagtaccatatatatatcatatcatctcgatcttaatattatctcactcttctctcataacaataatatataacaaagaaccaacttcaaagttcaaagcaatcctcaaattttcatttcatatctatctcccaaaaaaaatgttgacaaaattatcactaattaattatattgttaataataataataaccaaaactgttactactaatactaattatctagagttttacatgcacgacattgtgggtcccacagcgagaccagtcactggcttattaggcagcatctacagccgccacgtggcattcactaagccaatctcccatcccccagaccgtggtggtggggtcctcctcatccccaacccaaacgacgccgttccaatcgtaatgggttctgatggattgagccttgggttcgggacaattaccgtgttcgacgatttggtgacgagtgggcccgagttagggtcccaaacgttgggaagagctcgaggggtctacgtggcaagctctggagacgggagtagtttgatgatgacgtgtacggtggtgatggaaggaggtgagtatggagatagtattaacttgtttggagtttattatagggaaagtagtagtgccacgtcatcatcacggttggctgtggttggtgggaccgggaagtacaataaggcgagtgggtttgcggaggtccggttagttgttcgtagtggtccacgtggtgtttatggtgggtgacgttgcttaggattattgttcatctaacctaattcactaatcttaatggaaatttatgcagtaaaccttgaggatattctaggatcatttttacattattgtttcttaattatctgtttttgatattgatgtagagttttttttagttttaattttttttta

SEQ ID NO: 204473 - DNA, 547 bp, Cannabis indica
catttttgctcacatacccggacccaaaatccgaatccggaccccgactggtacctcgatcccggaccccaacctggatccgaacctcaggcttggactcagacccaaacccgaacctggactcagaccccaaacccgatcaaagaccaagactcagacccgaacttggaccaagacccagactcgaacgacggaccaagacccaaacctcagacccgaaccttgaccctgacccaaacctagacccgaacctagacttgaacccaaaccctgaccccgaacttggaccctgacctcggaccccatcccatggaccccaaactctagacccgtaccccgacccagactcgggacccaaacctggactcaggacccaaacccagactagtactgcagaccccaaccccagactaggacctcaaactcggacccggcccaagacctcagacctagccccgagtcgagggtttaggtcaggttcaggctcaagtctaaggttagggcctggggtctgggtttgatttgaggttcgagttcgggtctaggg

SEQ ID NO: 204474 - DNA, 1655 bp, Cannabis indica
cgctatgcattgtctatgtctctttcgggattataccttctgatgcaaaatggtttctcgtcaatacgtgaattaatagtttgtacatttttatctcgcttaagactatgtagtcaacaagttataagtatactctattaattttgtatttaatgagttattctattttgtatttaatgatataatttccattatatttgttgattcatattctctaagactgacacgtgtcaccttctcaagtacatccaaatttcaagtataacaaaataattaaatatttcacagaataacctatttttgaatttaaaaatattatggttagaatatttataaaaatatctaggttaagggaaaccattcttcatttaataagctcctataaatagtggcataatctcactattgaggaagaaggaaaattaatccagaaaaatactcaagagagaaaagcgatccaagagagagagaataactcagagatagaatgtaagagctttagagtcgaagaacacttcattctttttctcaagtcaatacaacaacaaggctattactattcttatggggacaaacctctataaaatctggtattctttttacctaactgtttttactttacactatttattttatctaatcgctttatcttgactcaatatcgttgactagaagcgagatcaacacttaatattaacttttataattaaaaaaatataaaagataaaaatatccctactaattatttctaaatcttcacttataaatgtttttgattacttttagtctaatttagtatttttttttatctatgattttttagtaaataatttgatttggtgattttgtagttttatttacatttataaatttctttccatattggtcaataatttttctaggtaatggttaatttttaattagttatattgaataattaccttaattattattacatcgagtggggtatggtgacaacatcgaatatagaaataacataacaagggatgactgatgtgatgagtaagaataatcacaataagagatgagtcatgtataaaagaatagagactaattaatttttttttttaattatgagtacttttgacttttcatttattgatttgacattgttaacgcaagtttttgttaatcaataataagtcttaacgtacttcatataacacagaaatattaagaaataaataaagtataattaacaccagatatttttacatggttttgtaaataaatctccatactctatgagtctatcatattaaatatatttttgaataccagatacaacatacaattgattatatctatgttatccctagaattctccgtccttttttctatgggatctgcccctatttataagaatataagttggcagttatttacatttaaatttgaattataaccgtttaatgaaacgtggaattgatcagatttcatttaaatgtatgttagataatattagataaccgcttaattgcatgttattcttatcattaaagatggtcaatgctgatttacacaatagcatctcgcttaactggttgatgattaatgttgatttggacaatcatatctttccaagttgttatccttagcaattataatgtagaaaatacgctaagtgttaacaa

SEQ ID NO: 204475 - DNA, 838 bp, Cannabis indica
aataggtaaaaagataagtttttaaagtttttttttttttgggaattttgcttaaaagaattgctaataggtattaggtaatgatggtgtttaagactatttgatatgtcaaatggtcattaatataatttaatttaatagttgataaaatatttacttactacttgtcaaatatcattttatattttatggtagtattgagcactattacttaataataatatattttttgagaagacaattaagaaattatttctaactaatgaccatgatagttattgataaaaatagttgtaactcacaaaattataaatgaatggatatagaaatataaaactactttttaatgtgttgtttttttggttttagtctcataatataagattcattttttttttttttttgtattgacttagttttaactagttagtatactttcattgtcacaatcagtattttgtttttttttttgttttttctttcttcttatttcttaaaaccttattctaaacaaagtcactctgaagtcattccaattgtcaagttgaaattcctacttctttcaatgagatttcatttcaattgcacaactcatgtatttaatgttattagatttttttttaatttttttttaaaaaaaattaaattgcagagaacaccacccgatgagcaaaaagccaagagcaaaaatatatattaaaaatggtatcgccaaaataaaagttttgtataaaaaaagaatattcaggccatcaaactgttttataatttcggtatataataagttacaactatatttttcttctttctactatattataatttttttgttattaga

SEQ ID NO: 204476 - DNA, 1579 bp, Cannabis indica
cccctttctctgaacgagcaccagaagacaaagaatagcatgtacatattcatatggatatattatttgaaaaaaaaaaaaacaaagaatctgaaataatatggcttacatgagcaccatgaacaacatttaagactccatcaggcaaaccagcctctgttgctagtgatgctagcatcaatgaagcccctggggaaaaaataacaagagaaaaagtgtcaatagaagtgcatgttaacaccatgcacataacagatatactctaaccatatacacaaggctttcaagccacacgcagttcactaaaatgtcctacatagaactttcattcaagagcgaaaaaacaagtaaggcaagagtaaagaatagcattaaatgggattacctggattattttcacaaggcttaaggacaaaagtattcccacatgtaactgcaatagggaacatctgcaaaatcatggaaaagagaacatcttagttgaaaaaatttatttcactttccttctctttaccctccacattatgcagctgaggccactaaagccccaacaggcaacagccaatcatagtcctagatctcttctgttgaaaggagcaacaggaagaaagttgacctcacaatgggacctcatgaatggggatgaggtctaatttggaacccatgcccgtcaaatgtttcccctctaatccaactctacaatatcatggtagagctaactttcacaaataaaaggaaaaccctagaagaaaagaacaaattaagctaagtttcacaaaataaaaggaaaaccctaggaggaaagaaaacaaaaatgtaaatcaaagtaataaaaatttccaacacctaccttaaaatagctacaaaagctttcaagggaccatttataacaatcatgtcaattaaatctaaagttggttcaaagaaaattctaaaagttttgactaccctaattaatgagtataggaaacacatatatgaagggaataacacacatatgaagggaaaaacacatatgaaaggaaatcttagaacaaacaaaagcaggaacgatgaagcatgacaaatgatgaagaatgaaaaagtaacaaaacagtcagacacacccataaaggagtcattgctggaaagttgaaggggcatattccagcacaaacaccaagaggttccctaatgcagtatgtgtcaattccattggatgagttaggaacaaactcccccatttgtagatttcccatcccacaagcatgttcaaccacctctacagccaaaaaaaaaagcaatcagccaatcttttcagcaaagaaccataatgctgtcagacatagcaacaagataattacgcaaatactaacctagaccgcgaagcacatcaccatgagcatcctttgatgttttaccctgttccattgtaatattcacggagagcttatcctgaaaagcatggtattattagacaactttaatatttataaactcactaaatcatttttaaatttacaatttactaacaatatctctggagatgagctcctgaagcttgaacatgatacgttgacgagtggtaataggcgtgttt

SEQ ID NO: 204477 - DNA, 1162 bp, Cannabis indica
gagtagaataaagaaagaaaaaaccgagactttcccataaaatttacacattgagggcttccatttccaaatcacatggctaatcagaattgtagtagaactaatactactacgtactaatactacaacaacaacaacatcatcaaaaaattctaagttcatcaaatgtgtgacagttggtgatggtgctgttggctaagacttgtcttctaatctcttacacttagcaacactttcccaactgtacaaacttttcttcttcttcttcttcttctttctctatctataattatgtatggttttcatttatttgagatgggattttaatatatttcttgacaggattatgttccaactgtttttgacaatttcagcgccaatatttcagttgatggaaagacagtgcatctgggtttgtgggatactgctggtaattataatcatgaaaattctcttttctttaatattattacttcttttccagatttttggtattttattgttacttaaaatttagtttctcattttcaacttttctctcatcatatataagataaatcaattaaacaaatgtatttgatttctagtttcttatgtttttcatcaacatattagtactggttttgtttattttcagttcattattgataggtgaaaaaaattcaccctttggaatcttacaactaaaagtacaaatgccttttaattattagatcataaaaattaaccaagtttataagagagatgcatggccaatttaggaacaatgaatttccatttattgataaaattggtttttatatatatatattattttcatcttctcaatattagtctgttttaatcattttctcaatatccaaattcactaaagcattttctcaacaaaaagtagttgtgactaatataagaaaataaattttggatatatttgaattaataaatatttagtgcatagaatccttaaagaggagttgtcatgttgtcatcatgaaacttggtataaaatattactatatgcaaaaaacaatctaaataataatatggtcccacttcgaaagaaaaaacaacattttatatatacatatttgaaaatatataattcatgtgacaacctagaaagaaattttccattaaattttttctttttacttaaaaaaaa

SEQ ID NO: 204478 - DNA, 1039 bp, Cannabis indica
aactatagagatcttgatcttggagttaatactaacaactgttcaagtttcatagaagcaatttcttggggaacaaggtatttcaagtgtaataatttctacagattggtgagggtgaagactgatgttgaccctgaaaatttcttcaggcacgaacagagtattcctcctctttttccacccacgcctgaagatgaatattcgagtaataatatatcagaaggtacttgtgaaaacatgtaagtgaatggtcatcattgttagtttaatcaattaagttatatgtttgcattgattggtgtggagatgatatgttatcgtttgtatgtatgatgttcatttgtaaaattgagaatgttttgaaagtgatgtactgcttttgggtggttttattatatcagtgaacaaaattcattgttttatctactgaattttaacttgtaatttaaaagttcatttgtttggactcattattgtataattataagataattgcacttaaattatcttaatattttacaattattatacatataatcttaacaaaaaatatagcagcagaaagccctactgttaaaattttagttggagtaacctttttttctttgtatattaagtgccaactagatcttttagatgccaactaagacacatgtgaccacatattattgggccacatgttaaataattaattatttatttaattttttttaaaaataatctatttaattaattaaaaaatagaaaaactattaaatgtatatatatatatttttttaaaaaaaacttagtttacaaaaataattaattcattcaacaatatttgtgaactgatttattaaattgtcatatattgttttaaggaaaaagaaagacaaaaatccttcattaataaataatatatcagttcaaaataatatatatcataatttaataaaaaaaaattcctaaaataatatattataatataataaaccagttcacaaaactgtttaatgaattatttattttggtgaccttaacttattaaaaatgatac

SEQ ID NO: 204479 - DNA, 1024 bp, Cannabis indica
tcaagggtcgttggggtgagtctgatcagatttggaatcggatttggaagctccagattactgagcgactgaaaatgttcctttggaaactttgcagagatataattccttttggaaatcgcctccaaaggatttttggtaatgatactagatgtgtaatttgtggtgacgcggatgactcggctcaacatctgttttttaagtgtcctcttgctaaggctgtgtggtttgccagtcgttgggctcttagaagtgattcactttgttttgactctcctcgaaacatggtggagtggttattatcccctgattttttacagggcgctgatgaagatgatttgggtgagtttgtttgatttggtacctgcttgtttgatgcgctgtggactgctcgcaacaatgcctttcatgaccatattagtcctacttggcgaggcattttagctaaggtgatcaatgttgctgccaaccttcaagccgcttgggaatctccaagaattgctgatgtattgcagcaaaatcagactgagatttacacaggtaatctggtgttgttggtggatgcagcgttcaaagatatgcacgttgcagctgggattgtggcgtcggtttcggagggaatggtgctggaggctttggctgtgaattttgaatcaaatcatccactggaggctgagtcgtgggcgttgattatgctgtgaagtggtgcaatctccggggatggaggcaggttgttattgcctcggattgccaactactggtgcatggtttacacgcacagagggcacctgattggcggctggctgattctttctgggcgttggtggagttgctcgatgatctccctgaggtgcagatcgtgtggactccccgtgcaggtgttcaggttgctcacaacctcgctcagtgggcgtttggtaactccttttctggttttttaaatgctaaggacttggtccctattgtggccatgtgatttgctgaactgttgtgttttttctctggttttctggtttttaataga

SEQ ID NO: 204480 - DNA, 877 bp, Cannabis indica
gcaagcaagctatgcacaagggagagctgaataattatgttgatggttcactcccatgaggtttcaggttcaatatcttgtggggaacacctattattttggtgttttatgttttgcaaagatttcttggttaattaagaggtaaggacttttctcaaaaaaaaaataaaaaaaaaaaaaaaaaaaaagggaaaaattaagaggtaaggatagagaaaagagttgcagccaatttcatctagagagctgcaacagtagcatcatttttgaaatcaccatgacttcgatatttttctagctctttaattaaagcttgattacaaactttggatggtggaaaagagagaaaaagtactggttccctgaattgtttcattgaacatgatttcatttacatgttgaactgttaaaagcttgatagttgaaggatatgtagattggtttctcatagttttatagtacaaatgcgaaacttatttatttcgtcaattgaaatttgaaataggtgaattcataagagtttgttttgattttgatttttttaataacatgttggacttttaagttaaataagaattattttagaaattagaccaataaaaatataagaacatagattcgttaagttttagtttgaatggatagcaatgtgttttcaattttctgtttttgtttctttctttaatatatatatatttatataataggctaattaggatttttgtccttttgacatgtaccaaataatttgatacgtgtcaaaatttgaggaaaaatcttaattagcctatataatacatattaatatattcacttttatttcctttaatatatgtatattatataatatatacatgtttctttatttatatatata

SEQ ID NO: 204481 - DNA, 560 bp, Cannabis indica
tagcaaatctaggagacaaagaaagtaccatggagcattcatctcgatttaccactggatgttaaggcgatttctccaccattttcaattttttgccaataactgatcttggcttctggtcttaaactctgattacttttctaatcaattaactaataggaatagggcaagggacaacttttactctgtcctcacccactagtcttttcactttatccaaccttgacttcagacttgccggaggagtacttttcattggaatctttggcctatcatcttccttaaataaatcaagttggttttaagtattaaaacagatgtagaccgtcgtctctgctttcatccatggaccataagcaggaattgcttttcctttaagtggataagcataagaagtagctctaacacaattttttatcatgaccaatgtaaccacagttccaacataactttcggagtttgtagtaacaaaactgtatccattctttctccctcatttaatatccagatagaacccaatgtaatcggtgatatgtcacaagttctacttgaaatttcag

SEQ ID NO: 204482 - DNA, 618 bp, Cannabis indica
acagggttcattttgtcatttaacaaaacacagggtccaattgataacttttgcaaaacacaggatccaaaatggtatttactctttttttaaaatgaaaaataacaaatgagttgtgatgtatcgtatgtatatatcatttggaagaaagaaaaacgatcacgtagtcgagtctgtaccatctgcaatctcatcaacaaattaactatttgatacataggtgcaattatctgtcgtacgtatattattaaattatgtgtatagtatagtacgtcttcttatttatttttaaaggaaactataattaaccttatttaaaaccgctagaagtgagaaattatcaacacaactactgatccatagacatcttttattgacattctcctacgacttttgcaaaactttcgaggttgccggcgtatatatatttagttgaatagttgactgtacgtgtgtataaaatcgagttattattattaactagagagtgatctagtttgtgtaactgtaaaaacacataaataattttgttgtatgttataattttttaccctttgaccttctgctgtgactgtgatgacagctacatataccttaattagcctagacattttttct

SEQ ID NO: 204483 - DNA, 790 bp, Cannabis indica
gctagaagtgagaaatatcaacacaactactgatccatagacatctttattgacattctcctacgacttttgcaaaactttcgaggttgccggcgtatatatatttagttgaatagttgactgtacgtgtgtataaaatcgagttattattattaactagagagtgatctagtttgtgtaactgtaaaaacacataaataattttgttgtatgttataattttttaccctttgaccttctgctgtgactgtgatgacagctacatataccttaattagcctagacatttttcttctcataatttttgaaggacaaagtgaaataaatttcaactgcattgcatgtggcatgtatctgccatctttttcatgtattaattccacagatgatcagtactgcatgtataaatatatataggccatatatttatatgtgttatgtatataaatttatagagagtgtggtcaatattaacgaacgttgtagtacggaactctttagcaaattcaatattgtagtgactctaaagagagatgtatttaatgtcaacatctacttcaagcagtttcagttggggaaagatgagaattatcataatgaataccacacattatctttaaataataaaattaattaatatacacaatatataacatatgtatggctgttatataataagtatagttgagttgactaaatgcaagctatattgattattataaacattgttaatgaaaacaaaatattggtgtatgtatggaagttggaaaatataatgtatgtatatata

SEQ ID NO: 204484 - DNA, 1085 bp, Cannabis indica
ccggtactgagtaaaaatattgtggtgttctaacttcgtccatatatatatataaatagtatgaaaaatatataaaagcatgattatataatactttattattattttaatttagtaattatacttttttgactaattttatatagaattaatacttatataaataaatgttttttaatgtcatcatcattattttttttttatttcttaaaatttattagggtaggatttactcgtaggtaccctactcgtaaaaaataatagggtaatgagatagggtatgagaagaattttttttaaaggtaaggtcatgaaataaatataccctaccaatatcttgcccattatcatccttagacatatataagacctaaattttgaataattgtatctcgataaaaatatgtaatatcagttatttatatatttttctttaataaattatctctcacgaaattaaaagaaaaatagaattttacgaatattaagtactaataatactaaaaaaaattataagatttatattagtaataagctcaaaattttagatatttatgtcacaatcaaccctactgactaagggttgtttactggaatgagaattataataatattattgtgtttaattcattgggagacctaattgaaaagcttaattgacctaattatcctgttaattaagtgtgaagtgaactcattaattagaaactgctcccaagaattaaaaaaagaaaaaaaaataggaaaaggagccaactcattaatacaacttaatctgaataaagcttaatcaaaaaatctgattaaaattttaaacttaatatcttctttgctacacgactcctgaaggctcggtattttcctactggctcttttcttacagcggagattggttctaatccgagtttcgtctggcgtagtatttttgaagctcgagatttggtagcggcaggggtgcgtaagagtgttggtgcgggtctctcggttagcattttgtcagatccttgccttgctgagatggatcatcattttattgagtctacacacccggggttaattggaaaaacagtttctagccttatgag

SEQ ID NO: 204485 - DNA, 873 bp, Cannabis indica
tttttttttttgagagaaattaataattaaaatgttgaaacgttcattttcacgtgagattcgagaagacttttctttttttttgttagaagtgagaagggttggtgcagcgtgtaagtacctatatcaatgattttgtcaagtgttaggttgaatttgtggtagatcttacaatcaaaaggaattgtggtaggctggtagcgatcgatcaaaaaataaatgaaagggaaggtacatttgtttgttttacttttgtctttatatatttatgtttatttattagtttatattttctttattagattttctatttttttttttaaaaaaatattggtaaagacttaattaataatagtaatctatatctatattttacatatagacaaaaatacaaaataaattttggtgacattttgtgtattctccatagtatataaattagtcaaacagactgcgctttacatacggctagttataaaaattttaaattatatgtatgaatatttattgaataataaaatcgtattaaaataatttcgaatttatttttatatataattttaaaatatatatttattaaaaaaaattatatatagagaactctaaaaaatatttttttttaaaataaaattcatcatacaatttctcatatacaaaataaaatacataaaaaatatcttcaaatatatattatgatacaaaaaaattaaaaattgaataatactcacacaaaatataaatctaaaacagaaagaagaccataaatttattgaaaactcattatataattttaaaataactgtcattaccgtatcacttatactcactactacatttaatgatattatcaccgtactgttgggttttatgccc

SEQ ID NO: 204486 - DNA, 699 bp, Cannabis indica
ggtcgagagaaaagtctggaagtccaatcctacaccaatcctaaattattgtgtcacacatgtgtaggcttataatttgtataaatttctaattatataggttttatgacaaggtagatttttttttttgataaattaagtttttgagttttagttttttaacaactttaagttttcactcttagataatagtagttttgttgacttttattttatattttatcttccttcattaattttaatattaatttcaacattgctttattttatatatttcattttttagtcaaatatttaaaatatattttatatattttttcaaatatgaaaaaacaaaatgatcttgagttaaaaaaaaatcttaaaatataattacttaggtaagtaatatatatacttaaaagaaatattttgattatatttatttatttttaatattttttgttaaaatatataattggttattattcaattttttttgtttgacatattctaaaaacatataaaaaaaaaagaaattatctatatattatttttgaactttttttttaaaagaaatttatgatttgggtttctctgatagtttctctagtggtttctatgttgggtgctatacggattttaattgcgatttaaattgttccattagttgctatatgaatttctaagtagaatgtcgtaaaaataacaaaaaaaaaa

SEQ ID NO: 204487 - DNA, 1205 bp, Cannabis indica
aatccaaaccccttctttctataaagattatatatatatttatagtagacccacatggatcttcaacatatcatcatcatcatgatgtataatcacatatatatattttataaaaattaattaattttttgttatcggtttttaaatttatgatgaagtggttatcaatgtaatttttttttttacgtcaataaataattgaagcaaaagttctacttttattttttgtgagtagtgatatgatcctctccaaaaacaaaaacaaaaaaataaataaaaaaacaatttgtcatgtatgtatattattcatctatatttataaaaagagttatgatttaattttaagatatactaatacatacaaacgattagggttaattatgtaatttgttttgttcttagaatttctatcactattagtctttataataaatattttgtaaatattgtaaaagagatcatttaatttaaaggatatatattttttggttaaaattaggaaaaataaaataaaattgtgggttgcatgtggggttcagagtgagagacttttaggtttattattatgactgagaataatggatatgaattcattaaaagtcaaggttttatttaattcttcttgtttattatgtatgtgtttgtttttttttttggtggtgggaaaaatgggttggtagggttggaaatcataaaaaaagaaaaagtatatatttcttaaagagaaaggttaaaaggtagtgccttgtcatatcgttatcaatgtaattaaatatcgaatctcgtataatttagtgtaataattttaatttagagaatatggctaattaattatacaatgtcactctaaaaaaatattagacacaactgatacccaatagcaatattctttctagtatctatatatagcacttttacatgagatttgctaaaaggtactattgatatttagtaattttttcagtgccatatcaatattagtataattaagtattggataggacgtcacttatagaaagtactaggctaaatgctcaataacaatactcattttacatatatagtctgagcatttttaattgtttctatagataaatgttatttttactctgataaaatttatttatatgatgatgtttattatagataggttaattaggctttttttaactatgctttttgaattttttagaagattaacaacc

SEQ ID NO: 204488 - DNA, 824 bp, Cannabis indica
atatatatatatatttgaattattgtttaatatattttgctcaatatagttagacatggacgtgttgtataatgtaatgtagagagtattatcgacacagagagtttggggcggagatcaggagtaaatttttatattttcttctataaacggtgggaaaaagattgttcagcattaattatgcaaaacatttatatatatatatatattctgatatttaatgctgattggtatcctagaaaaggacaactttccttaatatggaataaaataaagaaagaaagtataatttaataaaactgcttcacattattctaaagttcttctatgtggtctaccttattatgtcgatcatcatcgttattcatttaataaaaaacatatatttatattattattatataggacatggtctacgtgatttatattaatataaatatatatatattattagttgcacggcagtctttcatgacctgttcatgggctccatcttgttttgaccttcatgcagacactttctatttcgaggttttcatcaccttatctagccctttagatcactgactgtcactcaaattttacgggaaaaaaaaacaaataaagataaggtggaaaaaaaaaaaatacatgtctgtcatataggtttccaatttagggttccaagtagtgactagttcagcaacaatagtagatggtgctacacaccactgtcataatttttataatatttattagttttttttatggataatagttattaaattaaaattaaagttattaatgtatattttgtacagccggcggaagattggatatttaat

SEQ ID NO: 204489 - DNA, 848 bp, Cannabis indica
gtgtttatcattttctcgtttaatgatattgttttctgttttcatcactaagttttttctattatcttttcaattatcacaactatagtttttcttttatactctactattaatcattttattatctaacgatcattataaagataatcaaactaacctttgtttttgttcttgatacttttcagagttcaatgcttcaacctgagaaaaattgttcaacagaagaggattagttgctggttttaataaatttttttttttttttttttttttggtgggggggctgttatcatatttttactaatctaagtaactaaataaataaatcaattttacacctttggttcattttaagttcaaatcagatacttacgttgacgattatttctgattacaatgaagggtgtcttatgctattgtaaaggttgcatctgtattgtaagaacttacctcgtttaaagttcgttgggtaaataagcttatgttagtgtgaatgagtgcatctgtattgtaaaagggttgcctcaaaccgtagagtgtgcaaagtttatttatttatttggtaagtaaaattatttgtttaagttaactatttttttctgtgaaaacataggaatctgtttgtcacaacaatttatggttagcatttaatagttaacactaaaaaaaaaaattgtttaatagcaaattctgccgacaccatgtgaatccaaaacacgtcaaactaggaagtagaagacaattgagttttatattttgataaagacttcaagagatccaccaagccaactcacaccactaagagagctgagtcgagtgagtatgggggatcaacacattgatcatcg

SEQ ID NO: 204490 - DNA, 1191 bp, Cannabis indica
gcttattataagtaatgatatgggaaaagaaccgaagtaataatgaactataattaatgaaaaatatcctatatatagactgcagtttgatatttatgtgtagtttttttagtcttagttttttttttataattaagtatgttatagttgtatagaattattagtaaatttacttaagttttttttgaataatttacaacatctaaaataatatttaaatattttattacactaataataaataattattttcaacattataaattaattaaaaaaaaattattttgatcctttaattaaacaagcgttttttttattatatattaataaaacaagtttgcatttataaaaagtagtaggaattaggaatgcaacattgactatttttattttggtcctttctttcctaaacaatgtacaaagctaaaaaagattgcttaatgagctgtgctccctaattggtatgctttgtaatgataaatttatatacaatttttctttaacaatatatacatttaaaacacattgtccaaagtttacaccccaacatacatatatttatttatttaatattctatagtcctttttttcttcttcttttaattattaatgttaatttatgataaatatatatatatatataaaaattaataataaataaatgaactacttttgtgaaaggcccaccatccactgtcaaattgcatctctttaggtctcaactttctaaaacaaggttttgtgctatttgtcttctatatagtagacaacatataggtgaaaaagaaaagaatgcaatgagaagtgagatatatcttataataaatattaattattattattaatttagcataatttgcttttgcttctaattgactctacctttagactaaacccaacattactactttttatgataaagcttacccaaaaggactaggacacctaatatcaaataattataattattataatttaattactgtttttcttgacttgatgatctctatcaaatcccattattaataaattaaattaaattaaatccccctttccctccctatatactattgttttactcactcttttgttttagtgacattatttttttgaaatagtaaatattaatttagataaatataattagttaaaataatttatacattattgtgtataatatttggagtaaaa

SEQ ID NO: 204491 - DNA, 1128 bp, Cannabis indica
ttacgtggctcgccacgtaactcccatctagtatatatatatgcatttatcaggcaaaaattagttccctaaacataagctattcaatattagtagaatatataatattttcctgaaatcccattctacccctcccatttgaaaaatcaactctttctctcttcctctcgtctctctctttctctcgaacccatctaagcacgaagacccactcgaccgcacccaccatttgagcacgaagacccactcaatccaccactgtcgtgtccctcgctctcagaccacgaagacgaccacaaaacttgacccaccaccacgcaatgtcagccaaggtaagattccgtcctgatggtattttttaatatttttattattaatttagggttaaaatattatttattgatagaattagggtttgatttatgagttttgagttagatttagggttaaatttgttatttgtgagttttgggcgagaaattgggattttagtcaggcctgatgcatcctgatgtaaaagatggattaggttgaagatgaaggttcgatgtagggccagatggtctgtctgattgtctctttaaaatttaattttgtgtgtttggtctaataggttcgatatagtgcccgatagatggtccaatttagtgttttgtccaatagttccaacatagggcccattatagtgtttgattgtctatcaaattgttcaagtttagtgttttgtccaataggaccaatgtagggtctaataacatgtcccaatatagggtaggatattgcgaaaatttatatttgtaggcctgataggattgatgtaggtcccgatagtggtccgatgtctttgcacaaaatttctaactttctttatttttttttttttttttttgtctagttttcaaaaactccacgccttttacttctagtgtttgaccataacaccgagtgtgtcactaagcgggaaaaatttggtattacccgaagataaaatcaaaatttgagaatatgaattgttggaaagtgtgaaggatcccttcaagcaattctttgagagagggccattacagtttttgggtgcacttatccatcagttgttcatgcacaagatcaagtcggataaggcagacg

SEQ ID NO: 204492 - DNA, 831 bp, Cannabis indica
acgtatgtggtcggacataactatagatatatatatatatatatatatagatataaaacgcaccttataaaattcatatcgatcatatatattggaatatcgattaacatatcatttagtaattaaaaacactactatatatattatatatagtatatacatacatacttctttgatattcttaaaaacgaaggaaagcgtctaccaataagggaaattaagaagaaaaagcatacatatgcaagttgcattattattataatacattacttccttcgttactagttagtctcctttcatatttttcttctattggttatatatagtccacgtttgggaaaagtaaatgtttcagtactttcttttgccaccaattatttgggtagctcggtaggtatatatgtgtaagcttgtaaagttgattatttatattaattatatgaaacactaaataaagttaaacgtgtcatgagcatgaacgtgcccccactttgcctactaacattttttatgtggcccttatgaaaaaaaaagttatcttcacacaagctctagctagctagctttccactaataaaggttttcgaccaaaaaatttatattatatatgtatatatatttatccctcttacttttatttgcttttctttttagccttttgttatcaaaatggctcttttgtttttgctttctccttctttcttgtcttagtttgtggacaactaaatatggagcaaatttttacaagtatatatttcataattagtttttgttaaagagccatgaaggctcttagatttaggtcattagatattaaagtcattcaaatgt

SEQ ID NO: 204493 - DNA, 574 bp, Cannabis indica
gagaaaatgtggtcgtccctgaaacccaaaacccacaacctctccctcgagtctctctagaaaagaatggcgaagaagaaaaggaaagaaaggaaataaaagaaagaagaaaaaaatacatttttattttatactaattattatttttctaaatcattttataagtatataattttttaaataattttattagatagacaaatattaatgtgccacgtgtatataagtgtatatatggatgatctactgccacaattaacaaaataaattaaatggaaaaattaatttgctagttgagaggaggtttcaccatataaaaataaagattttggggttaattgtactaataggaaaaatttggagtgtaaccgtaatttaattgtttttaaattaatgataaaattattattttttttatatatttttataaacacactaattaaatattatatattgaatcacttttttatttttttttaattttttattttggggatgggaatatttgaatttgggtcctcttattttgagaaaaagtgtgtaactactaagccaataacaagagcccaatact

SEQ ID NO: 204494 - DNA, 614 bp, Cannabis indica
tacaaattaggtgtattaaggttctcaagttcactaagtgttatgacatcttaacaaagcttattataatagggttagccctaaaagataggcaggttagactcatgcttagggctcatatttcttcattaggcttttatttaaataaaaataagtacattataaacaacaaatattcacaatttaattggttggagtgaatgacaccttacataatattatgggttttagtctcataacactcttttttaatattttttttatatattctgaaaatgaaaatcctatgctcttagctcatataattctcatggtcggtcttgcttataattatataaaagcatgaaacttgctagctccactgttgaaatttcaacttctcttgattagattttagcattatattttattatgatgatgatgaatcgatgatgcttttgagatttgagatctgatgaaaactgattgagaagatatcacttgcctatattctgtgtatacaagtatttagggatgccatgatgctgatctgataatagtactttcttattaaaagtttaatagcagcccaaataagtttactatttaagatgaatgagaatgagaataaaagt

SEQ ID NO: 204495 - DNA, 1106 bp, Cannabis indica
tcttccaagaagccccaaaaaaccagtcggttccccttgtgaaaaaccagatctgtttttacttgtgttgttctgcttttttaatttctgtgttgatgtctttgtactgatctctgctgtgttgaatctctcttgctgttttgttctgattgagattattttttttgccttttatatctgttgtagaagaatacaggagagttattaataaagttttaacaaattttattaactaacttaataacctgtctaggtaaatagaggcctgaggccacataagaatttttactgccattgtaaactctttgtaaatgtactgatttattttacagtgtatagttaatatgggattttatttcaacacattatcatttttaatcttcataattgatcaataaatgtatacttttcataaataaaaatatacaattataattttatatatgcatttgtttattagtgaatagttaattatacatgatgattgtagtactgtgcaacacttttaatttatgggaaggttaaatattttattcaacataacgtaagtaaaaagtttctttccagatatgatgtttcaaaaaatattgtatttgcaaattaataatgttatattgagaagattgtattatttttaaaaatatattaatcaattttattgtttcctatctagtcagtttgtatattaatgaatttcaaaattacatgtttgaaacttttggtcatgggattatagtgatcagaagaacaataaagatgaagcattgacgatgataatgacaatttagtaattgtcgatcacaatgcgaaatgtaaagttgcttttttgttttagatttttaatcgtgtgtcgactgtttagttgatttgccgctttgttgtaatttttggttcacgatttgaatttttttttttatcggttttaatagagtttatctgatgaagttttggatcaattttttttttaagtgttgattgttcatttattttagcaatgatttcgtctctaatttttcaagtatattgtagatagtttgatgaacgattttaggtgctaaaactcatgattgatcttttgttatttttgtgaattgatttttttttaa

SEQ ID NO: 204496 - DNA, 819 bp, Cannabis indica
aaatctcaaaaatagtagagtttagatacaaaattattccaataaaactctaaatgtcatcctacatatgtgagagtctatagtgtcactaaaaatagtgggacactatagactacattaaattttttttcttagtttttaatattaaaataatgtgtttatgattaaatttttatgtttatatacatattataatgagagatagtttaatgatccaaaattcaataagtatctgaatgttttagaggtgaatctcaattgatctttttgacatacctaaataaaggtagtaggtaccgtacctacccggttaattagatgcttataatgtcagggtttcattttagaaaaaaacaaaacgcgtactgatttcttataatgagaccaaaattaatgcgcttatatttaatatgtttaattctctcgggtccttccttcaatgtgttcgatcgtacagagtgactttctctcttgtccacatatttcagctacttcgtgtccttcaatgagttcacagaagtcttaactaaaaaatattaaaaaaattactgacaaaacctcttacatttttatttgtatacacttaatctcttatttatttttggtgtatacaaataaaaacataaagatatttctcaaacaaataagaggactttctttcttgtccacgtatttcaactacgtactactacaactttttcattcagaaaaaaaaacactactacagcttgtacagtagggctagtttagaattcaccaagaactttacttcatttgtttcttaccttatatctcactattataattattttttttttt

SEQ ID NO: 204497 - DNA, 1593 bp, Cannabis indica
aaatttgcacgggcatttcttggtgaaataaaattggtgcccaggttggaatgtcaacctgagcgcccatagttgtggatgggctcctttgagatgtccttgatgaaatatcatgtcctagaattgttccttgatggatttgaagaatcatggtccaatgatgtccctaaaaacctaaacccgagccatggtgcgcccatattgactagacgtccacctaggcacccattagggcttcttggtgcccgagtgtcgtttctcagaaacttatctcgaaagtctgaaacttcactagggcatgtctctcatgtatctgaagaaaatggctaagtagattgcccctaggaagttgttggcaaccgaaactgatgcgagatggcgcacatgatgtcaacacgggcgccctgcactgatgttggtcccaagttaagccctaggatgtccatgttgacatcctcaactttatagttcattgttttagggtcatgataacctttttgttaaaggatagcattcaaaaacgactttgatgaatcttagtacttacctgagtgcctctagtgtgcaggtaatactgcgtttctttcatgccacgtgtcaaaaatagtgtccacgccatcaaaccaaaattttggataaacacttatttatccttcaaattcaattttaaaaaaataaatatgaaattatcaaatagtaattttacttttaccactattttctttcttccctagttaccaaacaatagaagggatacacattttcttttctttcttctctattttctatctttcataatttttccttccctctatttttctttcctttagggtttagacaaataatttaagctctttaacaaccctcttgatcattacatatataggcaattaaaatttaacaaaccaattaaaaaaaaaaataggagaaataaaaaggaagtggttaaagtatatttattactagatttttttttttctattcgtttatttttttcaagtcaacattatactggggactgtaaaccaagtctaatgaaggcatcaactaaaaacgaagcactttaatcacttccaagccttttgaatgtataataattccaataaattgcaaacctaggcaatcgactcagccaggtttatgttgtctttgatataacctaattattagaattctgctattgttattttttcaacttctattgactacatttctatatgatacaaacttcagacacttgggtctaaagaaacccctccatccaaggagaccaatcattaatgaataactaccctaaatgcctaagataaaagaagatgagcaaagagaaagtgggaagaaagaactaagaaacaagcagtgagaagtacaatcatcagggaagattcaaaggtagttcagtctgacatatgttggaccagaagaccgttgagaagtgggcgctccgcttcttcattccttacggctaaacttctatcgcgatgctgaggtctggtacaaacaggttacaacgtggattaaaaagatgaatggagtgattttggccaatgtatgagctcaaattcaaaaactaaatgaattatatatatggtc

SEQ ID NO: 204498 - DNA, 979 bp, Cannabis indica
atgtctactggttaatatatcatgcatacattctaaagttaaacatatgaaacctaaagtaaaactttcctttaccccgtttttgtattcttcgtgggcatagtggacattcatctccttcgaaagttatattttctccaaacgaaattatcttcgagatgttcgtctatgtaagttttctttaatcaggtgcattttgcataggtaaatacataggtgcattatctttaggggcatattagactcacgcctaaagctaattaggtctaattaggccatggatgtaggcctaattaggcctgtaaagcaactgttatttgtgtaatgcctgtaatgaacgcatctatttacatttttttggtgtattttgcgtaggtaattccactgatgtattacttttaagtgcattttagactcacatctaagtttaattaggtctaattagactatggtcgtaggcttaattaggcccgtaatacatgtcgagctttctcaaactaaaggattcaaaatctacgaaatattagcagtacataaatatacaaataaatcttttggaaatgcatctatagtaagtacaaatacatttttctcaggtgtatattgcgcatgtatatctataggtacactttgcactagtaattgcacgagtggattttttttcatcaccgtgaaaattatcacgttataagatataaatacatttaattataaaaattatgaaaataccccaattaaaaaaatcattagcaaaattttagttttctaactcaagttatgttgggtactatcacctttatgattttgggaataagacagtaggaagtaccatacatataatgaaaatgataaatgagtgtcattgctgcttagacaatctaaaatatacatattaatgtttgaataaataagttgaaaactatatttaatttgaaggatatagtattgataacaaataattatactattaaaaaaaata

SEQ ID NO: 204499 - DNA, 1033 bp, Cannabis indica
tagataacccaaacaaatctgtagttaacacataatgccaaaccatgccagtggaaacaatgggactgaaaacacgagaaggacagcatgaatcgaaatccacaactattaaagacagaatgcaaactgcagcatgaagataaatactataaaccttcactaaactggtaactaaaaacgaaggctgcaggcctccaacatttaatacatcttctaaacctgaaaatttattgagcaaaaatatagcaacaatgcaagtcattcaaagaaaatactagaacaagataactcccttccgaggtgccaaggtatatcttctgataggaattattgaagcaagttcagaacttaaaattattgaataaatgcatggatagtcttgaaccatttcccatcacctataaaaagatagaccaaaatccaaacaatgtagcacgttcagccaacggagaaataaaatgtaaggttgaggatgttatgtcaaaccaaagaccaccacaattttgattatgttgaaagttaaaacaaacagaaaattcgattaaacaacaaatggaaagctaggtgacaacattcacataaacatcttgctattacaaaatttatgagcaaacggtattgatggcaaaaaggataaaggaaaactaaatgacacgtaaaacgaaagaagtaaacatagtaaaaaaggaacaatatactatgacacacaaatgcaataattttctcgaaacaccaccaccatggcagggcacctttaattagtttaccaaagtcaaataagtactgaaagaaacaacagatttaccaaatgagaaaaaacatataaggagagtgagaaacaattttaaaaaggataagtatgtcaagctgaaattcttatttttcacaaaataggtaggttgttgaaaatctcatgttgtctattaaaagatattatgataagttaactcccttttgttgggacctgagaagatgaagacactaattatgagaatattcttcataaaagttgaacctgaaaattcgttgaaca

SEQ ID NO: 204500 - DNA, 445 bp, Cannabis indica
caatccttttcaaggtttccaagcatttataacttttttttttctgattctgcaataacttctcaagatctgcaattcaaggctcgagctttgttgggacacagctttttaaaaacttagtattcctcttgtgttgtgtgtagagaagggaggaagcaaaaaatatggaggtgggtcagatgcagagacagtgggttgactatacaaagtccttgttcatggaggtaaagtaaaaacacttgaaatgttattaataataaataatataaaagggtttatttccttgatgggtttgttttgtttttgctgattttggtttatagatgtatatttggtctgtttgtttttgtcttatttctttctttttgttgttgttttggtgagagaagaggtatctggactcccagttcttacagctcctgcagttacaagatgagagcaaccc

SEQ ID NO: 204501 - DNA, 804 bp, Cannabis indica
ctctctctctctctctcatgctctttttctttgcacgtggatggattttgaagctcctttcaccgacaatggagggaagatcgagagggataatggcatttacagctctttgcgtttggcaattgaagtttaatttttttcttctttttttcttgaaactttaattttctattgatgagattttggcaagaagagaaggaaatatgggtctgagacggtggtggtgataatagtgactgttatctttgtttctgatagctagtagtgggccaactcaatatgaaaacgaggcctattcatcgggaccacggaggtcagtggcatgactcgttcattaagaatgggcgaagccagacttgacgtctgactccatcatgagtaaccctcgactacggatctggagatcccaagtctggatcacccaacatatgctcaaagagcagacaagtctagatcgaagaagaatgcccttaggaggcatccaagaatagaatatgaaagggagtctgggactacttaaggacacgaacgtcgatccacatggcacaatcatgacacgatctcaagtaatcaggcagcttgtctctcgtgtcaaaccacagaaaggctcacagcaaaaaggaagtcacttttttggccaatgcccattactctaacattctctttcctaaaaccgatgacacatatgaatctatcactgtcgatagtgcatccgtgtatggacgatggttacctacatactaggcctcacctatttgttggctttatggtactaacagaataaatgtaaagaccgcttaagat

SEQ ID NO: 204502 - DNA, 560 bp, Cannabis indica
ccttggtgtcttcactaagtattgttgtctgcgtagttgcctctaataatcgttgtaagtaatcctttagaggctcgtcttcttgctacttgatgtagaccgcatcgttgggctcgatcggtctatgtcttgatgggaagaaggttggaacatattttacatgtatcttctttactaatcaagtatgtcgattataacattgtaatctaacatcctaaatatgcatatacgaaaaacaatgaatttaaacaagtaaaaaaatgagatttctcacattaagttgtagcagaatataatgtatccttcttttctaacactctaagttttgatttctttttgttgtaaggtttcaacaatttcagaacttgaatttattttctctaactttgaaacttagaagagcacaatcttctacaatttcttgagtatcaaattgggcagtgtgggatgacactcaatacatgaaggtttgatctcttgcttgtatgtgggtacgaattaaagagagagagagagagagagagagagagagagagagagagagagagagagagagagag

SEQ ID NO: 204503 - DNA, 1310 bp, Cannabis indica
gattttataatatgtggaagttagtttatgtcacaggattggtattttttgttaattttatatgctgatagcattattcttattgttttttggtttgtttttagaaactgtcatattgacctgaaggaagtaattacaaaaataatatgtgcatctctaatatctgcaggtatacctgttcaagaacattgtacattaaaatatggatatgtattattggtgccttaaaaattaataaaaagctatagaataaacaaatgcacgaatgcatttgttattttagtattctaatttaatttaattgagacatgactaatttgtttgtgtttccacattttttttaagattagagatataagtcacgtgtcatttgttatgttttataaatatatataatgattagtattttttctaaaaaaaaataagtttttatttatataaatttataataaaaagaaatcgttgaaatctatatgttcatcttttaaggggcatctttgacctcaaaaactcattattgtttaatttacaaaactaggggcgcaactttatttcttagtttgtttattaaaagttcataaataagtttaaaaataaaatatttatgtttattttgttttaagaaatacttatgtttataagttattcaaaaatgtgttttaaaaagtgaaactataactaaatataacattatgtataaacagtatgtttatattttatattgataatatttttaaattattaatttaatatatttaatacacaattttataaataaaatatgtatgtttattatttatttatgtaagacttaagaaaaatttattacgttatatagactatatagaaaattaaaattatgtttaggtgtctaatatagaatgtataattaaatgtaaataagttattttgtattatatagtgtaataaaattatataatgtatgcaaaactataaattttctaacctacttataatatatccatacagtctgactctcgtctaactctcttgaatacgtcctcatgctccaccataatggaagtattagggtttataccttaaaaacaaatatttaatgaataatatactagagaatatatgaaatacataatagggtttatgctctgaaaaacttgtaaagatatttttgtttataaataaaagttgaacattttgatgtatgctcgaatattaaatttcgatatttaatattgaataatttatatataaataaaaaaactttttgagtaaagaaatacttgagactcttctagtcgatgtaaacctcacacttctctctatataga

SEQ ID NO: 204504 - DNA, 1190 bp, Cannabis indica
ccatcttctttattaaactgtaacaatattatttaaagacaataatatatgatatgattacaaataaatactaaactttcttattgtaataataattatatatgtgacaacaaattaatgaatatatttacaaattatagggttgatttctgaagatgaagtcattatatttttttcttcttcttcttctaaagctattaattcgagtatatatatattcactttcatcttcatcaaccatgcattaagttagctaggttatttgtcaaatcatatttatttatttatttggccggtgtatcaatttattatcaattatgtttaaaagtgtttacatttggcaacatcccaagttttaattaaaaatgaatacgtacaaaatattaaagaattactatgggggtacccaaatgtttaatatatcattataaaataccttataattagttaataattttttattataaaaaattattggagcaaagtgaaaaaaaatttatttaaaacaactacagaataatacacattgcaaaacagcaaccaactaactcaaaaattaaaatttaattaaaactaatacatctttactctttttgttagcttcaaaagtttggaaaatgatactctagcttaattgtattgctaatgatagtaactgagctacaaactccttaaaccaatactattatagaaaccgctgaaacaatcgcggcccatttaagatcaagtcacttaactagtcaagtaaattttaggctaatcataataaccaaatcacaaagttacctcctccatcaacttccttgtaaacatacaatcagaaaacaaatgaatatgagactctttatcataagcacaaatagggtatagcaaatcgaatctaacctcaaacatttatcaagcttatcccaagttaaaagaaagctattaataacttaattgccataaaaagactgtgtttgaaaacaatgagtagtctattccaaacccactctatgataaataactcaccttaattagtctgaatgatgagggacaaatagaaagctttcactttgaaagtacttataattcccagaacaacccgtcctattcaaagtttgcagatcaattaatcttacttctcaatgtgacaactttcttgaaataccaactgacatcattgccaaaccacttggggttagctcaag

SEQ ID NO: 204505 - DNA, 1731 bp, Cannabis indica
ttccaactagaggcaagcttagaatggtcatatctctccaaactcgtgaatgtcccatctgtggagagggagaggaaaaaactttacatcttttctgggagtgctattttgcaaaggctatttggtttggaagcctttggggaatgaggactgatcatctgcactgcctcaattggatagattggatgttgtggtttcatgaccggttgcatagaccgcagaacctgtcttttgatgagtttatgactggggctctctgcatattccaaaaaatttgggaagctcgaaatgaagtgatacatgggacaagactcagccctcttctggagatcatcaactcagtcaactggctatacaaagatcacctgtccaaatggagaatgcacactgaagaaagagtaaacaagcagattcctgaagcaggctggtggaactgctgccccgatgtatcaattcagacaaaccaagccttcggggtggacgtgtttagagattacatggatcgaattgaggccatctattcgaaaaggatctctgctacaaatcctacactggtagaagccacaatgttggctactgcagcagagtttgcaagagcaaatcacatggggaaagttgcattctattgcgacaatgaagtggcgatctcaaatggctcagccaactgcaacacaaacagggatatcgatatctttggagtagctgatcgattcaagaacttggttctatctctgcaggattttaagctggggaaaattgacaggaaacacaattacatggcgcacaattcaacaaaatgggcggccataaatggtgcaactggagttcttgacctaggtaccatggacgagaacatcttctctgactttattgaatggtcccctgactaatggtggggttgagtttcttttgaatttaagctgtgtttttctctttgttactggtagtttgcttttcatttttgttaagtttgttgtctactgtctgttatggtagttgggatgctttgtcctgttttcgtgtgtacttttggctttgccttttttaatgaatgggtggattacaccccctctttcaccaaaaaaaaagtaacatttacttacttaatttctaaatttaaaatcattttgtatatcaacccaacttttttttagagctaagatgcaaaatggccttaattttgaaagataagtgagtaaatgtttccttcttaaaaaaaataagaaaatagccaaaatataataaattagctaaaaaacttttaaaaatgtatttattacatattatttttttttaagaaaaatataataattaaatgaagttatatattttttttttagaattgcatattattatattgtaacaaaaacgaataaatatattagatcattaaatatatacaacagtatttgatatatcttaacactgaaaattaatataccataataataaaattatataccacaaaaaatataaaaaatactaaattaataactcaaaaaataaatatatcatgctaacaaaattatatataccactattaaaatatgtatacataccaaaaaaaattatatataataaaataaaattaaatatcatcttaaatgaatgatatattatagacaacaaatactatataccatacaacaaaacatatatacctacaataaaaaaataaaactaaaataaatataatattaattagaaaaaaaaaatcatatgtaccatatt

SEQ ID NO: 204506 - DNA, 1624 bp, Cannabis indica
ttacattatttttaattgcgacggtttttaaaaaattgtgaatctaaactgtcgagattatactttttgtagtacgtggtgaattttgcattcctcaaaattttcaaaaataacatagaatatgccactagccagctatttaggaaaaaatatagagtacgagggagaattactaggtttatagaagaagtgcctaataattaagaagggcattatatattcaattcccatatataattaagatagaatcaatttgtatcacataatcatttttaccaataaagttcacaaattaaggtccattatccaaacacactaatcgaaaagaaaaaccacaacttaataaagtactttttttactaaaaaaaaaaaagaaacaaaacaaaaatgaaaccaataatattaattaaggagcatcatgataaaatacatgtataaataataaatatatattaaatcattaaaaatcaagtatttaagagtccaataataataataacaataaaaagtgaacatgaacacaattaatttatatatatagctaaaaaaatatgtacattttttttaatgtatgaaaatatatatatgcaaaaattaattatcaactatacaagtaattaattaattagattaataatcaatatagaatgggtttggttttgtgatgtatttatagcttttttgtcgtataataaaggtgttgaaattaattttattttttttaaatgaagatgggtgatgaaatatgtctgcttataaaaggaaaaaaataaataataaaaataatgtaatctgtatcccattaaggggacctgttgtaattaattattcaataatacttattatataataattcccctctcttcattaaattgatcagataataataatgcttcgcacatagcacaaagagataaagagagaaagagaacaaaatcaccaaattaaacacaaaaacccttaatcattctcttaaaggaaaaaaaaaaaatccaatcatcatgactggttttggatctccttgtggagcttgtaaattcttgagaagaaaatgcattaatggttgtatatttgcaccttatttttgccatgaacaaggagcaactcattttgcagctattcataaggttttcggggcgagtaatgtctctaagcttcttgctcacctccccgtgactgatcggtgtgaggcggccgttacaatctcttatgaagctcaagctaggcttcaagatcccatctatggatgtgtttctcatattttcgctcttcaacaacaggtattatatatatatgtttatatatagtctttgagtactatataaaatcttaaattccgatgaagttttattttatcagaatggtatttttttttttttttgatttaatttaattttcttctaatgattgattcaacctctgattaaaaacatatattgtgttaaattttgtaattaatatttgaaaccctattactattaaccttttaatttggatgaagttttatttaattatgagaacatatcttaagttttgaactattaattccctttttcatttgtccatttcaaattctgataaaaaagatatatatatatatatatataaatatacttgatttaaa

SEQ ID NO: 204507 - DNA, 855 bp, Cannabis indica
aaaaataatagtgatctatttatagtacaatttcttattcatttgatgcataagataagatctttaaatcggaaactaataaaatttaaattaattttcacactaatgtgtgatgttgtttaaatataaaatattagaaacagaatctttgacaagaaaccactacatggtactaacaaaatagaagttcatatatatcctgaattgtttcacatagtaaaggaatactatattgttaaataattatccatattatatattgttatgcctaagtttaatggtcttataacaatagtaaactagttgtattgaaaagtatatatggcaagagtaattgatacctttgaaccctttccaagtattaatctctctctcttttttttttttaatgcagagtaaatctcttttatatattagttagtaagttacatttacaacactaaattgttgcatacatacaactcgtttggagcgtcctattaagtcgtattatattgtattttagtatattaaattaaattatatatcatatttttatataatattatgttaaattttaatttatactaaaatattatatatttaggtgtctataaatgttaaaactacatataattttacataaaattgtataaaatacaatttaatataatactatataatacaatacggtataatagagtataccaatcgaatccataatgttaatttaccattcaaagaaagaaagtcattctctctttattattttagtaaacagctcatcttgaggtaagtaatagtattaccaaaagaatataataacaaatctattttcataaataaaatcaaaacctttccaaaaaaaaaaaaaat

SEQ ID NO: 204508 - DNA, 767 bp, Cannabis indica
tatttcctaaatattagaatttgtaatttgtaacatgatacaatgacacgattcgaaaatgatatgaaataaatagatttgcgtgtacatttaattttcgtgttaaaatcaggtcgacaagtttaacatgtttattaaacgtgccatttcggatcaacacacttaactcaaaagtgactcaattataacacgtataagcatatataagtaatttaaaaaaattatattatgtaaaataaaataaaaattaaaaaaaaaacaagcaaaaaaatactaatttttaatttctatatgaaataataataataataataataataataataataataataataataataataataataataaattaaaactataaattttatgagtaatatttgtgtttatataaataattacactaatcatgcaaaatttgtgtcatgtcataatatgtttaattgtgttatttttgggtttgtgtcatgagacatttattaaacgtgttatcgtattgtgccatgtgacctattaagtaatcatgtcgtgttcgtgtttgggttcttgacacaagattaataatcatgtcgtgttcgtgttcatcataaatgtgtcgacatgaaaacacgaattgtcagccctactaaatattgtaatgagagaagttagtgggacccatttaaattaagtaaaaaagaaaggaaaaagttctccccctattttataaagaattcttttccctttcttaactcacttgattttaattttaattttattat

SEQ ID NO: 204509 - DNA, 584 bp, Cannabis indica
cctatgcccaggaccgggcctgtggcccgatgcctgtctgacgagcttaatgaattgagcttaacatctataaatgtagaatatggtccgatattgggctgatgctcttattttttatgtacaaaaacataaaaaaaaaaatggtaacatcaggctaccatcgaactaccgttggatcctcattagatcaccatcggtataaataggaatgtggagtatgaatattgaagttagaagagaagagaaaggagaagggtattatgagtattaatatcaagtgtgcctattttttttttaattttggtaagctcgtgttcaaaaaatttaatatgcatataaattcaaattttccttctataattgtaataatcgaaactaccaccattctttaaaaaattgaaatcgaaatcgattgccgaaatcgatgatgattcgtcactgaattttttatttttttacagttggttttgagtttggttattattttgtgattttattttcacctacaatgcatcccaaaaaaaaagatgcactgatgtattcaatattgttttgacatttacttataaaataaaaaaaaaaaa

SEQ ID NO: 204510 - DNA, 2112 bp, Cannabis indica
ggtttccagttagtgttaaggaacgatcccctaattccaacctgtatctggcagtgttctactgtgaaggagataggcatagagccattgtcaatcaaacttgaattttcaacaaaaatcttgtcctccttgaaatccccgaccctgactcttcccttgtccatgaggccattaaaaaaatcattttctgagtccaaatccacaatatccccttctcaagaagatccatatcactggctaaacttgttcgccagattgtgggggtctttctagaaatgcatcagccttcttgttaggttatttttagtattattttaggttaatttttagtgtgtgtttaattgcttttagccaacgacaatgagccaattaataagcaataagaaatgtaattaagatagagtaaaaaccagttagcaataaagaacacaatattttaaagaggttcgacccctttagttcggtaatagcctactccccttagattgtattgacttgagaacaaagaatacagtgtttcctctctcaaagctctcacaatgaaatctctgagtgtttcctcttagatctctctgaagcaattctctcgacccattttaccatgagaatggatcactatttatagggctaaatgcataagggaaggtttcccttttgcttacaatatctataattagtaaaaacatacattacatattaagaatacataaattgagggattcagacagcttgccacatccctggatacgatcatgattgtagggattgcttgtgtgcttcacgatatcaatcttgaagtcgctaagtcttgatacattgctcggagaaatgacttcgtttgttgtttggatcatctgcccttgccctgctctgtcaggcagactttgtccgtgtagatccatggctgaggtctgttcggaatatctctctagcctgtagagaatagcagacatgtgtcaccgatatgcgttgccacgtgatagtgtaaaaaatgcgataacatttgccctcaagtctgcacgggacttccaaagtcacgtgtagacttcacttagcttaagttcgtgtctcaacaggtggcacgtgttcgatgcgcctgttggtgatctgatgtgattctgaccaaaagtcccttcaatattcggctaattaatgatttgatcaatttgcacctcgaacactccaatcgtttcgcatgttttgacagttgcctttctccaggtacttaattgcttttgatttcccaacatttactttttgggggaaattgaggcatttgaaattcgaaatgattgcatcctttcactaattcgcttataaatagggcaaaaattcataataaaccacttttagcatttttcttgtttagtaatcccacagcaagaacaccttttttctctcaaattcttcaaggaatttccagaaagtgccgatcaacatcgtctgagcaacctgaaggctttaaacagtgagtaagtttctcatcttttccttctttatcatttggatcttcaattttatgggtttccatcgtagaaaatttagtagttttgaacttgttctaggaaaaactgtagagaatctaggtttagaaatgtgaaactttgcttgtaattgaccatataacttgactgttatggtatgttgactttaatttcactatattcgattctcactttgcccattcggagtttagtgaagattaacccttaattcgaggttttgaaattctgggttatgaacctaaatcacacaaaattttcctctttttaatcttttgattagagctggtcgatatactttgcttgttttttgttcgatatcccagccaaatactcatcttgtgtcttatcttttgtagatgaaccctagtgagttttggggaggagaacaccatatcgactaggatcttctccaactcttgtatgaggaccaacctcgtctttgcgctagtccgtcctcatcaagcgacggactttctaatttgagtttcgaggactgggaagtgagcagtgagggtacaccttccccagaacctgaggtgcagcatcatttctattctgaccaaatcgcaggtgaaggctacgggtgcttcatttgggaactcaggaa

SEQ ID NO: 204511 - DNA, 947 bp, Cannabis indica
taagaaaagaaaattaagcataattctatattggctgctacattgcaatatacgtacgtacagtcataaaaatatgcacatggatgaactattacaattagaacagaagaaaagtaaatgataaagcttcttactcttgactaactcttattaagtactgttgattaatttgaaatgttcaaatcaaaatacactataaatagctgagcacatgaaacgagttttccatcaattaaagctaactccatctcgtaatttatataattatatagtgatcgtttatatacatatatatcaccaaatcgtgatttcaaaatggctgctttggtttcatcgaacattcatgctaattcatcatcccagaaaaatgggagtactggttccgatactattcgtcggtcggccaattttcatcctagtatctggggagatcactttctcaaatatacccatcaatcattggttggatatatttatttatttatatatatgtttattttagctctaaacttttttattatattaatataaatataaaacaattatgtatatatatatatattatgcatgcatgggttacgtataataatattttattttatatggttgtattatgattgtatgtccatcaggaagttgatgataatacaaagcaagaagttgaaaaactaaaagaggaagtgagagggatgctaactgctgccccattaattcttcccaaaagctacagttaattgatacaatccaacggttaggagtcgcttatcattttgagagcgaaatcagtgacattttgggagaaatgaagaaaatcaatcctcacactgaattggataatagtacccttcatacggtctccctttggtttcgattgcttagacaacaaggatacaacatatcaagtggtacgtattgatcgactattgagtacatatatatatatatat

SEQ ID NO: 204512 - DNA, 650 bp, Cannabis indica
tgagtcctagtttgctatgagtgggtttgagccatctggtagaatagcacattgctacaggtaatatatatatatatatatatatatatgtatatgtaaaaaaaatatttgtgcaaatttgatcaaatgctaactgatatccaagtcaatctttatcttagctattcatggtaccagatttggtctttctaatactgtgattgaaagacaaatggtattcttagactttgacttttgtgaggaataacttgaagtttgaaactttttcatataaatgattttagaacatattgatctgagaaggcttaaaagatttaagtgttatcagttgaaaagagtagccaaccaatcaagacaatccatttacaaaagattcagtatcagaaaaatagccaataaagtacaaactttggagatacaacttagattcttaaagtacaaacataataaccattgatgtaagtataatcataagtacagcaatcattgaaaaatcatatctttactacttaaaaatcaatattttcttttcccctactttcttgattaaccaccactcaaaatcaagcaattgaacagtaaaaaaaaaaaacaaaaaataaatacgaaggaaccgaaaaattaatcaatcaaactagatctcaaaagga

SEQ ID NO: 204513 - DNA, 978 bp, Cannabis indica
gtaaaacatattccaacatattggtactcccataaaccattttagcaaagaaagcctccttttggccattaactttgatcttacactaaactaattaaggatcttctaacaggacttcaacctttacaaatttagattgccataaaataagaattctgccagaagtggcagcactagaattgaactcccagttagggaaattattctcaatcatatcctgagtcttttcatgtttgacctttgtctcaaagaaagcaacaaagccaaccttattcaccttacaaacttcaagaatagcagcttgcttatctcttctagttatacctctcacgttccaccctatcattttacatacttccatcagactttggcacagagtttgtaaccgtacacccatcatctgcttcatgcagcactgcatatccattgttcaagtttttcaggcaacaccaacttagtagtgtctatgttaggctgtttcaatcctcttttttttggagtgatccagtctctatcgttgaccttctggatcaaagaagcagtagatgaagtagtaacaatctcctagtttagggatggatcatgatcagggacagggctcgttccattcttcttcctaacagttgttgtttctaatatacttgttgcaccagaatcaccgtcaacaagtttttggacttgtttctcaactttagcagcattagttttcttcttccaagtcaatcctttctccatattacagttagctacaatacgaccaagctgaacactaagaggggagccattcatactcaattgattgttcaactagttgcttcctttcattaatgaacgtaatagattttggaggatgatccgagatctccatatccaccaaaattctagcatatttcaccattgatatagaagaagtgaccttgtctaccatgatcttccttctaattgtgctcaccataacactaagatttttcttctccc

SEQ ID NO: 204514 - DNA, 572 bp, Cannabis indica
tagacagacagaaaaactgtaaagaaatgactggaaagagtaaatagcatatatacacaaagttttatccagatttggagcataaaggtctcctacaccccgcttggctttggccatcaaatccaatattgagtagagattacaaagtgtacataaactcattacacttacaagcttaattagtatgaagaacaactcttcttcctcactcacagctcaaatattctaatagaattactttgtgatcatttccttcctagaatttagggcccaaatcttccatatgtacatacagccacatcagcaatgatttcagtgctaaataaagtttcaacatacactcagcagccacgtcatcaacacacaattgtcgaatcaccatattcctcacacctttgctcgaagtcttggccatgaatgcataagtaagtttgcactagaaagttggtagcctagctagctatgaaaaaagatattatgcaataacctgttttttatggattcgtttattaattggtaaggccaaatctcacgtaaaattatgtatgtttattttcttgagcacttgatat

SEQ ID NO: 204515 - DNA, 533 bp, Cannabis indica
gggcccacaaaaaaaatatttttggacctgtcgtctaaattgataaaagagaaaagaagtaaacaaaaacgatattaatttgtattgtttattaaatattaagtcattaaattcacgtgccatttttttttattgttatatttaaactatttttttttaaaataataaaaatttaatgacttagaccaatctaggattgtcacgtgataatttacttaaccatgtacttataaaagttcaaaaattataatttaagtattattaccgccaaaaattaaacttagatatttatttataactgtgagttaaacttaagtatttataccgcaaattactcctataaaaatacataaaatgataaattttaaaaaatggagtgggatcatgtgccccacatgactcgggtcccttcgcaaccaaacattctcccactaccataatataagctatttttgtttctttttgaaaaagataaagtaatggggcgaatatataaagcaaacactcttgacttcaagttctttttttttttt

SEQ ID NO: 204516 - DNA, 1637 bp, Cannabis indica
tcatgtgtgtgtgggcaagacactctatgtaatatacctgactcatgcaaaaaactagtaaatgcttggtattctccccccaatcagattgtattgagttttatcttggtgtttaattgattctcaacctggtttttgaatgtgataaatgtggataaggcatcatctttggttctaagaagataaagccatgtatgtttggaaaaagcatctacaaaacttatataatacctatatccattggaagaaggtatgggtgcaggaccccataaatctgagtgaatgagctgtaaagactcactgtaaacagtggtggagacaagaaaaggaagcttatgcaattttcctaaacaacaagcttgacaaaattcagtaatctgggaagaatttttattattattactcaatttgatattacatgaagataaggcagcttggacaatccttgaggaaggatgaccaagtcttttgtgccacaaatcacaagaactggtacagtgagagacagtatgagagttacattgagagtgagagaaatgagtgctagatgaggcttggttctgaggatttgtggcaaggagatcaagttgagtagtgtcaaacttgtaaaggccattgtcaagtttcccatggagtaaaatcttcgaagtaacctggtctttcactacacagtaaaaaggatgaaattcaaagaaaacaccattatcattagcaaattgtgagacactaatgaggtttttggttatagatgggacatgaagcaaattatttagaaaaagattgtgagaagcataaggggaggtgaaagaagattgaccaatatgtttaataaccaaacctgctccatttcccatgtgaatttgctgctcgccaagaaattcattgctggtggtgagattttgagttggaggagttagatgattagttgcacctgtatcaggataccagcaaggatttgcaacagtttcagaggtggcaagagcagcctgcatttcaacaatgtttgcagaaccattaaaatgctggaatgactcaggaccagtgaagttcttgttgatcgatagaagcattgttgcgcagtatgacctatcttgttgcaaagctagaactgtggcttttgtccccagactgtagagattcccctaccacgagatgtacctcctctgaaatttccatactgacctcgagattgtgggggaccacggggataatgagaaggaaatggggaaaaaccagggggaccactggagttgggaaaaaattatttgggtaggaaaaccagggggagggccacggggttgatgagaataggtaggattggatggtaaaggaccagatccacgatttgtggatggtttagtatgagcaagattggcttcgtttttggtcacattgagttccttagctgctttgtccagaaaaacttcttgagccattagaagagcttctatttcggaaacactgtaggcatcagttcgagtattgacagaagttataaagacattgtaatcactgcttaggccatgaaagatagcctctatatgatcttgtggggaagtgcggtgaccaatagaagcaagagtatcaacaatgctcttgatcattaagagatagtcactgagagaatctttcatcct

SEQ ID NO: 204517 - DNA, 783 bp, Cannabis indica
tctagagagagatgctctgacctatggtgacttagaagaatgtgaaaatgagcttatggagctttccttttacaggcaatgagatctattaaaatattaataaataatacgaaaaaatacgaaaaaatatttcaagattaatcttgaccattgatcaagatctaatggttaaaacgactccggatgataatcgtcagtttttagagctcgaaatgtttatgttggatcatttttcaagctttttataaataaaaatcgcacttgacttgggaatgaattttcgactttaaatctttagaattgagatatgaatgtgagacatgcatagaaacatcttgaaaagatattttaaacacaacttgaattgtgttaatcgaattaatattaagtgagttatggtcgttaactgaaggttgttcaacgatcagtacccaggttgacatcctaatgttaacctatacgttgtatgagtgaaaacacgtgtcaaacttgtattttttgatgcctaagcaatattctgacatcacttaactaatttctcagttctggtgaagttgtttactagttctcaaagatgttgcttttccgcgaaataaggtacgaaacttccaaagttgcgactagtttgctaatattccactttgccaaaaaggtaaattataaaagtaagaatttcaattgtcacaagttgtagatctcgtttactgtgaaaaaatagttaaatgctcaaaacggaactagaatcgaataaacataacctaacgcaccaggtcatatgtcaac

SEQ ID NO: 204518 - DNA, 949 bp, Cannabis indica
tatatagatatacttaattaagacattgtaagtataagaatacgatatatatatttataaataaacattaattagtaagatagaccaaatgttcttggtataatataagaggttcaagttaaaacacatcaccaattcatggaaaagtcacacgcaatatataatatcccttaaaaaaataaataaaatttattatttttctaatcagatattaattataaagaaagtacttcatatattatttttaattttttttttaaattcacaattaaagttgctccaatagtaatttttatataggttgctatatagatttaagttaggttttagatttctctattaattgctatatgagtttctagaaacagcactaaaaataccactaagaaacacaaccaaaaaactccaaagaaactacacaaccatgtgaaaagacaagactactaagcaaaaaccaaacagattcagagtactatgttattaaataaaaaaaccatattatgtagcacaaaatagtattgtaatttttttttttgagagaaaacttgtgctttaaaagatgaaaccataaagtacaaagcaaacaagttaaagggatggcaaagaaccattccaaactaactcattatctaatcctaatcctagcttagctgcccaatgagcaagttgattagaattcctatacacatgttcaattttaagattaggactgaaagataacaagttcttaatccccattaaaatatcatccagatgactagcattccaattacaagcatttagtttatccactatagttttacaatcagtcttcaaaacatccactggaaggtgaagcaattgaacccactgaagagcatggtaaattgcctttgcttcagctatgattgcagggatacctccaatacaagacttcacaacaccagctttcataattccagtgttatca

SEQ ID NO: 204519 - DNA, 830 bp, Cannabis indica
agtaggtatacaatgtaattttcacttttttttttggataccagacaaaagagtccagtccagtccggcccggtccggtaacaaattaggtccaataaagcccaagaaaagggcccatacaataattctgacttcccaccttagccgcctcctccactccaacgcaattccctctctgcccaaccaaccgccggcgccgaggtcatctggtgaagaagattgctttctccagtgacacaatttctctagagaagaagaccgactgggctctccgtcctgttttcgctcttcaccgagactctgctagactctacaacatcatcgacttaatgttatacacttttgttgcagattcagttcacaaccatttttgttgaatagcttacgtacaatgctagacgaaagtaaatttgatttgaatttgaagttgtgggcacttcgaatacctcgccaactttgcaaagctgccactcgattactaaatgggttcgcctctttgcctaatatacagttcctgtaattatttgttagaagaatccattaatttatttttctgccattttatttacagctacttgctcgataagcctcgtgttaagcctattactgaagacccaacatgtgagaagaaccgttacatgatattgtctgaaagtgtccaaaactctggtaaggggattttgaactgtttttgtaattatatgtttatgaatctgctttgaaatttcagtttctataatgtttattagtatgaagatgtttaacttgtcttaagggttcattggttatatgtaacaatggtttcttttataaaaataaaatgaatatga

SEQ ID NO: 204520 - DNA, 2622 bp, Cannabis indica
aacagattaccctacacctatgttgtagccacgcaaaccatgatcatctcaaccatgatcaggttcaccaatttctcaaaggtctcaacgaaagttaccatgctgttcgtgatcaaattcttctcattgatccttgtccacccttaacaaagttttctccatgatcatacaccaagaacgacaaagaaccattagccatcgaaccattccaacgtttactactgctactacttccacaccagcagcatccaatactgatttagctcctgcaactaatcagactccaagaaacaaaaaatatgtcccatgtgttcccattgccaaaaatttggccactacaaagacaaattttatttcctaaatggatttcccctggttatggaaatttcaagccagttgagtcgagcaacactagaaaaacagatccagtttgatcaactcgaaaccctcaaagtatgcaagtctcgacccctaatcttgacatttcccaatcataactaacaacatctcaatgtcaacaacttatctcaatgttgactcaacaattacaaccaacaacagatgcttcaacatcaatcgacacaccaggtgtattcaacttcactgataaaatcaaccctctttctttctttcaattcttggatcattgacagtggtgtcactcaccacgtttgttctcatttaacatgttttcaaacattcaccaataatccatattcctaaattgttaattacctaatgtcacttcagttaagataaaaaaaaaggttggcactgtcataatcaacttaaatttgacactttccaatgtgttatatgtacttgaatttaaatttaatttgctatatgttactgcattaatggaaaaaaaaaattctaattacatgttttcacttctaatgactgttacatttagggaccttctcggaccttgaagattgggacaactaaaagatatggaaattctattacatgcatcaagtaaccagctctgatctcaaatttcaatttcttgtaaaacagataaaaactaatggcataattgccttggtcatccttttgtattgatttctaataagatcaataaacaattacaatttcctcatgatatttttgctccttttcattgtccaacttgtcacttggcaaaacaaaagaaattaccattttaatccaacaacaatttctctaaggctatttttgaccttattcacctcgacatatggggaccatatccaacaccctctattgaaggatacaaatattttttaactatagtggatgaccactcaagatacacatgaatatatctactaagggctaaatatgaagctcctcaaattatagaaaactttttcatctttgtcaatactcaatatcaatctaatatcaaatctgttagatgtgacaatgctaaagaactaactttaaccagtttttacagtagcaaaagtcttattcattacaatttctatgttgggagaccccagcaaaatgcagttgtggaacacaaacaccaacatatacttaatgttgctcaggctttagctttccaatccaacctaccactcatttattggagttacattgtaaaaacatgtgtttacttgcttaagagaaccccttccattactttaaacgataaaacctcttataaaatattgcataccaagaaaccaaattatgctcacttaagaacctttgggtgtcttgcttatggatctcatgtaacccacattcataaattttctcctcgagcaagaccctgcatttttctaggatatccaaaaaaacatgaaagcttacactctccttgatatccaaacaaactaaatttttcattcaagagatgtcatttttatgaatcaatatttccttacaaaaactctaacatcaacaccaacattgacatgttttttccttccaataatactgctactaaccctacagatacacatcaacctgacactctaggtttcaattctcctgctgcaaaccagtagctcccaaaaacctccaaatcaggtagaatattttagaaatcttctcacttgatgaatgactacacatgtgaaccaacaacctcttttagcacaactcaccccattacaaactttctttcctatgacagattgagtgcaaactttagagcagctgcatttgctacagctcaacttcctgaacctgtcacatatgctgaagccaaattacacacaatctggaacacaacaatggatgatgaaatcgatactttagaggaaaataacacatagataattgttcccctacctaatggacaacatgccatgggtaacaaataggtctatagaaagaaattcaaccatgatggcttagcccaaagatgcaaaactcgattagtagcttaaggctacacacaacaatcaggttttgattatttcgaaacatatgtccctgtggctaaattcaacactctcaaactactgtttgctctagctgccattaacaattagcacctacatcacatggatatcaataatgcctttctgcatggtgaattacatgaggatgtttacatgaaactacctcaagattacactccaaaatgagtaatctcaaaaaatacagtttgcaaattaaaaa

SEQ ID NO: 204521 - DNA, 185 bp, Cannabis indica
gtttacaaaaatataataaaaatcttaacaacacctccaattaaatgtatcactgacaattcaatgagtacatgacaattcaattcaatgatgaacccatgcgaataattttaaatttctagctcaataattacatgacaattcaattctatacaattaactaaagatcttctaaaataaaaatt

SEQ ID NO: 204522 - DNA, 1660 bp, Cannabis indica
gatagggccattaatttaagacatatctctaataaccaattattcttttgttttataaatgtgttttttaaattacatttttaagctaaatttctgttgagaaatataaagttcatcttggtaatgaaaggagtagtctatacatcttatgaatgatatttagtttccacatattatcagtgtgagactctctcaagatggtagttattttttgctctctaatctaaaacagcttgatcacaagtgactcttttggctcactatccctgaatcacaagtaactctttttagctcgtctttttggactaatttttagatttagatcaaatattcgttaaagtttaatttggcttttgataccatgttgagaaatatatggttccatctcaaaatctattggtaatgaaagaaataattaatttatacattttatgtatggtatttaatttttacatattattaatacgggactttttaacataaacactccaatattcttcaattgagctagccccaaggagttctaataaccaatgaatcaaactaattagttacaaacaaaggagtagtgtaactatttgttctgatattattgcattgaaaatgtcctgtttatttgtggtgtttgtcttgtgtgaaagggtactgttttttcatgtcttttttatttaagggaagtactttttaatctttcttttctgctctttgatcagatcctttacttggtttaccaattactttttttttgaaagtgttctttattgttgcttgaagaatatgttatgtaatttatagtaaaaaatgtgttaagttgttttatttagctatgttggtatatatatgtacacctaaccttaccaactggcagattattccctttgaccaaatccttaatccataattagacttaacaaacacaacactatgaaaaaatatactactaatatattatttcatgaagaaaattcgtaagaattagttatataaatatatataattttaggctaattagtaatttttctctccgaactttgacatgtactaaatcgtgtttcttaaacttttttggctgttaaaaattctccctaaactattaaaattgttagatttaaggacttttgtctaattttagtaaaaaaattctaacatcgatgaaagtttagagggcatgatttagtacatatcaaagtttgagcggcatgatttggtagatatcaaagtctggggagcatgatttagtacataaacaatcactaaaacagtaaaattgaatgaaattagacaaaagtctttaaatctaacaatctcaatagctcaaacgaattgttaacggcccaaaaaattcaaagaacatgatttggtatatgtcaaagtgggaaaatagttaattaaccataattttataactttatgctcatgcaaccatggtactccaaaaccctaattgattaataaaaccctaactagaataggagtagacaataaacaaatcagggtaaagagcatcaagaagttagcttaaataaaaaaagaaaaaagctgtaatttcattatcaaattaatgccccaaaagcaaaattcagagagagaaaaaaggtgaaaaagtacttaaccttaaatagagaaaagaagacaaaaccaattaatgaataagcaaatg

SEQ ID NO: 204523 - DNA, 635 bp, Cannabis indica
ttaatgaacaactaactaactagattggggattcaaagaataacaccacacactttaatacaattttcttatggatttggttttattattacctgttgagcattctgaaaactgagttcaacactggggcattggcgatcagttatattagaattgaatggattacaaaggataggaaccaatggaccagattgattgtagtaaatggttggtccagcctgaggtggagcatcaaagtttgatactttggtgatgaacaggttaacgatactgaccaattgaaaggtgacatctttgctttcgtatagtgtttgttgggctgtggcattatcaacgcaggtgagaatatcatccaaagctgaccgggatgttgggtttcttacccattcatccattgcaacacaagtgtctcccactacactgaattcatattatagaacacataagagaataaagaagtcaagttatttggaatacttgattacgttattcattattacattattaatgtaaaacttacttgtgaagaagaagaaataccccacctagaatcaaagttactgttacaaggatccacccaataactaccaatctgtaaagcggaaaacatgagaaggaaagagtaagatgatttt

SEQ ID NO: 204524 - DNA, 723 bp, Cannabis indica
taacaaaatcttctagaaataatgtcggtaagaaaattgcataatttgttgttctttcattttcgattattaaacaaatatatattatatatgaatattttctatatatttgtatgtatatttatatatattttacatatatgtatttatatataagggtgtgattgtgaatgaggacaggtgagctagtaatataatagttcttatagccattaatcttgtgaatatagttctggtcgtaaatgaaaacacgtacacacatatatatatatatgttttaattaattttcactacctaatattaattttaagtgaaaattatagaattgttaggtgggcttagcccttagctaactcatcatataattatcacaaatatctttgatcttgtcattgtgattccttatcaactttactatattaattatggggatatatatatatatatatattaatattaagacacatttttatatattatcttagtgaataattatacgtatatatatatatatatgtggataagtataaatagtaatttagtatactattgtagtcacatgagacaagtctcctatagtatctttaggtttttttacaaagtaaaataaaaaagaaggttactaactactattattacacactacgtagttactatataagtatttagttagtttttaaacaaaaaaaaaaaaaacgtaaaaactaacttacatcatgata

SEQ ID NO: 204525 - DNA, 1127 bp, Cannabis indica
aacagttttatccgttcttaaattgattgcaacaacgtatgcgacttgataaaccgcgacctgtccattcatatttcaacacttgagctcgcgggctcttcagtgttgtattcacaggatggccctttaggcctatttcgttatatgtctgcattcactcttgatcacataattgtacattctatccgttgacaacttagaacatgcaagttcccgacgagtcattaatcatttggaccagatttttgtaaagagacgatctttactaatcgcaagaaagatatacttaatcattgcatatgatctatacgcgcgaccattatttacttctcttaatcttgcttatcttttgactatatgacgcatatatatggtaaatgactgtctcggtcgcttcttctagcaagtttacttcaagcggggtcagttttattaaagctaatcattgacacatcatcttttttcttcgagaactgagtccatacgtgtcaattatatacaaaattgtactcattttcctaagccaaaaatttgcacaataacaaatatcaactttgcaatattataatttcttatataaatagtttaacatataaatatcaaaactttctatttagtggttatacatatcacatcacacacatataataaatattataatttttatttaatatataataatttaattaaaatattataaatatgctatttattttatcatagttttgatgtttagaattattttaaaagtttgaaatctatttatttataatttgtaacagaaaatattagtaagataaataacaaaaaaagagcaaactaaatattggtatatatagaaaaatctacaaaaattaaaatattaaagaaaaaaaggaaaaaaaaaacttaattaaaacatgcgtatatattagagaatatgagaattaattaatattatttatagagaagattcattatattatttataaagaaaaattattcggtacgaaaaagtgggtcttatgataatgatcatattcttttttttgaaaccaataataatcatattatgttaaaaaaataaattggatttttacttttaattttttttcctgttgtaaaaatttactcaaaattatataatt

SEQ ID NO: 204526 - DNA, 686 bp, Cannabis indica
acattatttgagtacatgacctaaacaatgaaatgtatgtattagaatcaacgtaccatattgcttatgggcatataattgatttcaaattatattactcaaatttattttagggtaaataattatttccttcctaaattatcggtcttataattttttaacccacaatgttttgtgtaaccaaaatttctccccaacttttttgtgtaaccgaattcccactataaaagatcttacttttagtcacaataaaatttgtgattaaaaataaaaaaaaaaaatggctatttattaattattatattgtaacttaaaggtccgtgactaaaagtattaaccacaaaaattaaaatttgttgtgactacgtgtgtttttagtcataatatttgttgtgactaaaattaaattagtgacaacttttgactgaaaatttgtaattaaaaataataattttttgtagtgacccctgaacatatatagtgagtacttgcgaacattcattttgttccattttatacaagttttttaagctagtttgttgttgtggctacaatcaagtacaaggcttatttaactaactgaaattagataaattaagtttattgatattaatatatatatataatacatactctaataagttctaagaatgaatatatttaatttatctatgtatttttctaca

SEQ ID NO: 204527 - DNA, 622 bp, Cannabis indica
tgtcacccgaactcggcctacaatttttgaaacccataatttctggtactttcaaatccaaatgtgcaaccctatttgatactttcaccattaaaaatataaattttggtactttatattttttaattcaaacaaaatcaaaattaaatataaataatatatattcaagataataataaatcacactgacttcatacatatattcatttaaaatttaattaatttgtaatctcttaaataataaatatacacttttttttaaagttgcgccataaatattgtttttttactataaaaaaattaaatctaaacaaattattttctacataaaactaaattatcttaattttatgaaaatattacttaaaatttaataattaaatcacactcagttcaaatagaattagaagtaattaatttttattttaaatttttagtatataaaatatattgtactttatttatagcttaagagtacaacactttcaaaatatataaatgatgtggtatttttgtaaaaaaaattctaaaatgaaactaaatttcctatgtctattacaaatagataaaatagatgaaaattattttagaatgtcatactcctacagatggattaattttt

SEQ ID NO: 204528 - DNA, 578 bp, Cannabis indica
catttgatgaacatgtcaataagagtattcgaaacccgaacattgcttccaaacccgcttttgttagagaattcatgaatcctcctacccaaattcaaatcacccaaatcagcacaagcagaaagaacagccacaacagtcacctcattaggttccaacccaactttctcaaactcaaagaacaaatcaacagcttccttaggcttcccacactgaacaaaaccactaatcatcaaagtccaagacctcaaatttctcacaaccatttgtgaaaacaaatcaaaagctctctcaatatcatctctcttaatcaaatgagttatcattatattccaactcacaacatctcgttcagacattttatcgaacagtttcaacgcatcatcaaattcaccacaataaccatacaaatgaagaatcgtatttttcaagaacaaattcgaactcaacccaagtttttccacatacccatgaacgattctaccgttctcaacatccaataaacgcaaacaagccttgagaacgaaagacagagtgaaactatcaggtaaaagaccgaactttataatctggtaaaa

SEQ ID NO: 204529 - DNA, 1433 bp, Cannabis indica
aacaaaaaaaaaaaaaaaaaaaaaaaaacaaagttttgaattagtaaaaattaaaaaaaaagttcctatattttatttgaaatatttgcagcataaataacttatatttttaatttcatacacttatatattaaatttttatagatgaaataaataatatatgtgttaactcgaaaattgatcccaatgatgtagacatcatgtttgacatgtgacaagagaaaaaatatatcagagttaaatagttttgagtcatagcagttgacttaggaggcgtccctagtcgtgcgcccaggatgatttcagaaacttcaaaatgagtgtttgaattttgtcaagttatttccaaactcactatcttccaatattttgtaccacaaaggtatgaaacgtccaagtcaaatatcttcaagatgattcccttcaaagtcttgataactgtctcgaaatcactttcaaccatcacaaacgggtgttgaaacgaaacaaccgtctccatggctaacagacagactgcagcttctccaatgaggagatcagagaagttaagcatatttgtggccacccacaaataagactcggtgtagtccctaaccaacgccacaacgcacatgaatccgcaaccaactttcacatcactgttaaaataataattttaatatttattttactatttattttttaactttatttctaataccaaataaaatgagagagagtaattatcctctccatctatcttactccccattctttcaaaactctccatccatactactctatttttttcctaccaaacatagcttcactgtagtaagtttctttttccttttttattcttatctcactctctatcttctttattcgaactttatcaccttttattctctccttttgcaactcccaattttgttctcatcattatctcttttatagaaatttatcccttttatagaaattataacaggaattataattagacatctcatattcaaacatacattacattctaaaacatattgtaactacttaactgtaaatgtaataatctaaaaattacacactaacttttgaagaaaacactttaaaaatgaaaaacttgtaaactacattctatatttttagtgcattctattagaatatttttattatggaaattattttctaattaaggaaatgattttctatttaaggaaataaataaataattgattttctgataaatgaatattttatattcattaaatctggacaaaatcaattatgtaatattctatatatggtcagatttctatattcattacctgatttgatttcctgaattaattgtcaaaatattctgacaattaatgtggcacagatactgatggagtatctcacctataaatatagggtctcggtccccgagctcctcactcattctgaatccattc

SEQ ID NO: 204530 - DNA, 800 bp, Cannabis indica
ccagattaatgattattgcatgaaagttggaattgataggcataagtctgttcctagaaaccatcatcgaaatgaccttgttgagagaacgaacagaacaattctagaaagggtaagatgcatgctcatctactcaggactaccaaaataattttaggttgaagttattgttacagcttgttatttaattaacagatgcccctcctctgctattgattttaaaactccaatggaggtctggagaggaagctcaactaactatgatcacttgacggtttttggctgtcttgcctatgctcacataaggcaagacaaacttgatcctagggccaaaatatgtatctttttggggtaccctgaaggggtgaaaggctacaagatgtggaacattgaagattagaagaacatcattagcaaagatgtgattttcgatgagatgacattgtacaaggatcttaatgcttgaggagaaaagcttgcctcagccaataagaaaccagtagagaaaattcagtttaaggtggagttggacaaagaggataaggaaattcaacaactgatgcagaaccagaagttaaaatggaagatgagaatgaagctgagaagtgcaagaaggtgatgatgaaactcatgattatcttctgacaagagatagagagaagagaaccacaagaccaccaaacagatttcattttgcaactgtggttcactatgccttgaacattgttggtattgactatgaggagccaaagtcttatgaagaagcaatgatgttaaaagataagaatgaatgggataat

SEQ ID NO: 204531 - DNA, 1201 bp, Cannabis indica
atattttgagttcaacacaaataatgcaaataaaaaaaaaaaaaaaaaaaaaaactttttatacttaggaaaaagggaaatttcattccacaaaaccagctgaaataaaatatatgaagtaaaatagatataaaatattatacttaaaagattaatctatatatataaataaagaaaaatatcaaagagtttaagtggcaatctatataaacttttcttcttaatctcttttttctcatttttttctgatttagtttatttttattctatcgattattaattattaagtaatgctaataatgtatggagcgtgtttataaattttcctatgcaaacattaaaatttaatgtcagttattgaaaacttttgattttttatattcctcaattaagtggttgttaattatgaattgattgttaatatgtagaaacaatttttcttcataagaaaaatgaataatgatttaatgcttttaaaacgtttcttcttattatttttaaaaaataagcatttcttgagtataaaatatgctttatagcagacacatgactgccaaaatgagggaggaatggagacaaataattcttttataattattcacttgaatccttgattacttttttaagttggaaaaggcttatcaaagaatgttatagcttaaaaacttaaaaaggcttgaatgggtaagttgatttatattggattaagattacaaattgtcttatttgtctctttataaaccattagtattagaattagttgtactttagtttgttttggtatgagttttgctgttgtttttgttgctcccttgctactgttgtttttgtttgctttctcttttttgttttttttatttgattttgtatttttctcttagcaggttgttgctcggagtgttactcttttctctggtttttgaggtctgttgtgcaacgcctattctatttatgattttttacactatatttattattctttcttgaccttatagctcacccttaccataattcttataatactatatatctataaaaatggcattttcaatacaccacaacaaaatttcatatcacaaatttagtatatatgaacacttatacatatatatagtttatattttatagatattttaaagatattgttctgtcacatttatatatgccatgaaaaatatctcttgctaatattcactttatg

SEQ ID NO: 204532 - DNA, 1349 bp, Cannabis indica
acttacccgaagtgggtcccacaaacacgactcaagctccgaaaattggcgaccgaccttagcagtcaatttcaccgttggatcatcatctacggtcaaaaatagcctaaatatatttttctatatttttttggaatagcttattattattttaataagacctcattccctataaaaagagagctctagtagctcatttctcatgttcagaaaagtactcataaggtcagagcatgcatctctagtttctctctctagaaattagagtatccagacttacctatttttctgtaatccttctcgtgagaaataaaactcgaagtacatgtatctacattactgtcgtgatacagggagtgaacttgtgtctctcttatttatacttaactcaatatattctcgccaatccagctagcgggtgtgtctagatgtctgcatcaacaaagatactatcgttctaaatctagcatccaaaataatcaaagcatattcaaatctcacttcttagaattttgattcgaaatcatagattataattatcgatggccaataaattatttcaaaaattaaatagactacatggaattgaaataaacgatgaagaaattggaaactatattaatccgtaaaagaattcaagagattcacataacaaccctaaaaagagatttagtccataattttgatcaacaatcttcttatactctcttaacttctttggttagtcctcttctcctttcctggctaccttcaccttggcatctctcttattgactaccttcgacacctcaatagttagcgcttcacgcgttgatgataatatgtagcaacaagaatggcatgcatgggaaagtgatggttagacaaaggacaagtcaaagtgagaaaacaaagacttagtttattttggtggtatttggtaatatttttatttttaaaatttttaaatcacaaaagtgaaagtagaacttttgtttttcattttttgtattagaaaaacaaaaatgtattttgtaattacttttgtttttaattttcaaaacaaaaaataaaagcatgtcctgtaaattttattttctatttgtgtttttgtttaagtcaaagtacggttcgggtccggatcctagttttggttagggtctgggtctaagttcaagtcccagtccagatatagggctagggtttgaggtccgggtctaagttgaggttcaggtctgagtttgggtttggggtcttgtgttcaagcctgaatttaggtttttgtcagagttcgagtctaaaatattaaatataaataaactataattaaaaaaatatatgtaaaatttgtttgaaagtgattttttttt

SEQ ID NO: 204533 - DNA, 559 bp, Cannabis indica
gttgtgattgttggtaattattccatacattctagattttttttttttttttttaaaaaaaatctcttctagatctttctcgtttgtgttacaatagtctaatatttcattagggttgttgtcatgaaaaaccagattttataagaaaaaactatatcgcaaaaaagaaagtcaaataggattagcaaagttagctgcacatttgtagatgggaaaatttaaaatttatgcttgtgcggattggatgttgatcgacacgtaaaagtaattgatttaatcaaagctacacatttatatagattttttaaaaaaaatatataaacaattaacatttttataaaaaaaaaatgtaatttaaattttttatacatataaaacaaatagttcaaatgtatattttattctaaaaaaaaatagggattttctttcttaaatttatagatacaagaggttgtattttttctctggccagccttgccggcctcctctgggcatagatactatttggttggggttgtgtttgttactgcgattaatcttatctttgtaatataatttt

SEQ ID NO: 204534 - DNA, 1013 bp, Cannabis indica
aaaagaattagcatactcaattaatacttatttggtataataatgtaaggtcttaaatcttagttgacaaataattttttaagagattatatttgctatttgtggtatgtttttactcccttattttgtatattttgtatgacaagtaagtaaacctaattatcaaaaatagggtattgccatgaactattcatatgtcaattataaaatcataactagaaatggaagctcacttcataattgagctgatttaaatacttgtcacatgcagcctaaggatcaatgccctacaaaccacctttcaagtattttagcgttgtgtagtatagttgtaactgataagaatgtttttgttgcagctctttatgagagggttgatgtttagtcctttgagaaggtagattatttgttgtggtggtgtcattttaatgggataggaaccctcaaactacattttaagagcattcttaatagttttttttattttatcttttcaaaaaaaattatttttttttttattttacctaacacatttatattatacaatacatcaacttccttatattttctttcacatcatttaaatataatatttatattaattaaaaaattaaaaattaaaaatattgaaatataataaacaaatgttaatagaaaaaatagaagacaattaagtaaaaaaatttgagagttccggatgagataatttagtaaggatttagaacatttgttggagatgaattttaatctcttaactattataaagcatctattaggagtgctctaataatccaattaaagaagaatacagtttgaaccctgtaattagagaattatccaaattgcgaaaaaataaggaaaaaatcagtacttagtaggggtgttcatggattggtttggtctagattttcatattttttgaaccaaactagttatatggttttttgaatattggaaaccaaaccagatcaataaatttctcaaaccaaactattaaaaacggtttggtttgg

SEQ ID NO: 204535 - DNA, 588 bp, Cannabis indica
aataaaagttttaatctcataaggaaaaatttagtagaagtgttaaccaagctactattaacaaaaaaatatatttaggagttgaataaaggtactttttaagtcaggtgaaattcgtagttcaattttttttttctgtttttgtaaacaagctaattataatttgagcattgctaacagtttctttatttttattttttaatacatgactaaaactttattttatttttttatattgcatcatatatcaaattttcaattatttttctgttttcttcgtatcatttaaataatattttttttaatatataaataaaacataaccacaaattaaaaaaataaatataatataaattttattaaaatatttttaaaaaataaataacattttctttattttaagcgtttatatattataacaatatataatttaaaactcaaatgtaggacctacacttttctgtgaccacttcaagtaattataaataatattaatctacatgtgaataagtactatagtgttttctaaatgcttctctaaaattatagaacatgattttcacactttttcttcaattctcatcttca

SEQ ID NO: 204536 - DNA, 2506 bp, Cannabis indica
aacctcattccaaagaccatagccaataaaaaagaaagcctacaaaatcaaatgctatctaattagctccatctaagcctcaggtgagagcattctcttaaccttcaaaacttaaggaaagctcaaccagaaacacgctcagtaaattacattattcattgacaacacattcactaaaattaaaatgcacttgaaattataagtacttgtatgaattaaacaaattttcaaaataaaacattacttggagggggaaaatgaaagatgataacacgaaaatatgggtttgcctactaaaactagataatgatagtcaaaacttcccaaattcaaaagtgttgatttagaatttagtcaactaacagcggagccttatttatgattaccaatcaccacgtgtaaataagaacagtaaatagtaaaggagacacaaagatttatggaggttcacccccttgtttagcaggtaatgacctactccccttttagttgtattgattttagagacaatatcatgcaaattacacgtttttaccttgtaatttctaactatggctctctttgaatgtttaacaatgtgttgaaaattaagaactgatgagtttttatgaaggacataggaagatatgacttagtgtctaggtggcatggatgaagtatgatactagagagagagagactttcacgtgtggcttaagcctttttatgcaagtggggtgacttggaatgactttgggaatgagagagacctaatgtcctttatatagtgtagggttgacaaaagatataatttaagtagataaagatattcctttaaaataagaatatttatatctttttatctgttgtttaagttacaaaaaggataactaaatccttaggaaacatgactaatatcttgaaggaaaatccccttttcgtgggttgttgggcctgtctcgcaactttgctcaaatggtcagagttgtatgtagaaattggctggccaaccctatttctaggagctggccaatctatgcactcctaaggccggccaggtattactcccgcagccccaggatgtgcctgccatgtgcttaccagcttttccatgtgcctgccagcttttctttgtgcttgccagctttttcatgtgcttgccagcttttccatgtgactgccaaccttggtatgtgcctgtcagctttctagcttctttgtataattttccttgcaaaggtcaggcttccttggtcaaacaagccctttttgaactgacaggcactctttggtcggctagcttatgctcacttcctttggtcggccagacatggttgatttatgccttggtggcctacttaactcctcttgcttattgcttgataatttttcttgattgcttcagaaccattgacatttgacatgtcgtgtaaggtaacttttttttgttgttgacgagctgtattccacgtgttctcagtcttgactatgtggacatgccacgtcaggtggacaaaatttgagataacaaaaagaaataaagaaagaaaaaggtactaccacaaaagtctaaacctataaattcactaagcataaacatagtgaaaaaaccaaattaatcacagcctaagttgaaaccctgacccaattcaatactctttatccaaaattattcataatacaaaatccaaatcaatattattaagaacgaaaaatcgaagaaaacaactaaaatctaggatcaagaaccagagggagagaatggtgatacctatgatgcctaaaggagaaagatgaagcagtggtgaagactgaggaggtgattgtagagagaggagtttatgatagtgtaatagacaatggcgcttctgggatgcaccttcctaaaattagttttagtctaattttatttgatagacgtgtatgttatagttatttaagatatactataaaattttgagaaattcagattaatttataatatagaaagaagtgttcaaacagtctatttcacacacatataaaattaaagagtgacatgtgcaacaacctctttgaaccctatttttgatgtgttatttttttttttttttaattttctcaaaatttcgcatgatattataaataactataatatacatgatcatgaaaaaaattagaactaaaaaaattactctcggatgtcgagacaagtaaacgtgcatcagtgtattccttttagggatgaattgtagaattttccattaaataatagactcttaggcccaaaaatattacaatacaacatacattcatggatcgtattaaaattaagttatcacttatgctccaaacataatagtgactaactttagaaatatttataattttatattcattatataattttattaaatatataatacaaaataatttatttacatttgattatagattttattaaaatacattaatataattatacttttttatactaatataataattatttttaagtgttatataaataaataataaacatatatac

SEQ ID NO: 204537 - DNA, 590 bp, Cannabis indica
ttatggccagaacaaagcagacttcgtagagggcctctgtgtgatcgtccggtagccaaggtggctacaagggtcgaattaggactgtagaggaggttgctcaaccccatgttgatgtcgatccagagattgaacagggggctgagagtcccagtgtcgagtttgactttgagaaggttgtaccagcgatgaggaggaggtttaagacttgttatgtcctgccaaactatcctttgggtcattacgacgccagtggtaacccagtgaataggcttggtgagccttcaatgcttggactagatcatgtcttaaaatagtcttcccactactacaatttgacaacttagtgatactctttagtgaccggcacagaatgtgcacgtcactaaacatttttagaaacttttagtgacgcgctttattagacagtataatttttataattttaacccacaatgcgggtcactaaatcaagttagatattttatattatttaaaaaaaataaagtaactatagtgacgtgcaatacaatacacgagtgggaaaagattttcactcccgtaatataggattgtaacaatgaataatc

SEQ ID NO: 204538 - DNA, 1760 bp, Cannabis indica
ggacatagaaatgctcatctatacaccaacgcagcgcaaggagaagggatttcgcttcaagagcgaccactttcccccctccgatgtaagggagagccagggctgcacaacgagaccgtcactgtttctaataacaccgccaaactaactttcccttccgttgggatgcagcgtccacatttagcttaaggagaacgggctcaggaggagaccaagttgggagagttgaagattggctggagcgagctagaagagatggggccgacgctaaactattgaagtcttccacgaaactttttgctaagttcactaacgcatgggcctgatcatgtgcctgatctttaagagctctgttcctgttgtaccagataaaccaagcaatacaaagaaaaagttttacatcttccttggttaaagagacatatatcatatgtgcagcgtcatgaaaagtaatttcacaagagccagaaaaaatataagggtaaaaatgcgtacctttccagactcttcgaatgctcttacagtagaacagggcgtgtgacacagattcatccagatttccacagcgatcatagaccgatgaatgtatgattttcctagaaactagatttttggatgttggcagggttgagttgatagcacgaaaagcaaagtgtttcaccttggtgggaattttgaggtgccaaagatttttccaccaaggcgagggggaggaagaagagggaatgtcaggtggtgtcatggaggagaagctgagatggtaacctgaccggaccgagtacactccggagttggaaggctcccaaatcagctcatcactagagggatgaagagggaggggaatggagagaatctcttccacaacatgcgacggatagcaactctgcagcttagggatatcccaagtcatggcagaggtgataaaagaggcaaccctgtcaggggtggtagaaagggataacctgacagaaacccaggatccaatgatcaagggttgtggatctgttctgcccattaccgattttagaataagcctttgtgcagcaattcatttccccaacaaatactacgccaaataaaagagggttagtgacctagagaactgttgaggaaagatgagtttaggtaatatctagaaattagccataatggactccagagagtggcaagtggccgcaggaatgcgaaaacaagccatagtataagtggggatggcctgaatgacagatttgaggagaatttctttgccccctttagagaacactttattcttccagttatgaagatggccccagactttatcatgaagatagtggaagatttcctttttgttcttccaatgtgttgagggagacccaatatttttgaaggaagatcgaaccgggatttgcagaaagtctgagataagagtttgatccctcagctcgacatttggggagaagtacaatgaagatttttgaaaattaaccttctgcccggtagccttcttatacacctctaggacctctttaatgatgttgcatgagtgaatagaagccctgcagaataggaaactatcgtctcaaaaagaggatgggatatatccggagcatgccttgctactttaaagccagtaagggatatgctactctcttgctgatgaagaagagaagagaaaccctcagcacaaagcaggaagagataaggggagaggggtctccttggagatgccccaagtaggataacgtttccagagactttgccattcacgttaaattgaa

SEQ ID NO: 204539 - DNA, 659 bp, Cannabis indica
aaagaattatgtgtacaagaaaactacttaaactttattttaagtacatgaaattatatttttctcaaaatttgtataatgttctaaatagtcatgtaaaaaaaaattaaaattatttgaatattgaaaacatgaaaaaatgcatcgatacatccatatatttggggtacactataaatttttcttataatattataacttattagaaaattctacaatacatctagatatttaaaattctacacccacaaaaagtgatctaccgatgccctagataattttaacatctagatagtgtttaattttttttttttttttaataggatggtgtacaatataattattttaaataattataaatttttgaaaaattttaaaaatttaacgcgtcgaaaacaagattcaaataatttattatatgcgtatctcttttattttaagcgcgtataaaatatctaattacaatttacaatatacattatcttataaaaaaatttgagatcatatactattcatatatcataaacacattgcattgcacccatttaggtagtcaccgtaaaagcacttatttcatcacttattttcatctgaaagcaaaactttatggggatgaggattccgtagagttgtagtgatcgaaagccataatctcatat

SEQ ID NO: 204540 - DNA, 712 bp, Cannabis indica
atttatttttaaaaaaagtactttgtatttatgtttgaattttgtattaaaatgttaaatttattgtagaaaataaactagtaacattagtccaatatgttaatcaaaactttttttccaaattatggactataatttcttggcattggatgtatagactagaaaaatttgctaattaatttttttttttcattagtagtgttaatatgagatataaaaaatgtgaaatttctaataattgtgtcaaaatttgggacttgattttttaacacttcatgaattttctcttaatgcatgtcaaagtttagagtatgaacaactatttcattagtgatcagatcaaattaatcacactattatcaattattctaaacctaattatataaaaactttattctaaatacattaaagataaaggacatgtttttaaacaagacaaacttaaaactcaaattttatagtgtggtctatcttgataaaaagagtgatacattgtattacaaaaacataatggagaatatagaataaatatatgaaaaagaagagaagatgaaataagacttaagtaatatgtgcatttaaaagattatcacgtgataatattatatagccaccacgagatataatttttttttttttttgtaaaagtaataatataatattttgatacatattttgtatattaattatttaatggttgtagtaaaaatat

SEQ ID NO: 204541 - DNA, 1463 bp, Cannabis indica
aaaaaagtaataaattaataatatgaagtgtagttgtgtagttgaggaatttaaaaagtggaccattgagagtgcggaatattcatgaaattggatggagacatgaaggcagaaagagatcattgtcatggaagaaagaaaattaatgtagctatatagctatatagcaaatttttgatatatatatatatatatatatattatatggtgggtgggtggtgaattttgatagagtaaaggtcgatgtcatgaattgatgatgagttgcacgaggaggccatgtgggtaccagggggttctaccaaaacctagcaatggcacgaccacatttcaacctaaaagacaggaatgtctgtacttagggctacttttattctctttattattcacttctcccatatgtctactctctactctctactacctatatacatataattccttttcatatgttgatcatgactatatattacttggacctcatcatcgaatcaccttttcttctactctaatatataatctctctagctatacatacatatatattacttacgtacctacttacgtatgcaacttttattcacacacataatgcagttggaaatagaagttgaagtaatgcattataaattaatttgatttatcaaaaaaaaaataataataatattaaagggcaccttatggtaccaagcaccacagcatcatcgtatcgttattagtgtaaattaatattaggttttacataatttaatttaataaataatataaaaaatcgataaccaatcgcaacaatatggtgttgggcaccatatagtacctaataacaatgctcatttacatatatccaacataaatgaaaaatgctaagggtcacgtgacaaacatgcgaaaagtaacgtactttggcgtattttaatatcgaatcttatatattttaataatttatttaataatataagaaactcataaatagtcatgagatactatcttgatatggtattagccaaataacatgatgttctacatacataaaataattgtaataatataatgaaaaatttacataattatagataaaaaatttaaaaaaattacaaaaataattcaacacaaaaaaattcatttttattctttgagttcttttatttgtataaatagctttcagtaaaaataacaaattatttttttagttgttttatagtttatttatagttgtattataggatcacgaggttatttttctggttgtctttggttattttatagtttatttatagttaatttataattatcatgagattgctttatcgttattttttaattatttttttatatttttgttgaaaaaaatatatttttataattttaaaattttataaatatactgcaattaaaaaatttaggccataacattaattataaatgaaaacataaaattaagaaaggtatttatgaaaatttcc

SEQ ID NO: 204542 - DNA, 1007 bp, Cannabis indica
aaacatataatgtaatgataagtataactgacactttaaatactaatttttgtaaagcaaattatttataacatttgtaaaactgaaatgatgtcatatataaaaagagagttttgttttttattttgacattttaaaataattttcttttgtatttttacaggattaattattctacacataaacttctatagcaattaactaacgaaacaatttaaatcgtaattaacatccgtatagcaacacacatagaaactacgagaaaaattaacagagcaatcccaatcataaattcttttaaaagaaattaattaaacataatatataagatgagaaagcctttgcaaatgatgcactacctagctattatctgtcatatatatatatatgataatatataaatatatatatatagatatatgtatatatgtgtgtgcatgttgaattaagtgtggatcgaaattctgatttgttgagagggtaaattaaattatctgggagggtgttatgatgagaaggtgagggtggagcagtagctaggcatggatcgatgatctgatcatcatgatcacaaaaattgtactaattaaaataagaaaagccgttgaccatggaaacccaattttgtctccgattgtctcctaaggccacgtacggtcactttcaagggacaggtgtcgcgatctgattgggtaagtggtcataaaccagacacttgcgctgttgaagagtcaaaccccggatctggaaggagaaataaagagagcgttgcttagggatgagaaagcgggttttagtttgagaggcatatggattgcctaagccttgtgcttgttgatgagccacactaaagtagactagactatactcatatatatcttttatatattatataaatgtatgattaattcaagattttgaagaatgtttctttccttttaatattctttttttttcacatttaattggaacatgcgcgctaggaccactcgaataatctcatggga

SEQ ID NO: 204543 - DNA, 1383 bp, Cannabis indica
agatatcaaattgttattggtctgattctatatgagatcttacaaattttataatataaaaaactaaaaaccactcacaacgcgctacattggtatgttgttgagtactttttaagatgtctagtaataatagaatcgcaaaacggatttcgacacggctcacgaacacgaacatgacataaattttatgagttacaatagggtagggaaaattagacgcgagtcgaaaatagatcggcacgacttgacacgaaataaaaacagatcaaacacgatacaatccgcttaacacaaatttgacatgtttgacacggttttttttaaataaataaaataatttttttttaataattatataattatataaaaatatatattttgtgattcaatttaaaaaaaaaattaaatttaattttctaacatgaaattgaaaatattttaaaattttaatttttattatataaataaaaaattatatatacataaataagtgtatataactttttttatatatggaagttaaatttatcatttttctctataatttttataattttagcttcaataatagacaaaacagatcattatgaatcaacacaaacacgatacgattttttacgagtcgggtaaggattgagaaaattaaacacgagtcgaaaaacgtacatgtttgatacgaaatatagaagcggttcacatatatatgtattgggatgggatcatgataatcggatttaccatgcagtcactatgatatgagatcatcatcctagacggttaaaaaatgataggagaatggcgtacgggggtagtagctagggtagtgaaataatggtctggtcccagtttatataaaagaaaacaacctaaaaaaagatattcgaaaggcaaagaggtgtggacaaattgtccaaacaaaagaggagaatagcgtttgtttggagatactgtgccctgtctagaacaaaatccagtattgggtaaacttaattttgggaaattttgccttatttccctttctatcaattcatggtccagtttttgcattttagtgttacttttgtggtacacggctcttcacatcaactttttccaacttctgtataagttcttcagctcacccattttcaatattttcaccttattaacccaattcataataattaatgatagttttggggtttttttgtaattaactgtgttacttgttagttaccaatacatatatctaaattactaagtgatatctctagctagtattgtggtattccacctgtgcttattcttttaggtaatggaaaagttttcctgtgagagctctaggaaatagaaagttattttgatccgaatcagtataaatattatgttttgtcttctttgtgt

SEQ ID NO: 204544 - DNA, 956 bp, Cannabis indica
tattattttaattttcataatactttttctaatttataatattattattcttttagttttcacaattatatttttcatatgatttacaataatactttttcttattattttgtttgaacaaaactaaaatatatttttattcaaattaataaagctagtaaaagagtaccattacaagtttacaaccatagtaatagtataagaaaaaatatgtactttcaaaaaatatatatatatttgtgagaattaacaaaaattgatacaataaatatcttctaaaactaattcatcaatctttaagagacccaagctcttagcaacaatcttgtgttatgtttttagttagaatcactgcacaaaatatcaatagttagtgactataaatatcattcaataaatcactatatataaaaacacaaaacatttacatatgtataaatgtgtgtgtatttttcactgcccatgcataaccaataccaaaaaaaattctgaataaaaaagaattcaaaagagacttgctatgaataaatactcttaaacaaagcaaattaaatataaaaaaacagaagtcaaatagagctagttgccactttctttatttcattataaatctcccttgggagtaattcttcttttaaagaacaaaaataaagaatagtttacctttggagaataagcaagagacttttcttcacattttaaccagttgcatcactgctaaaaaaaataaagataaacaaaaaatttgaaacaaatttatgtcccacataaaatgatacaacgattatagttattaagaaaaagcttaatcacacattgagatggagatacgaacgtgggagattatatctaacctgtgttgccatgactgagcttgcacagaaagctactaagtgttactctgagacgattcacctaaattctaaagaattcactaaaatggtcctagatggctc

SEQ ID NO: 204545 - DNA, 1143 bp, Cannabis indica
tttttttactttataataaaaaataagaaacatatacaaaatatgttataggatgacattcttttattgcattcttttttcttctaatactaagtatcaattaaaaaatattaaaaatatatccatatcatcaaacatcttttattagagatactttaatgcttatttaatcataaacctcctttaaacacagaggaaagatgcatgtgatcttcatcatgttctccacaaatttatattatttttttatgagaattttattattaatattattgctaagttttattattattattattatttgtttttaataattaaattttataaaaaagaattaaaagttaataactttattcaatcactaaattgtttaggaacaaatcacgttcgatgcactaatctagaaaatgtatgatattatgatttacaattattaaccacttgcttgggaaagccagaattaatcataggatgttaattaggagtgatggccatggttgactagtgactagtggatactagtctactactaaacttaggaccctgtaattgttaaggcttagctgtgactttgttcacataaagctatctaaatgaaatgtgggcccaagcccaattacgataagagcaggtccaaatgtaaagtcaggtagtcggttttggcaacacacgagtcacatccattcatattacaagttacaacaaattcaattttcacacacatacgcattgaaattgtccttcttcccttatctctctctctctcgttattctttctaaatttctatttgtgtagctttcccaagtgggattggtttatgggtgattttgatgtataatagcattattaatcgcgtttgccaggccagattatactcgtgcatatgatcctcaactacctcttaataaatttttaaaaaatatcacaattcaatttgatctcttaaatctcttcaatgttaaaaaatttatctaaattatgagaatggtactaaatacacacagttcaaatcgtaacaattacaaaaattttgattgaaaatatgcagtattcaaattcacttcatcactacaaatgaaaatgaacaattacatcccataatctaaaaaatgtattatattattattattttaaaaaaaaaa

SEQ ID NO: 204546 - DNA, 850 bp, Cannabis indica
acaataacttataatataaaaggcaatgttcatacggtctgtatcccttactttgtatctctaatataataataacgtatgtattttataatttgcactataattaagatgtaaaaataaattacataaatttttgttacaattatttatgaaaatacataaaaatataaataaaataaaatatagaaagctaggcacgtgcatagtacgcgctaacctaacttagtatatatatttattatatttatttggtgttaccagtagtgacacaacttatctttttgaaagtttgggtacctctttgctcttctcagtgtggagaagaatctgaaactcttgagcatgctctatttttctgttctggcttgattctagtgtgacatcggttaggggtgtggtcggtgctctgtcgatgtacatatgggccaatgcaagaaattctcctattactctttgacaagctatcccgttaggcttttgaattgatgatgacaaccctttggtggctgttatatgataggaactcagtattatttggcaacaagtagtcacgattgtatattattctaattagccaataaccatatggaagagtttaaggagtatgatcgacgagaccttcatttgggatcgggccttgcgaacccacctgtaaaccgaactactcgatggatgccacctcctcctgaatcttttgttctagctacggatgcggtgattctggggagggactttgttggattggagggagtgatacgtgatgcagaggttgtagtttgttggttggcgtggtcattagatgtgttaggtgatttctcggctaatgcggcggagctacttgccattcgtc

SEQ ID NO: 204547 - DNA, 779 bp, Cannabis indica
ccggggttggagtccaaggccaattcagagtctggggtcaggatcggggccgagtccgagtctgagtttgggtttggagtcggggtccgtatccgaagttgggatccgtgtctggatcaggtcttgttaatatcggagtctcaaagtattgaagtgttattttcaaataaaataaaaataaaaatagtttttgaataatattaactaaacaaaagtgacttattatattttgaaaatttcaatatctgttttttgtagttcttatttctaagaacacaaatttcaaaacagaaaaacaaaaaacaattgaaacatgattataatcttaaatgatcaaaattcaaaaacacataagttactactaatacttacaattttattggcacaccatatttatagcagtttcattttatttgcagaatttttactacagagattcagtaccgtgaatagcacgtgaaactcacgcgccaccacataactgatagcacaagaaaaggataactatcttaattaaaaaaaaaaggataactattttcgtgtaataataagagaataattatttattattagtattttttcatcatatataaataaatatatatattttttttgaaataaacggtataacagtctctctctcgctccaaatccctagccaagttctggccccctcttcctctcagattcggtctcgttcgtcgttcctggccaactccgaccactaactctctcacctcaaccgcggtcattttcctcctcggcgcgactagcaacac

SEQ ID NO: 204548 - DNA, 1130 bp, Cannabis indica
ctctcatctcataattttacaaccacactaaacacatcttccttttactcaccaacttttattttattttattacatatgaatatatttcaacaataccatttgtgaagattttttttttttatagtattttttatcagaaaaaacaaaaagaggagtgatatagttaatcgcttattataatttttgtgtttaaaaatacatgctgaaattttttttatagtggtgttcattatatttacaacattatttttgtaaatttttgaaaaatttcgaataaattacattatcgaaaatatttgaagttttttgaacgtggtaaactaaaatattagtaactctatttttagcatcgtaaactaatgagaattttttaaaaatttacatgaatggtattgtaacggtaataaatattgctataagaaaaaattaaaaaaaaaatattttggctaactgaaagattgtaataaaagattactactcctcaaacaaaaatagattgggataaagtgtctgacatagaaaatgttttttttttcttaatttgtggaagtgagcatcaatggatacgtattctataataaatttaataaatattataatacaatttgtatttggtgggaccttagccagtgacggaagtggatcgcgggacaccaatcttcattttcatgagatctgatcgaacctatggagtagagaaaaccaaccaaatctcctaaacgccaaactttacttaccaccaaaacctcacccttaaccagagcctctcatacggttagagggagagagtttgtgtgtgagagacagatagagagaaaacatggccatggctttggcgctccggaggctctcctcttctgttgacaagtccgttcgtccacgcattaatggaggctcgctttattatatggtttattattgtttcccttttctttttcactttctgggttttatttcgttcttcttgaaagtggtttgttttctacgttttcgattgtttatgcatggtttgtattaatacaatattcactgcatgttcttcttttctttttttgggtttcttgtagtcttctctgcccaatgaagctgtgtacgaaaaagagaaaaatggtgtttcggtaagcaaaa

SEQ ID NO: 204549 - DNA, 1175 bp, Cannabis indica
agagagtagacagagagaagagagagagagagagagagagagagagagagtgattgagagtgaaaagattgattatagtattagtttaatatattggtacctggtgtgatggaaatctgagtttgcacgtgcttcatcatcatcatcatctcatcccatctatcatctgtaatttggaaacaaaaaataaaaaattaagaaagtaaaggaaaaatcacttcaccataacaacgacccacaaactccaatccaaacaaacaagggcaagttttattttttatttatggaaaaagaaaaaaaaaaaaacacaattgagagagaattttcatagcaccaaaacagttaaggctaaagtacatataacagaaaatgatatctaatattcatgaaaagagaagctctaccacacccacctgcctataactatctatacgatcttttatgttgatataatatcagttcatatatatatatacagatataaaaggaaagtcctctgtcagactcatatgatatacacacacactctctttcttctctgcaacttaaaagggaaagagtgaaaaaagagagattggttttaaaaaagactcagaaagaaaaaaagatacctatctttattactcacttcattatccccacacactgctatactatagtactactactctactttcatgaccatatttctggaaaattattaataaaaatatcctaaatcaataatcccatgatttctttttcttaaattaagaattgggttttctcttttgtggcttttcgagtgaagtacctgcgaatagatcaaaacaggggaacttcttctgatttgaccctcccttttcaaatcatatgatgcaaccaggcaaccctttaatgaaaaatcaattttttttctttaaaacaaaaaaaaaaagtagagagagagagagaaggagagaaagaaagaaagaaagggatgtagggaatatggaaatgatatgaacttattgttgtaattaaaaaataaattatatgtatataaatatttgtgtatgtatctatctaatcctctattttatatgtgcttataatgaaatgaaatgaaatgagatgaaatttctaaattagtgtcagaagatacaaacagctgaaaagacgaggaaacgtctccttccaccaaagcttaatatata

SEQ ID NO: 204550 - DNA, 887 bp, Cannabis indica
atttatatattttgcacatactgatgcagtactatgaagaggactgggaaaacgcccacaccgaaaaggtggaagtaatgaaatatttaaagagtaaagagtacacagatgctaaggactacgccggagaatgtgagtcagttgtgatgatagccaaaggccaaagtacgtgccaattaattaattacatattcctttgtagttgtcaattactgtatataaatgattatatcgtgtctagtttttattctgtcttgatccataatatataacctgatatattgagctaattaattaatattggaatatatatatatatatatatacaggtgtgcaggggacatgtaagtatggaactcgagtagattacatattgggttctccaaactcttgttaccagtttgtcccaggttcatactcggtcttttcatccaagggtacttctgatcaccacatagtgaaagttgacataacaaaagtagataacactggtcaacaaaatgtcaccacaaagaaaagacatactaagaagaaagttgtaaaggtaacaggctcttctcaatccaaagctatatggaagacacatacgacgtgagactataatagatttgaatttctttgtttttagaaattataaaaaaataatttatatatattaactaattatatgatttataggtctagttgtttttttttctttttccaaagttgagaagagtatctgattttgaagctgctctgctcttgtgccctacgtgtaaatcatctatcggaattgagtgctagcagctgctgcaatatatattacatgatctatatatttgttactcttatatttctacacataaacattaaacattgagaatatcattaattattagaataga

SEQ ID NO: 204551 - DNA, 613 bp, Cannabis indica
tttgcatacttgacccaagagagcaggaacattatcacggtctccatccaatacaatcttgaatgcagaaaatgcttgttctacttcacccttggccaataaaagctgacctgcaaaagaagtcaggttatgacctttaagtgcaggcatattcaggcatgggtcgcacacctcagctttcaataatttagaaaaatcgagttttttcaactcatccacctcaaattgagactgcaaagcaactaagtatgtcatacagatttaaagaaaagtatgccaaaactaataatacaagtacaagtcatggtttaatttgggaacaatatacagttaagacgattatgtcaaactggtaatctctcactggaacttctggatcagcaacagcaacagtcgtatcaaaaattagtgtctacatttaaaacctttagatgatgaaattctattgaaactgtgaaagtttttgtctttggtctcattaatatgaacaagaatgaaatattgaatagcaaacaatacattgaagttgtatatgaagaaataagtttgaacccaccttttccaacccaagtagaaggctcgtgcatgtcaattcttgacgctttattgtagt

SEQ ID NO: 204552 - DNA, 3158 bp, Cannabis indica
tggaaggagccattaatattctgatgcacccactgcaatgtttctggaactttatatgtgtttatttatattgttttagaaattcatatttaggatgttaaataacatatatggtagtaaatctagatcctggtaaaacatattccaacacaagctccctcgagcgagtcttggccctcaggatcgagaggaccaaaaaagcatatccgtgcaccaagagcccggggaaagagggaggaaaaactgaaggtaccctccagctgacctaagacagaaaatcaatgaaaagcatggtgacttaagaggccatcttgaaaagaagaaacacgcactgccaatttctggagacacgttgaatgagggaatcctggttgagttgacaatactacgcaaagacatttctagggtctcccggagacaaaaaggcgatgactcggactcagatggtgaggaccgggaactatgcgctcggcacatactagatgcagagctccctaagaactttaagataactgaaatgacaacttacatcgaagattcgaaccctagcgaccatttgtcctgatttaaccgggagatgcctgtcatcagggtcagtaatgacgcgaagtgtttatgctttccactaacactaagcggttttgctgaggaatggttcaagaaattggaaccaggatcagtggacagctggagcaagctacaagtcagtttctggaggcagattttcacggcgagaaacattaaccttgaagtcagcgccctgactaatataaaacaattgccttcggaaactctaaagaactttataaaaagattcaaagaagaggcttcaaagaccaagaaggtagatgatggacaatagctggcccccgggactcctttctggaatgaactacaacaagggggagcagctaatctccaagatttccaaaaaagggtccaaaagtacatcaacttggaagaagcccaaatagtggcttacgaaggatactacccgactggagtattaggatatgcagctggagcacagcttttgggagccctacctccggccactcctcaaatgagcggaattgtattctccactaccccgggatataatcaaagcctcgccctagctcccacatcatcacactttgggccacccatgggcaatccctcgaggatgaatgtctgaaccccgtcccaatccgcgcctgccaccagcctggcaagacctcttctgagctcccggagcaaaaggtcctcaaagggtagcacccaaactgaggacaagcgacagcggaggaggtatacccctcaatacactcaatacatgaagctcacggacacacaggagcacgtatactttgcaaccatgtagaatacgcattatcggaagcctcctcccctatatagggatagctcatagagggatcccaataaaaggtgtgaatatcacaacaacattggccacaaacaatgagtgcaagaacctgaaagacgaaatcgagaacctaatccgattaggtcatttgtatgaatggatcaagaacagattaccccatctaaacccggctctagcaggagaccctttacctcaggggggactaggaggtatgcccggagaacaagtacccagtgtaccccccgtaggagcactcccccagtaggtacctggattgccaccacagccaaatgggagcgtggccatgatctccgatgggcctcatatcggaggaaccaccagaaacgaactaaagcgttacgctggggccataaaacacgatgaagtatgggaagtaactcaactcccagcacaaaggccccgactcatgcaccaacccatcactttcacagaagacaatgcaaaatcagtgcgtttccctcaccacgatcctgtggttatagagactcacatcgccaataaggtcgtggcaagaatactagtagataacgagagttctgtgaatattttgttcaaagatgccttcatggccatagggctcacgaaaagggttctatcgcccagcagctcccagctcataggattcaacgaaacaacgcttatcccaatgggaaaagtacgacttcctatcaccctatgcccagacaccccacagagcactttcaaatactgcacctttgtagtagtagatttcccgacagcgtacaatgccatccttggccgaccggccttggtcgattttggagcaatcacctccatccgacacttatgcctcaaattccctacccgggaagccagagtggggacgatgaggggaaaccaaggagaggcaaggaaatgctacaatgttgcaattcacttgtcggtactgatagtgtaaaggggtgaagagccaaaagtgatggaacaagatgagttggatccccacgtgggatccgaaacagctgtagaacctatggaggacaccaaggaagtaagtgtgtgcgaccttgactccactaagtttatccgtctaggaaagaacctagagccggaggaaagaagcaagatcattgaaacattaaaggcagccacagatgttttcacgtggtgccaagaccatgtgatacccatgtcttaaatgttaacccagacatgcctccggtgcagcaaaagcgacgtcctcttgatccagtaaaagcagacgccttagagaatgaggtggataagctgttaaccaatggcctaatccgggatgtgtacaacctggaatggctggctaatccggtgttggtacccaaactgaatgggacgtggcgtgtttgtatagatttcactgatctcaacaaggcttgcccaaaagattgcttccctttgcctcaaattgatcaaatggtggatgccacctcaggattcaagctgctgtccttcatggacgcgtactccggatacaaccagatgaagatgaatgtcgcagatcaatattgtactagcttcaggactgacaaaggggtatactgttacctggtcatgcccttcagattaaaaaatgtttgtgccacttatcaaagaatggttaaccgaatgtttaaaggcctcttgggaagaaatatggaggtatacgtagatgacatgctagttaaatctaagacatgcatgggccatgcagatgacctcatggagtgctttgaagtggtttgaaggtatgtgatgaagcttaatcctaagaagt

SEQ ID NO: 204553 - DNA, 572 bp, Cannabis indica
aatcataaaaactcattaaaaaataaatataaatggaatattatgtataataaataaaattaataaatgcaaaattgacaattgaaaataaatgctaagtatcatttttttaaaagcagataaatgtaattattaatatacatcactgcatgtatttctatgaaaattgaaatgtcttattaatgtaattaataaaaaacttaaagcataaagttattttaattgtaatagttagattttaaatttaaatatatatatatcatatcagggtgggttacgggcagatatttattctcccgccccgcctcaaatatgactcgggtatgaacatttaaactcatatctgtcctcgcctcacccccaaaatttgattcctgccccacccgattagagtcaagtacctgaactgcgggtataattgttatctctatttatagtctcaaaaaaggagctcaattttcaattaaatactttttatgtcgttttattgtattttcatagcaaaacgacgccaataatagaggttggattgaaagttttgtttggacacaaagcagaaaacacgtgaaagt

SEQ ID NO: 204554 - DNA, 1412 bp, Cannabis indica
atgttgggaagaacaccaccgctagcaatggtaacaccgggaagcaattttcccaactcctcattgttcctcacagccaattgaaggtttcttgggttgattctgttcttcttgttgtcacgtgctgcattttcggccaattccaaaacttcaacgccaagatattcaagaacaatagctaagtagatcggagcacggtaccggtacgttgagcgtatcttccctttttcatgaatcgagctatacgtcccattgggaattggagtcctgccgtgacggacttcgtcacagctttttttctctctctgccttttcttcctcctgctcctttggttgctttgccggtttccattgccagcaactttgaaggttttctctagttttttttttttttggaggaaagtactgttttggattttaaatttggtgtggattcagaattatatagggaacggtttgctacgctggctgttaggttatttttagtattaattttagattgagttaagtatattttaattgagttttaacgtgttgagctattttacgcttgttatttttattttgtagatttaaataaaagaagattagaaaatatcagaggaagaaaatagggaaaaaagataaaaatatctcacaaaaagatgatatttaaaatagagaaaattgtgcaagaaaataaagttgaaacttcaagcctaaattcgattatgttctgattagattttagaaaaagtcgaaacatgaaagttctagatctcttctttatctttccggaacatcttgaatcgtccaattctgagcaatatcaagagagttatgaccaaaatgctatcagtcgatgcaacaaaaaactaacctcctcttctaatcctaagtagaatatgttttctaatcctaatagagtaggttttttgcttcagcgatcgttatcttattttattattttttgactataaaagaagtggacttcaatagttttgggcaagcaattcagagggaaatagagaatatatatacgaatttcagagatcaattgcaatgctagagacattcttcagagaattttcagcattcttttcttctctattttcttctcttttcttaaagttaatatgtgtgattttgctttcataaacatgagtagctaaacacttaattagggttagatgaatattgtttgatattgctttatggtattaatatgatttatttttcccccaatttctatgtattccatttcattcgtgcttaactacttttaattgtctgatcaccaattaattgtctatgattttgatgcgagatttgataagtgagtgtcaatcatgctatagtgaaatagaactgaatttcgatataggacgagagcacctgtatggtttagacagcttataggatttctgtgtttt

SEQ ID NO: 204555 - DNA, 760 bp, Cannabis indica
atataatcccattaaggaacctccttctactgtccaccaaagttgaaataaattcttgatgatgcaaaaccaaatggaaagtttcagaaaaatgagaataaaaataataacccacttcgcccaccttcagattcttccaacaaagtcagtcaaaactccaaaaatctcttgctttctctctctctcatacacacactctctctaccttacattcaatatcaaagacttaccctttaaaaagtattgctttgagtttcagaagaacattttgttttcattacaataataacaacaaacaactgaagtaaaaaactatagaagcatcaaagagctgatctgtttatggcccaggataccaaaacaataacaaccataagtaaataaataaataaataatatatataaatacataaaagaatgagaatactcactaggtgaagattcttggagatacccaagtgggtgtgtatttttcttaaaataataaaaatacacaaaatataataataaaatatatggtataaggtttttgcctgaaatacccaagaaaaagtgtctgagaaaccaggaacaccaacaacaacaacaacaacaacaacaacaacaacaacaacaaagactagatatatagttatttgataagaaaggtattaaggtggctgttccctctttatgatatctatgtacctatatatatatagttggttactacaaaaccaaagctgtaatctgggtctttctctgtttagactcttctgta

SEQ ID NO: 204556 - DNA, 985 bp, Cannabis indica
acagttggtaataatgatcaatatactattgctaatataatattacaaatgtttaaatgcatctctctaatatctcgtgtcataattttttgtcattaagtatttatttagttgcttctaagtttattttatgttgttattttaaatttttgcttaattttttaatttatttataaaaatagcattttcatctttttttattttatattttcaaatgtattgcgaaattattttttttacaaaatattttgaataaaaatatattacattaattttcttaaaatttttaataaaaataatttattttgaatttttacatatatatatataagtatgcatctttgagcacttaaagcaactcttaactaacttattgctaatttttagcaatttaagtgaatataaaatattaccaatttaaaatattaaattaaattgtgttaaatgggtatatgtttatttttttatacatctatttttgagttaatgtataattcgtttacaattgtaattcattttcctgagattatttatgtatgtgttgtttttatttattttttaatttgacgcaatatgttgatgcttaattaatttttatattaaagtgaaattattttcatgtttattcgttgttattaaattgttagccaagagaaaaacaatacatgtttatttttttgtgggtacaattggtatacaagtattttgtagttgcttttatatttatgttatagattattagtattattttttttcttacagtttttttttttttcatgtctatgtaatttgcatttagaaatgaagttcttatacaattatttgtttgttattattaagttgtttaatcaaaagaaaattaatatactatatacatatttttatatttgtgtgttatttttatttattttttaagttgatgcaatgtatttatgccaaattaatttttcagtttaaagtgaattgttattgagttgtttattcg

SEQ ID NO: 204557 - DNA, 645 bp, Cannabis indica
aaatattaaccttctaaaaagaaagggaatttctacttacgtattataactcttacgcttccactttcaatgaataacactcttgtctttccgaatataagtttaaggccaaatagtacttgagtagttcgagctactaataagatgttaaaattatcataaagcatctaaaaataaacatttggatagaaattaataatattttgtgttaatttcatacaaacatattttattataggaaatttttcatcttctgatctttagaattgtatttcaatggagcattgttatccgatgcacccatattattcttactgccattttcaatggagcattgctatccgtatgcacccaacataaaatagctttttttttcttatctaggaaaatgatattttctaaaatttaggatttttatttaggatttttacaaaatttatattatttttatattttatttacaaaaatatgatcaggcgtatatttaaatttttatatgggttatgttttgttttggttttgttttttaaatttttactgtaatgttttgagaaaggaacaataagaaggagaagagaaaataagagggagggggttggaagagaacgtggttagaatttttagaggttagggattctagggatg

SEQ ID NO: 204558 - DNA, 2540 bp, Cannabis indica
tttaattaaccgtttatatattacaatatataactgggactcgaactcaggacctctaacttcttcaagatatatcaaatacgttgatatcttttagtatttaatttagtgtctcagttatataactttaccatttcaattaatgtggtaattggtgctgatttgaaacactataactaaaatctaagggtcatatatttgtgagataatccaataatatatatatatatgcttcggctttcctttccaaaaatatatttatatgagcattgctattaaccatcagtgttgcctagcaccttttcgacatgttacgttacgattgactagcgataattagttaaaaactattatattaaactatgtgagacccgatagttagttggaccaataacgatactgacacataggagagtagcattgctttgaagtaatatatattctgatacgtgtgtattcgtaattatcacaatttaatattaaatttctattttaaatttaagaataatcattgagttactcaaattggacggacttattacatacgatgacatttaattactctgaacaacttagtaataatttgatcccattcaaaaatatttaatgcatatcatcgtttaataaatgtgcaatttaaatgtgtaaatctatcattacttaggatttgatcttacccaatgtagtgaaaacattttgattaaataaatatagaaattaatacatatatatacttagtcctgacatatatataggcatataataaaatgcaggattcatacgcattgtgccgagtgttcaagaaaaacgggatatgttcggaagtagaagaacaacaacaacaactactagcacaatgcaacaccaacaataatagcatatcactaatggagagctcaacatcacataattcacatggcggatttatcaatgaatccgataccatgtcacctgacattcctatggcatcgtcgtcttgcatcgagcaagacgacgacaaagatgattcatggatgcagtttatcactgatgatgattcttggtgtcagtctaacacaaccacaaccactactattggagctcacgatgatgtctctcgtcatatctctttcacaaactagctaaattatttattattattattattggtcctattggacgtaaataattttacaattctggggtggatttttgctatttttcttgaataataaaatacaccagtaccatgtgtttctgatgagtacaggtgaaatggaagaaggaaatgggatgaagagaaggaaatgtaagatctatttgattaattatattcttatatatatttattatatatgtttgttaatttgtaatttgtatattaaatatactatctctctaattgggtcttgtatgggttgtaattaattctcttagtctggtttgataattatgcatggcttctatagagtgaaataatttactgaatgctctatagatttccaggttatctgttcgggtgtgatattattaattttattatttagcaggggtcttacacttattttaatttaaaattaattttaattcatataaatgggatctaatatttatttgtaccaataatttggtaatatttcttttaactatttactagagttattaattcttgggcatgcattgaatatatttgagaatattatactattcataaagagcaatatgtatgtgtaatttaacagtgtaattactggatttaagatggaatcatatcatcttaaatttttatacgtaaccttcatttcaaaggaatgaaaaaaataaataaaagaatagaaaaaatgaaaataaagtgaaagtattaaaaaagtaaaagtaaaaaaaatgaagtatatggaagaatgagaagaaaaagactgaaaataaagagaaagaatatatatatggagcagggtacgggtggacatgattaagttcactctaattgagtccgaagttaaattctaattgaattagatcaattattgaatattaatcttaaaatctaattaaaaattaatttaatttaattacattcaatatatattaaaaaattatatttattaaaatataataaaaaaatatatattttaattatatttattttgatggttttttttatttaaattgttaatacttagttgttttatttatttgatttcatgatattttgttatattttattatttgatactatcttaattattttgaacttttaattgtattaaatttgtcaagatgatattttataaaggattaaactaaaatgaagggtgatatatactttatatcatttttcatattttttaattaatattaaaaattaggcgtataatatttaattaagaaaccgatctaatcaaattagtagttggattggattagattttaaggtctaattagaattgataaaaaactactacaaatttgagttttaatggcattgtttagtgacccgcaaacaccctcctaactataggtgtgctatcgtgattttttattaattgtgcaatttgttgcta

SEQ ID NO: 204559 - DNA, 604 bp, Cannabis indica
gtcattttgcatctcagcccattttttttttcatcttgcatcagaatgtctttcttttcatgtcaaaatagaacattcattctactaaaatgataaaaaaattattctataagaatgacattcttatactttaaaatgtaaccaaataaaagaatagaataaaaattagtaaaatttacaaaaagactagaatttaggttaacttttacaaaaatactgtatttttataaaaataacagtaaaataacagtgaaaacttaacatagtatacagtatttatgaaaaaaattctgccccacaataaaaaaaataaaaatgttaaaaattttaatatgtggtgtaaataatcctaaaaactttttcttttctattctattattactttgaaccaaaccccaccttaatttcaagtgattaaaattcaattgagttctaaagtttttttttttttctctttttcaggtgagctcagtccaccaaagttacactcttttaatataccaagagccaaaaaaaaaagatcagctgaatgcaatcgtacgaaggaacaacgcccaattcagaggctactcaacctcgacttccacgaggccttatgtgaacc

SEQ ID NO: 204560 - DNA, 645 bp, Cannabis indica
tatattttttattaaaaatattttgttttgaggtactcattttagcttttcaaattatataataaatataatgtcgacatgtttgaggctaaatctatatatagctcaagtgtttggtgtgttagtttatgagaaagtaaaagaggtttaatttctcattatatgacaaatatataaatataatttcatgtttgtacctgtgattgaaaaaaaccattcacaatttcttaaatttcaagtatttttacgtcattatgtgtaaaaaaatacgtaaacaatacataatgaatactgagtaataagaatttgctttgaaaatgtgttcaactgatcagaataaaaaggttctttaattttccaattccaaagggagaaatgatttagtcctaaaagttaataaaaaaaagagattaaatttatgtggttaagtttacataattatgactaacttagttatgtaaacttttaattaaaacaatgctttttctgacctttagagcattaatttttttttaataataattattaaattacaccaatattatgtttggtactgttaccctttaaaaattatcttacttacgcaactgtagttaataaaggttaaaaaaaaagtagttcataaaaatttaattttaatttaaa

SEQ ID NO: 204561 - DNA, 1433 bp, Cannabis indica
ataaagttataaattttctttttaaaattgtacatgctatggttgaaagtttaattaattttttccaaaaattaatcaaccaaatataatatatcatgctcaatgatttctatagtgaaaatgttttttttagtggaggaacaaatatttttttcaaaacacaacatatttttgtattttgttgttgttttttgtactattaatatatgggtatatgtactttattgttgtgttttgtttttgttcatttattggatgtgtacgatcgaattggtcttatgtttgttgaatttttgagaaatgaactaattcattatgcttcaatttgtttgggatttatatttttcttttcttttctttaacagccatgatttgtgctcttggttaaataagaaatatgaaaatcgtattaaccatatagtcttcttatagaagaaaatgaacacaaattcacaacctcctttttaattacaacacacagtattgagtagttccttccattttaaattttaaaagattactcttaatttattgtgtgtttacaagttataagttactaattaaataaacaaaaataataattaagaaagatcatgcattaataggtacctaattaaataaacaaaaaaaagaagaaaaatagttaataagttcttacagatcaagctaggtaaattaaacaaacttgtgcccatgagaccatcacttctccctccttcaacacttatcctacaaaagtgaaaaaatatacatgttatacatattatatatatatgaaaaagagtttatataattaaaataataatataataataataaattagtgcctgtttacacacatgatgtaaaacactcacattttcataagtcattgctataacaattcttccaaaaacaatgaacgcaaaaacataataaacccttccataaacacatctataatatttcttacgactatgcaccttcttaagatgtcaaagcatagtttcatcatccataatgatcatagttgtatcacctttaaattttttttcacaatatcagtatggagagaataccatacaatacttgccaaccaaatttcacctagaataccaatgatattcagtaaagataaacagattatggtgcattgtattattacgtttacaattccgtatttacactctattgtaaacggcttgaaattcaagagggtaaatagaaaccattcaactatcatcacaattttaaacatttcagcaaattgagattcaaacttcttcaatcttttaacttcatcatcctctagtttcattaagtctttgatctatcataataaattaataaaatgaaagttagataaaatataaatttaaaaataatatagtgatataattatataaattaattttaaatagaattactttttaaacttactaagtatatatata

SEQ ID NO: 204562 - DNA, 541 bp, Cannabis indica
ttggtgattgttacactggttttggatgtaggttgtgattgatcatcattactgtttgtacgcctgagagagagtcagacttgaacgatgctttgatgcagaaatttgacatcaatattgtgtttcgtgtgtgtgttctaacttaacaatttctcaacttgacacaatacagaaacatagtaaagtagagaacatttggcataatctgtaattgctccaaaaagagtaaagtagatacttgtttaatggtcatttcccctccctccgagccgaattctcctcactcactcactccccagtatcaagaaaataatgtgttgttctgaatgcactgcagaattctttgataatctgcttattacttgtttatcaattgatccaaaccgcatgcatgcatgcatgataaatctttggattttcaacatattagatgacatgacaaacaggaagtgcatttctgctagttatgatttcttctccaaataataatcaacctcatcatctccttcctttggatagtttggtaaagctatcctcttgg

SEQ ID NO: 204563 - DNA, 2768 bp, Cannabis indica
ctccaactgagtttggacacttacttttgggaataagagttaacacagtggattcaatctccctaagaagcttacccgagtgcaaaaaagatgttacaacttcacaaatatcagttccaatcaaatcccaattgtcctggaagaagaagctagaatagccatctggtccaggagctttgttgccaggaatatcaaagattgcttgcttgacttcatcaaaagagaacctcttagtaagcaattcttcttgagtattagaaacagtagagccttgcttgataattgactagataacacttcttctatcctgcattctgctgccaagtagaatcttataataatcaagaaacattgctgaaattgaatgaggatcttcagttcttacctctctaacatcagagatagaaagaatacaattttgactccttctagctctaatgctattatgataaaatgatgaattggtatccccatctttgagccacaaacgcttagccttctgctgcaaaaaagacaggtaagttgcatgtaaagatgcatactgacccctagcctcagcttcctgtatctgcaaggactcatcaaatggatcttggcgcaaggcactttgacattcatctaacttaatctttgctctatttgttgcagcaggcagatcaacaaaatgtcgagaatttagctatttgaaaatagcttttagccctttcagctttgttatgacttggaacatctttgtgcctctctcttcttgcttccatctctctgaaaccatattcatatagttaggatgaaaagaccacatcctaaaataacgaaatgattttttcactcctggtacagcctcatgaatagttatcacagctggggaatgctcaaatattccctcattttaaaaaaaaaaaatacctcaccaactgggtgattattcagccaagcagggttagcaagaaccctatctatcttggaacatattctctatttccttgttgtttattgcaccaagtatagaaattgccaacaaacttaacatcttctaagttgcagtcctccacacactctcgaaatgcagtagaacttttaaatctgaccctgctccctattcgttcatccttggcaagaatgtcgttaaagtcaccaagaaccatccatgcatttccactattaagttccttcaaatccctccataaatccttttttcaatcctcatcattgaaaccataaacaaaattcacaaagaactttgttttttatctatggtctcaacaaaaaggtgaatcatttgactagtacactttacaatattgacaataaaggagttaggattccaactaacgataatcccaccacctttatgccaagcactattagaagtgaaacaccatccattgaacatcctcatatataaggctcccaagtttagagccttagctcttgtctcgaggagaccaacgagccctatttttgattactcatcaattatttgactaggtttcgcttttgttggctgtagatccctcggacattccagcttaaaattttatccatgatttagagagggaaatcccgcctctcctgtatcatcttccttcacttgcttcctttgtcctcaatagagtccttcattgattcatctatcagatgctcattccttttatcttccagcagctgaaaagagttactggtagaggcaacaccattagcattctctgccctagtcttccaatcgttaactacaagttgaaaccatcagagtcaacaacttcttttggatttgtcaggttttcattattcttttttcctggattctttgacatctttgagaagaggaccccattgctatttttgtctaggttccttctttctaaaatcgttcgtagcatgccgcatgccattacaatttgcacatatcacaggtttccattcataggaaatggcaactgttgtattacaaccattttcatcttcaaactcaataagctctggaagatcttgtttaatagccacttcaatgagtaccctagagaagtttaacttttctctccttttagtagcctcatcaaccacaactggttttccaatctgccttataatcttgtacagagacttttccccccaatatttcagatctaactcatcaagatgtacccaaattgggaccatcttgatgtcttctttcttaacattgattgagggttcctaaggtttcatcacaactggtcttcgattaaagaagatgtaccgcctgtagaacaacatctctgtctataatggtgttaaacctgattatatagatgccatatgatagcaaccctactctttcaattttatcaagccacattctcctaacaaatccttctataacaacaaggggaggattagctcctaaaacataacacgcaatagaaggtttccagaaatcaacttcatcttgaatatcatcatttgttatcctcactttgttactcgaattgttcgaaaagagacttcgaacaactgaacctgacctcaatacaggaggattagtagtcataccttgagagatcttagtagagcattgctcattagcctccaagaaatgcactaaatcctttctgatatcatcctgctgaacaattgacttaagaaaggatttaggggataatggagcaggttactgaaattctagaggtaacgctccaatttcatcagtcgaatcttcatcttcaacatccaaaaattcaatgggagttattcctagaactgcatccattgaattagttttctaaaca

SEQ ID NO: 204564 - DNA, 1891 bp, Cannabis indica
aaagatataaagaagaccaaaatactaaaccaaagtggtatttggttgaaaaaaataagaatcaaatcgaataataaaatttaaaacacaaaaaaaattaataaaaaaaattgttaattttttttttcatctaatattagaatggtctctcctttaatgtaaaatgaaataatcattctactaaaatgatagaaaaattattccattaaaatgacatttaaatattttaaaatataaccaaataaagaaaaataaatgaaataaatattgtttcattttcattcaatttacattttaaatggctattattgttttgagcaataataaataaataaatttaaattaagaaaaactttaataaataaaattaagccagactttcattaatcctggccattgatgttagtgtgtgcatgtgcttatctgaatttatatgatttatcttttattaattattttttagtttcatattattatttatcatgtaaggttacacaaacatttcatattattcttctctctaaaaaaaataaccattaatgtcttattatatgctaaattttgaaacacatcttaaccgtccaattccatacaatgtgtaacccacaatagcaaaaaagaaatttaattagttaccatatttcattattaacatttattcccccattgaagctcttttaccaccttctctataatatttgtaaataaatagtaccacaaagtatactatgaagggcacaaaaagtattatttgggatatatattctcccattctagcacactatcgctagtttctctccctagctcttgttttttctttttttggctcaagccaagccatgacgagaaagaaggtgaagttagcttacatcaacaatgactcctctcgaaaagccacttataagaagagaaagaaaggtctcatgaagaaggtaagcgagctgagcacactgtgcggtgtagatgcatgtgcaatcatttacaacccatatgatactcagcctgaggtgtatccatctccagcaggggtgcaccgtatagtgacaaaattcaagaagatgcccgagatagagcagagcaagaagatggtgaaccaagaaactttcttgaagcaaaagattagtaaggtgagcgagcaagtgaagaagctgaagaaagagaatcgtgacaaggagatgaatcgactcttatatggcaatctctctggtaagatgaacctccaaggcttaactgttacagatttgaatgatctcacttggctcattgaccagaatttgaaggatatcaataagagaatggaaaaaatagctaaagatacaaagtctgctcggatggccgctgctgctgcagctgcagcaacaatgcctccactcatgaatggggaagtgaaagtcaatgtagctgctaatctgcggcaactaacattaatggccataacgaggccagtgcagaggcagcgattaaggggagactcgaaccctcaaactcaaactaatattaataataataatccaatgagatttgggggaagagacgtgatttttccattaggaaacaacaacaaaaataattgggctaataaccacttcacatgaactttaactaagttgtttagccatggtgattatttgtgtttcatttgtcttagttcttattctcatgatgagttatttgtgtttggtgtgttttttattctcttgttgccggtcacatcgtgttaatttatttcatgtttttcaattaataattatatgtgttattagtgttcttattatgtaattttcaataatattttttataagttttttttgttattgcattttttatatataaatcattccaaaagtcaaaataatgtaatttattcaattatctaaaactaaattttttc

SEQ ID NO: 204565 - DNA, 808 bp, Cannabis indica
gaccatattgatatatttatataagtgtgtgttaaacttaagttagacaataatccagattccagacctatttttttttttttaattagagaatagtgtactagtgacacagtaaattcaaactgcagatataattttttatttttttttaaaagaaattacatatatataaatataaaaaaaaaacaaaaaatgaaaagggcacattgtatttacacaaagtataattcaaaattttttttaatgtgccaaaaatcgataaaaaaaatttatttcacgcgcgtataaaatttactgatttgtgagaattcttttttatatcaatgaaattaatttattacttataaaaagaattatgaatacgacggttattataatactaatttttttatacggtgatacataacgcaaatatatgaaacttactaaatctgtatatgtatacatactaatttctcttgaaatttgttaattaattatattttttctacaaaaatattggtggaaaatgttaaataataataatatatacatcggcatatacctatatatgtaaaataatataatttctctatacctaacaaaataaaaatttacgattatattgatattgtatataaattattacaatttagttgctttgtaattattatattaattttatttgaatactaattaatttcataatttggaaagaactatttgtatatgttttggggtttacaatattgttttgcttgttgagattgagatcataggtccatatatatataatcttctatctaataatcattacaaaaaaaaaaaa

SEQ ID NO: 204566 - DNA, 1623 bp, Cannabis indica
tttttttatttttttcttaggctaaaactctttacatttatgcctcaaatttattaaaaaaaaatagcttaagatagttttacccttaattactcttccagctttattattaatgttatgatggttattaatattaaattaaaccctttatttttatgtcacaagaataattattccttttttagaaataagttatacattttgtattatttcaaaaaaaaacatatggtttgaatttttatttaataaaaagagagttcgaacatattatttttgcaaaacattgacactttaaaattaatgatctatatatgtgcacctaaaacatttaatcagacacttttttatatatatttatggatttttttttgtgtaattacatttgaactttttgttttaagaaaaaaaaccttctttttctttttttttttttgtaatagaaaaccttcttttaacatgtcattattttgtaaaaaaaattgtaaatttatatttttgtaatttttttgttcatatttataaatatacattataaactagcttaatgatgatgagattaatttactaataattatgatgttatattttattatggatcagatagtcatagatagttttgaagagattcaagggagcaagtggaatcatcatcatcatcatcaggcatggctatgactactgtggataataatattaatggagtttatggtagtaatactaataataactactcatcatcaatgttaattactcatcatcatcaacaacaacaacatcatcatcaacaacaacaacatcatcatcatcaacaacaacatcatcatcatcatccacagccatattataatccattactacaaggacaaccaatcccaacaccaaataatcatcatggaagaaatgttaatggtttttcactacaatagttaccatttttttttctcattttttttatgatatttttcatcattagttgaggcatacattattattattttgttatggtaactacttttaattaatttgctacaacatttaatgttcacagatgaaagaaaacatatattcttttatttttattattctgttattttatttgtactatatagtactgcctcttataaattttttttctttttttacattattattattattcaaagttttatttgcacataatcaataagttgtaattaactaagttttattattttgaattaatacatctcttaaaattatattgactaaatgtaccaatatgggctcaaaacattttcttgaaagatatttgtgtaaataacacatttgaggtaaaaggtaattagttatatatactctaaatttttttcagatatattttttaacttctcaccaaaataattttttaaaaaaacaacaatatttttgtaaatttattttgtcaaaaaagcataataatacatttgcaaaacttacatataaaaataattccaaataaaacaacatatatataattttccatacacgcttatattgtacacagtcgactctatatatagtacactactaattaaattaatagtcattttaacataatttaaattaatagttaaaaaaggtaatgtaattggaaattaattatag

SEQ ID NO: 204567 - DNA, 661 bp, Cannabis indica
tatatatataaaaatttgatttttatatgtattatctttaaaatacgtattttattcatgatatcatcactttattcaaacgttattatctttctacactaaaggataaaatttatgagtactttttattaataaaatttgttgtgtaataaaacataatcaattaatcattaaaaaaaattaattaatattattaaaaaaatgaatactacttaatacctttaaatcactatctacaattagcggcatacctaaaattaatattaaagaggacgaaaaataaactaaatattaaaaatgaagatgattttattagaatttgaacttttgatttctataacatatgtaagacagtttaatcatgttaaaattattattatgtttatatttattattttcaattacaaatatatattgtaactcacaaaaataaatatatattctttcttgtttttttagatggacgactgctccttctcatggaaattacactttatacattttttatattgtcttcttttacgtttattctcttttttaaagtctctcttaccttttttttaaacattatattaattttgctcctgccactttaagagactctccatgtgagtctcttatttcaggatattttgagtatataaaaagatgtatatttcaa

SEQ ID NO: 204568 - DNA, 789 bp, Cannabis indica
catttttcactagtgatgaatttttttttacttgataaatgatcactatcttaataattttgcaatatcatcagtaaatacattgtttgtaaaaaaaaataaacaaatacaaaaaatgcaaactaaataattatcattcaataattttaaataattaataatatctctaaaaacaaaacgagacccagagaaaacacattaacaaactagtctttcacaactttaagaggtgtttaatttatgatcaaatcttgaaatacaatgtgttgccacttgtacttttaaaagctacataaatattcaaagttaaaaaaaaaaaaaaaaaaagaacatataaaatagatattaccatcacatatatgtaaataaatattacctattgtctatcattttcaagttgatgaagttcaaaatatggtttcttgtaaagaatgaatgtgtctagacatcataaaacaaacaattataattatatttataagaaaattctatggtagatacatctattttgtcctcataacatacagacatagtttttacccttgatgtacatgacttttgaatgtacaaataatataatatgtacttgtgtgtagtaaattataaatttgggaaagttaagattttgaaattataaaaactcctgacataatataaaatattgattaaaaaattcttatacattgtttctttctatgtttaaatcacattcattcactgtagcagcaaaaaaaaggttttatttttctagcaattcatagaaatcttaggatgattgaagcttagctt

SEQ ID NO: 204569 - DNA, 1061 bp, Cannabis indica
gcgagcaagcaatgtttcaaacagcttgcgttgcatattgcttccaacttccttgacaggggctgcgagtagttggtttgacaaattcaccaactattccataacatcctggaaaaaattatcgaaggatttcaaaaagcgatttcaagctgcaagagatcatcaaccagaggcttcatctttgactaacatcgagcagcaaccaggagagtcccttaaaagcatacttgagtcgcttcagtacagctgcagcaaaagtcagaaacttgaatgatagtatttaattaacacctcgccagactagaattacaactgatttacataagtagttaactgtaataaaattcattaattatgtatttttgtcaccatattctttacaattgactataataaataaaattaatggcactttaccaaactataactgaaatcataataattaatggaagaaatgaatcggtttaaaatagaaaataatcgaaaataatattttactatgttgtttcccaaactgtacaaaaaaaaaaatcaaaattatattatttatttacataactagaaaggtaatcagatattttaatttgacaaaattgtaattgttaaaatatgtaataattttttgtttatagatttttaaaaggcatatttgtctttttcaattttaattaataaaattaaaataaattaaattaggaaagagaaaggtattttctataaaaatggggggagaacatttccctttattttcttcttaatttgtgcgggctccactactttatttttttctaaaatttagtagacaattgtatgagaataaatattaaacaattgattcctattccctctaagtaaatataaatagagaattttattgtaattattattttttaattaatattataagaaaattctacgatgtaccctttatctgttttgaaatttatgagaatttttaatctatttttttcatggtcctgtacgttaaagttatttaagatattttataaaattttgagaggtttgaaaaagttaagcatattaaaaataaggttcaaata

SEQ ID NO: 204570 - DNA, 1561 bp, Cannabis indica
ttgttgttttcatgttatttttactaaaagccgtaaaaatatataaaaaaaaaaaattcttcaaacgcaaacgtaaaaatgtaattttttttacaaaaaagagtatcttatataattatcccaaatgtaaatgtatttcatttaacaatatttaaataattaattatattttgttcgattttaaaaaactcatgtaaaatttatatttatttttaataattttttaatgtcaaaactagaagtaagtttttttaatagaaagaattcataaacttaatgtaattattaaatttttggggaattttaaaaaatactcttttttatattttatttataattttaccatctaaaattttttatttacaaaagtacgcttttaaagttttaaatttacaataatacttttttatcagaaaaaatacgaaaacaactaaaaaataataataaaaatcaatcacacaacaactatacaacaacaaaaaataatcaaaaaaaaaaaaaaaaaaaaacctaatgacaactataatacaaaatatcatgttaagagaaatgctaatcaagttgcacgtggattagcaaaatatcctctaaagttggatggaacaaatttcctatccaattttctcttttgttgtaaatgacttttgatttataataacaatatattttctaaaaaaaaaataataaagttatttataatactattttttaaagatatttataaaattattatactatttaaatatatatattattaaatttgattgtatttgtagtattttaaaaatgctattatatgatactttaataagaaatatataattttaaaaaaatatatataaataatgaaatttataatttgctatttcagatacgaaatcaattgctttgtttatgtttaggagtttcgatttaggatactagtcatggtggtggtgtgaataatgggatagtagtggtggtaacaatagagtggtaaaagtggtggtggtaacaatttgatggtgacaatgataacggtggatacaaaaaaaggaaaaagatgaacaaaaagaaaaataaaaagggaaaaaaagagaaaaaaatatcttttcaaaaagaatctcttttaaatcttttttaaattattaatattatgtatactaataaaatttatacttatatacacagtagtagtccatttgaacacataatcgaccaaatggacagaaaaagtacatatcgaaacgattgtgaaagttggggagttcagccttaatttttctaagatagtaaaatataaaaatacactatctttttggcatttcatttagagatgttctaagatatttttgccgttacttttttattaagatcatatatatataataattataaatattaatggagtttcttctcaaacatctatcttttatatcttttatataatgttatagatgttaaagattaggtggaaaaaaaaaagaatttttagaatttataagatattatgggtgaagttggaaagtgtagtttctaaaaaaatatttttgagaccttataagtagaagtattttttttt

SEQ ID NO: 204571 - DNA, 777 bp, Cannabis indica
tgttcagtagtagtgtttatatagtgataaataggtaacctttaggtttggatggttgcttgctcctaaagtaagcaacaatatcaaaaccattgttaagcctgatatcaatatcatcttttattcattagacatcacaacacaacactgtattgggtgagctagctatcaatgtgaacttgtacgcaacatagtttgaatgtttaataggcaaaatttgttttacctgacacttggaaatgatagacaataataggcaaaattctccaccgagcaatgataaagaaatattaataaccataatgttgaaaaatagcgacggctagaaaaatccctttaaccaagtccccaagcaaatcgtaatcatatctaacagtgtagtactaaagtgagcttgtcaaaaaaggaacagtgtatctttgaagtaaaaacaaatgcattagaattaggagagccatagaaacacaatatacagtaccattaagagttaaccatggatcctgaggctgagcagagaccagagatagcaccgagctgaggagaagataaaggaagagtagagcctgtgttgtacattgccggataatagatctttcgaaagaagtacttgacctcacttctctgaccctcaacaataggaatttgaatgttctacatggctaatattgccatgccacaaagctatattgccttctggtcaaaatttaatagttagtacatcctatcaaaatacatcctccaaatataaattcaattttttctcaaacaataggcatg

SEQ ID NO: 204572 - DNA, 1223 bp, Cannabis indica
caacaaatatgaataacaaaaagtggtcatttgtgcccacaaaacacttagcttccacctcaatatttgcctggcattcccataatgcacgatacaccttctcctgatgatcaccataacaatgcccataataaggtttcacaacgactcctctcttagataaagcatgattcgtaggaatccaagactagcaaatttattaaacaaaatgttttacctttgacggaagctttaatttacataaaaatttctaccagtgttccaaatattgagtattagattgtgttacctcctcctgaatatcagctgccactctataccctcttgatagaatactctttatgtttgctataatgccacctaattttatcctccaaatcccaaccttcacttaagattttaaggatgatctctgtatcttcctcattaatcacatctcgaacgaagtcatcatcataagtcccattctcctttaaattgatagcattgagttgatccagaattggtggtcaatcataaattttaaaactcagtggttgtggcacccatctgttggtttttacagttcatatcaaagtcgcaggggaagcatctttagttttataaaactattttagattgaatctgacatgaaccataatcccaagatctcatcaaaattacagagattaaatctaaactacaagaataaggattttatctcttgaagcctattagaggatccttgtatcttttcgtatatccaatccaattataaatataaacttgttgaagatttcataccacaatattctaaatcaacctcaacactcaggataaaagtgagcttataagattgataagatgaatttcttttcgcactcaactcgtgagacactataacctgatatgggagaaaatgccaaacctttagagagagagagttcaactcttttaggattttaggattgagaaatatatcgtatattttttaattttttaaagattgtatttgtttctcataatacgtattatctatatatatatatcatatatatattaaaactttttttaatccattataaaataatagataatattattttaaatttgacattcaaaataatataatataactgaataacagaatcagggtatacctttattattttatattatcctttaattttaaatacattatcttataacatatttaattcaaataattaaaagataattattat

SEQ ID NO: 204573 - DNA, 786 bp, Cannabis indica
gaactcaataattttacatttaatttatatgaaatatattattcaatatctctcaaaataatagctatttttactcactaattttaaactattattgtcacaacccgtgccatttgtaatgagtacatatgatgttcttattttgtgctcatttcattatttattaattgaaaaataagaagaaagtcaaatatatatatatatatcatcgtcaaccatgatctaatgagtacatatctttttacagaaatttagaaataattaggagtataagttaatgttgttcttattggaattacttttttaaatttgttgggtggaactgtgtacccgggcgctgttgaatggttttttctacaaaaggaaacagtatgagagtatatttatttattttgaaaatagtttaattagaatagaaaataatatgtatgaattatgaatatatatatataggtgtagagttgaccaagtactattccaatgtccactgtggaatttagttagtcaacttttcacatgtggccgtctactaaaacatacctcatccctcagtggacactatctcaccaaaacgtttttttttatttatttgatcattaagaattgtaataaaataatcagtattatattattattattattggtgtaattaaatattaatttttatataatttaagaaaataatttttaaaaatattattaattaattgtaaaatattacctataaaaaatattaaacactgcgaataaaaaaaataaaacattttaatttgtgtctattctaat

SEQ ID NO: 204574 - DNA, 745 bp, Cannabis indica
aaataattaataaaaaaaataaatttaacttatatttattttaatatataaaaaagaatttttcctttttgaaagtagataaaaaagatttaaaattaaagaacagattattcaactaaaaaaaatgaaaaactaataaaaatttcttgtatctctcttaattccctctctttcttcttccctttcttcatctgtacatttttttttttcagtttcttcaattttttttgaacggtcttctgcactctcaaactctctctcgcataatgttcacaacttttcaactgccactcactatttttatcgacgaaaaatctctccaaaactaaatatgcaactccaacactcagatgccacaaaaatccaaaaaaattccagatgtaagatatcaaaacgcgcagaagaaactccaccatttttaccagcgaaggttctcggtggtctagctttgtagcgttttgggttgcgggcgtttgggtttgaggggttcgcggggaaatctcagattgaatgggattttttgtattcataaataagtagagttttttttttatatatattttaactcatttcaaaccgtgagtttcaaatttcaaatgggggtttcaattttgatgatgataatgtacaatcataaaagagtttattgtatttttatttatttatttattttgtctcagaacccactgagatttaaaacaaataaaaaaaaaccatgttattttttttgggggtaaatagcgac

SEQ ID NO: 204575 - DNA, 1032 bp, Cannabis indica
tctctctctctctctctaacaatagttatactcctacaatttttcattaacataaaaaataaagcaaaacccatttttctctccccatccattttagcttttctgctaaatcatatttactcagtcatgaaattataaaagaaggcctcacctagtgatgagcttatttcattttgacattttttttttttgctgaatgacaaattaattggcttagccttttaatagtataaaggggtgtagtattttgcttaaaagtacgcagaaaagtagaggggcttaacaaaaaggatccagtggacataaaagctaaaaggaaatggaacggatatacctaatgaaaaatgatgctgaagtttttgaaatgtgtttattaacctatataccgtattaagtttcttctcccaaaaattaaaaaatacaataaaagtatcaagtttcttctctttgttttatgctaattatttctctataattttgtctgcaggaatttggactgatagacaagaaggagcttgcaccactccaagaacttattgaatcaattgttccttactaaacaggttctgcgtatccccggatttaacttatctcggggacacgtgattaatgttaaataaatactgatcatcagtatgtaacttggcagtgttctatgtagcttaacattataagttgatgttcatatgctctgtgtgtcttatctatttattatcttctttacttaaaaaaggaaagaaagaatttagatttgagctaaacgtctttgttgcttgaggtgttgcaatgtagaaatggccgaagactgcctgctttacagccaccaaacttgtacaaagataatttcttgtatttgtttgatgtagattaaggagtgttgatctgatctacaacaattgttgttatgccaaggttaggccaattatatgaatttatgaagtacattccaaagttcaattgtgaaattttgctttctttctattagctactgcatcatcattattattgggtaattcccaccccaactgttcc

SEQ ID NO: 204576 - DNA, 1181 bp, Cannabis indica
catctttatggttcgctctgtacagctgaaggcttagtgcatgtggtatttttgtaaatatttgtatgtggactgtataaatgtttaatgggccggcccaaagtattttttgtaatttttttttccttttttgtattttttttgtttttttccctaaaaaataacactatttgtgacaaaatattttagttactatatttttttaccaccgactttcagtgactaaaaaaaaaaatttagagtgactaattaatgaattttaatagactaaaaattttagtcattgaaaaagagttttcttgtagtctaactaaaatagtgggaaaatgattccattgaaatgagattttaatactttaatatacaattaaataaaaaaaaatgaaaattatatttcatttcattacatcaaagcaaaccctacctaactattcatgtaactgcgagtagatattattcacaacctatttaaaactccgacaactaatacagtttcactttcgaaatgacctatgtatatgaaaacttaaatcgttatggcagagaaataatttcttgtttactttttttctcttaatatatatatatcaacaaaaacgtcgagatgctaatatatcagcatctgaggaaggatctgagatgatactggtagacccaataccagtagtattattgatattaccataaatatcattgttgttgttattatatggtagcactactgtattggcctgcatccaatccatttgtacattgctgggaatcacataacccgtacttatcatagctttattatcttcaatttgatgttcgttttgctcaaactgtttaatcgccaaagcttgacccgagttgtggtattgcgcctcacccacgctaatatcacctgtaaatatataattacaattattataattcattaaaaaaataataacaatttcaaatattcagttttcaaatttttttaataaaaacatttttgtctactaaatctaaatctaaatgagtcagggaattgctgcgataaagtatgttgtgcggacgtgtcaatttattagccaatcgtattttttaatacgcacggatcacattatattatatataataataacaataatataaatgtaaccaaaatagatcgattatataattattttcatatacacacaccttgtgttaat

SEQ ID NO: 204577 - DNA, 1108 bp, Cannabis indica
acaattacaaagtcatctaaaaagtccttgaacactcggttcattaggtccatgaatgcttccagagcatttgctaacctgaaggacattgccaaaaatttatagtatccataccgtgtatgaaaagctatcttgggaatatcctcatcccgaatcctcagctagtgataaccagatcaaagatcgatcttggaaaagacaatctttcccatgtagttgatcaaacagatcatctatccttggaagaggatacttgttctttactgttaatttattcaattctcgataatcaatacacatctgtaaggttccatccttattcttcacaaaaaaaaactagtgcactcgaaggtgaggtactcggtctagtgaattttaaatccaacagtccctgtaactcctactttggtggtaaccccggtaactcctctggaaagacatacagaaattctcgaaccattggaacatgttttggtaccattggtgttttctttgcagtatccaccacactggctaggaaacagatacatccatcccataactaatctctttccttaagcaccaagattcatggaatttgggatccttaaatctttcccacaaacacgaatgggtcctcaccctccggttcaaaagttaccatctttcttttacaattaatggttgaattatactttgcaagccagtccattcccagtatatcatcaaaatcctctaaattcagttcaatcaaatcaactgacaattccaagagagagagagaggcgggtgttgagaaatgagagggttagttttgagtttaatgaaaaattaacctattctacaaactttgttacacttaatttagggttaaaattttggcccaatttatgcataataaatcaaattttctttatgttattgtgggttcattttgttctatgtgttacattttaaaatgatttatcaaatttcccaaattatattgttaaataattttttgagatgtttgggttactgtattattcacttttgctttgctttagaaagaacaaaaaaactaaataaataattgattagctacaaaatatatcaaacaacatgagtaatgcatgcgaatgacagtggg

SEQ ID NO: 204578 - DNA, 827 bp, Cannabis indica
ccccaaaattggacctggaccccggtctaagtctgggtccggggttcgagtatgagtttgtgttttggggtctgggtctggggctgggtttgggtttgggtcggagtccggattcggggtctaatctgaggttggattggtttatggcatggtatggtgtagaatattgtttttttcagtaaaaaaaaaaatctaaaaaatagctttgaaaaacctaagccaaacaccattgaattttaaaaatgataaaaaactatttcatgttctcacttttgaaaatacaatttaaaactaaaaattgaaaacacagtcaaacaaccactttattttttgagctttttctatttataaaaaatgcagttttattttaaaaaaatggacacaaagataatttactatgtaactagtaacataaaaagtaattgaatgagtcaccctaatgaaatgagttaagaagaaacaatacttctaaaaatattgttataaggcaccaataatagctagtaccacatggtagcgtcttataattgtttagcgatattttataaaaattatatgaaacttgatacttaattgtatcaatatcgagatgatatattggtcatgaggcttgaactcacactattgtgtaatgtatcatacactcaatcaatacacttaattttacttaaataaaagtctaatgaagcatttcatcttttattttgggcttccgaaaaattgaagggtattaataccactgatattttttaatatttttccgaggttggagcaacccttttaagttggagattaacagtagtattaaaagaaaaaagaaaaaacta

SEQ ID NO: 204579 - DNA, 1200 bp, Cannabis indica
taattacatagtgtaattacaccaaactcttattgggcatgagaattggagagtgtaattaaagtttctcaattacctcaaattatacagtacagtgcaattacatgattaaacaaacacacaaaactgtataattatttaccattacactcaaatccaattccctcttagatttccaaatgcgtcttaagaatgtttaatatcgaatttgaaatgaatatataaaagtaaattttttattaaaaaattattgtctaaagttttaaatataaaattgttaattgtaatttctattggcaatggaaccacaaaataaaaggaaatatatttcttaaattatttttaataagttctaaaaggttatcaacaagatatgttttctttccaaagaaagtattattacaaggtgaaaatataactacttcaatatataagatcttgtttgcatgttgaaatcaaaaaaaattcatctctgacattctgggtccatgaagtgattcttcaatgaaagaaatctttaaaggatcattttcataaaggatggaacattagctcgaattaaatcttctaatttgatgttaatgatgtctcttggaactaaaatagtagattccttccacactccattcaccatctctaacaacctataccaccataacacaaataaaaaatattagcggttatgttgtaaacacacactcaaaacaaaactttagtagattttacctcatatagcaataaacaactaaattaaactagaaaccattaagataaaataaatagataaatcacaactaggtttatattggttcgacctaattaatggcaagctccagttcttccaagaggttccactatgagaaaatatctcagatcgatcggagaacatatcatgattgcataggacatagatgagaaccaaagaacccatttacattgaagaacttgaacaatcactcaaccctcacaactctcttctcacatcccatacaaatctcttaaaagtatttcccaaacccctactctcaattctctctctagaatctctgctgctatctctctcctattttcccatttcctttaagttaatgaaaatgaggctagacttcaaaagatataggtattgatctgcaacaaaaaatacctagaaagacatcatttaatgaatctgtaacaaatcttaacaactcaaaccaatct

SEQ ID NO: 204580 - DNA, 1032 bp, Cannabis indica
gtcaactttaacgaacaaatcaaggaacacggataatacatttaagctgaacttaaccatcttaggattgatctattgacctaagatcaactaagtgatattgaattagaaagatataacagtaaatttatgatatcttatctaatatcaatatcggtcaagtccgatgtatactccatacatccgatactaacatactttgccaatatcctgaaaatgacataccacttatctaaggtgtaagtaaaatttatctctaattatcatgtaagtataaattcattgtactgacaaatcagaggacttaatactttaaagcatataatcacaatcactttttagtgtgatggcatcactgtaattgtaaataactatatgttctagatttaatagaatttatacattaaacatataattatgaaagtaatcatgtgaaccatgcaacataaaatgatttctgatcttttattaattagtaaatcaaattatattaaaatcaattttatttaggacataaaatttcaacatccaaaggttagcctgacctcgcagtcactttttagcaatgcacaccgcttagtaaaatggtcataactctatcaatttttatccaaatgacacgattcaagtgcaattaaagctattttcaagatggatctaattaagtgtgtatcatacctccaccacaatattccaaagtttcgagtctcaaaattgactcgcgagttcgtgcaagatttttcagcgactttcatgagaatttttatttttatttttattgtaagttagttggaacttcgtctctataaaaggagagctccaataactcattatccacactttccattctctctacaaggacagggtttctctctcttcacacattatctcttaaaaaactgtgaagtgaggttagattgtcatttatttttcttgagttttcttgtaaggcacttattatttgtgataataaaagcttgaggtagacgtagctttattagcatcgcgatataggcagggacggacccatta

SEQ ID NO: 204581 - DNA, 1153 bp, Cannabis indica
gattctgagttatgcccaggtatgttgcggggaatggagttttacataattgggcgtcatactgacagtcctgtctgaacttaaacctgtcagcaaggtagttctttatttattttaaacctttaagagttttttttttttttggtttttgagatattaaaccttaagagttatctatgtcaagtatatggaatttttggggaaaaaaaatcatgatatatgcacacacaattaacacacttatgtggcggcaagtaatttcaactaatcatatttatttaagatgtgtctcacctatcaaagtaacttcccacataagtgtgtatcatgtttgtgtgtgatttatgtaaaaacaatacaaaaaaaagaaccttccttattttgtactattgtgatttttgcaggtaactaaaggtgggtatttggaagttggtgtccaaacatatggaggtggcttgtggcacacatggtttgatcgagacctgacacttgcgggaagagtgatcgtaagggaagaaaactgtggagttgtttcatactcgcataaacttttaagaattgaggagcctataatgcggattccaacccttgcaattcacttagacaggttctcttgttatttcacatttgctatgtgatatatttagttgtcaagtgatttatgatcaagattgaaacttcagaactgtattcttaagcaaacctgccattgtcctccatcaccttgagcagataatcccataatgaatttgtccatgtgctgtcctgtggcaggggtactgatggttttaaggtgaacactcagacccatcttctacctgtcttagcaacagcaattaaggtatagttatacttagacacgcttatatgtgccatttaattggtctgaatattaatcttacatttgagttcatattctgtaagtgtcaaatagtagcactaccacgtttaccattgattgattactattttccaatagcaaaacaatatggaaatatttctcagaacacaaagccatcttggaagatttggagattgggactaacttaccacaataacgatgttacattttaactttagatatcataacacaatatatttttgaaaatgtgattcttcatttggattgttcgaaaaacataatttagttccc

SEQ ID NO: 204582 - DNA, 1476 bp, Cannabis indica
aattatgggactaaaagtacgatcataatgaatatattaaacaaattttatacttttctttttctttgaaaatgatttttctctttagaatattttttttttgaacaatctttagaatattattagttagtctattgtgaaaaagggcatattaattataattgggggggagctttgtcttaatcattgttataaattataagatcatataatttataatttgacatcattcatgattatatatgaaacatctgggtccttttcttgctcgattgcttatattcttctttttattaattatatcacaaatagattattattgtttatttaatccaacatttataacatgatcaaacaagggtaggcatgcaaaagtaaaaaaaaatccaatataataataataataataataatgttttttgcatttataaactaataatgttgcattattctataagaatctcaaagtttggtaataacactttattttgtatattttgccctaaaagttaaatgaaaggtaaatattatagggaatgtatataatagatcaaaggggtatttcggtagatttattgtcaacatcaacattaagaatctattttctttttatactcgtatacgttatagttaggatcacttgtaaatttttatacaattttaaataatttgcaatataaggtttaaacaattatttaagacagtcgtgcatgcaacaaaatgtttaaaccttatttttagtattataaattacacacaatttttttaaaatttacatgtagtcataaataactataagtacacgatcatgaaaatatattagactaaaaaactgtcctatacactcaaacagataaaaagtttaccaaaataatcttttaatgtactatagacatacctaatattataatctaacattttttatttttcatttatgtttaagatgatattattaaagtaaatctcttcattaaaatattgtctaacaaatcctaaatagtaaaaaagttggttccaccattgatcacataatagaccaatttaaattaagtgattttgctacaataataatttttatataaatttgagcacatatataagatggtgtttagtttggtgtactgaaataataatggtaataataatataatgatataaaaatggtaataagaattgattataatatttagtttgtagttaaaataaacattgtaataattataaaatattcaagaaaaaaaaggataatatagacttttgactttttttttactataattttataaaaatatattatttttctttttgtaataaagtgtaattataatggagattatattttagtatgtaattatcattataattatattatattataatgaattacaaaagttaaaaaataaataaataatgtaatgaacttatttattatcggtgaactaaatatatgtacgatgaatgttaaaaaaaagactt

SEQ ID NO: 204583 - DNA, 1035 bp, Cannabis indica
taatcatggacattgagataaaaagtaataatcatgatccataatgcagtgaaatcattccattcttatattgttttctgactttcttgtacttttcaagcagcttcttatagctctgctttacatcttcgaatattatctgagagcaaaacctagattttatctgcatgaatacacattcaatctcgtatatgtcttgagccaataatggaaacgagttcatgatttccctaaacggcatgtaacaatcaaggccttcatttgttttgtcacccaaaatctggagccatctaatccgttgaaagggatcttcgtttttttgtaagggcatgttccactttacttaaggcttcagaaaactttgatccagtatcgattttatcaaccaaacagtgaaaaatttccaggttcaaattatgccaatcactggaacatgccgatgacgaaattccagcaaccaaacaagcctttcgaaacgaagtatcagaatcaccaatcagcccaattgctgcatgtaacaaagccacacccacatcatagacagaaccagaacaatgttgccttttctttaggttccaattccacagtgctacatggaaaaatccttcccacctgtgttgcaagtgtaaataaaacaatgaacttaggatgtcaaaatttcacactgaggaaccccgatatacatgcaacacatctttaatgaaagttaatgaaacacgtatgcagttatgccaaataaagacacgttcatgcaataagcatcttctattcaaaagagacaagaggtccagagagttgtctttctgtctagcatcataagctcccatacttgcagcttctcacatgaattgtaggagtgcatccttaaaaggtatggttaccaattcagccaaaaaataaaagtatggtcaccagaattaaaatttcactaatgttaaaatgctcaacaggtagggtttaagtagaatataatcagccaaaataatgttcattaaattataatgaaaagattataattaactttttgtaaaaatt

SEQ ID NO: 204584 - DNA, 2210 bp, Cannabis indica
gagggtctatcgacgagctgaccaacctggtcctttagggactaggacagatcttcccttaccagagggggggacaaacattacctcaaaggtttaatagcaacaacagccagatctcggcagccagtggcatgggggcagccagtgatctcaggctcaacaataacccccatcattcagccttttgttggccagccacctggagaagtgtccttggccggagaggggggaacacttcctccctgagcagagtgagacacccgaaggtcaatcttcaaccgaaaaggcccacggatggaaacacccaaaacggaaatttgagaagtgaaaatgatcacctcagatatctagatacaccaaactccaacaactggtgtggtttacctcctgccgacacattgccaacaacagtaaactgaggagtctcgggcagccaaactctgccgcatgtaggtctggccgaccactaaggagtcacaagtagccagaccctgctctttgtagatctggccagccatggaggagctatgggtggccagaccctgcccaatgcaggtctggctggccatagacagcaacttagtgtaggcatgaccagccaaagtggacacctatacttgggagtggtcggccaggtctacaattcaacacaggtttggctgatattcaccaaacattctctcagagtatggccggtcagaccctgttggacccaaatcgacaaccccctagggagggccagtcagtcaaatccctacaacaacagatccttttgtgcaaacatagttggaccgactcagggttatgattcaaggaataattggtccaaagccttcaggccttgagctagaccggtcaaggggaccaccattctcatcatacataaatgccttgcccttgcccatgttcaagatgccagtatggaaaatgtataccagacgagaagactcattgcgcacatcaaatactttgagatgcaactctatctctagaaggttactgatgacgtgcaatgccacatattcacaaccactttgtcagaaatagctcaacagtggtacttcaaactcatcctaggaagattcaactcttgggctgagttctcttgagaattttacacacaattctcgtctttgagacttgtaccatcatagctagaagaccttatcaaagttaaacaacgacaaggagaacttttgaaggattacatctagaggttcatgaccgaggctacaaaagtcaaaggccttatagaagaggtcaatatacgaccatactgggggggggggcatactcccattgagtgacttctagaaagacatctgaaggatctccaccaacaacgtgaaggagtttcgtgatagagcggatgactttatcaaactcaaagaagccgtacaacaggcccaggcagggcatgtcaataacaagtgatcacgagatgtcctgcagtctcatgacctaccaggtccccatgtacacactagcaactctatccaaactactagttgtaagaacactagaaacaaacgcaacaccaaaaactcaagaaggaacaatggcgaaaatgggaagtttagcacttctcccacgccacaaaatcaaaagaacaaggagtagaagtatacctacttcacccttctaacgaagaaacctgaagccatttttatggctacttagggaacagtcccctacaaaaagccctttcctatcaaaagggagatgaacaaaagggacacgtcgaagttctgttggtatcacaacgactacgaccatgacactaatgagtgtcagaatttgaagagggagattggatacctcataaggcagaaaacaatccccacctgtgtcgttatgtgtagaacgaccaaactcaggcacaaggtgcccagaatggagatccaatgccaccaccagtggtaggaaacttaggggtctttattggcggaccccatatagcgggtgagaccagcaaagctaggaagcgctatgctcaaacacttcatcaagagcctaaaattgatatcctagctgttgaagaaaggggctttaagcaaccaaagcttggaaagcccacgatttcctttatagaagaagatgctgctcaagtcagcttcccgcacaatgaccccctgatcatcactgcacaaatcgggaacatgactatagcaagttgcaagaagatgttgctcaagtcagcttcccgcaca

SEQ ID NO: 204585 - DNA, 533 bp, Cannabis indica
ttattttatttatttttagttttgatacagagaatatataattatatataagtaaatgagaaaatgatatataaaaggccaagttccaacgtacgtagtacagacaggctgtgaccattaatcttaaagttaatagagaaaatataaaatgtgatctgacaccctaacaacgttagggttaatctttaattgggtccatgtgcttcactatctctctctctctctctttctctcttacactactacactttagatatcatattattacattgtcattacagatgtatatatattttactaatactaattgataaaagtaatctatatatagtactatagctactttattctaacttctcctatcactaaataaattaatggatttacacaaatgcactatgcgtgtttgctatacaaacatagaacccgttgtgataatggccaggctaattaatgggttgtattttgcgatatatcactgtatatgtattgttgtaattaataattttatttcaaaaaaaaggtagaaacat

SEQ ID NO: 204586 - DNA, 1401 bp, Cannabis indica
catttttaatgtataaagatatatacgagttactaaaattaaataaaaaattttaaatttaataatctcaatagtttaaggagaatttttaacggcaaaaaaagttccgggtataatttgttacatgtcaaagtttaaagaaaaaaattactaattagcttaaaatatatatatttttacaccaagttatttttaattttaatgatagatagttttaaatagggccgcgtcacttaattgaatgattgagaataactatgcattattatatatcaaaaatatgtataaaaaatcgagtataaaattaaaaaaaaatatttgctatgaaatcatactccataaaaaagatattttgggccaaaatattcaagttataagcagaattgataccatatatataaggatcgaactaacgactaccacctaaacataaatgaaaagtattttttggcgccaaaaaaatatcagctacttaaatataatattgtacataattatttacatatttttattcttaatatccttatttatatcatagtctctcaaaggatagatcttagttaatctttatatataggggatttctgttgtaggacttaatgtattgaacgtaatactaaccaatcagaactttaaaaaggaaaaagtacacgtagctttgttgttattagcttttttccctcttaatttctttagtaattgaagttttagatggacataattatggaatatatagttttgattataatcaaatcaatcctttatttttattaaaatgtgtctttgctagagaggtttcccaagtttatttttttttttcttgttgtttctttgttacgatacatatgcatcaataatcaatgtcagcataagagattgatcattgttataaggtagaagtgatgcttaacggttagcactatctaaaagtggtgtttgtaattgattagtgatattgaataaaagttataataaattatatgaaactcagtatttaattgtactaatagcgatatgatatgttaaaaggtgttatagacactattggtgtcttctatcatttctctaataaatcctataagctatatagatctttcctaagattatctccaatgcaagatgtataatttatgctaaatttagcccaaaatatgcactaaagttatatttagtaggggtgttcatcaaaccgctcaaaccgtttgcaccgcaccacaccgcaaaaaaaatactgtttgaaattctttgcggtgcggtcgtgtttgaatttttcctaaactgcactgtgcggtgcggggtttgcggttttgaattgttaatatgcagttcaaatcgcaccgcaccgcacattataaaatactaatttttatattaatttggtctaatatgtgaatgtctagc

SEQ ID NO: 204587 - DNA, 586 bp, Cannabis indica
gataatatgaatcatttcttatgtatgaaataatatgattcattcaaaattttgttcaaacataattttttttcttatttaatacaatcgcgatccttatacggtttaccaaatgagtggtatactgtattgtgttgtgttgtattctatgatgtttggctatattgtattatttaatacaaactttatttggtattgacttgtatcaataagttgtgtattaaattatactaattaccataaactcaacctcgaactcggtcaggttggggtccatgttcgggtttgggatcaggtttaaggccagggatgaggtagggtccagtctgggtcccgaagtagggcttagtccggggttgggctgagggtggatttgggtctagggtcagggctgggtctagggctagagtcgggtactaggttcgggtttgggtctgcggtaggatcgagtctgtgttcgggtccaggtctaggactggggtctgagttcagaacttggactgggtccggggctagtgtttgacactaggttcgagtcttgggtcgggatcgagtccgggtttggttcgaggccgcgtttagtttg

SEQ ID NO: 204588 - DNA, 1437 bp, Cannabis indica
atattaaaaatctttgcttcttttcagcttattccatataacactaccccaccagaagagctgaaatcagtgtcagctgggagatttagatcaggcaagcaaaacccagtttctttctcattttctaattcttctacgtcttgtggcggatgtggttgagcaacaagttgattgcgttgatccgcctctgtttgctgcgagattgaaccgtgtttactaactcctatcgcgtctacttgttctgctcggtaactaatttctgtcttaactttttgtggagaatccaattcaagctgaaatgggaaaaacaaagaaagaaagaaagaattgtcagaatcttatatccttcttacactgcaactatacaaatctacaaatgacatttgtcacaccttaaatctgttgaagttttcttttgtggctttttgtttctcaatattgagaagcatggttgcaatttcctgttcagtgaaagaatgtgagaaacaacagccacacatacttttatagaaagggatatatttatgtatattatataaatgaaagaatataatatagtgtgtgaaacacatacagttttcaactttttcctttccctcaatagcaaagtctcctcctctttaagttcagctaatgtctgccattaaaacaaaaaacaaggcattttatgttacttcaattttactcaaaagcaagataaaaaaaaaaaaaaacgatttagatctacctaataagtaaaaacaataaagaataaaagtagaacagaagtgattataatgttttatgacagcaaaagcaagacacaattaaagttatatcataataaaaggttatgctattctgttttcctctttttactgttggttaaaatatagtaatagtaatagattaattttattaccttcttctttcttggtctcttggaagtagtgggttcacctttgacagaagaaacctgttcacataaccccaacatttatcaatcactaatttaaatgtaactagttaaaaaaccacacaaaaaaacaaaaattcagtgaccaaatagtgaaaacacatttttgcatattcacattatgaccagtgaccacaaaccacttcaaataagaaggcaaattcaaacataaagtcaaccctccatctcaaaatgttgacttttcaatgtttaatacactaacgtcggtttccaataaagcaagaaccctaatactgttagttaataatattttgaaggttgtaataccaataacaaacaagtcatcttgccttgcataataccccaatattccatttacaattctatctggtcccacactataataactccatcacaaaagaaaaatatacaaatataaaaacaaacaaaaacaacttgtcctactttgatatttcttatcaaattttcaactttcaactccatacatgaaacaataattt

SEQ ID NO: 204589 - DNA, 859 bp, Cannabis indica
tttttttttttctttttcaaaaagccacaataatttttagttcttacaaaataaaaataaattaaatcaaaatcaaatattttcaacataaaattatatgtcattaatttcataaaaatattaattaaaattttatttattttacaatttaagatcaacgctatattgactagttattcaataagaccgaatttcatttccaatctagtgcctaccatctcctcttcctaacttcactaatcattttgcactcttcctacatcaacttttcgtcttgtttaaacctctgtttcatctcctcctcctacctcatctcctacccatttttcctctccctcactagtctcctccattcctgactccttaaacttcttccacttcagtcgttcctttggtaggcttacccatccaacatcaaaaatccattctcccaactcacactaatgattatccaatgatcacattctaaagttggaatgtataaacctaaacctttttgtgtcgttgtaggactggatattgagccacacaagtacaacaagcaagtcattaagcatccttagaaaattgtttcatctcatggtgaaggttctcaaaactacaactcttgggtgccactatcattatagtgttaggttgcaaaagactacacaacactactagggcctcaatgtaaaacctgtagtacttttcactcgagcatttctcaatgatgggttattctcgagttgtgttttcatggtgagatgtctaatgatgtattcgtctcaacccaataagcacccttcttgtgtgcgtaaactagatgaagcctctatcacctcaaaaaatcacattccttggtaaactgaactcagcc

SEQ ID NO: 204590 - DNA, 1301 bp, Cannabis indica
ttcttttttaatatttttttatatatatttttaagggttttaaaatctaattcatcttagactcgtatattcttaaaaaaaaattattataagtatgttaatcgtgtaacaccacctatataagtatttggcctgcacactactaatgcataataataactctataaataataaaggtaggaaagagtgttgatgattggcatggtgtgaaaatggattggtgattagatatatgtaagagctagcagagtcttcctcaaatattagatttccaaaacagaaacatatatagagtagttcacacttcacatgcagcagtaaagtttgattctgctcatcagtctggtcaagaatcaagatagcctctcctctctctctttaaatttattataaaaattaaaaatattgtatggggatacgtggatagagagagtggcacgtggcatatcaaataattcacgggttatagtttctgtgtgtcacgggtgcacaactaaaaaccttatatatgtattgtccatccatcatatattaatacaaatcttaaaacaaattctacttttacttattatattgttgtccatacaattacttattaaattttatataatttaatatataataatttttaaaaaatattatacttaatatctttataaaatataatataattattaatataatttaataccaagtgttatttattatttataaaacagctaattaatataataataatattaagtatcacaaataatacaaagtgttacatactaattaagcagtactgactctaaatataggtgagttaggcccgcacttaaagcctattcattttagaaattcaaatcaaaaaaatgtcttaaaaaaatatatatatttttttaataatttttaaaaatactatttattattatatagtaagggcctaaatatttttttttacttataggtcatttcaactcaagaccggcccttgtactaagtattattaatgtcttatacaatattaattaattaattttcatgtcatgctaggctagctatgacattaattgtatgctaattaatccattcatgctctgttgttggtcaaagtatatttatatatattgatatataatccataaaagcataaaaatggcatctactcataatcatatataattaataattgtttaaaatgataattaattatttgagttttatttttaaagatttcaatatatgattataacacaacaaactgtgagcataagaaccatttgatctgatgaaaagtggcacaactcatcacttaa

SEQ ID NO: 204591 - DNA, 1455 bp, Cannabis indica
aaaaaaaatgtttgaaaatgtgagattgcccattttcatacataactactaacgattgttttcgtaaatatatcaaattgccctattcctataaatatgcctaattaatgcaaatataataatatatatacatatatttttaagggtaaaaaatttagggtaagtctaaactacatcctcttagagaggtattttattactcaagaaaactttatttttttgtttcataattgtgtatgtatgttataattatttaggatcaccggtaagtttttaaaaaattttgaaaacatgtcaaaaataaaatttatatattttgtgttgtatgcacaattatttttcttatatgtataataagtaaccgtttaaattttattttcagcactataagttatttaacaaaaattttaaatagttacaacgtacattattacaaaaaaaaaaaatagattaagaatattttctcaatgacaaaaaaaataaaaaatctatgaaattttagggtctactatttaagattcattatcttgggtgaacaaagcatgtatgaggtatataatggaaggaaccccactcacaaacaaaaaaaaatagtgacttaagataggcatgtaaagttgtagaccatgctaattatgagtcattgtataaaggccaaagagtgtggtgtagatagcaatgaatttcatttgatttctttgctttgggactaagaaaaatcaaagtgatgagcaaagaaagttaggtatcaatctcttgtttagtatcattaatccttgtataactacttccttctcatattaaagccaagtaggtcctcaataataattccttacatttatatatgcattctaaattctattccatgaagtatataatgattaaaggttcccaacttaaattttataataaaaatcacaatttatgtatatttatatatatatatatatatttttgaaagatgaacattacattatatcataaaatagcataaaaaattagggtaagttgaaaaatggctcttttattaattaattaatcaaatttgtctctaatttttatttaattgaaacatacctctttttatatgtattgtacccaaaatatcctgatataaggaagtcacataaagagttgaagtgacaaaagcaaaattgatacaatgtttaaaaataaaggtaaaaataatagacttttaaaaataaggtaaaaataaaagagaacaatataaaaatgatataaagtctaatttcctctaaaagaaaattatgttttcattatctttcatgtttctttttaggaattatttaaaaaaaaaaaactacaaaaaaaacaaaaaaaaaaaaaaacttataaaaaataataagttgtaatgtaattttaaatatttttacgatttcttaagattttatttacataaatacaatttttagtatattttatgtaatacttttg

SEQ ID NO: 204592 - DNA, 669 bp, Cannabis indica
aaaaaataaaaaataaattaagtatattcgcataagtagatgaaattggaatggggatttggatttgaagagacaaagaagtcctatccatttggtttggtgtacgaacaaaccaacaaaacctataatggcttcatcttcctctttactcttcgaatccattctcacccccctcctcctcctcaccactttcttcccatcctcctcctcgctcgccggcgctgtcaatcctccgtttcatcccagagatgtgcttcctctcttgcccagacagctctcatggcctattctcaactctctccacagcgccgtcgaccttttgcccactttcgttggcgcagcctcagtctccgccttatcctccaaccacaccctcaactggaaaggagcctgcttttacgagaatagcgcttgggtagagtttcataacaagagtggctccgagtttgggggcggaacgcttcatatcaaggtttgaatgtcaatttcagatttgggctgttcttgaactttttattaagtatggagtagtgactatttcttatttgctttttaattgaagaactttatcgctcaatcaattttttattggtgagattgatagttggttgtgcgagaaaaaagtagctactttcatttgaatttgttagttataactattccagtcct

SEQ ID NO: 204593 - DNA, 1115 bp, Cannabis indica
gaaggtttttctaaacccttatgtgtttatttcatattttttagaaattcatattaggatgtaatgaaacatacttgttagtaaatctagatccaggtaaaaatattttccaaacaatatatatatatagttaaagtatagagtgcctctttaaatatgaagtccaaatgctctgagcatctccaactgcactctttattttttacccaaatataagctaaaatagctaaaaaattaaaataaactgcctattttttttaattttacttcaatcatgctctccattttaattattatttgattattttaataatattttataatttaatattgttaaatataaattaatttgttaaaatataatgaaaaaataataatacttttgattaaaatattattaaaaaaatttattaaaaaagtagagagttctctatccattttctattataaggagctattttttttatggttggagcttatttttttgaaagctcaacccttattttagctaaaaagtgtgtttagaaaacatattagacatactcaaatttaattaaaatctattattttaatatatattttttagtttgtacatattattaaattaattaaaagaaaaatcagttttctacatttgggagtaagtcttttaaagataagctccaatcatacaatatataaatatatatatatattattttttaataggtattattggaaaatttttaaaaataactataattaaatgttaatttttaaaactgttaacctttttaaaacatgagattttaattcaattatggataataaaagataaattagagtttatgtgtttaattttattatttaattaatatatatttaaaataaaaaatggagcttctaaatatggagagctccttattgttttgtaactttttttttttttttgtacaaagtgattagaatcactcatgaatttacgacgcagacgtctgccaccggcgctggaacctcctcgaaccatgatagctcatcgtctaacagcagagcatgctttgccaagtcatgggccgctaaaatcttagagcgagccacatgggacaaaactgcccccgaaaatttagacaataaag

SEQ ID NO: 204594 - DNA, 1022 bp, Cannabis indica
attcacatacctaattgtaaagcttaggtagctaagagagaatataatttccaatcaccaaattcctagttctagtaacaatacaaacacatgcaactctaaaccttcttaaaaagaagtagcaaatacaaacataaaatctacattaaagaataaaaggattcttcttcttctttctttctttatgggacatacttacttctataatgaaatatttgttaagtgaaaataatgtagttcatccactatctttattttgcttttacatttaatgtttactagggatagagaattagaaaaatgaaatactagatactatatcttataatatattaattatttcaaaattaaaatgttatgtcatgtactcttgattcaaatattatttatattttatttttttacaataaacatttcactgaaaataattaactaaaaagggattaaatctttttttttgtatattagagagggaatttgaatttaggatctcctctttatgaggagacatgtaaaatcattaatctatgcatatgactacatcaaatttatttatttattattattattattattattattattattattagtctccaaaaatttcaaaatttgatttgttaatgaacatttgagaagtgaagatcagaattcaaaattggaaaagatgtaaggattagagaaaggtaggtgtgtaaatagttgaataataacaccaaggttatatttcagccactaaacaacaaattaatgccctccatttttatttttcttatttaaattttcttcttagatgggttgttgttgtattgacggctcttcttttgacaaacaaaccaaaacaacttgcttttcattgttaatcaaatattttaaaaccaagttcatacattaacccctcaaattgtccaactcgtgattgcaacaaagtctttctaagtgatggtgtcggacgtccttcctatttctattgtgagatttgttgaaatcttgttgctacttgtacttcttgcaaaatcttt

SEQ ID NO: 204595 - DNA, 1077 bp, Cannabis indica
gtgaagaacccgaggcccaattctgaagtgtttaagtagttatcgctggatggtttttatgaggatgtttttattgatgatcgtgtgctggttaagtcttcaactgatgttggttcttcaccggggaagaacgtttctcctgatattgagtttttgatagaaaaagtcaatgaaattatttattcgcaaaataaattgtctaatgacttttctcatttgaaagattttgttgaacttaatttcaagggtgtgtcggatgtaattggtgaattgaagacaaaggtcattgatttttgtgacaagtctcatgttcaggtatgtttaatatgtcattttaagtttgtttcattttgattttatcatgtcatattttgtttatgttatgtagttttagtttcgtgatttttctacagattaatttagctaaaaaaggggaagagtcataatctcacgatgatgaagaagaaaatataggtccaaattcagagaagaatgatgatgattctgatggtgatggttcttgtgagcagcatagtagtgttgatggtgaagatgctaacgatgatgatgatgtggttggtgatgaggagggtgctgatgttgcggatgttggtgagcaaaaaggtgatggtactgcagcaagtgaaggtgaagactccaaggacattggcaatgtcaaagaaaaagatgttgatttaaagggtgatgattttttaagggcttaagccagcttgagattaatgaagatgaacttgttttggctagtttaaaggcttttgaaaaaaaaaaggtatggctcttattgatttttttattttaattttttgagattgtgtttcaaagtagttgttttatagttgcagtcgagttttattcagtttttaaactgtcaattttttacttgttattttttttttcaacaggttccagattcctttccttatgaagtagttgaaaaaatagatgacaatatttctaaagaagaagaggatggcattgtttcttgtactcctcttgtggacaacagaaagtgttcctcgaaattgaaatcttcttttgttgattttgggtcgtctg

SEQ ID NO: 204596 - DNA, 672 bp, Cannabis indica
caaaaggttcactaagccaccttgataattgtagtactgtgaatcaataatgtcaaacgtgggatactaatataatatatactatgcactatataaccctaaaagagttttttcaaaaagagaatataatttggctaacctagaaaatgccaaaacccagctgccatatatctagaatgagtgatgagaattcctatatgggatgcaatcatcttttgttgttattatcttttatattattttctaacttctgttctgaatgtattaactatttttattatttaatagaagactacgtgcgtatgcatgttgttaaatttagttgtatatactttgtacatagatatatatcttggcagacatacgtatatgtttatgatgaacaaatacacatattatacactaaaaaacaaaaattagtttacttaattttattcatacgttgtgatcaaaataaattaatttattcacaataaattataatttttgtaattaatatttttagttacattttattgtgagtaaaagtaaattttttgatagagatatatataatatatgaaagaatattcaatatataatattcctctcttggactttcttatatatcattcttctttatctaaacaaagaactccgtcatatttacaattaaattataattaataaatg

SEQ ID NO: 204597 - DNA, 1767 bp, Cannabis indica
ggtggtggtgacttgtacttgtaaactggagtaggtggtggtggagatttgtacttatacaccggggtgggtgggtggtgaggcttctcgtgatgatgatgaggtggtggtggagatttgtacttgtacaccggtgtgggtggtggtggagacttgtagtggtaaggaggcactgggtggtatttcttaggaggtggtggagatgagtatagatagttatttgcagtggtttctaaagggaagcttagagagactaatgctactatgagagcactaagtaatagggcttttggtgaccccattttgctcatcttagtacagaatagatgagaagagaaaagtgtttggtactgcctattgatcaaccagcacaccctttatatagcttttgtctttactactatctctctccatggtaaaattataacaacttgacaaattaatcaccccctcatctaattagtaaaataatattaatgaatagtcatcttaattaaaataaagcatatgggaaatatttatttgcataaaaatattttctttggtggggaccttattgacttggttttgtttttttgtttttggatctatgtcatgatataaatatggctgctagcaggggaagcaaaataaatcaatgagcaaagaataatataatgtatatatatacatacataattatgtatttttttatttatataagtgatattttgatgattttatgcattgattgagaatagggttatggccgcctaactttacatttttttgggctggaggaccctggcggctatgaaaataataataataataatatatatttttttactctttcttaattacatttttgcatggctataaattttctctagatttaattactttgaatttattttaggaaaaaagaaaaaaaaagttcataccttatatattctcttttgactattctttctcagtaccttgtgtgataataattatacatattatatatatatatatccagctgtatagtaatatagaaagttaatattattatattatatggcatagactttatagtgttgtccttttagaagacttcattattttaagtagaatcttaaaatttgaagaggacctatatggggtacactaaagatttgcaattaactaattgattattaattctatatcattattattatataagttaaataaatttatgagaattagtagtagatcaaagatcgacagctacctcaactttttcatgaatatgtcttaatcattgttttggtataagttagatatatacatttacacattcaatagtaattgatatgatcatgataccactgaaaatattcaaagtttgaaaatccatgcattgtaaatattcatggtttagatgttttctctatgtatgaagctagaatatttgtattgtatgcatgtctttttttttaaaaaaataaataaatagattagtggataaattaataaatagcatatggggtttaactttcagccccttaggtcttatacaaaagtaaatacatctttattagcaaagcaagatcatatatatgtataatattactaaaaagaaaagttaatatatgtgtatcatagctagctatgtaaatattctcacagtttggtatatcaatgaatgaaaatcttaatatagactttaatttagtaactaataataaattagagagtaatgttttcctaattcatttttagtatccaatatatatatatttttcctatatattataatta

SEQ ID NO: 204598 - DNA, 1119 bp, Cannabis indica
tctggttaaactatcaaaatattcaaatttaatttaaaataatatttaaaatttaactaattctaaatatcaaaatttgaaaataatttctaataaaaaataaacaatatgaacaaatttattattaattgcaattaattatatttaggtttaactaactacatggacgctgacccttggcaacatctaataatttgttatttttttatttaaaaaaaaaagtcacccaataatttctcataaaccaagaattctgttatatagacacattttatataaaatagaaatagatacttttataattgatttttttattcatttataaaaaataaaaacaaaataacatcgaaatggaaacaacataatctcaaaataaaaataacttttataaaaatgaaaaaaatctaaaaaaaaaatgtaaataaaaaaaataaaaaaattcaatatataaattcccccaaaaataatataacagtaaaaaatatttttttaatataatttttggcattataattagagtaaaaagaatttttgacactaaatttagtatcaagattgaagatgaatttaataaaactgtttacttcaacctaaaaattaagaatagcatatataccacataattatagaaattaatcataatttgaagtttaattgatgagaatgaataagaatctattaggtctcatcctttatcacaataccaacaatgggatgttatgcacaagtgggaaatatattcattaggaattgtgtggtttatatcatatcccatagaattaattcttgatttttttaaattattctttttaagatttgatggaataaatatatacgacatataagattttgctttaattatttggactagagataattagttatacaaatataatttattatattccttcaattttttttttttaatgaatgtgtaaaatattttcatataaaaattataaaattgtacacaaatacacttttaattagatcatacagtattatatggagaatgtttatcattctaagttggggaatttaggtaaaaataaagatgtgatagaaaaaactaatgtaacaaaatatgtggtaattttatatatattagattaatattat

SEQ ID NO: 204599 - DNA, 1335 bp, Cannabis indica
ctattgcttataacttggagtctataaagtgaaaaaaaaaattccataaatagatccataaaagaattgactaagcacactgaatcattaataaaaatcttactttgatggaattgtcagttgatgaactcattaatacgggctcattggcaaagaagtggagtgaaagaattgaactatcatgagcatctcttataactgattggagccttcttttctcaagattccatacagatatgacaccagatgaaccaccggatgccagaagaggctgtccatctaaaatatcagaaatgaaacaaaacagaaatcaacaactactttatttcatcagccctacataattgagtactaagataactggtggaaaagcaaatcatcacatgaacttctccacctacaacacataaaatttcaagcagacttgatttttcatgttaatttattgtgccccaatattagcaattttttttacctctgctaaaagataatgtggtcacagcacctcgggtagaatgagtaaacataactgattcctcatcttaacgaatattgtaaacatgaatagttccatcagcacaaccaatagcaactacatctaaagcaggagatgaaacacaacttgtgattgcagaattccatcccttaaactcgaataattttttttcgtactgatgttccaaagctgtagagaaccttcttgactcccaataagaatatgtttaaaggattgtattatgatttttttttcatgaaagagataaacaaactattgccctcaaaaaaatgattcccatacttgctgaattgcaccaaaacttctatatgaacagaaagagtaccttatttaagtaagtatcaggatgcatcatacagctaggagtaaaattatcatatagaacgatatgtccaactggtgcaggattctgatcaatttccttaaatgcccatatgaaaatattaccttcaacatcaatacttagaatgtggtctccaaacaatagcaaagaattgatctttgctggatgcctactccaagttgatatctgttaaataaaataaaaacttaattgaaaggaaatgagaatatgaatgaaagtaaaatttaaaatgacataaacaaaaacaaataaaaaaattcttgcattggaataatctttacttctatttcaaaatagaatagtaattctaccaaaatggtagaacattccactgaaatgataaaaaggtcattctaatactttaaaatgcaaccggaatgaaaattgattattttctattccattccattcaattaccgctaaccaaacgcatccatatagtttacaaaggaaa

SEQ ID NO: 204600 - DNA, 970 bp, Cannabis indica
gttagtgtttagctcttaaagttctcatcctttggttgcccaagggtaataatttgaaaacactacttttgaataacttgaaatttcggtggttattaattttccttctgtgatgtggcacctattttacttctaatagcccctcaagtttattcatttctgttattacttcatttaattccataagcaaactaatctgttcagtgtttttagatatttagtttcttttaattgcgcttatttttcttaacaaattaattttgtttcagttcagctctctcaaagggttattttttttcttatttgtaggccgaaatggccttcttcttcatttgtttcatctgacggactaataacagccatggcctaccgcttgcctcacgtagtatgtaccatatccatcatgttgttcaaatatttattatgtgtatccgattgtttctaaatttatagaattgttttttcaggttatgggagacaggtcgggaaacattcgctggtgggatgtaacaactggacagtcgtcttcattcaacactcatagagaaggaatccgaagaatcaaattctcccctgttgtagctggagaccgaactagagggcgcatcgctgtgctgttttatgacaatacattttctatttttgatcttgtaagtatgagtaattaaattgtactcttttctgaaaaaagaaagaaaagatgaattgcaccgtttctttcgcactctatgagaagagcgttaaaatttgtgtttgcaactgttcatgtattcgtcaacctgtttttcacaagtttccaagttgagagctaaaatttgttgttcccacttgggcaagagcctggtgctcatttctgagcagtttcctatttgtgactctgagatagaaaacaaagcatgcttgtgtcttatgcggcaccaactacttttatttgctaagttcctaaatgcctactcctctctctctctct

SEQ ID NO: 204601 - DNA, 1740 bp, Cannabis indica
caatttctctataacttctctattttatttataaattattcaattaatatattttatttattttaaaaattaaataaatataataatatcatatacatatagtacaaaaatgtttaaaatattaatataataatatttatagtttaataaatagtactttttacatgttagtcactatttatgaactaaattttttagctaaaatagctatggaacaattatttaattattaactattttagctactctattttgactgcttttaagtttaaaattcgaatggcctcccctaacgcccaatatatatataattaaacttattattcacaataattttggctatacatagtcccatatatataccataattttcataatcgtgttcttgaatttttaataatattataaaccaattaaaatttggtatgtggaacatttttttcagggatgattgtattattattattatttttttaataatttaataattgtttctattttctttaatttttttattaagaaataattgctccttttcccttttgtgaacaagaacaagagcactaattagactaattgttttaaaaattgcatattgttatatcaaactgaatttatctcagaacaccctacaaaatataattttttttttgttcatatcacacttttcttttttgataatatatatgaatacattcaaacttatcttaactgttataacttatagggaacatctttcagagcaatccttcaacccacatggatggaaatcattgacaataatattagctagctcccaaatatatatatatatatatgtatatatttatatatatgatcaaatttggccatggaagatttggagggaagacaaaataatggaagattaagacccttttatatattttattataataaagttttatttgttcttcagctttcaaatatggtattattgttctagattagtttttcttatattcttgaaagttattaataataatttgtaagttcactattcttttacttttcttttcttaatttcttttgtgtttctattttttcaaacatatgggctagactttgtttgaactttaaagtcaatgatgttgttgtgaccttatgtagaatgtttaagtagttgggtgggccacatttgaaaaaaggaagaaaagaaagaaaagagaagaagaaattaacttcaaattctatcaatttggttttgaatttttgtgagaaaaccatatctactctcattgagaaagtgaaccaagatacctaataaaggttggtttatttcatatatataaatattttttttttgttatgtatatattataattcttgagagcaatcaagtagggtaagaggcaatgaataaaggcattttgcattgtgatcaatctcattcaacaatcaacatagaattagatttgaatatgaatacaaaaacaataccaaagttaccaaacgaccccaaaaccaactctagtttgttcttttatagtatttgcgtacggcctagcgtaggcctaataatactaaattacaatagtgttaagtcacttaattcttttatatatagatagtatttcctccaaccatgaatataaaaaaaaaagttttagttcataatttactggaaaaataaacattttgagtaaaagtattcaagcacatatcataaagaaataatacagcaatgaatgaaagaaacatttctatgaacaatataactac

SEQ ID NO: 204602 - DNA, 528 bp, Cannabis indica
aaatcaccaataagcaatcgacaacagaatattaagacttaacaaatatagcaaaaccctatttcttattcatttttctttgtatctttttccattttcttacaaagaacaacaaaactcattaaaaaaaaatatcatgggccaaaaactagatgttgtttgaaaatagcctaaaaaaactcacttgcaaagcttcaagaaattcttagtggtcaaggggcatctatctgagtacaaatcaacaacaatgtcccctaagctcgtcacaatcagcacagacattgcctctgccaaaaaaaaaaccaaaaacccaatataaattttgatatgacaaatgtaaatgatgaaaaacccaaagtcaaaaaagttgtaggaaaaacaaaatgtaagagaaaaatcaaaataatcggttacccagtaccttaattgcagaagaaccctagaaaaacggtcttgggaaaacgttttggttaggattatatatgagttttgctaatgggtcaggttttataattggtatttgagatc

SEQ ID NO: 204603 - DNA, 1272 bp, Cannabis indica
tagagaagataacagattcttacaatcattaataattaatcaacccgaaaacagaagacatttgttaactactaaaaattatttgaacagtgagcatgctatcagtttcaacctctattattttattccaaactcttactctttatctagctaagagcctcttttattcccaacgcctcaataacttctgttgcatatataagtactgccatggtaattcgctttaaacttgatctagtagcctacctgaagaatttcgagccaacatcccaaaaccttaagtatcttctctctcaaatagggcaccatcaacattgatcttgcctgtagtagaatctggttttgtccagtgctcaattttattatcattatttctattaataaattatttttatcttgagctttgcactaatagtgagtagtccaagctgatgtgaaagtacttaagtaattaattttattatagttaaatattaatatgaaaaaaaattgacagcgaaattcgtaagtaattaattttatttttttcaaaattactatttttataaaaacaatatatattaactaaaaaaataattataatttacatttaaaattaataaattttttaattattaatattattttatttttttcaaaataaatatataattaaatattattattaaatattaaatattattataatatgtataaagttttaataattatattatctaaaattaatagtggaaaaagtttttttaacggtacaaaatttatgctaagtcataccacaaatttgctatatatattaatatattccctttttctattcttattacacaacatgtatttatagaattattaccattaaaactagtggtggccgttgacccaatttattatcgatgtgttttcaattttttttgtattttttttaagcgaaaattattattaactaaggtaagtaagcagttagacccactaattaaataaattaataaagcttacacacatacacatgcaattaattaggttatctcaatatttgaattcaagagacgagatcaccaaactgagaagattataatatatataatggtggatagaactatgttatcttccaaactatacatatggatattttatttatataaaaataataatatttattatacattaattactctaatattgactgggattagttcgagagagggactacgatctataccctaataaaaaatatttatatcatgatatcattataatttatttttatatatatat

SEQ ID NO: 204604 - DNA, 1207 bp, Cannabis indica
gcaattgatatcaagagcagtttcatgaatgtgtatacattaaatgatatatgtatgtgaatggatgatatttattgtaaatgtatgagaggtgatgaatcattaattatataatataatagggtgtagtttttgtggttatttttttttagaaaattaatgtaagccaatatagagaataaaatttttatataatttatttattttttgaaatttaattttacgtaaaaattattcgttgtaatgttcatagcatgtgagctcggtttctaatcttgaaacttggccatgcacatcaaaaatatcacatgctcacgtgagctcgggctcatggaggaacctcagccatgctccacatcgggtaccatgctcacgtgagaaattcccatgcatgggatgcatgaacaaggaacatgagtccctagaggaacaagtaagcacagtcgggtccaattggacccatgctactgtgcatgtgcgacgtatggggcacgagcccgtgagggttcaagggaggtcgaaccaccattgagcacaatagggacccaatcccttcctcccgtgcttggcctcctactcatgtgactagacccgtccgagtcccatactggttcaacccatttgggtcgtacgatctccccatgctcctcatcctcgtggccaccggcaaccgccgaccaggtggctatcaagccatagaccacaatggttgatggtggtggtcggccctatattttttataccccacccgactatatatatatatatttgtatatatatataatgtatatatatcatgtatataatgtatatatagagtgtatatatagtgtatacactataaattatctattaattatttaatgtaaataattgagattattttgggatatttatttgaatttgaatttcaaataaatatattggttattatttgaatttcaaattcaaataataactatcctagttattaattaataaaaaataaaacagttttcttatttttaataattaaaccaaaataagagagttgggatatttattttttaaaattcatatttaaattaaatgaatataattaattttatatttaaaattcaaacataaacttaaaacaaaattaagacgaaagttgtcttaacctttaaataaataataagttttattattttaaagcaagactaatagataattaatttgtcttaaa

SEQ ID NO: 204605 - DNA, 968 bp, Cannabis indica
actttgaaacttggcccgtcgtcgattttccttgattaattatactaagaatattataatttatttattaattaagctagctagcctccataaagagtgtgttgttttgtttcatcttgtaacatgcttgaattaacacattggattcccctaatcacatcacatgcttcaataaatatccccttaattaattttaatccttatattaccccactttatgatcccgatgggttatttattattgaaaaaataggtagaataatatagtttgcttttgtagactaataaattaatccttatatatagctaaactaataaaacctaaatcccggataatactttcccctaaatttatccaaaaagggattattgctactatatagattataattaaactccctaggttattatttacttaattatcactctagtacaatagtactcaatatcaatccttctttttcatgttggattaaatcaaaataaggacaaacataacaaagacaagcatataggaacaataaaactattgtctccgcagcattcaaacaattcaaactattatataaataataattatatatatatatatatattcatatcccctatatatatatgcatataactcatcatcaatattacgttcccatttccaatttaaattctctttgcgcagcttaataaaactgttgtagtggtgtttaaacatgtgacacactaaaacttcgaaaaatatcatttacacataaaaaaaagtatgaagcgcacgcccttattatattcaattctataaaacagcttgtagggttagaatatcaaaactctgaagtcatgtcatatatatatctgtttctgaactatcttattaatgttattggaacatatctccaatgccatggaattggtacatcccgtatatatatttttgaaacaaaattcaacatgaggtggggtggataggataaagt

SEQ ID NO: 204606 - DNA, 1194 bp, Cannabis indica
ttgtttgttactctttcttccaagcaaccccaggtattattttgtattgtattttaagtacttgtctggctaaccaatacttcattgaaaactttaccctgtaaatttagtctcatttataattaggtcataaaaaaacatgaaacgggggacattttaccccaaaaaaaaaaaaaatatatccagtgagcttaaaactctatgaaaatgtatcatgtgatttgaacaactccttttatttgtgttgttgattcatctacttctatcaaacaactttgcattatacagtgtttaatttatttgatttctttattttatggattatttattattctaatttgagaggggaaatgcccctcttaaaacaaattggtattatgtaattatagtatgagacattttgctcaaacattaattagctagatttgtattattaattgattaataattatattcaaaatgaacaaaccacactatttgaaggataattaaaaaagttgtcctcaaattatttgggatcctatttatacctcagaaattggttgtgtattaacacttaaatatagacattttaacaaattcttactattattaaacaaagaaaccatgtgtatttataaatatacacacaaaactagcaattaataaaaagaatttccataacatatttgattaggaagaagaagaagaaaaataattatgggtgagagaattatgatgaaattagtaatccaaatattactaagtacatcaataatgatgatgatgatatgtgttaatgaagcaatttatccagtaaatccattaagtaactttggaagtgaaaggacttacgttcgaataactaattttgttggattaaacaatgatgtgaagattgagtgtcgtgataacaaaagtcgtgggcaagttaatgttcctccattcagaacctacgagttcaattttaaaaccaaggttgaagcttttggtggtacgattttcagatgcaacttccaatggatgaatggtactaaacaagttgattattatgactatgagatttacaatcaacataaaactgataatcgtctaaattgttgggtcctcaaggttgaaggcccttgttactgcgattgtaaagatgagaaatgtgattacagcaaatgtcgcaaatggcccaacaaaaattgattctatctactacgatctcta

SEQ ID NO: 204607 - DNA, 1132 bp, Cannabis indica
agtttttttttttttttttatattagctaagcaaataccataattttattagaaataataataataataataataataattaaaacataccatattagttaaaggtataaattatataacatctttaaatgtttaaatgtgatcatatatatatatatataaatttttgggtaaatactattttagattctgtattttgtaaaagttataaattggaccttctattttgttaaatgacaaaatggatcttgtattttctaaaattatataaataggactccgagcggattttttgtcaaaataaaatttaataataatcggactagaaatattatgataaaattggttacattttctgtatttattcgtattagaaattgtcttaaaattagttaattttaaaaaaataaaattgttaaaaattgagctcagagtcttattttactattttacaaaataacatctattttatcatttaataaaatagagagtctaactaataatttttacaaaatataaagttcaaaatagtatttaccctatattttttggaatgattttttttttttggcaaggtggaaggacgtctatatacgtccatatatttatataattttgcttggaatatatatacacaatatttttcaaaattattggcacaatatttttcaaaattattggttttcatatattaattagtgagtcactttctatttcagatttcgtccttccttaattgttttttgaaaaagtgttgaaaaatagcttttatatagctaaaaaagataaaatcctaattttttcgcaattaaaagaagcgggtcatggctcttgtagctcgatttttggtagtgagcttcctagtgcaacgagtgataatattttggccataattcttttaatatttttaagaattagacgattctaaatattttgaaaatctgaaagagagatctaaaacttttattcacaaaatttttcctgaaagtgaaagcatatcatagtaaaaaattcacttgaagcctcaggcttgattttcgatcacaaacaaatcgtgttgagcatccaaaacttataatttttcaccacttatatcttggaactccaaattcatgataattcatcatattca

SEQ ID NO: 204608 - DNA, 527 bp, Cannabis indica
atatatatatatatatatataatgatcaatggttgtggtgtggactcagaaactactgtgttggcaagaagaaagaagaaaaatagaagctgtaattctatttagaaagaaagcagaagagctttaattgagttggtgaggagttatgaaggaaatcaccaccaccaaatgtgttaagagagttaaatgaatgttttggtaatcaaaatatagttcttcacagctttaaagatggtgaagaagaagccaataacaacagatggtggaataagtactattggccaaaaccttttggattttcaatcaagtgtttaatatttttgggtaccatatcatgtatgattagttttagtcattattataggagttccaaccccaaagttgttgcttcatttttggattcaaaacaagctcaagtctcaaggtcaaggaccaaacatcctcctttcaatgtttttcaggccaggggttgagttagtactaattaaacattttttgttttttaattggaagtttttttttttttt

SEQ ID NO: 204609 - DNA, 524 bp, Cannabis indica
ctttggaattatacacatcatctctgaaaatacaaaaaacaatattaataaaaaaaaaaatcttttataatatttattaattagtttgtttactatgacatagtttttgtacaattttgttagcgtcttggcataaaaaaattgtcccttttttttttccctcagtttccactcctatgatgaaaaagtaattactaatttttatattttaggaaagttataagtagtggggttattaatgctcatgttttacatattcaagaataataaaaaaaaatgtatgttttacatattcaagaatcaaaataatgtatatataattgagaaatgttagaagataccagtgctatttagtattttcttaatattgtttttggtctaattaaatatcgacttctatatagtttaatgtaataatttttagcactattactaaccaatcgcaacgcaacatgtctaaaagtagtagtgcctaacaatactcatatataattatacatgctatacatgtttaaataaatagt

SEQ ID NO: 204610 - DNA, 1103 bp, Cannabis indica
ttgaaagactaagaacaatatctcacaacataaccaagagaatatcatccatgaaaatattattattaatcttttgcattatgctcaaataatctagttcaaacctaaggtttataagcccaaagatacaacattgatttacgttgtttctcaaagccaaagcctcgataacctcagcctcaaatcagccagcaaaacaccaagccaccaatgccataatgacgccatatgaaaaacacgagcgaccattccaaatatatagcccatttttattgtcaagggctacatcaatattaactttgatgaaatcaataagtggcagaagccatcgcaatgcagatggcactgaaacatcctagtgcaaatcagtcacccacttgaaggcataccatgttcaaggtccccaaggaacgtgcatgcccaattaaccaccaatgtcacttgggtatccatattattttgcacctttgtattccttttgtaccaaatatgccacaaaattacaagcacacaatctctatttagttgattgataagtgatcactattaacatgaataaattgataaaaaattcatacagtcaaattcatgtcccaacgcttgaaatcacaaagtttgcaacaatcatgaagagtaggacaaccccaaagggcatgatgagttgatttcacatgggtagtacacaccagacaaaggccatttgtaataaggtcgtgtttgatcaagtttattctctttaataggaatctaactcaaggaagttttccaagaaaacatcttcactttgggaggaattttatgactccaaaactttttccaccaacccaaaaaaatgagaggtagaagcacgatcgaaacccaactgttgaatagaggtataataaccttaattagcttcatcgagaaaaataaaccatgaatgagatcaccatcccacttttgagaatttgatttcagcatggagaccacactatcaccaccaaggtacataggagacaaagccaaggaaattgaattgagagaaatccaattatcaaaataaattgcaatattctttctatccccacctttaatatggatccaaaatcaaaaagctctttaac

SEQ ID NO: 204611 - DNA, 875 bp, Cannabis indica
tcatataaacatatttttgatatagtgtaaaaagaagtattttttgatattttatttaattaagtaattaaattaagcatacaaattcaaatttctcttttattattcgttatcggatcaaaatttaatggtttaatatttttaaaattaatatttatagttaaatttatttaaacttattaatgagtaatactcattaaaaaatattatttatatatatatatgttaaatattcaagattccaaaccaatataaggtcatgatatctcatcaggaagcatgtatgatcatgagaaattaattattattttaacaaaatatctcaaagatatactcgaacatttaataatacaaaaaaatcatctcggtgtaatgtttctttaattttgataagttaatataaatgtataattatatattttttaaatttatacgaaggaaatacaaaatggtcatgaatataattttttttgtgtgtgtgatttaatctatatatataaaagttaataaatatatagatttagacgattttgaagttttggtgagtttgacctgtcaaacaacttaatctgatagcttaccttacctccaaagggaaactattgactttatacactgtatatatacatataaatatataaagctaggtatatatccagatctatgattatatgccttccataaattaaattaaactttcaaaagaaacttctgattgaaatttgagcacaatataatgtaccatttactaactccacctaacgattgtaaattcatatttcagtacacgctttcattatcttctcagccaatatattatatacatgttctgttaattaaattatcgtgtgtgttattttcttttaattaataag

SEQ ID NO: 204612 - DNA, 664 bp, Cannabis indica
aataaataaacaaaaaaattatcatgaacagaaatactgtaattaaaatcagtagaagctctaaaatcatcttacttttttcttagggaaaagaaagaaaatacttaaatttatataaagaaacaatatatatatatatattaatgaagctgaagattaacagaacattagctttgatatatattataccaggttggaaacttggaggatatggagaacgaagaaaaaaaaaagaatgagcatttaaaagacagaatgacattatatattacgaaatccaagacaaagatttaaatatttcagaaagaaaacagttccaataaaagtaatgcatccagaaaaaaagagagaaaaaaataccagattgagaagagatgcatgaccccaactgcatgttccatagtcacatttctcaggaggccaccaatccatagtagcacaaataaaatcatcatcaatcctcccaatgataactttcccatcaatggaaacagtcccttctatgttcccatctcctgctacaagctcagaacccacaaaaccaggctcaagctaaagaacacaccaaaacacaacccgtttcaaaactcaaaatctgagacccattttccagattctctccaatgcagaagatctcggcctctctctgtatctctcttaaaag

SEQ ID NO: 204613 - DNA, 966 bp, Cannabis indica
ttattgtatactagcatttaatacaattttatgtttgatattaaattatactaataataagttgtgtaaaattataccattaaccaaaatcagagttcaacctcaaaccccaaccttgaccttggccccgaatctaactttggcctcaaccctagcctcgaattctaatctcgaaccccaaccctagtctcaagtcttcgccctccggcttggacctcaagccatttctaaatattataatataatataaaatttttattaatttttttaaaaaagtggatgataagttatgggaagatgcatggaagaagtgtgaaggtagatatagaatagatagagtgatttgatttgattggggaaacagtgtaaataattgaaggcaaagaagggagaagagttagtttcatttcttgtagcagatgagatgagatgagtcagagtaagtaaaggtagggacacgtcacacatgtgactcgcaccacacacaatcacatccatccaatcaagtcggtgtaaagagtgaaacaaacaacatctactgttcattcacacacccaatcaatatcacccacgtgtcctctaacaatcacatgtggggcggctcaccctcacctgatagtgacttcccaatgcttccacacaattctttaccaaaaaaaaaatatcttctttttttattattatttattttttgaatttaataaaataagatatttttaatataattttttttaattaaaattattatttttttaatataaaataagataactctaataaagttataaatcaccttattagctaatcgtttaatagaatagatagaaacatttcataattctttcaataaagccttacaaatattaaccatttgaccaaatatggaaatcataacaagtaaactaatgcaaggcttgtatgacagataaacagttagtttcaaggatagcatggtgtggtcgattc

SEQ ID NO: 204614 - DNA, 735 bp, Cannabis indica
ctttgtgtttaatgtgaatatccgatcggattttgtgttttgtttaaataaaaattcatatcttgcagtttacaaaaagatcaaattgatactttaagcttaatttttaattaaataatttttgaacaaattgacaacctaataagttcaatttttatgactctgtgttcagatattgtcgatgtttcttttaattttgtaaaacgatctgctaataaggttgcgcatgatttggcgcgatcttctctttcagaggctgattgtactttttctggggatgctttaccttcgggtattgcttctttgggtattgcttctttggtctcagatgatttgatttaataaaattcatcatttctcaaaaaaaaataagttcaatttttataaaatacttaagatttaagccgaacaacgatcttaaatttaattatatcaaaaaattgattaatcaaaatggagcccatgatatcaatttgatttattttacaaaatacaaatctaaaatatcatttaacaaatacataaatcgatcaagtattaaggctaaacgtgaaaaacaaaattaatatgttatctattttgaatatatattatctaatcatctttatttataataatattatttaaaattttactataaattataatattatttacctatatatactattaatttaccataatatactatttatttcccactttagatttactctgaaagttttaactaagatc

SEQ ID NO: 204615 - DNA, 1532 bp, Cannabis indica
gtatttgatgagaattcttctcgggtaatttctactccgtccctactttgatttaaacaagtattagaacaaatataaaatgaatttaaaaaacgaatataggataagagagcaatcctcgccccgccccgtttacatctatctataataaacaagattttgtctaatgcattttaaaaaaaatttctttgatacttaacttgttcatataaacaagaaggtgctgacttgacacactaggacaaataattaattattttctctctacccaaatttattagtcataatcctattctcatattaattttacaaaaaagtaaaaataaaaataaaaaataatagtcttatagtgggaaaatgatatagacatgacttacaagactcttcttgagcaaaattcttaacatttagtcaagtttctacttaataaataataataattatatatatttgagtttttttattaaaatttgtgaagttataaattcattttgctatgtctctaaattatttgcaaacttcaatcactttttttttaatgtatttgtactcttctatattagatcatcacgtgttactatcaaaaattatttatgataattaattattattatttaatatctactcacaattagggtactaactaattatttttctttagttttttttaataaggggttaagacttcactaatgatgatatctttctacgagtcattttaaaaagttgattcacttgtaaaaagaaatacaaatgtttttaaataaaaattacaaaaacttcattaaatcaaaatcacctaatagaatagaatgtacagcaattaagtttaaatattttttttaatagaaaagttaataattgcactatattatatatatacatataattttttaatattttgtttgtttgaatataataaagagtagttgagtttactttttataatgtgattaggtataataatgagcctcaaattttagcattgcaatgtcatcaaaacattaggtgatgtttaatttaaatcataattatttttttaattaatcttagataatgtattaattcacaaacaaaagaaaaattggccatttttaaaaataaataaataaaataaaagaaatagaaaaaggagaataaaaaaaagaaaacaaaatcgccacacaattattttggatattattattattattattattttgtcaaaaattaattactaattaagaaacttatttttttttattgtaagactaagtattatcttttgaccaaaggtcttagatttgaacccgagctcttttttttttccaccattccctcactactgagctagtgtcattagttataatttacatggatcaataaaaaaaaaattatatttctactcactatattatatgattgtataaaaatacaattttatacataaaaacaataaaaaaaattacaaaaatatgattgtataaaattttaaatatttttacaatttttatgattttatttactataaaaaaaagttttttttaatgtat

SEQ ID NO: 204616 - DNA, 599 bp, Cannabis indica
attactccaataatccaatttacgacctaagagcatccccaaattgggacctcacatataactttctgatcttacaatactcctattgccaaaaattacatttataatttcaaatctctaaaccatgccgagtcacttgacccaacctttctcggccgaatactatatactctttgtttaacccatttcttttattgtacaaattactctatctatgtcttcattttttgcattccatattttttcattcctagtcttccatatgtggtagactaagctcgccaaagcagccgaaaggacttgttttttaaacttgctgcatttgcttctttcaatccaccacataagccttgttattgatggagtagatgcattccacctcaaccagtctttaatcttctgaagacattgctgagagaaaggacaggagaaaaaaaaggtggtcacaagtttcttcctgtgcattacacagtaaacaaccttgatcattgatgatcccaaatttatacagtcattctcttgtccttaatctgccctgtgtagcgatccacataataaagcaacaaacacataaatatgctttgttgaagaaatttttt

SEQ ID NO: 204617 - DNA, 652 bp, Cannabis indica
tctttttatttttattttttttatttttcattttcgtattctgtttgaaaattctcccattatcagaaacctcttttcatccaaaaaaaatgatattatatattgtcttcaatttccttcctccatcaactgccaatgttttttcttcttttttctttttttgatctgttttataaatggccactactcagtcttcatctttccccatcactattgctgtaaaaaccttcaaaaataggtgttaaatcgctaaccaacaaatctaaaggaaaacgacccattattgaagatgatgattcacacttttctctacctacgaataaacgtgatcgtcgccctgtgaagaagaaattgaagagtaatgttgcttaatatatttttctcctaactaaaaaaaggaaagaatcaagctgatgagagtccaaagatttttttctagtttctttattgttttgccctaactttgtgattttattttttgttttgggttgtgaatattcttttaattttattctagtgtttagatagtttagttaattttaatgtttttgtagtgatttttgtttagtgttattttatcatttgtgcaactgttgaattcttaactttcgcgtcaatttgacacaaaaagtattatgaacttgtaatgaaa

SEQ ID NO: 204618 - DNA, 1122 bp, Cannabis indica
agacatgggtgattgggtgatctgggtggggtttgggtgattgggtctgggtagggtttgggtaattagggaaggtggaagaagaagggaattgcaaaagaagaaagagaaaaataaaaagaataaaaaaagaaaaaaaaagagaataaaacaaaataacatattttcttataatttatttatttttataatttttaaattattttttataatattttaataagtaataatacgtggaccactaaaaatttgtcacgtgtacatttgtgtacacgtagacaatccaatgtgatactttactgaaatttttggatggaagtgtgacgatgaaaacggaacctgggtttaataggttttgccgtcaaaattttaatttttgtggtaaaaaatttaaaatttaggtgatttaacccccaatatccctaataataataatgtgaatttgtaaaattttagccagccttattattttggttattttgcaaatacacaaaaacaatcaaaaaattataaaaatacatttacacaaaattttaaatatttttatgatttttacgattttaattgcagaaaatacggtcttttaattttaattttttttgtatgaatcagtgagtgttattgcatataaactattttttttatacaacctaacagcaccatgataattatgcaatagcctttaattttccatacaattcataacgaatgaaaccagtcttttaatttattttttatgtattcttgtgaatttgttgttattttttgttgttttgatattattttatgttgctaattttttttgttgttttgggttgtttttataagacaccataaaatgtaaaaaaaaatgttagagcgtaaaaatgtaaattttattttaaatagtactatgcaattatccttattattttcttacacttgaatgttttttctcaattttttatttattaattattcaatgtatatttttatacaaattaataattttgtttatcatatatttttagactataaatttaagagaaatttacattaagtacccattattccatttaatttacaattttgacattactctttttttaatgtttgtttttatttgcctatattttataacgt

SEQ ID NO: 204619 - DNA, 971 bp, Cannabis indica
tggtgtcactcaccatccagtattgatccctagcaagttcatgcatagctctagtctggccttgtatctcatcgggtcctcttctttaattccttccttgagtttgaataaccacttacaggctattatgttcttcccatcagatctcttaacaacaatccaagtcttattcttcatcagagatcgcatctcttcactcatagtcttgttccattgctctgcatctttgcattttatagcaatttcataggattttggtttagtgtattttatctccatggaacttaggaaatcatatgccattacttcatcccaaacattgaaactaaatttctaatttggcttggggattctcttctttctatctctggttagtgataattctcaatgtttccttccacctatcatgactcaggttctatgtgaactactagttccacctgaaccataccaggttacggttgttcttgtccatctgacctgcatttcatgttcctagttccacctagctagtgtcttctacgtctggttccacctgattcaaatcaggttctatctccacttgttgtgttgatatgcattgggttgtatctgatgtgttattagtactagaatgtcctaaagttccaattttcgggaatacgaacaaagtcccacattagctagaaatagaaaggatcatggatatataaggatggacatatctttattagtatgaggttttttagaaaggttcccaagaacaaaactttgaggccttaggcctaaaataatatcatacttggagtggaaatgttggtgtctgacgtccttgacaagtggtatgagagccagatcccaacattatccatgcaaatgaatcatctgaatcctcttaaggtgatgtgccttagtgtactctcatgatgtccatggatgtgctcagttaagcgatatactctgattttgtttggagttggcctagtaatgag

SEQ ID NO: 204620 - DNA, 1258 bp, Cannabis indica
gtataccatgtaaatttcccattgtaaaataccaccaaaagacatggtacttgccacttggcccaactagtcagtcatcttaatttgaacaatatttctttgtttacggctacaactcatttttttaaaataaaaatactaaatattatgttataaattgttttcaaatttcaaccattggtcaaatacgttagactcataaaagaagaaaaaaaaaaaaaaaacacaacaacaacatatagttggaataaataattttcaaaccttggaaatatattttgacatataacattttggtcaacaggacctttcatttttgtttcaagtaacatttttttaataagttaatagtttttttaattagtaaaatgaaaatattttttaaaaatatattattaaaaatcattttcacttttttatttttttaattaagaattaaaattttaaaatttaaaaaaaaaagctactttcaagttttttttttttaataatattttgaattttgatcggactcagactcaaatttggatccctactctgaccccgaatctagatccagacttagaccccggacccagattttgaatcctgaacctataccttagacccaaactcgaatcctagaaccgaacctggatcccgaactaagatcccggcctcgaacccagacctggccctggccctaaccccaaacctagacccagattacgaaccctggccccataccttggccccgaacgttgacccccgccctagacccgacccgaaccctgtacctggactcggactcgaccctggccccaaccccaaatcccacacccaaacctacacctcaaacccaaacctacacctcaaactcgaacctacacataagaaaaaattattgcgcccttatttaaaaataaatatggtattttcaaatgcatagatttgatattttctaatggagcacatgtagtccattagaaacacctccaaacatggtgggaaggtcccaagagcataggaaagtattgaatggtgtgctcattacatcatggaatatagaagaggggataaagagaagacaaaggttgcaaatagacgaaatgggaagcgaataccgcctgttggttctgtgatgaaaattaatacagatgcaggtgttcttcagggtggcaactgctctggtttgggttgtatcattcgtatgaactgtgctacagtgagagttttcgccactacaagcaaagctcttgctattcttaaagatttacaa

SEQ ID NO: 204621 - DNA, 732 bp, Cannabis indica
tttaatgggtaaatgagataaatattgtatttgatgtgatttaatctatcaacaaaaaagtgtgtgttccacattgtctatgtgtgagtaaattgtaaagtttatattatatttatagagcatttctaattatgcttaaattataatattattaagataatcaaatactaattaaaatagagagcataattcaagcaaaaataataaaaatagttcattattttatttatttttatctattttaactaaaatctggctaagaaatagaatatggttgaagatgcttagtaaatagtttaaagataactgttgatgctgttatttttcgtgatcgagcagtatttggttatagcatagtcgctcgagactctcaaaggaaagatggctaagtagggtagcttagcaagtataggcactccgaatttaaatgaagtaatcggtatcaaggaaacgctaagctggattaaaactcaaccataacagaaagtggagatggagtcagattgcttggtagcagtctaagctattcgaaattcatcacatatgctttctctttttggagttattatagaagatttgtcgtaaacttcttgcatctttaaatatttttttgtttttattaaacgatttaccaatatagttgctcatagtcctgctagaatatcttgtttcccaaattcagcgttcaacaagatgatgttcctcttgaacaaggtcaaccctaacaataga

SEQ ID NO: 204622 - DNA, 954 bp, Cannabis indica
aatttttagagaatattgctagtcaatcgcaacgcgacatgcgagaaagtgctagacatcactgtgcctaatagcaatgctctttgtttaaatagtttttttgtcgtcttaccctcatgaagtatgagcactctttcccaaattaattaataaattgaaaggaaaataaacaccaaacgacatgtcgtttggtccacttttaaagaactaactgtgaaaggtcatggactcatgggtggtatggtagacacgcgccttctcggccgtacttttatacacataacgaaaaacacgactaagctatttaattattgatcccacattaaaccacgtggcatcataaccaacggatgatattccgccacatcaccacaaaattccagggactacaaccaatccacggtactagaaaaagaaagttataatcgtacaagattacgaaattacccttcaacgccgccttttatcatacccttataaaatcccattttcgtcattataccaaaatttcaacctatttcgtctctcttttatcaaatttttattttacaccttttttttccctgaaaatttgaatcatcgactgaggctgcggcggcaatggcgaccggcgtgtggagaagagcgttagctagggtttcatctacaccggcttcaaagtttgttcctttccgagccttagcttcggaagccgaggcccagcaagtggaccccaaggctcgacccactactgacctgaaaaccttctcaatctatcgatggaaccccgataagcctgcgaagccggaacttcaggaatataagatcgatctcaaggagtgtggtacctatggtacttgacgctctgatcaagatcaagaacgagatcgatccctccctgactttccgacgatcttgccgggaagggatttgtgggtcttgcgcgatgaacatcgatggttgtaatgggttggc

SEQ ID NO: 204623 - DNA, 861 bp, Cannabis indica
ccagttagttaatagtgttaacagtttccattttataaacaattagtttttttttttttgaggaatgtaacaacaaatgaggcaatcagttcatgttacaacagtaatctagagatatgtctcgccagatttgctccttctcaagccctagtgttgccttagccatatcatgagcatgaacattgaaacttctgggcaaaaaaattagtacaacagtagggaaagtagacaaagagcatctaatatcttgaacaacatccgaaatggctaaaagatccatcttcttcgaattcaccttacccaccagtagttgagaatctgaaacaacttttgcaagtggaaaatgtacattctggcaccaaagtaaccctgctttaagggctaaagcttctgctaataaagggtttacctttgctgttataggtattgacaacccagcaataacaaaacccttccagtcattaataacaactcctaaaccaagcttcccatcagcaaagttaatggtagcacctgtaaaaagttgataaaacccttttgtgacatgcttatcatgatgaaggatgtgattgttggtcactttatttcttgccaccttcttaagttgagcttcctgataatccatcaagtacctaactctccaattgactaaatcaaaggcagacaggtgagatttaccgaaaatctttttatttctgttttcccataatgcccataaaagacacagcagcaacataaaattattcttagttagatcagcaaaaccagatagaataaaatctttaatatctttgtatttattttaagaataaaactgctttaaaggggagtatttccatacctgtctcgccttggaacagt

SEQ ID NO: 204624 - DNA, 1514 bp, Cannabis indica
agagagagagagagagagagagagcgggacccgcatgaaatttagggcggggttattcgagtgacttgggttgtaaagtgtaacactcgcgctaaaatcagagccctacatcatgtatttcacacgtggggcccttttctcttcatctaacacacacacacactcacctaagacaagtcacctttcttctttgggtttggaatatactcctttcttctttgggtttggaacagattagcttcccctcatgtgtggatagggtttatgtcttctttattattattgtttagaaaaataagatttaaataaatcaatatcaattatgattttttttggtggagatgtgagatgttaagtaccataaaaattataaattattggtattttaatataatactaagtagctattaagctttaattttatgatgaattttgatcataattgagtaggtttggtgtaattattttttaaaaggaaatgatataaggtactacataaatgtggtattagataggttaagatgtaacatgttaagatatgttatgttttacgtatggtaggagttttggattctcaatgaatgatgacttcaaaataaatttgggaataaaatttaatgaataaataaaaaaaaaaaaaaagtaaatgtgtgacataaatatttaagtttaatttttagttgtaaataaatatataagttttatttttaccgttaaattatcgtttagtgtcaagttaatgcccacgtgcaatctctgattggtctaaattattaaattttaatttttattaaaaattaatttaaatatacaataaataaatgacacttggataataactttacatttaacatacagatacttatgaaagtttcatatatataatttaaatattattaccgtcaaaagttaagtatttatcaacaatcaaaagtcaaacttaaatatttacactataaattactacataaaaaatataattttgatttattttgaggtttttgactttcttatgaagttttagtagtgtggtactaatataatagtccttatccaattgaatgggttaaaaagaatggtgcttttcctatatataatatggttggctattggtggttacaatggtatctttgttgtctacaaagaattaaacctaggatttctatttgggaaaagaatgtagttatccatagagtgcccctatgggacctttgacaacaatattccatacaattacaaatataatggatgtgtatggacttgatttgaagatgtatgttttgaggtaccaaagaatatgaccccttctttttgacatatttatagctaccaaccaaatcacattattttaatcatatgttggcatgcatattaattttatattttatgaataaaaagagtaaatgtcatttttttcgtctaaaaacttaaaaatgagctagtttaattaaagagaatcttaaaattaactctcttttttatccggttataaaagaggatgaccattcttatat

SEQ ID NO: 204625 - DNA, 450 bp, Cannabis indica
tgttacctggtttttggtcatttaaaggttgaggatgatcagacaaagaaaccccttttgaagcaatattcattacatcatcttcaccaaatctaaacacaggattctctaccttaatccttaaagcaatcaaaacattcatctgtctagttaactcatcagcctcttccaaaacttgtttaacctttttcctataaaagttgacaactttattaaactcatcatcaagcctcttaaagaacacaacctcatactctcccccatcatctgtggacatcataaacatggtctgatactccaactccaactcctcaaactcagactcagacccttgttgttgttgttgttgttgatgttgttgatgaactgggttcactaaaatcacctgatcttcatctaatttcaatgtattgctcctgtacctgtttgtaagaccactaaatgctctgt

SEQ ID NO: 204626 - DNA, 859 bp, Cannabis indica
cgtataatatatttacctcagcaagtaccctctaaattcttatcattagagatactcttatatattctatatttaaaataataacaaaacctgtaattttacaaatattaagtagtcgtaccactaaaaataaacattaactttatatcacttataaatttttttaaaaaaatcatttatactactatttaccgttactcattcttattcatatgatctaagaggaactttaattattattcgttagatttagagggatcaaagaaaatatttgatagccaaaagttagatgatgtagtgattcaaaagtcaaaaatcatcaaaccactgaagatcacgcatttatttttgaaaaatgtacagcacgtacgtattttgttttgattttgtctcaaactaattatgatggtacgcattgtttgcataatgtgttatgatggattggagtggtgaccataagagaaaatgtttaaattatatatattttttttgtttttaaatttttgtaaatcataaaaataaatgtgcattgataattaattttgatttttctttaatttcaaaaataaaaaatgtgattggtaattttttttttttattattcttattatttaagtgaggatcttaaaagcaaagtgagattagttagataaagtgatgaaataaaaataaaataaaataaaataaatattgataaaaataaaatgaatatgtgatagtttagtggattcacgtttttcttaagaggtctcaagttcgaactcctctttcctcaatataaaaaatataataaaataaaatgaatattgataaaataatatgaatatgtagtgatggtagttttatacttttttgtaag

SEQ ID NO: 204627 - DNA, 565 bp, Cannabis indica
agagagagagagagttaggagtcattttgtgtgattctgaaggggggagctaagttagaaataatagggttttatgatatatgtataaatagtagagttagtgtaatgaaccaaactatttaatgtattaccttttttttaagttttgtttgcgtcaatttttatttgacgctactttgcatcagttgccaactcacgcaaaatttaaaaatgtcaattttcaattgacgcaaagtagcatcagagagaaaccgacgaaaaatatggaactaaactttttgtgtcgatttttcgtgttgactaatgtatttaccgacgcaaaaagtcaattttgtaatagtaattttagccattagtgaacaagttaagataattgttaaggctagagcctaacttatcaatttgcgtagactaagtaaaagagagcaagatgtaattgagttgttaaacaataagtgagttgtttggttgctactcgatagtgtgtattgttaaatgattgttgaaataaaatattctctttaacttcaaaaaaaaaaaaaaaaaacaaaaacccaataaagag

SEQ ID NO: 204628 - DNA, 940 bp, Cannabis indica
aatatatacatatatcatattggtgcaggtatttattctcccgctctcaccccgtttctgactcgggtataaacatttaaattcatacccgcccagcccccgaaagtcgacccctgccccgccccattaggggtgagtacccgaacccacaggtataattgccattagctttagctacacctgaatcaaccacttcctcaaacctaaaaccctactaacaataggtaaaagaatgtagttgttattgctaacttgagctttctttcattgagtaagatacaacaacgcatacgatacaatacaattctttgtatctatgttcgaactattgttggtcatatttctctttatcacgaaatcgaagaagctatacaagggttttgtcgggtctgctcatacggtacctaatcatatggtatccaagctaagtagttctctgaattcagtatgaattcgagatcctccggttcaacaaagaacataattcctgaatttctactctaatcaagatcgagaaaaagaagttttacgcgtgtatttaatattatttttggtcatgtaaactatttaaaaattctaaagtgacttttgataccaacatgtacgatcatatataacaaaaaaattaaactaaaaaattaatgttacttataatatgtcagttgaaaaaaaaattaatgtgatccatgtatccttaatatgtcacttgacaaaaattaagaaaaggatatatatatttgatattttaattaattacaacatatattaaaataataaatataaacataatactagttttaataattaaattagttaaaatcccattagtgtaattatgattgtagctagtaattaaaagttaaaatactataataaaaaaaagactaattcttcaaaataaaaaactgaaaatcaaattaaatagagtaatttgtggtat

SEQ ID NO: 204629 - DNA, 1517 bp, Cannabis indica
tctccaccattagccttcggtgaacatagataaatagatatttaggttagccgcaaaagatacgtatagagcgggagaaaggttgtagaggacgtgtgtgaatttcgaaggtgatacattcttaatttcttattctaagtggttagacttttattttacttggaagactttgaaattttattttattttgtatccatttttcttttgtaaattaatctactagagtcatgaaataattacaatgaagaagaccaaataaactacaaaggatggacaaaatatcaatacattgaaattaaaattaattgtgtggaaggataatatacaactaaatgtatttattgatgaggttagtttttctattatatatcacacacaatttatataaatatatatatttattgacttgacttctattctataccacacataatctaatgataattacaattcaagttttctaacccaaaacataagttaagttagaccaaaaaaataatgttttagagtttcactattctttgtggaattaattaattaggtgagtgtgcacttaactactaaaatataggaccctaaataaaattctcatttgttaaaaataaatattttgattttttttttttttttagaaatcaaatgttttgaatttgatgtatatatataataataaaagctcttaaaatatccataccctaaataaaattatgtttcttaaaaataaaaaaggtataaattaggaaaaactaataaaaacaatagtagaacccataagtgaaagtaacaatcacaaaaactctctagaaaaaactttaatgttattattagtgtgtattgaaaagtctagcagatataaacaaaataagtccaaaaaaatatgtcattttaattcaaaaactttcattacaattataaacaagtttctttcttgcttttattatgtcggagtagtagtgtcttatttttgagattatttgacatcattattcaagtgaagtggttatacttttattttactatatatctagctagtaacaattaacaataatgaaattaagaaggcaaaattaacataattaaatatgtgcagggacataattggatgagtaaacttagataccaatctcaaataaagtagtatggaaaagaaaaccattataattttttattgtatattcatgggtcatcagtaaaaggaattaatatttacactgtttagttaatttattattattttataaactaattaattaactctgtatattcatagaaaagctcagtgcctataaatataaatataaacaaggataaaccaatagcacacacacacatatatatatatattgatatatgatgggtctgtttccatgcctctattctctaatcttcattcttacttcttcttcttctctttccatgtcttcttctccattgtgccatacccatgaaacctctgctttgctccactttaaaaactctttcactaacatcagtgacactacctactgtagtcgtta

SEQ ID NO: 204630 - DNA, 757 bp, Cannabis indica
gttataagtttaaaattctacatttttacttactttttgattattattgagatttgaattaacaattaatttaaaatatgaatacactaaaattctcaatttttttaacataattaatggtttattatttcattacaattaattctataatttttattaaatattgaagttcacataatataagaaattagaataagtattgctattaagtatcatgattcttattacgattatggtgtgatgccttataaatatttattagttttctataattattattaaaagtaaaatagctagatattaaattacatcaataacttatgacactttacaaagagtgtaattgccctaagttaaattttatttctgatttcttctctaaacataatatattaatttatgatattttcgatgcccaagagaatttatgaattgcatcaaagggttgttggaaccattcaatataaaatttatggatcaaataattaataatcttacatgagagggtccataaataggtggttggtgttgggaagtattgctgtattaatatttattacataagggtctatagagatattattattattattattattattattattattattattagtattattattatttatgatcaaatcaagtgaatatgtcccgaagttattgcataagaaaaaaggttaagaaataataccttaaatttgctgcacaaaaaataaatatgaaagttgtacacacacctacacctatcaat

SEQ ID NO: 204631 - DNA, 1578 bp, Cannabis indica
cacaggctttcactttcaaggtacggcagccccggtatggttagaatttcgcttcgaaaacctacctgacttttgccatttttgtggacgccttaaccatattgtcaatcactatccagaatttctcgcaaaatgtgactcctcttctgccccacccttgcttcaatacgatcacactttgggagccaaaatctgcataacttccaaccctttctacatagccagcactagaactcgtcttagccctcatgtctctaaccccgtttccttagcccctcctccaaacccacgaccccccactaaccaaatcatttctgaaccaccttataatgacccatcttctgagtatggggttcaatattttcatcaacctcgaaccactccagttggctgctatatgactcaagttcctcaaaacacctccttcatacgtgatctatatggagcaaatacctctccatccttctcggcctggccaaattctggcaatgttgtggaccttgatagcccttctcaatctcataggcctgccctccctttgccataccccatcatcaatgaccaaaatgcacatatcaacaataacatgtccctccctgaacaagttgctacatctaatcccattgtggcatcccctactatcactaatgccatgaacactactgacacaactggttatactgtcccggtgtcgcaagcttttgctactataatggcggatctcaatgctaaccagccacttcactttaccattggatcatcattctcaccagccacggcctccccttcagtttgccgttacaagccaaagcgccccctagcattaatgaaattaaatttcgtaaaatgctcaagcgtactcgtgatcttgctcgttctcttgatgaaggctacattgatgaggcgggtgctgcccagcgcacccgccaagcgccatgattgtcatcagttggaatgctcgcggattagggagcaaacgagcattctgatctctctccctattaactaagaaatacaagcccacacttttgtttattatggagtccaaactccctattggtgctttaagtaggtttaaattacaacttagtctccctaatggtttagaagttcctaaagttggtcttagtggtggccttttgttgttatggactcatgatgttgatgtaactcttttgtcatataatataagtcattttcattgctaccttaagcctccaattttctgctttttatttcactggtttctatggggcaccgaatcatcataataaaactcattcctggagagttctccacagaattggatccactatccataactccccttggttagtcgtgggtgactttaatgattatttaaattcacatgacaaaattgggggggacacttctcgtgccccttctacccaattttgcaattttcttgattctttcactctccatgatataaaatatactggtcaccccttcacctggacaaataaaccaggccagcaatcccatacccaagaacacattgactgggcgatttctaatgctgaatgggattctttgtttccaaaacatcatcttctt

SEQ ID NO: 204632 - DNA, 760 bp, Cannabis indica
atatatatatatatatatatataaagtctcataacatatttccaaacttcatcacaactcaatatatatatataatccgaaacatatcaaattcaatcactttgttattatttcttgaaacatataagacataacagtaaataatgcctgacaatccaacactccatttcctctaaatcaaatcctacaaacttcaatgagcatatatgggttaagcaaattcgtcgaacactagacgaagagcttgaagatgatgatactgaagttcctgtctcaattttcaatgtcccaacaattctaaaggcaagtgatcctgaatcctacacaccacaagaagtagccattggcccttaccattattggcgaccagagctctatgaaatggaaaggtacaagctatcctcagccagaagagctcaaacactcctccaatctggctataagtttcaagatattgttcaagaattgatcgaccacgaacacaggattcgagcttgttaccacaagtacttacacttcagtggcgaaacattggcttggatgatggtcatagatgcctcatttgttcttgaatttattcaagtttatgccatgaaagaaggaagggttagaccatctcaattctcttcaaggaatatgtcacacttggttgactacacagggagaaagtcagctcacaacgctataataagagacttagttatgcttgaaaaccaaatcccattattccttttaagaaaatattggaatttcagttttc

SEQ ID NO: 204633 - DNA, 1365 bp, Cannabis indica
taataatatatataagtattaattatgtaatttgagtgtcgtaccaaattattagagtaataaaatactaataattacttattatagaaagtgagaattaaaaaagcacaattaattttcataattatatctcgagtgtattttttgtagtttttattataattattttattttattttagagaaagtaaattgcatgtagtcatgaagataacaaggatgtcaataataataggcttattgtgggttaaatttaataaatactaagtcttgtgttaaatttgatataatttttagtatgtatttaatttagcacattttttagagcaccattacagtagtaatttttcttcaggtgttaaaatatatcaatacactacttttttgacactccattaaagatgtttaaaaatggtataaggtagcaataatactccaaaaatatcaaagataagttttcaacaatgaaattaaaattcatacttcaatttgatactataattatgtggtgtgttaactaaattttacatgtatatcttttaggtataattttttcactatcttccaaggatccaaggatttgaagggaagaagttatattactattcattgtcttaaaattaatataatgtaaggtagcagtgaaactattagctggatagacttttaaaataagtgtttgattcatagcaattataatttagaatgcttttctagcattaaaattttaaattcatactttaatgaatattatcattaaataaagtgtaacgttaattgaattttgtatatttgttataggccaatgtaattttttatttattaatcactcaattatttaaaaatctaagaaatttcaataaataagttttattatacttcatttgtaaaaattactctcatgaaattatatatgacataaattctaaattacttattttaagattctctttataaattactaattagtgtcttgttattaacattaaaactttattatttagcttttctagaatatcttttttatgttagtggtaattttatgagctcacagattaacttgacatgtatagataatgaagtttcttaaatggaaaaaacccttcttctttaacaggatttttattttccaatcatctaaaatgatcatttaataaaaaaaaaccgccatcatcaaataatactaaatttcattgaagaaaattaaacatgggtaattttttgagtttttttttttattattattattttttaaatccactaaattagtagtttattttttttttttttgtaaagtactaaattagagttatgaatacgtacaaaaaacttatagtaattacttactatataaaattcccctaac

SEQ ID NO: 204634 - DNA, 1782 bp, Cannabis indica
tcaataccatctcctgggtgagccttacaaaaactctcaaaccaataacaaaattcagcatctccactcaagacagtaaaacccgatcccctctccaaacaagccatagtaaaaggacaagtaaccataagaggaaatgtagtctcgacatctccactacaaagaggacaagtactagtcacattaactcgcttagtttgaagtgaaacaagagtgggaaggcaattagagagggcccgcccaagaaaattcttaacttttggaggaagatttaaataccaaaacttcttacaaaaaccagagttgtcttgagaattccatcattaggactttatgttaaccaaattctggatttaacaaaacatacataaactagagaagacaaaaaacaaacgatgtagagtagtagcaagtaattagaatagaacataaatacctattaatatccacacaaaaataacgtgggattaggaaaaactaagttttcaatttaatttcaagtacattaaatttgtggatatataattacaaatataatacatatactcttaatttatatgaattatctggctagaaattgtgaaaaatctcaaataatattaataataataataataataataattgttatactcgaaattcggctgtacttcagaaagcgacacgtgtcgatcttagaggatatgaatcaacaaatataatggtaattaaattattaaatgtaaaatgaaataactcattaaatatagaataagtagagtatgtccgtaactcgttggctgaatagtattaagtgagacagagatatacaaactatcaattcatgcattgacgataaaccatcttgcctcaaaagacatagtacccaaagagctataaacaacacatagtatgtaaagaagtatcgacgagacgaattcactaataaaatacttagcatacaacccacgttataacaactaagtgtaataacctaaaggacatgattgtccaatctgcaaggccttatgctcaaagagcagttttttaattttctcattatactggtgctcataccattgctggaatacgagtcatccaaagtcatccatctatgtacaaggcgagatacctccagcgaggtacctttggaaggaagtttctattcatgtcaacgttgtccgccttaaagatagtttaagtcacaactatgtgattttcaaaaataatttacacgtatttaaatggagcgtatttaaagcccacaattttggggaatactgttatgggattcaaatttaaatgtaattaactacctacctatattgctataaatatgggcaaattatacaaaaaaggggggacgaaaatcttagagagaaaaaagaagtttactgattgtaaaatcctaattttgtatccagaaatatcttaataagatagactcgtggactatgcagagttaactgcaaaaccacgtaaaaaatttaatgccatcgttattattttctttatgtcggtgcttgatttattacaaaataggctcataatcgttaatgaaaatctgcgttaagaagttggtgctttcattgagagcctacgtgataaaagctcagaaaaatccctcctaaacaaagaagaaagatttttttctccatggctgatcatgaggaaagcgataacagttttcctgaagagataaatcgtcgtcctggaaaaattcaatgggctcacggaggccacccacttgaagaactacacgttcaacacgatcgacactttcaagaagaagccaacgtgatg

SEQ ID NO: 204635 - DNA, 1229 bp, Cannabis indica
aaaaacacaacctctatggattagctaatgtaaatttcggcattcacagaggagtaacaaagggtcattgctttctttccttcctttctttaagcaacaatgtgaagtttcatctttcaagtatacatacatcaatagaattagaatgtaagaattctatgttgataattacaaaatacaaagtacaatacaatctctctctatcacacaaacctggttatgtcatacaccaaaagtgccccagctgctcctctatagtaagatctagtaatggatctgaatgattcttggccagcctgaaagaaaagaaaggttcctgacctaagatttcagtgcattaccaaacagtacacaaagacatgaattgttcaattcattaattgaaaaaccagttgacttactatattataaaattaagtttatcatatatgctaatgctacaggatgatcacccttcataaatatatataataattattaatatgcctaaaaactccaccacaaaatctaacacaacttttttattaatttattcatttcaaaagtggaagccatttaagatcaaagtcacatgggaacttacataatttgggcctgagaatagttagaaaatgcatttataaaacaaaggaatattcacaaacgaaaagctcactattttgaaataattttctcagctaagaagaaaaagatgcttacagtatcccaaatttgaagctttattggacgaccatcaatggtgaccatccgagcaccgaactcaactccgatggtgagatcatgaacaggttggaacctcttatcagtgaattgtaatagcaggcatgatttccctacacctgcacacacagaatcccaacccccgattcacaaaaccaattaattttttcttttcaagaatgatcggaattagggttcttgaaattggagttaaagtatgaaacctgtgtcgccgatgatgatgtacttgaaaaggtagtcgtaagacatgttgaaaacgacgtcgtggagctcaagaagaagaagaagaagatgaagaagaagagaattggagattgattttgaagaataaaaaagcgatcttttttggtctgaaaaaagtaataaatttgaattaattaaagaaataaaactaattgaatgatattttggtttagaggaagaagataaagataccgtgccgtgacgtgacgtaaaaccaccgacaatgctgaaaattgcttgggtag

SEQ ID NO: 204636 - DNA, 896 bp, Cannabis indica
agcctggcatcaaccaccattaaaatccaaccaaattgttttgatattaatattttaattaagagagcaacattaattgatatgatcatgaaataatatgtaccatcacaaacctataaacactcaattaatattcagtttcagttacatacacgtttatcctaattagctatgattatattgcaaaggaataattattcactaataatgattttgatataataaccaacaaaatacatatcatttcacacaatgtctacttaattaatgttcttagaaccatttattatatatttaatttgtttcattgtactttttttttacaagtctcaataatcattcataatatttactacattactaaattgttattaagtattagtagtgtccatcacattttataagtgacactctacgattagataacgatattgcttaaaagctatttttttaaagttatataaaatccaatacttaattacaccaatagcattataacactaaaaaaaatactagacactaataatatcttttcataattctcctactaagttaattatatgttgtcaaactaagaaagtagtgccaattattaaagaaaaaaagaagatgatataattgtttgaaaaagatgtttatgccactctataaattttttagctagagatagaggttgtaccttatagttagtattggtggtccactttcaagttaaaataagtttatttttatctccaacactatttttattaaatattaattgtgtctaatattactatataaaattatgtcttggcaatctacaacttttatgacccacttttcctcttttatataatataaaattagtgttactgtgaatcttttagttaatctttgtgtctaatttttttttt

SEQ ID NO: 204637 - DNA, 1111 bp, Cannabis indica
aaactaattaaaaaagtgttaccgaacaaactcaaaaaagttgaattaggattcatgatttacctatatatacctagtcattgtcattcatacaagaatgactgaggctagctagttagttctaaatattcttcctctctttttcttaatttttttttccttgttgtcaacttaaacatcgtgtctcctttgattttgatctatcaaaatggagagcagtaaaagagaatcatcaagtagaagtacaagagctggtcctagtaattataatgaaaagtactattccaaagccaaaccacctcttccaaatttatctttatcattattttctgtggaggaagccattgcgttactcaaagacgatttgactcgaccaaatgccctcgttctgctgggcaaggtataaatttcataaatatacacaaaccctcacactaaacaaattttatttatttcgacattttcatctaaattttttgttatttgcgtttacatccttacaaacattattatttttcaataatatccgtattcgattgcatgtttttattttgcttttgaccaagttctttactctttgttaattgttttgtctctattaaaacgtatgctgatttcttgattttcttggattttttttttttggttattaaaattgttttcttgtttggttcctgagaaaaagtttttgccaagattaatatctctcggaaaatattggaagagaaaataattatatatgacaattattgtctatataagattttccattctgttttgttttttgattattataataattaataacagtcatgatacacgtttacgaggaccttgtcatcttgcaaggctatctttaattattttccatagacgttaaagactaccaaattatgactctaaaaaaacgttagaaagtattataataaatattaaattattaatggacctcagatttttttttttttacttttgttaacataagaaacttttgtaaaaagaaaaaaaactaaatttatatctatttatatgaatatatagaaaataacccattactctattaacccgttttacgttgatattggtagtactttctatgtatcatcgttta

SEQ ID NO: 204638 - DNA, 1510 bp, Cannabis indica
atgaatatgtatcatcatgtattttatttgaaataatatttttcttaattctttctttaagttattgtgtgggggacttctccaaaaatgaattcatcgagatgtaatttagttaaaacttaggaattagaagagatgattctccatcctagaaaaatacataaataaacaagtccactagtagatatagccaaccaagcatgtgatatatatatttagagataactccccaaaatggaatgtctcgcataaaacaaaagttttatattaatgttaactatgctcaatgccaattggtagattagagttcgaataaagagtcacactgtgccaatcaaattagtaccatgtccttaaattaaatatataattactaattaataaagttggtaccgtacgtaatataatcatgaactgtggtgtacgttgcatttcatcatcaatacatacttcatgaattttttatagaacaatttaaagaaaaagaaagacagaaagaaataaaaacttgtaaattaatctaaagttaatgtgtatatatttctcattttttttttctctctctaactacctataatggctaataaattttgccacaaaattaaaagatatgggctaataataagtttaactaatctccaagtctatcaaaccttaatatgataaaatgattttgtcaaaaataataaaataaaattataatatatttaaactatatataattaactaaatattattataactagaagcaaaaaaaaaaaaattaaacatactgtaattgactacaaaataaatcattatttagagcagcaacatttttattaaaatacaaagttttcaatcgaaaagcacttttttttaaaaaatcaataaaccactctttagagctacaaactcaaaagaatgagagaaggggtacaagatcatttattgatcaaccacatcaatcataataatgttctgaatataatttggataatttagctatcaaactttactaaagcaacaagggtgtagggaacaacattttaagaacaatgaaaaagactaactaaaaaagagtaaaattacaacaaactaataatatcccgaagaactacgccaaagaaagaatctaaagaaacatgattattaaccttgtgtactgataggtaaaatttataatataagtgtacgtattgtttcaagtaataaagttcataagcacgagtatcgtcctacgaaaaatattacccagtactaataactatttttctactttctatttaacaaacaaaaattgaaaaatattattaaaattaggaaaataatttaactataaaaaatattaaagtaagcaaacaatgattttgaatatcaataaatagaacctagggtgtaatatttttatcaacttgtcaatttatttattttacttttgcattctataatttcttcttcctattacacaatcaataaaacgtacatagaatttttactaactcgggtgtaggaaatcaatgcagtttcc

SEQ ID NO: 204639 - DNA, 1107 bp, Cannabis indica
gtctacctctggtacgaccgagtgattctcttttacaagatcattggatacaacaaagtcagacaagcttatgttcaggctaagctacattccttttttgttgttcctttgttcttcagattgtttgtgaatatgatcatgtattgattatctagtggtacagtatgataatgattatgtattgattatcaatttgaacttcaccaattaccaaatgcttgttcatttatttcactagtatataatgcacttcctttcaaaaaaaaaaaagtaagaatgcacttgtcacacattaaacaaaaatgatacaatgaaaaatatttagagtagaaaaaacaaaaaaaattagacacaaaagcaaagaaaataaatgataatactattttggtctcttcaaaaagagaattgctaaagatactaatagtgtctagtattcttttcggtgtcattctgttattattggtgtgattaaatattgaatctaatataacttaaaaaaataatttttaaagaatatcgttaattaattataagataccacactactactataaatatcactattaaatttaaacaaaagcatttaattaggcctacatttaataacaagctttctatcactgttaatacttaataatacaacctactactctgcatttcaatagaataattattgctataatgtcctttcattcttcttttctttttcgtttttttttgaaaaggggtcctttcactctttaaaatttgcaaacaaactacttttcattgtgtattataaaccaaattaagataccatatccaattccactgcatttccatttacggaatgtttggtttataagaatgagaattgtaattataattaacatttccattattttatttgtttttttttaacttctgtgatctattacattatataaataaggtaatacttgttaaaaaaaaattaatgtgatggtcactacaattacactttattataaaattaatataatattataataaaagaatcttgctcttagtattttgatacataataagtccacctcaccaaacatagtattactttgataaaaaaaaaagggattattttacaaaaac

SEQ ID NO: 204640 - DNA, 609 bp, Cannabis indica
attgtcaactgaaataggaggaaaatggaggcccttatgcagcatctattccactaattcaggctacaaacccggaggcagatgttttacttgcttatgagatgaatggagaggtaattgcatcttctcagttggaattaaatggcatgattgtctattctaaagttattcgatccatttgaaccactcaactttgctgtttgcatcttcaattacatgcttaatgtttttctactttctagtaattaaattcaaaactcacacacccccacttggtcaccttgacaaaattgacaaggctagttaacatagcacatacatttgcccactttctaagatacgtgaagcattataaagatagagcgaaatgctcctctcccttgccctggatgttctgttcttttagaagggatatacccatctactttgtttttcacattacaaaggctggtgctaagatcataacaaccaagtcaaccaacataggtatagaacagtgttatgaggatatttggtaactaaacataggtatagaacagatggaactgtctagttttagagattgttggtaaataaacatttgcactcctttaaattgctaaagttttc

SEQ ID NO: 204641 - DNA, 645 bp, Cannabis indica
ggtccgatatgtttattttgattgccaaatccttacacacattccttagtttacttatcaaagagacaagttaacactcatgtcaaatgaatgtaacttgagggaggattttaaagtcgctcaagactagtgtttaagtcctctttggtttgttagttagttattgggggttattctgttagttaacttgggtaccaactgtacttttttgttactcgttatttgtaattaactgtttgtttatataaagtttcttgcctgccttttcaaggttgagcttcattcactttcactttctccattattcattgtctcgattcctctctctccttttttctcactcaaatagattgtggacggagaaggtgaagaaaaaaattgaggactgagattggagtgtggaaacggaagccaagaaagtggagaagggcctacaaatgaaagatcctgcaagactctaagagaaaaaaatcccaatacatttcaatgcatagtggcaatatggacacaaaatctggtttttttttttacggcctataaaaaggaccctataaacttatagtggcaatacacatgataaatcttcacattttttttgtttgaatctttctccccaatatatatatatatatatatatatataat

SEQ ID NO: 204642 - DNA, 688 bp, Cannabis indica
aagtatctttgggaagcatcaaagatacttggcatggaaatcaagagagagaaagaatttcactctaaaatattgacgcaagcttcctatgtcagaaaggtggtggaattatttgagaagaaagaagcaaaggttgtgaatactcccattggtgcacacttcaagctgagatccttaactgaagaagaagctgcactgaaagagaagaaaatgattagtgttccatactctaatattgtacgtggcatcatgtatgccatgatttcaacaaggccatatttggcctatggcattagattggttagtagattcatgagaagatctggacttgaacactgaaaagatgtcaagtggcggttgaggtacatgaaaggatctacaaacctgtttatcaactacaaaagacaagagcatggaaactgctttgggtattgtgactcaaattttgctgaagatttagaaaaaaagaagatatttaacttgttatgtcttcacagttggagaaaatgtggttagttggaaatcgaacttgaaatatgttgttgcacttttcatccacttgagttgagtatattgctcttacagaagctgttaaagaggctctatggctaaaaagaatcatgatagagctgagatttgaacagaaggaagtgaatgtgcattgtgactcccaaagagaaatacactt

SEQ ID NO: 204643 - DNA, 700 bp, Cannabis indica
ttaaaatttactaacattcctaagttgaaaattgttatttactagtcttaatttacgttttttttttttttcaaatttattcgtgttgaaaattaacttgtaatatttttttttaaaaaaaaaattctccacactacgaaatatacctttagagaaagcgagtgttaaatttcttcataaacttaatgattttttagtggaataggtaccgaatatttataaaattgtaattttttttttctaatttcgtcaacacaaactctgttattatcttaaatatgatatatataaagtccagaatctaaattggaaatatatagtattagttacctcctaaattttttttaataaattcaaaattgaacacctacaaaaaaaaattaaaaaaaaaattataattattatttatttatgctgttaaaaaaatatttaatttatgccacttacaaacttaaaatgttaaagtatttatacatttatttaccttaattttagtcaataatgacatctatctcttctctttctgattattattattattttttttaaaaaataaaattaatattataatgagtttaaattaaatatttaccaaaacagagatagacagattctcaatagatatgaatcatgtcaaggaaaaatggggttgggtggtgagagtgctaggcgcactcccagacatctgggtcccatcatc

SEQ ID NO: 204644 - DNA, 983 bp, Cannabis indica
ctcatcagtcataagaccctgaaaaatcaaccaaagtatacaataagacaacaaaccgacataaatccactcaaagctaaagttactgaaaaacaagagaacaaaacagaactgaaacagaacaacataaatcaactcacactgaaagttcaaactaaacataagaaaataaaaactagtttaaataggcaaaatcagtaaatgagaagaaaaaaaatcaggtatatttccattcatcacactccacaaatccatatgaaaacaaaaacaaaaaaaaaagatagccacatgcacttgatactgtattgaggattaaaccacaaagagaaaaacaatgaatctccaatcaatcacttaaatgaaaacaaaatagagatttcttcaaccaagtacgaaggtattagactagggcaccagatattaagtcaaaagtacaaaaagtatgatattttgggtttcaaagttttcaccttcagagatagagttagactggttgagggcatcaatggtcgactcgaatggctgaaaagctataagctgaaccacctttccaaaacggttcaagtctgagaccgagttccgaacggcctcaatactctgaccgatctcatcgagtccctcagcgtgaaagaggccataaccggcggcgtgctcgtgtaaaaggtaaagcgccatggaagtccaaaacgcagagacactactcttgagtgtaaaccctgcaatcggctgaagtaaagaagaagaggaaaatggctagggtttaagaggttttatactttcatggctgcctcctttctctctctctctctttctctccctcttatttagggtttattacaataatggttctcaattatactcataataacacttcactcccccaattttaatatatatatttaaactaccacaacttttgaatttgttacatgttgagcccattaatgaaaaaacatacaatggtgaatctattaggaaaaaaa

SEQ ID NO: 204645 - DNA, 572 bp, Cannabis indica
agtactatcataatctatatacttgttagtatatatacatatgtaattgaagatatatgtttatcaataaacacataaacaattaagaataaaactaataaatatattttaaaaatatatataattataattaaatgacaattggataataattgaatcctttcagtcgattgtccattaaattagacatcccatctaacaatcaattcgatccaattcgatttttaaaatttatatccaatttgatacaattataattggatatccaactttattagattaagtccagaattagatgactttctaaatatccttaactttggaaacaattttcattatagcagctctcaactcatttttttaaattttcatttttatagtttttattggaaaaaatttcaaaaatataactttttttcaaaaaattattttacgggaaaaatttaaagttttttcttaaaaaaaatatgtgaataataatttagaatcctaaagggtagctagagagataaccaattaactctttttggtaaccaattagtttatactatttttttctatattttttattt

SEQ ID NO: 204646 - DNA, 781 bp, Cannabis indica
acctcaagcattcaaagagatcaacaagtcgttccctgcatcgtcgatttcagaactactcatcgcgccaaaacatgactttaaacagtaagtgattcatctttctctgttttcttatatgctttttatttcacatttctgggtttgatcactactttcttagtgcacctttgtgaccttatttggttttagcaagtttaggttgaactttttctgggtaaattttagggtttaggcagagtgtagacttttggggttttcaaatttaccagcttctggtttgataaatttcatctaggaattgggattgctttcttcttgtaacaatgtcaaaatctagttcagaagtttatcatccagaaatcttagaaacagagtgccccggtgaacttaccatcccatttaaacccagaatttcaaaaccccagcccaaattagagataaatgatgcaaaaattagggaccacttagtaaaaacccactaagatgatatttctagtaggcacaggcgcttcttgcgaaaaataacagaaggcaaacgtcatttcttatgagatgcttcttggcccgaacctcccagtttatcagctattcctttggttaggcctttatttttacccaaagtcacgattgcttttgaaccaggtgaccttgactttgaagtcatgtcttccaagccacataaatcaaagactccttaagatcgtaatgttaccttcgaggatgaactaattgagtcgagggtatgagccatcgaagattacgtaggtagcatcctaag

SEQ ID NO: 204647 - DNA, 682 bp, Cannabis indica
gcaccggagaccaccagaatcgcaccatccatttgtgcagcgccggtgatcatattcttgacgtaatcagcatgaccagggcaatccacgtgagcgtaatgacgactctcagtctcatactcaacagtagcggtattgatcgtgatccctcgagctcgctcctccggagcggcgtcgatttcgtcgtacttcttgggagcgctatttcccatggaagctaaagccatggttaaagcagcggtaagagtggtctttccatggtcgacatggccgatcgttccgatgttgaggtgcggcttcttgcgctcaaatttccccctggcagccctgacggaaaacgatctccgtggggaaatggaatttgcggtagacggagagaacaagggagagtagcgaaatgggttggaagaagaggtagttgagaaatagggttttaggtggtgagagagaagaaggggtgattgagattgctgtatatgggggtgtttgaatgggaataaggaagaaggaggtccaagaatggaagccatggcggaaagagagtaaagacttttgggagaggaaggtggtcactactcactggtcagaaccaaagatcgtttcagaaaacggccttttcttggatccaactgtttttgaataataaaccagtcgttttctcaactaaacctaagcgcttttt

SEQ ID NO: 204648 - DNA, 627 bp, Cannabis indica
acaaattacatgacaactgtagttaatgggataacttgaaaaatcatatattctttaataagaccacaagccttttacatatattttttttttttttttgaagaaaagcgtctatatcatagattgaaataaaattagacctctcgttacacaaaatattgttaggtacaagccttttacataaaatcatcaaactataaatattgtgaaaattacacattttatggttttcatacaatttgtgaaaaataatttttttaaaaaagttaaaaaataatgagaaaaataacaaactaaggagataactggttaccctaaattatttttaattcttcaaattttttaatttttatcgcaatatgtttttttcttttaaaaaacaaaccatattttgtatactttgcccaaacaaccacaaaaatgaaaactcccataaatatatgatatatccatgcatgaattcataccccattagacataacattcttttgtttttttgtgattaaaattaagtgtaattataaccaaaaaaaaaagtaagaacatggaattcacaataaataaatactgagaaatccgagagaatattatctagttctagccttgaaaagaaaaaaaaaaatgaaa

SEQ ID NO: 204649 - DNA, 1296 bp, Cannabis indica
aaatagcaatggtatggagtcggtcgggtgcaattgggcttcgctggttgttttacggtggatgctagaggtaaaagcgggggtttggcgcttctttggactaatgatttcatggttcaaatcaagtcttttacggtctctcacatagacgctttggtagagaacgatatggggtttgtttggcgctttacgggattttatggaagcccggatccaggtgggagagtggagtgttggaagttgctatatcggctaaagaatatgtttaataatgtttggatttgtggaggcgatttcaatgaaatagtaagtataaaggaaaagaagggagggggtccgaaacccgattatcttatgaaaaattttagaaaagctatatcggattgtcatttacgggaaattgcctctaatgggaatgcatttacttggtgtaatgggaggacatccaatttgatttatgagaagcttgaccgtgtgctttgtaactcagcttggctagataattttaaatctaacaagaccactctcctcaaatggtggaactcggatcatagaccgattttattggaagctcatcaaggtgttaaagggagttcgtttggaagaaaatgggggtcttgattccattatgagcatgcttgggcggataatgaagattgcctcaaaattattaatgaagtttggggggttaaagagaatgggaggcctcttgatactcttactcatttaatttccaattgtggaaggagattacatgagtggaatatcactcaaaagaatgccatctttgctagatccaaggagttaaaaggaaaaattgattggctttccaaatcgtcaaatatgacggattggttagtccgtcaaaagttggaaaaggatcttaatggtgtaggaaaaaaaaaggaagatgtattagagacaaaggagtcgggcgctttaggttaaaacatggtgatcgaaatactaaatttttccatttcaaagcttctgctagatggaaaaaaaatacaattttggggctgttcaatgatagtgggaagtggtgcactgctgatgatgatatagccgatgtggctattaattacttccagaaatttattctcgtcttcaaatggtgaagttgatgtcaaagctggccttcgtggaagaatcccttgccgaattagtgatgctgaaaacagtgcactcctggagccgttcactagtgaagaaattcagtccacattattccaagttcaccctttaaaggccccgaggaaggatggtctgtcgggtctgtttttccacaaaaat

SEQ ID NO: 204650 - DNA, 1196 bp, Cannabis indica
gtggcccccactttcttgaaaatcctcgctggggcccaattatgagacacagaaccccaggcattttccacaatcaaatcactgcgggggtccctgatccaccagacctcaaaccggaaaggcccatggggtttagcttcctggcacacattgctgatacatatgggacgatgatctgagttgcacgtgtggtaggactgaacagtcgcctttgggaaaagaccgagccacaccccattaactaaggccttgtcgagaggcgatttaatatgagcttcgccatcacgatggttatcccacgtaagacaatcccctttaataggtagatcagttaatccgattctattgattaaacccgaaatgaatggcaagaattgatctctccccctcgatccgactcgctcggagctattcaacacaaagttcacatcaccaaggattaaccaaggccccccaaatttatgtccaagctctatcatcatcgaccagaaacttttcttttcattaaagtacaaggggccataaacacacgacaacaaccagggatgatggtcaggatccgagtacacaataccagaaatatgatttttcgagatacccacagtttcaaaagtaaacccggccttccaagctagaataaggccacctgcaccgccaatcgcaggaacaataatattaaaataaaaatgcaagcttttcagagaacgtaccaaatgagtgtgatcgctcttgagctcggaaatgaaaatgaagtcaggcgagcatgaccgaaccagggctttaacttccagaactgtaaaggtctgccccaaccctctatagttccaagctatacctctcatggctcatgtggaggagggctgtccgcctcctccacaagggtaacaatgtcaacattagtacccacagcagagcctatatcatctatgaggacatgattcttcaaagggatagcaatatccgccagtcttgccctagccttccaggccgtgagtctcttggattggccagcagagactggtttgtcaacgtgttgagaacaaccggcagataacttggtgggggagctcccctcatctaaagacggctcatctgaatcacctgatccatcatgctccccggacacaaccgggtcaatgccccgtggcccaacaccgcgagggaaactccctaaccacacatttgaactcttctca

SEQ ID NO: 204651 - DNA, 1082 bp, Cannabis indica
tttgtattaactttagttttttttataggggattctatccgccttgtcccgcccctattaagggatttctcgctctatccccgatgggaataaacagggatgagaatttaaatttttaaccgggatgaagacaagtaaagtactccccgccaatttcttgacccgcgtgtacccctaatgtagacattataaccctacagccacatgctcccacttcgattatctcaaaccttaacaatgtcaacttagttggtatggctaatctgtaacccttaaacgaaatggtgcttcttctgggcgcatacatagttgaatttagtcacttcatcaacttcttctttaatcaacgtccaaacttccaaggcacaggtaatcttcactacaaaaaaatttacttttagtcacaacaaaatttgtaactaaaagtataaaaaaaaaatgtgactaattataaattatcattcctacatcatcaaaaaaaacttcaggattagatgtattagtcacaaaaatcacaatttattgtgagtaaatatggttttagtcacagcttatgactaaaactaaattagtgacaaagtgtatttaaatattgtgttttaatttcaagtaactttttattgtaattagtgactaaaagtaaaaaaaaaatttggtagtgtccattccagtgtcacacctggcctcaggactagctatcaagttatttgctgccacgtctacataatcatcccctcatgcgaggcttaagtggtacacaggctaaacctagcaaccagtaccacttttctctcgtattgtgcggccgaccctgcctcatattttttttttttataaaagaatatttcagtaaatattcttttataagccaaacaacataattgtacatatgtattctaaattagcaaaacattggaatatcttatatattgaaagccatctctcttaattcaataattaattaatttaatttattaatcatatatatatatatccacctattaattattaatcaataagtgcaatgcatgaatttatatgataccacgttcgaatgtgcttacgacgtcgtctctatatta

SEQ ID NO: 204652 - DNA, 1422 bp, Cannabis indica
taaaataaattccaacatggatgacttagatggatcgtcgttgggaaaaaattccaccgtcagattggtaggtagcatattttcgatatggcatttaagggtgtcagatcgtacgagctgagcctcggacacttgtcacctcagggattctcccttttgaattttcctcattcctagccgttggatcatatagtctagtacacaaggacatgcattctctgtatgatggcgtgtcgtgggagacaacctctgatgttgtactcgaaaaagtctagtccctaggtccgtagtctgacacgtatgggtgaagcttttgcgggttaaaagcataactcggttcattgtatttcagaatgccttggcccctctgggcaatccatgctcctcgcaggggttgatagccttagctcctgcaatggacggagattttgtttcacagatacctttcatatgactagcagttggggaacgccctttcacagagactctttccgcgaggttgatgcctttatcttcccgaagcatcaatgaagggattagggcagctaatgactttttggcattccttgattagaatacacatgtcatacttatgaaaatgcggataacaattaatgttattttttgtattttcttatagtgaaatcattaaagtttataatgtctattctttgtccaaataatgtaattacaatttaataaaatttgatatattttgtatattatcaaaacatccaatacatgtattttacaaaataacaatggtcaaagctcatgagcatgtaatgtctaatgagtcaaaagtctatttgtaacatttatcatcaatttattatttgcacagactcatgtctctccattttctcttcatcctgttactatctccatcacctataggaaaaaaaaaaaattgacagtgaaaaaattaaacaataataaagtaaccacattctttgagtaatgacaatatcgaatcctaaaaataatagacaacaacaaacaattataactaataaattaaaatactaatttaaacaagaaagcataattttggtcccactgaaaaatgacattttacttttgcaagtagaactctccttgactaaaacactaagctagagaagccttccttaactgtaacaccaagatagaagcctttcttgactataacaccaagctagattgacacaagctgtttcacaataagtcttccaaaagttctagccaacttatgctgtaaatctaaacaaagattttaaatatacacttttcaactaatgttattaatggtagatcaacacatttatgtagaatggtacattattatagctggaagttatttagaggagctacaagtaacaaagctaattccatgtaacctaatgcagaaaagtatcagtacaaaggaaccaaggaaacttt

SEQ ID NO: 204653 - DNA, 2306 bp, Cannabis indica
aaagaactgtaagagatagcacctcgtcgtcatacttttagttttcttctcatcagtcatccctaaataactacgcccctctcacaaattctaatgattaatcaatttatttttacacatttctttatttttcatttggttcaatatatgattcatttataagaaaattagaaaaaaaaaatacttctacaccattaaatcacacacacacaagcaaaagaataacttattaatgtattaaaaataaatatatttatgtcgtaagttatttttataagtgtgactcatatatacttaaataaaaagtagttttttttcttttttttttgttatggccaaaaaaggacaataatattatacaaatattatgggctgaccaaataaatatttatacaacccaataaaaaaaataacaaaaatacatcttacactcaccttcacattgcatgatccacacattagagaaacaaatcctttctgcaatgaaaggaggtcgacaacgatagaatcaacgatgatagatagaaaaaataccattaattggcgacgtcacttgagaagaagaataaaataaccgaaaaatcaaccattaccgattgataaacgattatgacaaaaaaaaaaaaaaaactagtttgaaacataaactcaaccgtgaatcatcattcaaattccataaaactaattacaaactgataatattacaataattttagtttatttacaagtatttcatatagacaatccaacacaaggctctcataaaaaaacaaatctaatatggtcaatttttcatattttaatattggttgacttcacgttggtttacagtgttcttatagttgtttcttcatgtgatattcttaacgtacaagtcattgttcatcagtttaataaaactttgtttgtccaatcacattgttcatacatagttgcacctatgttgtttatcagttgtctaatagttgtgctactaaaatattattatgttataaattagggttcaaaattggcaatacatgactcatatagaggaaactttattgtggtaagtttgtttttattacgaagtggaggttgctattagttattttttggttgtcaaatagatgtctggcgacatatgtattatataaatagctgatgttgtgtctatatcttcaatgctttgctgagttctaattgcataatagttttctcatagttggctgaccatatttaaatttttcaaaattttaggaaacagaagcagttctatttctcatacagttcaataggcagtttgatcaaagaatggattatgtaaattacaaagttagtggtaaattcatctcaagggattgcaaatatgaagaacttgtacacaagttaaaacaagtgctagaatccaaccaagacaacactcaaccgcaactgaaatatcaagtgaaagaaggttaccaatcgttaagaataaagggcgatccaagcttattcttctacatataactaaaattggaagaacttgaatttataaggtattcattgtgtgtgaacatgctcaataacacaacaacaaccaataacacctcattctttacaatgagcaactcattagttacacaagtacatactgttggaaatatctttactaggatcttaatgtactaatcatgtatgttggattataactaatctgacaccctaatatggaaaacctaaaataataatataaacacctaagggattatagaataccttacattgagtgtagcgaaatattatgtcttattccgttcagatttctaacccttgattcttgtttgtagcagagtatactcaagatttgaacctaaatattctcctcattcgattgtgttcatcatagtcttctacaaaggcttgagtaccaacgtgaatagtgtgggcggatactcaaacatctttgaacaatatttgagagagtttttcttagtgaatttcaaaaatcaagagaagaagaagatgtgacattagccttttcaattcttctttgtatagacatttatttagggttgggtttagatgagattgacttaaataaagacttgggctaaatttaatcctcaagaccgaattctctaatgggctttagagttggatttttcttactttatttcaactaatgaaactaaattgctttttttaattttaccacttatctcatctaattatttaaatattaattttattttaataattataaataattatcaaaaaaaatacaatttaaatatatttattaattagacctacaaaatatactaattaacaaataaattcctatt

SEQ ID NO: 204654 - DNA, 676 bp, Cannabis indica
aaagaaattatagtgccaaacattctttagaaaatgcaccatgctagattagtacgaagtagagacaatatatgtgataaagcactcccataacaagttagaaaaagaaagcaataacacaaattgtctgcctcagtatcacccctaggccctaaaccctgtcagtgaaaattcacaagggctgagtatgagaatggttctaccaaagtcggtgggagttcggtgacagtgccaagtaagctaaccagagtatagcttataaatattaaatacatatttttaatactaaatccactgagattcagcctgcgtcgatcagattcataaatattaaatacaaaggtatggttttggtaacatcactatgttacagaagacaacattcaattactacactagtgctaagtaggaaacaagaaatgatcagaggagcataagagcaagttcctatcaagtttacttatattgccacaaaatgccatcatttataagcagcatctcctgatcataaatattactatctggtaaatccaggagacaaacttccagatgtcagagttttattattttatgttcttggagattttgctaaccatatatcctcttaacaaactgtattagtgtaattaagtttaccatgggcaatctatgacaaatgattgccaggcctgaaaaa

SEQ ID NO: 204655 - DNA, 1290 bp, Cannabis indica
ctcttgtagcataattgtacttgtaattcataacccatatgcaaagcaaattgttataaaaaaatgagaagaatgtaattggaaagagatatttccaactgaagaaaaaaattgaaagcaaaaattctatttattctaatgaataataataataataattacgtaattgacatttctccaaaccctgtaaaaaaacaaaacttgaatcacaagtaacaagtacacaaaaaaattgtttgattttagattaatacatattaatcttcaaaagtaaatatattaaaattaaagtctacaagaggattacgtaaaagggtaaaaagagattaaaagactggactggacaagggtgcatgtgggaactcaagaaacttgtgccgttttttgtgctcacttaacgtataacgtggtatcaacctattattacttcattttgtcagtttttatatacatataaatatatatatttatatccgttactctatgaaccatataatgatttttcaaactacaaatgaggtacactgttaaatattattattactattatattttgaaagggttacctgtttataataagttattatatgatttttcacgtggggtagcgattaattattattaaacaaaacaaaatttaaaaaaaaaaacgtaaattaatattagcgcgaaatttaaaaaattctcttagaacggtagcttctgtcttcttctattggttattaataataataataatacagcattgatttgaacgaataccgctgttgtaatttcaattccaaaagcttgagaaatgctaaaagataatggagtctcgtactctcgtataatttatgacgtgcttattaaattgtaactaataattaaggagaaaactgaatcaatttaaaataaaaaataattaaaaataatattttattatgatgtttattaaattttatagaaaagaaaactataattatattattttgtttatgtacataactaaaaaagataatcagaatgttttaatttgataaaattatccttgttagaacatgtaattacattttgtttataaattttaaaggacatatttatttttttatttttaattaataaaattaaaattaaaataaaataaattaggaaaagaaaggtattccctataaaaataaggagggaattttttcttttattttctctctaatttgtatgggtctcactacttctctctttttaaaaattagtaaataattgtaattccctctaagaaaacatatcattaatgtaataatttttaaaaaa

SEQ ID NO: 204656 - DNA, 1319 bp, Cannabis indica
tatacaaaagtaaaaaaattatcacctacttatagagaactaaaaaaatattattgtttatttttttttttttgagtaatgcactaaaatattttaaatattacattcttatcttaaaaaaaataaaaaaaaatagccctaattatctctacaattatctctacaattttaaactaatcactaattatgtagattatgtaaattatatacctataaattttttttaaaaaaaaaaaagcccttgaattaaaagaaaaaaacaaaaaaagtgacaagatgagggatcaaacccatcacctctacgttaaccaattgtgctaaaacaattttatgtaattaattgaactaaaatttatatattatatatacatatatttttctatatatataatatagttttaattttttgggggcctccagaattgtggggcctggggcctacgccccggccgccccaccctctaaccggccctgatcatttaccatatttaagtacaatatttttttaaaagaaaaataggaatttatttatttattttaattattttgtttatagatatatattattagtttattattaatgataatatatttatatatgctttttaaaagtagttacaagtaatacttaaaatattttttttaaaaaaaattaatattattgttaattatgatttttctatacatttattattattatctaaattttttttaaatattttttttaaaaaaataatgtactatatacttttattaccatattatcattatatttattatttaattaaaattaaaataaagataaaaatgaaatttaaattacatatgttgttaagatatttttttagattttattatgtttaaaaaaaacataaatatgaaaaaaatttaaagccctctcgagagttcttgttcttgtagctgagaagctggagccatggctaaaacaagatcgaaaattcaagggagagctaattctgtatcaaaaatcagtaagaagaaggttgtgaaacagcgatcagaggtgactcgaaccattagggaagatgaggagactggaattgagtcgttggaggtatcggaggacgaggatgggaacgatgcagagcttaagcagagagacgtaatccaatcacctttatctcccaaagcttcattggaggatattcagagacaggacgatgtgagaaacgactttgtaccactttcttcgtgcaaatagaccaatgtaacagtgaaatagcacaaggtatgtctcacgattcccctactttgcaatctggaagtgtggtgcgaaaccttgataaatcttttagaaa

SEQ ID NO: 204657 - DNA, 725 bp, Cannabis indica
gttgggtttagttttattggggtattttgggataattggttatgaacaaaattacccctaggttaaagattatgtaagtgttaagttaagggtaaaatggtcttttcacttaatttttttaagttaattcttttgtttttattaatgaaataggggctggtgtaaattaataggttattctaaatcttattttaattagatagacttaagtaaatcaaagttatcatttgctctctctccctcttttgctcggttaagaaaggaaccaaggaacccaaccataactcaaaaaaagtcagagccatttccatcaattttttcaaggatttaggtaagttaaggtgaaattgcaaagggaagatcaatgtaacccttacccctaatttctcttcgtattgtttgagttaaagtttggaatttaggtgttttaggtgttcttgcttctgtacaaattgttataggttagattatatattaaatcttaaatttgagttagtatagagttatttaaagtgttttattgttgatttggttaagagcttcaagcttgaggtgaactctaacggtagattttttattggtgatgttattaagttatttgagttgtaatatttgatgtaactatgatattggactgttctgtgaagtttagtatcatttggttaggcttatagtggttttgagaagcataaaaattgagttgttgtttgctgggaaaaacgaca

SEQ ID NO: 204658 - DNA, 702 bp, Cannabis indica
gtgggactaactcttaataggtcactaacaagtagaattaaatattattaataatgatgatattttttaatcataattttttttttacttattattacaatttgtattaatatatataatttctataataatacgtagctattgtatatataaatacaagactatatatatatataatgaataattaaaaccacaataccatatataataagactcttacatattatatgtaagcaaacaaagtgttacagattatattatataatatttgatcaacatatatatatatatatatataagctatatataaaaaactataactctgggatagcaacggcctctataagagctagagctagtagtacacagcttacacacacatatatatagtactttcttattccaatataataacacttacatatataatatggctaattaattaattaactcttattattctatatataagagttaattaacataattaattaagcagcagaaggtgcagtgttttggggtatggcagcagttgctaaagcagtaagaaaaggtccaagcttgatatgaccacctttatcaccatcatcatcaccatccacatgatcatgatcacattcacaattattagggctttcatgggtttgatgatcatgatcatgatgatggtagtccaaggatttgtcattatatatgtcccac

SEQ ID NO: 204659 - DNA, 1068 bp, Cannabis indica
attttttcaattgcaatttctatggacagttttcatgagtagtgggaaacacttaaaagttcattattaaggcactacaattatgcatatcgtcgaattaaatcaaagcttagttactcattctcattttgattggttattgaatacatgttgttcgtttacaaaaaaaaaaaaaaaaacgaatacatttagttgtcgctaacaattattgaattactttttgttatgaatactataaattacttcatttttgtttttttgtgtggaaagattcattaagaataacctattgtagtaaaacaaacaaacttattactaaaatggttcgactattttctttaatctgataatttaggggaaaaagaaaaaaaaaatagttatgaaaaagctcatagacaaatagcaaattgaattgttttgatatgagaaaaatattcaaacattaaatgggtcagattcgatatcatgacttgaaaatcagatgaaatttaaagatttgagtttgttttaaatgggtttagatcatttttgaattaacgtcatattggggttgacacagttgatacaaaattgacttgttaatgacatatttaaaatttatttagaacttttacagttataaataaatcataaatgtattaatatatatgtcataaacgtgctaaactgatcattaatagattaatgaattgaatttttataataatatctatttacaaacggattacacgggtcgtaatataccgacctgtttaggtgttattttgttgacacatttattaaatgggccatgtatgggtcaagcatacacctatatgctgaccaagttttttggtgaccaaacaattacgaagactttagagattgacgaaatttttaagagaaaaattaaagaagagttttttacgtggttgagcgttaattaatcttagactacgagtcactgtatcagagttacttaggagaaacttacaaacgtaatggggggttactttggaaattttggtaagcgaaatagcttgagatcgaaattcagatcctctatacgagtggagtgatcgacgtcta

SEQ ID NO: 204660 - DNA, 602 bp, Cannabis indica
aataagactttagcttcccttccatcctttatctatatctctttccttcaatcattatcttcacatttctacataataactatatgcattaatcttaattagattaagggttatatatctatttaccataaaatttccaaatcttcttatcttaatcaattaggttaattttagggaaagtgatgggtggaccttgactaagtctataagcatcccacatggccgacacatcttccccacaatcttttatgtgggcagaaaaaaaattaaaaaaaaaaaaaacaattgtttggctttgtcttgaaaaaaaaaaaaataaataattaaaaccctaatttttgtctaaatgacaaactaataaaatccacatcaaaccttactattcacaaactctttgttgtagaaagaactatatatatggtccccatgcaatcttcccatatttccatcaaaagatttcccttcttttccaaacaaaagaccaacatttgttaccatataattatttcaagtctctcctcaccattgaagaagtataagctaaattcttatggagaattgttataaggcgcttgtgattagttagtgatattgtataaata

SEQ ID NO: 204661 - DNA, 1011 bp, Cannabis indica
taatatcaacatatatgtgcattctttagagtttttatttttttttaatgtttaatattaataaatcgaattttaagtaatttaaaattatttaataaaccctcttaatattatgtttaatattaataaaccgaattttaaattatttaaaattatttaagtaatttaagtaatttattctcattattattttgtacaatgactgttattgttataactatcagccaaagagtgtgataagtattttatttatgatatagaaatatgcttaccaccacattatagaaatacaatatatattttatttataaaaaatatacctatacaatatatatattttaaagtatatgcctatatgatatgtatttatgtaatacacttattttgagttataaataataatcaacatgtaacatgtataagtgactcattggttgttcttatatgaataccagtagtaacactaattcttgccaaatataaatattattaacaattacaactaaccaaatcatttttagttaaacaaacactacaacaattacaacaattagaggcgaaaggatctgctagcaataggagcgttttcggttggtataagtgattattggcggggtctcggtattgacccaccgataatacctagtcggtattaatagttaatagtggcggactgacacatccgccgctactattcattagcggacctatagcagcgtgacccgctgatatttaatgtgtcggatttattatttgatacattaatagcagcgggtaccccgtcggtattgtgttttaaataaaaataaataaatattaaatttaaaatataatgtttataaaatttttaatttataataatattaataatatataaaaatatttaaaattataatacgagtaataattttattataaattaaaaataaattaataaataactaattattacacacataattaattaataattgtccaacctaacaactaaataattatcatccacacata

SEQ ID NO: 204662 - DNA, 1857 bp, Cannabis indica
gcgtaacatgattattttatgagattgggtggtgtaagggttgatacatggttgttgtaagagttgctaatatgtgattgatgtatgagattgagttgtaaacttgattgttgtaagagttgctcatgtggttgatgatgagaactgggttatcataaaggttgctaagatgattttcatatgagattaagttgttgaaagagatgctaattaacacagttgttttcaataaatataaatcatagactcatttttttagctcaaatttagttcaaaatgtaccccactcattagagatggtataatatcacaagtcatataagaattttaaaagcccttgcacgattacactaactcattgacgttctaaatataaaaatgatgaacaaggtgatcatcatcatcattgatcaaagagatcacaagacttttatttaattggcaaaataataaaaggtttttttttttaaaatgataagaaggcctcatatctctatgtaacacagtagttatagatataattgtgttctatagttatatatatatatgtataaaatatttatgtaaattaatatcaatatataatatcatgtttaatagtaatatatagattttgaatgtctttaaaatgcaatattattagcggagaacgtctttttgtgaaaaaaattgtagtatgtatacataaatgaagttttttttaaagtatcgtaaaaatgattaaaaaagttttcatatacgtattaatgaaaacatcccaattatatatcacaaaaaattataataaaataaaaattaaaatgttaatactcaaaaagtatataacaaaattatatatattactactaaaatatgtatatgatgccaaaagatttatgtatagtcattatatataatagaatagaaattaaatataatgtcattgtagtcattagttgttccatgtattcttttctcaaatctacacatcaaccaatatttgattgtttctaatagtgtgataaggccgtgtataaggttgttggtcaggtaaagggagggtgggggtttcagttattggttgatgtatagatttgacaaaaaaagatatagaacaactaagtggaaaaatctaatttacaacaacattgctaagataatagacaagaattagaacatagctaagaattgctcagtgacacaagcaaatgcatttgtctttgaagtgaagatgtcaaaagcaagtggattcacagttaatttagaccacaacacatgcacttgtaaaagattttaacttttaggttgcccgtatgggcatgcattacgtgtgatcaggttttgtgaccataaatggtgggactattgtcataaatactacaataatgaagcttttgaaccagcttatataaggactacttagaggcaagacaaaggtcgcaatctaatattttctccttctgagcacaacctacctggcaggcaaaaaaaaaaaaaagaacagagcagtcgatgagccacctccaccaaatgcaacacttaaaagtagaagagtaggttcaaaaatacattgctcaatttgtagggaggttggtcacgcaactacgaaatgcaaaaaacctaaaattgtaccaccaccaaaggtatatttttatatgaattaacttgttcattgatattttaatacaatttcaattgatattgaccatgatattatattagtgtaggctggaaagaataaaggagagaggccacctgttcaaaattaaaccccttaaacatggaaaaggagaatgtgaaaggagaagcagcgagctatacaggcaacacaaaaggcaacaggggaaggatggacttcacagtctactcaacaatgaa

SEQ ID NO: 204663 - DNA, 1653 bp, Cannabis indica
agagtagagacttgaatttgggacttcatttttgtatgttcaatttggtcatttcttaaaaataattataataatttatccttttcttatgccaaactcggcatagtactacagatatcaacttgtttaccaaaatttattaatcataattctaatcgatttattgctaattaattttttaacaaaaaacaaattgtagtcttggaaatttattagtagtgcaagttgttggaaattgcaagttcataaagttgttaaaatcttttgagcttttaataaaagtaaaatgagcatatcttgttttcaaagaaatggatttggattccaaattcaacaattagctgtatttttgtacatacgttgaatttccaattacctcacattttaatattattattgtatttcctaaaaagataaaagaaataataatattgaggtcaactcaagtatttgtaatattttaagactcatatacctttactaaaaaaaaaaattgatatatctttgatggtagtgtgaacattgtaaagttgcttgaattaaagtgttgtgatttgaattaaaaaaataagttataaattctgcactgaaatgccaagcttctgttaaggattttcttttaagaaaaataaataagactaaaaataaaaagtaaaaatggaacatcaaagagttgcctcgagttggtattattaagaccaagaaatttcttagccaaattttagttatatccaaaaccatcccttaattgatagggataaaaatctccaaacctcaagttctctctaatggaacaagtacaacaacatatcatctagcaattacaagagaaatatttgtaaaattatttgaatatgagggcatctcgtcctggcccaacaccaatataatgaactggaatgcccacaagttcttctattctctccacatattcacgagcagcctttggcagatcagaatagtttcttacagaagatatatcagtgttccatccaggcattacttcatactccacctataaaaatatatatataaagattcatatgcataatcattcacacatgtatgcagttagttcaatcaggaatggtgataagactttaccttcaattgctcgaggagacgaaggtcggatgggaacgacttgattggtgtgccatcagctagtttgtatgtgacccccaattgaatttcgggaagatcggataacacatcaagtttggtgagattcagtgaggaaaaaccattaatctgacagcaatactttagagcaactatgtcaagccaaccacaacggcgaggacgcccagtagttgtgccaaactcctgcccggcaaacctaagaaggtcacccccttgacccaagatttcagtagggaatggaccagagccaactctagtagtgtaggcttttacctgcagtataaaagtttgagtctttagtgttgactttgttatcactcttagtattcatctttggccaatatgtaaaacacaatgttttaaaaatgatccttcagtaggttaaagtattagagaataataagatttatttgtatcaatagacacataagaactcaaacaatgataaaagttcaactatagagaatgggatcgatagaaaatgatgaacttaccactccaataagatca

SEQ ID NO: 204664 - DNA, 570 bp, Cannabis indica
acaaaaacaacctaaaatcaaaattcaaatcgtattcatcaaagaatttaaatacaatgagatcggataaacttcgaaacttacccaaaaatgaatctgataacaaatacaaggtacaaaaatttctaaggattttcttcctaattaagttatttttttaaaaaaaaaaagataaaatttttttagattatagaaatcagataaataattaatgatatagaaaatttgttgatcttaataaataaatgaaattagattacaactaaaaaaatactaatgcatacaaatataatcaactgttttttaatctagaaataattgtatatatgttattttggaggattataatagttgtttctttataaatgaataattactattgaattaaatctcatttactattgattgtcagaaaatagttatttaacagttgttttgatagataaaaatagttgtttaatagttgttttgatagataaaaatagttatttaacatttgttttgataaatataaatagttgtttaaaattatgaacacaatctgaaaaaaaaaacataagaattagtttt

SEQ ID NO: 204665 - DNA, 618 bp, Cannabis indica
ttttttatggtgatgttggtagattgattgacgtaccaaaacaacatttttatagaatttcagaagtccatgaggagcaaaaccgtgagttatcgctgcagtaagggtggaagcatgcagaaaaaacataaaaaaattggggcatcagacttgcttgtcgcggcgaggactctgtcgccgcagcgagcaacctcatggccgcgacgaggggtcgatttctgaactacgatttttttttatcttttttttttaaaggggagttatcttttattttagtgagatattttctaatattatacataggccttaaactcttaccaattattatcattatcgttataatgtctagttttgagtagttttcttttaattaagggttatttcaaaacccaagacatgagttcttaatcctatattgaatgttaatttctagtttccattatatattaaattgcttctatctttctatgttcaatgtcatgattattgttttaatcttttttagaatggccactaatttaggttttactttaatctaccgtcatcttaggattactattcacctaatagtctaggattctaagtgtttgtgataaattgcaatttttaattgtgatg

SEQ ID NO: 204666 - DNA, 1282 bp, Cannabis indica
gtaaacacacttgtaccaaatgtctcggttaataatcacttaaaatgaaaacaaaggaatgagaatgtgaatgtgaatgtgaacaggaatagaatgaaataaaattttatatgcataattttttttataaaagaattattcttttttaaagttcttactagggagttaatctggttaaagttgcttttctagaaaagctaatttaaccaaatttttttatacaactttaacaatacatacaatacaactaactaatcatatcttaaagttagttgtatggtttcctcatttataggattaggtttaattctgtaattaatgtaatttatatcgtttagcctatatatacgtgtatatcaataataaaaattacagagaaaaattgatctcaccaaaacagtcttttatgacagtcattgtccttgctctccccagtctatggagtttttccctcaacaatattcctgctaagataccatgggcataaacttggagaaaaaaaatatataaaacactgcaaagctttaattgattatatatcttataaaggcttagaacataagagggacataaaaagagagggatactaataaaaagaagaaaaaaaatggaaaggaaactcaaatcagctcatttctaatctgcacaggtgtaccagattttatcacctaatatcttagttgataatcaactgcgatatcctaaatcttgatacatttttaactaaagttttctttctttttctttccagatttgctgttgcattttatggtgttccatctcgtcctcaattagttgctcttgttgctcaggtataatattggtttaccaagggttcatttaattttccatcaaataaggctaaaaaataaaataaaaagaaaggacgaaaaagacacacacacacacatgcacgattccaacccctttcctcttacacacgctcacacaccgtttgaatcccaactaattgcatctatcctcaattgactgttctggtaagatgttgacagcatgttctaatcggttatgtaacagtgcatagataatgatatttgtatttatattatgtaattaaacaattttttagtctttggtcttcacttttttcctttttgtttgccttgtatgaaatccataatggcggaacctttagctaaattgccttaatttgttgaagtacttgttaaaagtatacttaccatttaacattgttatggactggtacttttccaccttttaagtaactttttttttcctctcatttttctctgaaaaccaa

SEQ ID NO: 204667 - DNA, 738 bp, Cannabis indica
gcctgttcagttttgctgtagcagaattactttctgctgctgcaaacgcttacagtttttatattttcgtatatacaactgacatttgtaaaaatacgatttttcagttatgataattacatcactaaattgtgaaaatcttatcatatatacaatttatatattgattaaatgttgctatataattatcatattcatttagcataacaaacaactagaacatagatttttgactatggagaagtccaattacaaaattttaataatcccaacaccaaaagtataaaatttttgagctttgaatcaccaaattgatgattatcttctcttatacttcacataaaacagaaaaaaaaaatttacaaataaataaaatgtacgaacatgccaaaaatagaggagtctcggaatgagtgttgaatgagtctgaaagtgaatttcaatgagctactcaacacaaaccagaaaaaatcagtatatttatatttatatatgtatatgttatggattctctagagggaggttagataagatatagttgtgattcttttctttgattttattccattattagtttcaacttcttccttttttttttcttgagcaataagaagcctgcgcagaagcatttcgtgaggctaaataaaacttatcaatttcttcactaattttttaacttagacaaaaatcacatccctatcgatacatacaactaagactcaatgaacatatatcaat

SEQ ID NO: 204668 - DNA, 911 bp, Cannabis indica
ttactcgttgtcttctccactgatcatattctaattctaaatatcttcttttaactcaccataaaaattgttcacgatctccaaaataaaatcagccacattatcatttaaactttttttttcacgttcaaccttaataaatacgtattccaagtacacaaaaaaaaaaaaaaaaaaatcattctcaaatatataattccttccagctcattgcctcgccaaaatctatattgttaaaaataaagatttacattacaatctctcccactctgccacgtactcattttatgtctactatttcgttacgtcacaaccctcaataacattcatgaaagccaatatctctctctttttctctcatttcctttataaacattttctcttatatcactcatttacattttcaacattatttttttgaaaaaaaaaatcgcttctcattcaacattttcaacctgttttataacaatgattaaattatttattttgttaaataataaatttagcttaatattttttaaatagtacaaaatattattttgagctgatttgttattacaattaaatttaataataatgtgatatatataaggtgttaaaataatactaattacattttgtgtatatgtttatgttaaaaattatcttcaaattagttaaaaaaaaaaattattaaaaattaaattcaatgtactattttgtaatattaaaaaaaaaagtacaaaatttaaatttgttattttaaattcaaggttcatgatattatatttaaacgctcatattttctcaaatattgtcatgcaatcttatttatttacttttttgttaagcctgtgtattctcttcaatgttttattttatttaattcttttctttcttaattgtcttgcttttttttttcttctttttat

SEQ ID NO: 204669 - DNA, 620 bp, Cannabis indica
tttttctatatatagttattgtgattaaccttttagcatatcaagcatgggatttattttaaagtttatacatagtacttaaaattaaataatgtttcacgagatgcccaccttatattttaatttctttctaatttatttacaatttttctagtggttaattttaattaattatatataaaaaaattaaaattatgtgtattaatatatatgtatatcttgagggttttcaactttttggctccaactttttgatgtgttatatataattttatgtatataggcctaactgtcatatgattctctccttaggctattatatataatatcatagctagtgattgatatatgcaaaattgtaccatgcatcaactcattatgtcaagctaaaacacaaaaaatggcaactattaatgtatataatataatataattaattaatttttttgaaatttaattagttaatccttaaataatataatatattgttacaatttatgaagagcaattactacaagtaaacttttctttgtcataagtttttctcgctataaaaaaagtataatttgttgtgaataaatgtatttttagttacattacttatcgtgattaaaattaaa

SEQ ID NO: 204670 - DNA, 774 bp, Cannabis indica
ttaccccatatcataatacacactatgaaatatatatatgttatgtattgatattttttgttcatttgcctttttttttggctgagatactttgattagtaatagatggtagattgttttgaccttatttcaatggcagattttcatattttgcctttattatttcttgactgcatggctgattttaaaatgtctactaactataataattttgtttgaaaagtactatgaaattatgactcactttcaaagtttctaatctttttgtcatctcatatagtaaattttaccattaagtgtctttgttctgtaattatgttatatggggttggggattgcatgtctgacttagtttcagattggtctttaaattgtgtcgatcaatccattattgatattaaaaagtttattagtctcattctcatctcatatgtgtgccaacttaagctcacaaacagctccaataatgatcattgagagctgtatgagtatgaaaaaaagagaaaaaaaaattgtaatttgctaagaattaattcctaagactcaaatatcaaaaacctaacattaaataaatatacaaacaaaatgaaacgcaaacctgtctgacaagattatcaatggttcgatagaagtagtagtgaagaagaattcgtttattgactatagtttccaccttaattacaaatatagataaaaataacaagagactaaaaaactcgcaaagcaacaatgtacatttaagtaactgtctagtgagcgagactaaaaacttct

SEQ ID NO: 204671 - DNA, 1412 bp, Cannabis indica
ctttcgcctaaccaaagaggtagtaaccagtagtgcattgtggataactcgccaaacaaagatcttaactttttgtggcagttgtaagggccaaaagaacttccaccaagaagcttgtgaattggaacatgaacagttattggcatcaacttcagcaatagatgtggcaagatgataccccatctgcactgcataggtacccgatatatagaggtaatgttaatattcgatcaacatccattagtgaaaaccattgtgtaagaaggggaacattccattccctcttctgtaattaagtgagcaaccattccattgggtgcatctgaataccgaatgggaataaaagattcatggccaggtatccaaggatctattgcaactcaaatagtcttccctcaccaatcttccacctgaatcctttaatgagcaactctctaccccaaattattccttgccaagttaaaaaggggctatgtccatgatgagcatgaaagaaattattgtttgggaagtaacgactcttaagtagcttaccaagaagagaatctaatttttttaacaacctccaagcttgttttgccaacaaagcttgattaaattgttcaaatgatcgaaaccccattccaccatctttttagatttacacagcaaatgccaagctctccaatgaatttttgaaccgttctcattcgaaccccaccaaaagttagccatcatagattctagttggttacaaatatatactggaagccgaaaaaagctcataacatatgtaggaatagcttgaacaatagctttgagaagcacttcccgacccccagccaaaaaaatctttttgttccagttgtgcattagacgccatattttctcttttatgtcactgaaaagctattgtttatctctgccagtgtatgatgggagtcccaaatatttttcatggcattcacaaatgggcatagaaagatgtctgtggaaaaagacctgagccgccaaagtggtgttgggagagaaagacattaccgatttatcatggttaagaagttggcctgaagcacgatgataaatgtctaggactcgctatattgcaagacatgaactttcattggcatgacagaataggagactatcgtctgcaaatagcaagtaggaaatcggtgaagcatgtctagtgagcttaaaacctgtcaatcgtccatcttgttattcatattgcaacaatcttgataggccttcaaagcagatgagaacaggtacggagacaaaggacatccttggcgcaagccacgagttgggatcaaggatcctgaaacttctccggaaagcccattttcctcataacttcttcaataaagcgccattctactcgatcaaaggccttactcatgtccaacttgagtgaaacaattcccttt

SEQ ID NO: 204672 - DNA, 529 bp, Cannabis indica
aaataaataaaagaaagaaaaagtaaacaatagtgtcgtctttgcatttgcagtggtgcagtggcagtcttcctcgtctcccaagtccctaacgctattttctgagatacaagacaacagagatgtggcgaaggtgctttagcagcggcacctccaacttcaaatccggccccatcacccgattgaacggtcaaaagtgggacgctctcgtcatcggcggcggccacaatggcctcactgcagccgcatacctcgcacgcgccggcctatctgtcgctgttctcgaacgtcgccacgtcatcggtggcgccgcggtgactgaggaactcatttcaggcttcaaattctctcgctgtagctatctccaaagtctcctccgaccttccatcatcaagtaactttttccactttacaatcaatgatatactattattattatatatataggtatatatgtataaacgtattgatagatagatgcactaatacatacagtgtatttgaagtaactcgttttggcattacagag

SEQ ID NO: 204673 - DNA, 1185 bp, Cannabis indica
aaaaaaaaaaacaaatttaatacgcttatgattaagttaaactacaattttattattaattataattttttattttatgtaatattaataactacaaattctcatatttaaaatatatatatatataaaataatttgtggcataaatacttaaattcaacacccaattataaataacttaagttatattttcaaaaccttactactccataaatataagcaacctagagtttaagatgcatgtttactattaagcaattggaatcaataataaaagagtcattcttttatatttgtttagttaatttatcaaatttaagaaaatgagaacttaattaaataagggagaaaaaaaagagagaattttctccactaattttctaaggaataccattaacgcgtttactaaattgtaattgtaatcagaataatcaatggaagaaatgaatcggtttaaaatagaaaataatttgaaacaatattttattatgttatttactaaagtgtgcgaaaagaaaaccagaatcatattattttgtttacataattgggaaaggtaatcggaatgctgacaaaattgtcattattaaaacatgtcattattttctgttcatagatttttaaatggtatatttgtctttttttatttttaattaataaaattaaaataaaaataaattaaattaggaaagggaaatatattctctaaaaaaattggggagaacctttgttttctccctaatttgtgtgggttacactactttctccttttttaaaatttagtaaacaattgtatgagaatcaataccataacattcattcttattcccttttaagaaaacatgtcataagagtaatgacttttatttatttttttaatattgaatttataatgataattttatcctttaaaatatggcttatcctatagtttaactcaaaagagtaatttagttaatttaagcattccgattatattccctaataaaataaacaagataaatcactattatttattttccaaacaattttaataaataatatatcacaactattaatgcagattattttttatttattcaggtacatttttctattaatttatttcaattccgaatacaaacatgaatctagaatgtgcttaatagatgtctcctccatcaaaaataataatctttagattgta

SEQ ID NO: 204674 - DNA, 1065 bp, Cannabis indica
ttaagggcccaaaattttatatcgccttaggcccacatttcttcagggccggcccaggtcaattttaataaaatattaagttttgatatattttgcgtctatatatatatatctttacttgcatttgcatacacactaaatggtacaaaaataactgaatccatttgatttatttcataaaacttaagttttgatcagccgttcaccaacaacaaaaacaaaatggaactcttctttctatttttttcctctttttttctttttttttttctggattgaactcatattagttagcgtgaaaaatacagctgacatggagagtaaaatagtgaaaatataaagtaattatgtatattaagccaccgagactagatctgtgtgatgagggacaaatgtgggaaaaagggaaagagtatgagtgagaactcaaaactctaaattattaataaataataatccataccaatacgctaaaaaatacatgtttataaatgacatctaaaagaaagatcaatatagtatattaaaattgagattttttttttaatgttgacttagattttcaataaaatatataataatatgaaaataaaggtaattggataaatactatgcagagttaaactttattgtgtcttagaaattttttttacccttatttagaaaaatatattattttcaaaatcagtaagaaaaattatgtaaatttttagaagattttttttttttggatctctaaggctagatgagctctagcaggcctaatctaccttaacatagggccagtcttttggtgtggtgtttattaaataaataaataaataaaaataaggtacaatctaatttattagacaattaatttaatttaatttagttgtctttttttttttttttaactaatttaattgtctttcattaaattcaaaataacctgaccaagcaaaaagataaatagcatgactaaaattagcttgaaaatgaagctcattttaacggtaaaacacgacataaaaacagattctaataaaaaagatctacataagattctaacaaaaaaaaaaaaaa

SEQ ID NO: 204675 - DNA, 597 bp, Cannabis indica
gttaattggctcattgcttggcaacagactcttgtttctctacaggtcgtgtgcttcagttagaggactgttcctctaaagtgtgttctattgttttgaacttatttattaattaataaattttatgtattttattactaaaaaaaaaaaaatacaaatgtgtgtcgttatgtaaaaaaaaaaggactaaaatagttttcaatagataaggagtttactaaaatatggtgtacaattagctcaacttatacatatgtgaaaattgttatgttggagcattattttttattttacttttatttttaacatattgaaaaattatattttaatacatatatattaatataaaagagtacatattattggaacggtaaccacatttctttctttactttttgttctaagattgctaatagtgtgactcacttgttagtaaattaattcattctttggataattattttattggatggcttcactacccctaccctagttgtattagtgcctccttatcttgttactcttttatttttgagggttttcccattgggagtagtcatgaggtttttatgaggcttaggtttttttttttttttt

SEQ ID NO: 204676 - DNA, 1367 bp, Cannabis indica
gctgaatttgctggctaataaaaattattttgccttcaaaaaaaataaataaatacaaaacataatttcacttatgccgaatttatagcatgagagtttattaatttaagtttgacgattttaagaatgatctcttaattacaatccttttgttttaaggaaataccttttgattctaattacgatgatattaaataatttgaaataatgtgagaaaatttaaggtgaatttagatttgcaactgaactcaataaatttaactaatcgagctgcctacatacttttttttatgaaggatcaagccacttgtagtacgggataaggtattttaaaatttgaatataaaaattcctgtatatgaccactttcaagaattcattgttatttaaaagtttggaaaaattcttaggtgtatgactttttatggaattttgagatttgtattttatacttttttccagtatcggtgacttagccttagcaactaagttgcatacgtattcttttattggaatcaagttaaaggtagttgcaaacgttcaaaaaatttgtatcttcaaaaattttgtggagaattaactcactttaatattttgaggtagatgacctcacttgagatttttgaggtgaatgacttgatttggaatttgatgaggtgaatgacttcgtttgagatttcgagaatttgtgattgtaactaatttcaacaattaagttgcctatgtatcccaaatgggaacaaatcaaacttagttcatatgttgtgatgctttggtgattaagagatgaatatgatctctttttgaatgccatttaatttattaaggctttgaattttagtgcaattttaaattttttaggtaaaaatatcattttgagattttcatgagattaatgacctttttgaaattttttgagatgattgactccctttaatatccctagattaattttggtgaactcatttggaattttatgccatttatataactttagaattttaccattttttgtgacaaattgaatcttgaaatcctaatacaaaatataaaaatatgtcaaataaaatataacacaaacataacacacgatgacaagttttgtcactcttccataaagttaagtgaaatcttcttataccgcacgcgagctatttcctaattttttttaaaaaaaaaacaaaaacatacaaacaaaagatatagcgtataattgtaaatattaaatagatattttgttaatagataatgagtactctacaatgttctgtatgtactataaggctatatttgaaagttaaattttggcaaaaaaaagtaaataagaaaaaaaaaaaaaaaaagtaagtagagaacaaaaaaaaaac

SEQ ID NO: 204677 - DNA, 1386 bp, Cannabis indica
agaggggagagagagatgatagagtgagatccgaatgtttgaacaaaattgatttttttttttaatttttttgtatgtttaacacgctatctccaactgtttaaaatgttggggatactgtactcatttttttaatttaaaattgtgattattttgcacaattaggaattctaaactgaccgtttaaaattgctggaaatagtggagtactactgacaattttaaacaatttcttaactttattagtgacggtcaccaaaagaatatgatttaaaaactaacaagaataagcatttttgtaatagtgttaggttttttttttctttttttttttttaaagagaaaatcagttcattcaactttaaaaaaagaaattaagattgacaggcggtaatccttctcctacacaacaaaagtcaacaacgttacattttagcttagacagctaaatcattcactcgagtaataaactcacatttaacaaagtagaaatagtgttggttggtgatttagcttcagcgattttagcggctgtagtttattatatttggtgtaattataataacaattttatttttgataatgtttgttactcggctaaaactatattagcaattaggtcaagcttagtcttaaagctataattgtttgtaatgtttctaaattcaaagctagagagaaagatatagttcacatgataaataatttttgagttatttgtcagggctgcatttttttttttaatcttatttggtggttatttgaataaaatcttccttcttaaaaaaaatgtaattgtattctatcaacaccacctttttcttttttgaaagaccgccatctcaatagtcaatatattataacgtcatatttttccatataaatgtaagtgtaattattcatttatctctcacaaaaaataaaaatagaaagataattatgtgtaagtcttaaaaattaaaaatttaaaagggatcaattttaattacaaaatggctccctctcaaaaaaaaaaaaaaaaattacaaaattggttatatatatagtaattttaaaatttgagtggcacatgcctccactgttctttacaactcccttgctccctgaatttgtacacattaaattaagctagttagatataattgtagataagtgatcatttataaattaattaatgaaaagtcagtcatatcaaacctttttaaattgtaaaagttgtaatttgcatgtacaacaagtcctgatggtggggagcgtttcatatatttaattcgcctaaaataaataaaaaaagaaaaggtttaagaaagtctggtcaatgtacgttccctaaaaaatattacttcagctaaataaaagtattagagtattgactaatacataata

SEQ ID NO: 204678 - DNA, 986 bp, Cannabis indica
ttaattattatttttttttatgagatttgctccacatttataaattaatgtagattctttaataatattttattatttatttattcatttccttctttctgaattacatatagaagtagatagagcctcatttctttctctcttttatatgttctagttattatcagtgttattatcaatttcacttttgactaaacattttttttatatatatattttttttttcttatttttacattagaaactaatcacttcaataatatatatttatttcttttaaaaaaataatatatatttatttgtttttacttgcagcccaattaaaaatattttataattagtatataaaataaactttttatattttatactattagaatatagtttgataaatataaaaaggaattattaatagttaaaagaaaaagataatacatgttataattttctctcttacactatagggtttcttcattaaccccatctgctgctttttcagagtttttcggccaggcccgcctgctcttattggtttaggcgtggctatggtgaggactagtgtaattcccacattgtttttgtctctttgtagtgttttacttttggccttcaagtttctcatttcttctcggtttcattcttacttgagtgcaggagtttgatgtcgttggcagtcatctggtttgtctgcgttgttaatcttttttgtcgatctctggcctcgaggtggtggtgttttcctagggttgtttcgttggctttgtgcggtcagatttggcttggaaatcatggtctgcatttggggtttggatcgtgcttctggaggcagcggggaggtggaggaccggttgtgtaagctatgtaggatcacttgtaaattcttaaaaaattctgaatattttaccgtgttgaaattaaggttcaaacaaaatttttattcaaacaataaaaaaagtacaaaaatacgtaactccgaaattttaaat

SEQ ID NO: 204679 - DNA, 1246 bp, Cannabis indica
gttttttaaaaactaaaaatttatttttattttatgattaaaaattaaaaataaaaatattacaaatgacacatatattaattatgttatatatatattaaaaagataaaaatgtcatcttcatgtaatgtaatggatcactttgtctcatttaactgaatatttttttttaaaaaaaagaaaacataatagttaaagataattaatatataatatactaataaacacctggaccatgagatctagatttgaaggattccactaactattgtccaaaatagttacaccaagagagtgaaaacttctgccataaaaacgaaccccaaatataccgtcacttaattttttatattacatgttaagagtatttttaatggaaatgtacgtaaattaatgatttattattaaaatataatttattttgtaaaatatttgttataagatatagtatgtcaaaattgattcaaattaaaatttatatcataataataaatgtattacttttatatttacttttgtagtatttttaatattttattattaaatttaattattgcattcaattataaactttttacatctattttttattattttacatatatgataaaattaataataaaattatcaatttttatatttttgatagaaacattaattaaatattaaattttatattaatttttataactgtttattggagcacaatattaaaaattaatataaataaattacaaaattattttttataccaaatataatataaaatgagtatcattttaatttctcacatgttttcattgattaggtaaatttatatatgcataaatacataataataataataataataaaactatagctagccaacatcacttaatttgtaattacattttataacatgtggcttttataacagctggcctggacataaaatagataaatatataattaataaaaaaaactacattttcatcctccaaaaaaaagctgaagaagaaaaagaagaaattaaaaatatgcaataatggtgggctgtgcaaatcttgaggttcacgaatgagatcttaatataacattataaaattgagattctattcaacttatataaatatatgagtctcttaattacattattgtatatacgtttattttaggaaggattttgcattttatataaatttatatatatatttataagtgcatgatgacagactaacaaccaacaaactgatcatgctatata

SEQ ID NO: 204680 - DNA, 1048 bp, Cannabis indica
tgatctagggttggctatccatggacaaaccctcacccagagtatgggtagccaagctctggccaacctagggttttagtccagccgagaaaggccactcggtcaagtccctattgcagcagatttttctctacaagcatagttagatcaaataagagatatgataaagggcctagctggccaaaaaccataagaccttgaactatataggttatggggatctccattctcaacatatatattaatgccttgcccttgactaagttcaagataccggtatggaagttgtatatcggaagagaagatcctcttgcacatatgaagtatttcaagatgcaaacggatctccaaaaagttactggtgatgtgcggtgtcagatcttttcagcaactttgtcagaaatagcctaaccattgtatttcaacctggctccaagaagattcaattcttggaattaattttctaaataattgtttacacaattcacatcctcaaggcagataacatcacaactggaagaccttgttgatgtaaaacaaagcaaggcagacctttgaatgattacattcaaaggcttatggctgaggccactaaggtcaaatgcctaacaaaacaaggtcattatacatccatactagagggcatgctttcgatgagtgacttttggaaagatatcaggaggatctcagccaacaatatgaaagagttccttgaacgagcagacgaattcataaacttagaggaagccatttgacaagcccagataggagggcatgtcagtagtaggcaatctcaaggtactatgaagcctcaagacctgccaaaaatgtaagcatgtacgatcaatgtcagccagccctctagtagcaagaatactggaagcaagcgcaacaataatagttctagctggaacggtggcaagaaagggaagtagaatacttcccctacgtcatgaaaccaaaagcagaaggaggagaagtacacatgccttaccctcctaaccaaaaaacctgagacaatttatatggccacttaggctactatccc

SEQ ID NO: 204681 - DNA, 955 bp, Cannabis indica
atcaatgacataagttgcttttaggaaatcccaactgacaaaactggagactttgacaaaatatatgcttttctgaaagagaactggaacattgccagatgggttgctcttggggttgttgtttttgaggtaagcgtgaactgtttcctcttgttttgtggataatttacatgccatgcataccatctacatggaattatcggtgctgactatgtctgtttgtctctctttttcctcttcacacttttaactgtgagattaataaactataactcgaacaatattcataattcatctattgctgtccgcatacttattgtaaatttaatcttcatgaaaatttcatgttttactagcttttctagagacaactaactgaattttactcctttgtggagttttgattgaatagtctcatcaccaacaagggcatagctcatgttaaattttcatatgaatagtaatttctttttttttttttatggcgtgggaaaaaagtaatctaagtttatttctttaaactaaagaggaaaaaaattcatgcaaacaagttagatggggaaagtattttgtggtatggttggaattatgatgactcacatcacatgtattatgatgtactagtacctctacatctgttaatatttgtatgattatttatttatttgtaaagggattctttgattttctagaattctgatttttctatttctgagccaggctatggtaattcttggataaacatttaaatggttgttttcttaaacttcaggctgtgcttttcttgttagctcttattgtgagggcggcaaacaggccagttgagtatgacagtgacgacgagatcattgccccaaggcaacaaatccgacaaccgttgatcggcagaccaccagttccagtgacaggggtacctgtttctggtaaccttgatcagcgtccaagcagaaatgat

SEQ ID NO: 204682 - DNA, 885 bp, Cannabis indica
tggtgttcactcaacactgcctcacaccctaaatggcctataaaagccaacacttccccaactgggtcatttctactgcccttcagtttctagatttccaaacccattcgacaagattgcagatacccctgatttccttttgctcttcctctgccgttgtcaggcaaagtactaccatcacacggcgtcttctgcccttgccttggctttactgtgcaattctttatgcatatatacttcttttaatctgctagggcaagaagtgatagtaatgtgtatgtttatctgctttgtttgttttcctcgaaatgacagccatggtcgacattggtgtaacgcctccttcggtgggtgtccaatgacgcgtgtctttctttattactagattttatgtactattttattatatatattgcttctttctcttttttttttttaaaaaaaaaagagggtcgaaatcgaagagttcttcgtgtgcccttttctagcagtttcaggcagcctttgcatgctttctatatatattttttaattttccagttttgcttggatattttgcacccgatgtctgtctttgtgaatcgtttgattcctttcgacagtcatccagaggagtcctctttccagcagttaggggacccctattctcctttttgacttagggtttgatgtgggggctaactgttggatttcttgttctttcagatgagtgaagtccttcgtgatcttcacaatcacagtttctttgggttcgaccaagaaattcttgatctctaccacgatgtgttgggttttgtgccctaaataaaacccattacaatctcactagttatcaatctaagaaatttgaagtgacttatgtttgcatgaatttttcatgcgtat

SEQ ID NO: 204683 - DNA, 1542 bp, Cannabis indica
gagcttggtcatctgattttaagactcaaaattgtataatttatttttctttaatttttacctaaaatttttacgttcacaatattaatataaattaaaattcattatcatttttttttttgtttattgattagtttagatgagtttgaacgtattgaatatatgttgtgatactcaaaagttttttctttcagtattaaaagctcacatttggaaattttttgggaaaataaaatagaaaattgtttgatgtggtgaatatatttctaggctatttttgggaaaattgagctcgggggacgaacgaaattcggttggggatgaaaaatcccataaacagcgtccaaaacagtgtagcagaggtcgagaaataaccggatctaaatccaggtggatcgagacccatcgggcgaagaagaaggttccaatctcctaggcgcaaacaacatgtcgtttggcatccatgggttgtgatcgttttcgaaaaatgacacatacgttatttacataaaacgacatgtcatttttcacgacaaatatatatatatatatatgaaggggcttggggcgtgtgtggggtccaaattggaccaacttttcacctttatgctctattttaattttttcacttaattgttttgattatattttgagtttggtcaatttaaattgtcaattgacacataatcacatattagtttaaattaatttttttcacaattttttttgttaatttaattggttgaaaacataattatataaataccataaaattattttatagatgattgatatttttataatataattatgttagtgaataattaattgaatgtttatgtactcacctattgtgggtttaaacatatcaattttgttaatcataatattgtgagaattgtgacaaatttatagttaattaattgaatctcatacaaagtcatttttatttatttatcatactataattttgtgatatatatgcttttggcgtttttgagaatatgttgtgaattttattgttgctgttattatgaattctttttggatatattttatagaaaatgtgtaataaaatattgatcaatttgcacatttatgatagaattattgccaatatttatttgatattttcggaaatagaatttgttagaaattcaaaatgcacaattggccttactgaataattatgagattaaaattactcattgaatgtgttatatttacgcgtcgtaagctttcacgtgtcaattatcgatattgtaatttatgtaaataattttctcctgtatcactcacaattattactaagatctatacatgcaatttagtcatcctgtcgataatttttattattaggtaggatgcttagatggtgaaggaaacacattagatgtcatgaactacacaatcttttctaccttattagtagtggattaaatgaatttggttataatatttgaagtagttgtccttacctgcgtaagagtcaatatggtttatttgaatgactctagcataacatgatcgtttatgttgata

SEQ ID NO: 204684 - DNA, 536 bp, Cannabis indica
tgtgaaattataattttttgctagtactttagaaagtaagaaattattatattatgaaattactatatcatctctaaaatcagtaatataatattttcaaagctattaaagaattttattttcgagctatgacctttgtttttaaattttttagtccttcataaatgatccatctaattttattacacgtggcaaacaaagacataacgtttaattaattgtcaagtttactatttaaattaaaaaataaaaaattatatattttaaaaatcattaaaataaaaattattaaaaaaaaataaatctcatctcaatcacatctataaatagtttgaaaaataaataatttttttcttttaattttacatataatttaacggctcaagtacttataaaagtttcaaaaatacaacttaattattgttactgttaaaaattaaacttaagtatttatcaacaaccgaaaattaaaattacaatttttaatgccataaattactcaaaaaaaaagaattagtaaactccactctatattt

SEQ ID NO: 204685 - DNA, 1481 bp, Cannabis indica
aatcaggttagactcggtaaccgaaatcgagatgtgaaccgttctaagaccttattgtatcaagacgagtgagtgtaacacgtgggtctacgtcacgtagacataaatgggcatgtgagcgtaacacgcaggtctatgttaaatagacaaatatgaatggcattattgtatttgtgatatgttaaatataattgttgatattatttactatcttgctgggcttggctcacgggtgttctacagtgaaggaaagggtaaatctatttctgattagccataagtgcgagggcttggcaaagtatgtacatgtttgggcgacagtagaccaagtgggttggggtctaccagtgttgtacttttgtaatctgaatttgccgcttaggtcggctagtgaaaagacttgtaatactttgtaaaacattttagggattccgaaatatgtagcttttgattgtaaagtttattacaagaatttttttaattcttttttggattaaagtttaaattttccgcaattatctttgtagtattcccggttaaggggattagggtttctataatcggttgtcgtgacatgcctagcaaccaactcagaataaaatattttgaaagttagagatatatgatattaatattttttataaacttaagtagcaatagtctttattggcttcaaaatatcattgtataatagattaatatagttagttaccgatcaaaattaggaaagtgttttcctcatcatattttttttggtagtttctattctattaagagatcatgttttcctatcacgaagattggttctattaaatattttagttttttctatcatcaacatttggttctttcaggtttagtatattatataataaactgatgtgatcaatgcatgatcaagcacctcgcaaataacacaatgcaaagatttgatcaagaacagaattgaacaattgcagattgaacaaattaactatgacagaaaaacaataaaaccagtaatgcataaaccagtaatgaaactaaagtataacagaagtaggcaaattatcaatgacaagaaaataagggaagagagatcaaacacaatcaattacgaggttcgaacaaatgatcagttgatcaattgcctactcctcggccagaacagccccagtggctttgaatctttattgatgctagattgagagagaattacaagttgatttacaaagtgttcatgacacacattcactcgagaagcaaagcttcaattacaactcatctcaccagaactctctcactgaattacagtctaaactagctcacaaaaatactatgtctcttccttgttccaaagattgtaactcatagctttatatagcctttggcttttagtcttgatcctaactgtcataactgacagttaggtaagttggttagagttagttgctaacatcttggccaaaagtatatacctctattagtgaccaaattcaaca

SEQ ID NO: 204686 - DNA, 735 bp, Cannabis indica
ttaccacatatgcattaagttttcgacaaagtatagtgtcaggtgcctaagtggagaccaacagtctactcgacaatgctacaatactgctctgtccaaagcaaaaatggagaaccagccccccaagagctagaacagtgagtccagttaggggcattaagggtccaaccaaggcgaggagaaagacatagatcctcgtttggggatcctgcatacatctttgggccagtagaggaattagaagaagtagagatcgacccctccataccgacaaagaaaatcgaaattggtcgaggtttagagcgaaaaataaaatccaaattgattaaatttctaaggacaaacctgaacctagttcaactaactagcaaggaaaaccagaaaaagaattgctcgatactctaagaagaagttcatcccattgccttaagacacacatcatcgaagttgttcgagatatgctatattatgactttggcttggaatatcataatctggaagaagcataatatcaatcttgtcgaatataacatgctctaacaaagtcaaagcccacctatttgtattttggatagaggtcattatttttatttatttcatgtatatatatgaatgtacattaaatatgagtactattcccattatttttatcttcccactaaaatggggttgagtaaccactatcctacttctataaatagtggttcactctatgagaaaatgatgacaattttt

SEQ ID NO: 204687 - DNA, 929 bp, Cannabis indica
aaataacaaaaaaaaataaaaatgtgtccaacaacatcaattaggaggacttgtgttatataataaacccaattgtactaccatttatgtaaagttttgctaaccccgatgcagtcatcacattggtaaagctaaatgtgtctaattgtacaaactaaaatacaaaaattataaattgacaaaaaaaatataattaaattgaacaactccttattttaaagagggccaaattcaataacagagatactatatcttctattaccgtaaataagaatcgactgtggctgagagaaatccaagaagagaagacgatggaagagatactatatcttccattactgtaaatttacaattcattaagcggaagacagtaaagttgacatcaaggtgcgagcgtgctcgaagaagagaagacgatagaagtcgcttttctgtaaagtcatggctatgggttctcctctacgaataatttgacgtgttggtatgggttgtgttggaggctaaggtttttgctccagagagagaataggtgaaatggtttctctcttttccattcagtagtcgcaacagagaagagaaagaaaaatcaagaatcctattttaccattatttttgagaaattagttagatatcttgaatatttgaggtataatttttcggcattctagaatcttctctcacgattcgaggcttcattcgcataacaatagcaattatttattattataaaattaaattatattattagtaacctccgttaaagttaacgcagctacgttaaaattaacagataaataaataaaataccgttaaattaagaattgccgttaaataggcacttttaatatataaagatatataatttttcatattaataatatatttatttcatattaataatattttaggttttttcattcttatatttt

SEQ ID NO: 204688 - DNA, 1928 bp, Cannabis indica
tatatataatatgtatgtactttaattaaagaataagatcactttgttttttaattaaggtaatatttttagaagaaagatagaaaattctactaaaatagaaaaatgatactaaaaatgttatactaacaaataaaagtggagctatatgaaacaagggcaatgctaggtgtagactaggtatggcggttacctcagatgaaaatattaagatcggtcttaaactatttggagcttaggtacataaatttttttagggatttatacaaatatatttctggtcaaataaaattaagtaagattgtttgatgtagtagtaaagatccttttaaaagttaaagagatcacaagtttaacactccacaccttcttttttattttatttacttttttttttttgaagaataactaaaatattattgttggaatttgaactagaaattatgtaatataaaaatataataagtcattctataaaagtcactttaacataattaaatatgttttattatatctaattctataatcttgttgaaattttgaagtctggacaagatataaaaatatgtagtcgtctcacttcaatttttatagcttcgcccttgatatgaaataggagattctgtttgtgctccactaaataaaaagtatactctaatatttaaaaaagttaagtttaatatacaatttcttttaatattttttaatttttttcttcatattattttatgttaatttgagtagttattttaattttatttttctatattttttttaaaatttgtgttacaattttttttcttactaaatttcacatatatatatattttttttttaaaattttttaataatatttataatatattttatttttgttttatagtaatagatatatttttttaagaaattgatttggaagaatttaaaaaacaaataaactaatttaattaaatatatatatatatatatatatttaatgtaaaataaaattattgaaataagatttatttataaatttttgggtataagatagaaataacataaaaagtttaaatacacaaaattataatttttatttatgcaaggaaataaaataactaacttagaaactaattttaaaggacaattatgtttattgcataataaataaatacatatgttatatttttaaaataataaaaaaaattattgacttattcagtgcttaaatgtttgaaagatttttaaaaaaatggattttttcatttttactcttcaatatatatattttttgtatttttacagaattttacatagaaatacttatagcaactaactgaaatactggagcaacacaaactgtaaatttgaaaaaagaaaagtttaaaaatactatatgaggtaattttcctttaaaaaatcactataattacaatattaagaataaatttaaagtaatacaatgtatgtaatttatatactaactaccacgtgcgtagcatgtaaaatttaactattttgataaaagatgagaatataaaaataggctgttatcgacttgcctatgtatttttgcataagtccaaatgtatcactcattttcacatttatatattggttaaattacggtataaatttctaaaaatttttgataagtttctaacgttaaatattggcagtgaaagtctttaaactcactattttcgtaagtccgttaattttcttttctaacagttccgttaagtaattaaaaattcaacgtgttgacaaattattattctaaatcatattttttcattaaaaaattacaaaaaaaaaaaactaaaataaattaatttaaaataaaaaaaaattaaaataatttaatattttttaaaaagatattaaataaataaataaaaactttaatatattttttctctcctcactgttcaactctctctctctct

SEQ ID NO: 204689 - DNA, 603 bp, Cannabis indica
tgtcaagtgtgtgggaaatatggtcattctgctgcaatttgctataatcggtatgatgaaaattatatggggaatcaacctaacacagaaccatctcaggacaagcgattctcagccctcatagccactcctgagatgcttgctgatgacaattggtacgctgacagcggagccaacaatcacttgacctcaaatccagataaggtgcaaaacaaatctgagtatggaggtaaagaacacatcactattggtgatggtacgcatctgcctatttctcatattggatctggttttcttgattctaattcctctaagcctttgttgctgcataatttattacatgttcctaatatctctaaaaaacctgattagtgtctcaaaaactaacagcagataataatgtttctgttgaattcttctctgattgttgttgtgtgaaggatcaaaactcaaggaaggtggttctgcaagggattcttaaggatggaatttatcagcttcaaacaaagccttaaacacctcaacttcactcacccttttcagctgttgctactcactctcaaaatgttaactcaacttctttattttccctaaaagacattt

SEQ ID NO: 204690 - DNA, 1134 bp, Cannabis indica
tattttcaatttagttgatacatgcccttaattttgcacatgcactattaatagtagacattcgagtttacaaagatcttactggtcgaggtttattactaaattttccatctttgtggtactctgattcaacccttgcccaaaacttattacctatttagtttctccctataattggatcttgagaaatgtcaacatagacccgcacaagtacacatcttcctctatgattaaaaagacccacgaatggaagacatttttgaagaaaatatagctacttacaaaatatattaaaaatatgtgatcaaattgaatgagaggaaaatacactgcaatggttgagatcgtagtcaaataattttagcagccaagattaaatcgcgagatttcttatcttctaattttagattcaaaaaataaggatgtggtgtgacaatacactacaaaagttgagatcgtgatcaaataatttcagtgtccataattaaatcgcaaaatttcttatctattaattttgaattcaaaagataagaatgtgaactgacaacacactgcaacggttgaagtcgtgatcaaataattttaacagccaagattaaaccgcgaaatttcttatctcttaatttttgattcagaagataagaatgtgatgtgacaacacactccaacagttgaaatcgtggtcaaataatttcagcagccaagattcaaccacgggattttatatcttctaattttaaattcaaaagataaggatgtgatgtgacagcacactgcaacggttcaaattgtagtcaaataatttcgacggtcaagattaaaccgtgagattttttattttctaattttggattcagaagataaagatgtgatgtggcaatacactgcaatggttgagatcatgatcaaataaagggtgccactcatattaaaccgcaacatttcttatcttctaattttgaaatcataagctaaggatgtgatgtgacaacacactgcaacggttgagatcgtggtcaaataattttagcagtcaagattaaatcgcaagatttcttatcttctaattttagattcagaatataagaacatgatatgacaacaacacactacagttgagatcgtggtcaaata

SEQ ID NO: 204691 - DNA, 706 bp, Cannabis indica
agatgagattttgtagagacttgcctgaaaaagcagcgacaaggccttgaacttgctggctccaatcgaatccacgaatagcctcatgcacacctccatagtcccttacccataacttctggccaattttccaagcagcaagcagttctggctggttgtctttgattgcagcaggtattgatttccatagaaaccgtgcactattactgcaaccattcccaattccaaagatgaaatcccaaataaaacatcttaaacagctttttatttaattctataaacccaatgctgcaaattagtatcaagccttaataaactctcactcaaaacccctttacattactagcttgtagcatatagcacaacaaactttaatttcttgtgagcaacaacattactcaaaaaccagataaattatccaaaaaaaatccctcaaaatctctatcgcggaaatttcgaaatcagaacaatataattaaaaaccgcatacaatagacaatatgattaagctactaagaatttgtttttatttggtgttactcaaaaattcaaataattaaaggggcaaataaaagatcaaacaagtcattttaagtaaataattgtataaacatacgtatcatcggaataaatgtgacccagaagatgaatcgcgtagggccactcgtcctgataggggacgccctccgccgcaacctgtacgaag

SEQ ID NO: 204692 - DNA, 725 bp, Cannabis indica
tgatttttgtaatatagccctctttttttccgatatttttttatttataaagattttcaacacacttgatatcacgtgcaaagtaaaagtggaatacattaattcttacttcgaatttatttaataacctgtttacaagactattttgaatattcctctattactatgagttatttagtaatatgaagttttcagccaaaccaataatgtgggttgatgataatagaaagaatatatacagtgtgaatgatcataataaatatatatattttttgaagagagaaaaacttttatttcaccaaaacaggccaatccccaatccaagattaattacaaaaatgagaaagattaattgaagaagtgttttggtctcgatagctaatataatatctctacattaattaaaaatatgtatatatatatatataatttaataaaaattcaacaacaaaataaatactcaatcatgaagtcttagaagctgagtccaaaattgtcactaaaaaacaataatctccatagagtaatctaaaaccgatgacgatcaaacaacatttacttataatgaatataattaagagtattgttattagcacaatcttatcaatatttaatgcggaatgaaagaaagtgttttatgtattaatctgtcttaattaattacagaatgactagaggtatatatatacaagagaatagttgaaaacacacaaccgcctaaacta

SEQ ID NO: 204693 - DNA, 936 bp, Cannabis indica
acttatgtgattattttccaattctaaatataaaacactttaccccacaatgtatctgactcattttttttatatataaaaaacactcaacttaatttcaatacctaacaacctctttgatttttggtacatcctctttgccgccatatttttcttgttacaaaatgaggtttctataagtgggattgccatcaattcattacattttcaacttattataacttatttcaacatggtcttttcttcttttctttttttctcccaaataaaaatttggatttgttttagattttttttatgttagaatatttatgtgaactaacataattaagtattgttcactcaagaccagtatttatatatataatgattagtatataattagtattgcatggtattatcatcaagccataataaaatagacataatgtattaacatgttcggggccgataaacacgcttaaaaacatttttatttaactcattgtgccaaaataactaattctcttaaattgggcctctaggcccaattagcccataatctctcataattggataatctctcaattagcccaattaacctcataatctctcatataagagtttgtcttttatttatggtgatgtgtgatgggacaatggtatgcgagagaatgaaagagtagtgttcattacacccaaattttcttgctttgcttcatgtgtgtagatcaaagaggtttatgaaatcaacaatggttcatagctcttacaaattcaataccaaatattaaataaggtatgtttactaattgtaaagttaatgctttaaaattaaatatttgatcttgcatgagatgagcatgagtttgtattgattattattgataattgcatgctcattgtgtagtaatttttaacaattagtatctaaagtcatctcatttgattttagag

SEQ ID NO: 204694 - DNA, 688 bp, Cannabis indica
aaaatattctcaaaagataattcacaaacatatattcccgtaatatatactgagttgctcaaaaaaaagcaatcgggctatggtgatcatacttatatacaatctcccattgtttctcttaagattagacaatttcagatttttcacaataccaaaaatgtttaaaggaacaaaagatttaaaaaataatacataaatttaatgccgatatctttatcaataagcaaacttagaaaataatcttacaatcaaaaacactaaaaccaaatacatattttaatggaaggttataatcaatcatatacttatataaattatttcataattttattcaaaaatacttctttttgagaattagatcaattgatcaaagtataaataaattactgaaaacaaaaataatactatattataaaatatatagtaatcatattcataattataaatatatatatatatacatatatacggttacttgtcactacacagagaatgagcaacccaaaactgcatctattcaaaatcttggattgtttttgccatatcaaatccttccgttgttaaaattttccttctcttccattgaaggcaatagtgaggatcgtttcttgtaggcccccgttgacaacaactttctatgcgtcagagtggagaacgacaccgagaggaagagaggtaatattgttgc

SEQ ID NO: 204695 - DNA, 619 bp, Cannabis indica
agaaaaagaatcttttgatagcaaccgtctttacaggcgctcacctagtttcgtccagccacgtggctcttgactgatggttcaagcatgacgaaagactttttttccatgtcataaatgctcattttgattaggataaacgatttaaagaatgagattgaagagttatgcaatgactgcattgatcaattatcaacattatttatataagggtaattattagtttggactttttgttttgtaaaagttaaccatatgttttgttagattataaattggattttgtgttgtattttccaaaatggtataaagtgataccctaagctcaatttgcatttttttttatataatcaacttaaagtcagttcttaacatgaccaaatgcgaaaaaaaaaatattatcactctggtcatagacaccttcagggcagggcaagttattaagttttattttaataaaaaattgagcttatgatactatttttgtatcgatttggaaaattcaagatttgatttgtcatttaacaaaatagaggctctaaaccaattgataatttttgcagaatataggattcaaaatgatatttttcctctatataatgcaatatttgaatgagaa

SEQ ID NO: 204696 - DNA, 803 bp, Cannabis indica
gacaggagagaagctaccagtttggtttattacatcacaaatatagcttaagcttgctttgctttcgtcaacacaacttaaaacactaagtttaacagtattctcaatggttttactcaagtaatgcactgttttacacttaccatcaaagatgcagcaattccgataccaaacattatacattgtcgctgaatacgctgcattctgtaatgatctcaacggctctgtaaaatcattccattccatgttactcctcggccaaacaacattacccagccaagaagaaacttccaacaacaaccttttagtgaaggggcagtccacaaatagatggttatgagtctcaaagtcagtatcagaaatctagcaatttaaggaagggagagacagaaccttgccgaggtgatctcttatgagtagatgattattgacagcttgccaacaaatgaacgcgtattttagaatgaccattttgtgccaaactcttgcatcttaattcacttcctgaattgagataagctgagcatagaaatatttttccttgaatctcccatttctagtcgccttgagaacctcttccttgtcaatgatatttttaagtcttaatagcttcttgaaataccaattagcatcattcttaaaagggagctgccaaaagtcttgatctcttaagtatgtagaattcacccattgaacccacaagttatcttgctttttcgatatagcccaaataaacttggccattagggtgatattccatttcttcccttcgcaaaaactaagaccaccttgcttcttaggaa

SEQ ID NO: 204697 - DNA, 937 bp, Cannabis indica
attgcatgtttttttttcttaaaattatggaaattacatgatttaaattgttggcaaaaaaaaaaagaaaatgtgatcaattaatatttttttaagtgttttggaagctgcgtttaccacaaggcgaggaattgtgtgtagcgtggtgtaaatgggtgcattctaacgagagtctagttgaagtcgaagtatgtggaggtgttgtttttgtgtccagtgtgtcatttggcaagtgagtccatcttgcattgtttagttacttgtcagtttattcagagttggtagtatgtggttaggttggggttggttccttttgttgacggctcttttggggactaggtcatgactttatttgctcagttggatgagggagaatgttgtcgggtggtcatgttgtgttaggcgatttggtatatgtgtaaccaacttttgtggaaggaaaagaagaatgtgatggagtatgttgttaatttagtttggatcactcctatcaatggagaaaagctcaagataaaagtctatttctttcgatggatacttggtgtctttcgggcgggattgaactttagtctaactagatgttgataaactcaaggtgaatatcaatgctgccatttttgaggagggcaaaaagtttggtagagtgattagagatcaccacgcttatgtggtggctagtatatcaggattaagggcgggtgttgtgctagctgaagttgctgaacctatagcacgaaaaggatgttgtcgttgctaaaagagatttctcagcagtcagcagtgttgagaccgattgcttgatgtttgtgacagtcagtagtcctgtgatctgtaaggggaaataccgtgtaagctgtgcaatcccacatcgcctggggaaggtaaagtgtgatgattctagattgtgtaggtatgggactacatagttgaagaaagc

SEQ ID NO: 204698 - DNA, 628 bp, Cannabis indica
tagagggtaccaagtaatgatgattaataaaagaataaggtagcaagtttatattttaataaaatacagagcatttactctttcttatcgtatttataaatatcaaattacttttagacccaagtttttatttttcaaatccaaatgttcagagtagcatttggcaatctattttgcttcagttgcatttgagctcagctcatataagtaactctatcctcctattttcttaaggagagagtgaatatcccaataaaaatatgcagaaatggattgcatccaaacaaaacaaaacaaaaaaaaatagaaagagaaaaaaggcagtgttatggcaatgggcatagcctatgatttcacacaactcctaaggaagaagtatggcaatgggcatacccaatgttcaaaaacaaaataaataataagtagatcatatggaaatattcttaaaatgcatgtactctgatttatccttagagaatgtcaattgtcaaaatatacgtttcataaaagtgagcaaggccagaggcccggacaatacaatagaataattcctcgcaaaagctcttttagaaactactcttatattgatgaatactcgtgctaaaaaggaaaaaaaaaaaagaatttt

SEQ ID NO: 204699 - DNA, 1014 bp, Cannabis indica
tgttggtctaacttaatttgttgaatcgtgtaaattgaatttaatttgttattttatgatcaaccctattaatgagagcctctctctctatctattttattatgttttacatttttgtagctaaaattaaggggagaagtaactaaatttacctctaaataaaattggattcaaatgtatctcattttatgagtattgtactcaaattattctcatactctcacataacaaagacacaatttcaaattgtgttttttttggagatgaatgtgtaggttcgtgaaaaagtttggagcaaaattttaattagagaaaaatgtaaactaatgtgaagtgatagggataaaattgatagaataattaaaaaaaatagtaaacataataaattttgaaaaaagaataaaaattaaagacatcaatttaaaagaggtgttagtgtaatttcttcctattaaaccaaccacccacacatttgtttgtaaatcttgttattaataatcattttatattgaactataaaaacgtgaacatatcaataagttgtgttttccttaattaggcaaaagaaaagatgatgatatagtctcattcgagcttaggttggatctcactgaagtactctgataaaagagtaattgattaaaatttaaatttgtatattttaaatctttaatttaattgtgcatataaaattaatttaaattaaatattatataattttaatcgtaatattattttagtttaaattatttttttactctaatttgtatgttatttttaaaaattaaaataaagtgctatatatgaaaactgtgtcaaacccaattagattggctcaagcatcttcccatgcctttttcaactcaacccaatcacagttcatcaagtatttccgtgctccaacgtccaagcccactacaaactagttgatgattcaattcaattcaatttaaggtgggccattaattattgggataatttcaaagaaaacgtaaaataattaaaaaaaaaaaa

SEQ ID NO: 204700 - DNA, 2574 bp, Cannabis indica
ttttacatgagaaattaatggatttcctttttttagaaactgaactcttttaggcgctcacagcctcacactctatcacctacaccccaacgtcaccctgcttgcttttcctcacacacgacaccgcctcaagctcaccttctctctcgtgaacagattcgtttaacagagcatctcatgccccttcgcacaatgccaaccctgcttgctttccctcactcacatctcatctcaggcgtagagaaacatttttttctttttatgttcttttaatctattctttgactgtagtccgaaggtgttgttaatttgtgttttattttttattaccgtataaataatgtttccatagttagtgtttgtgtggcgtttggcaacacttttattttttaatttaaaaagaaaagtgtgtttattttttattttatttaagtcggattcgggtcccaagtctggctcggggttcggggtgtggttttggggttggggtccgttcgggtctgcgaccgagggctgggattaggtttgggatccgagtccagattagggatgtggactggggtctagggtcgagatcgcgttcgtgggcgaagttcgagtctggggcaggatcctggcctgaatctcgggtccgaggtcggggtttagggtcagggtctaggtccaggtttggggctggggtccaagtccagggttgggggctagagtccaagtccgggttcaactcccggtctagggctggctctagagctagggttgggtctgggtctaggtttgaatacgagtccggggtctaggtccgggtttgggtccaagaccaaggttcgggactgtgtccgtggtttggggctagggtttgggtctgggtttgaggccaggtctggggctgcgatcctggtccggtctgagtctaggtctattcaaactccaaaatattgattaagaaaaaaaatatgtttaaaaaatttttaaagtagtctttttttattattattttttaaattttcactttaatttttagctcataataggcatagcagcttttgataaagaaatcaaccaagaaatcacttctgttcatgggttttcagcttatatgaagttttagctcattcttcaactgccatatataccacaactcttcaaggtaaatgtgttgttattttctacccaagcaataaaaagctacttgctttcaccagcaaatgcggttgatttcatggacaaagggcttcaggtctcttatcttatcttgtgaagatgaacaatctttagctaaggtccacgctcttgtgattttgtctggccaccgtggaaacttcaatgccctgcttataaaatcttatgcacgcattgctgatacagtgacagctcgccgcctgttcgataaaatgcctcaacgaggtgtagatgtgtggaatgccatgatcattgcttattctcgagagcacaactctaatgaagtcctaaggttacatcgtcagatgatcgccgaaggtgttaagccagatagctctagttttacggtcgctcttaagtcgtgtgcgtgcttgttggatcttaggttaggcgaagaaatttggtttaaagccatagaatatggctacaagtatgatgcttttgtgggttcatctgttttgaacttgtatgcaaagtgtgggaggatagatgatgcagcgaccttgttcgatgaaatgccaaaaagggatcttgtttgttggacatccatgataagtgggtttgtccgaagtgggaagccattaaaagcagttgatatttataggcgaatgcaaaaggagggtgttgaagctgatggggttgtcatcttggggttgatacaggcttgcgtgagccttggtgactcaaaactggggctttctattcacgggcatttgattaggagagatcagcctttggatgtagtacttcaaaccagccttgttgatatgtatgctaagtttggaaatttggatttagcttgtttattatttaaaaggatgactcataagaatgtcgtctcttggggtgctttgatttctggttatgctcaaaatggttttgctgtggatgctcttaaaatgttggtagaaatgcaaagtagtggttttaatccagaatttgtgtctctagtgagtgcacttctctcttgtgctcaacttggttttttgaaattgggtaaatccatacatgggtatattgtcaaaaggcttggatttgatcaagtttcaggcactgctgtaattgacatgtactcaaagtgtggatctgtttcctatgctcgtgctgtatttgataagacaaagactaaagacttgatattttggaatgcaatgattacaagctatggaattcatggacagggaagagaagctttactgctctcctcgagatgacagaaaatttaaaacccgaccacacaacttttgtttcacttctttcggcctttagtcactcaggtcttgtggaagaaggcaaaaaatggttttcatctcattgcgaaatgattttctaagattcaaccaggggaaaaaccgatttaatctttgttatggtttgatcttttagtctcgagca

SEQ ID NO: 204701 - DNA, 928 bp, Cannabis indica
aaaaaaaaaaaaaaagaaatgacttaagaaatgtgaggtaagacttgaactagagagaacctatcacttgagaattgagatgagagtgagtcttgctgtcggctggtttgagttgagagtgaggcaagaacatcaaattttctttcactccaaagaagaaaagcaaggcaagaacctcagttctacaagccaaaaagacacaaattaaagaaaaatatgagtaacttacctatgacattgcctcagtattgtcgccgtcgccactagcattttgtcgccatctccgtcgttaatctggattgtgagtgtgtgtgtgagttctgatggtgaatcgataaaattttagaggagatagtgagaaactgagggaggcgattgaggttttttttttttttgataaaagaaagagggaggcaattgaaactattaggggccgtttggtatgcagatttcatttcatgagaataagtttaatattgctgggagagtgatgaaggtttaaacctaggaaagcaacactattgtgtttggttatgtgcagtaatattatgatgatgcctaggaatatgaagattagtttgtttggttgacataggaatggaatgtgacaatttttttttttttaactaataatgattattttttaaaaaatactaataatttaacattttttttctttttaaattttcaaaataatttttatttattatttttcatataattttatataaaaaattaacaataataaataatcataaagagtaaaatatatatatatagaaatgtcaatcgggccgggtcgggctcaacccggcgttgacccggcccgacgcgatatctctttggcacgattcggtcatgcccgaccacttctttcagcctggcggattaggccgacccccttcttttttttttgaatggtagaatt

SEQ ID NO: 204702 - DNA, 876 bp, Cannabis indica
aataacgaattaatttaataataattggtgcaattatcttaatgtatgaggcgtttacttttcgtttatataaatatatatattctaaaaaaaagcttaggctgtagaaaaatatcttaataaagtgatgccaacttgaattcttgaaaactcattaatcttaaatctcaacaagaatcccattatatccaatttgactttctacataactataagatatatttatataggggtgtgcttgacaaacctaaaaaaaaacaattgattgtgggcatgtttgatatgcacaaagatttgattcttttctttatttgtttttctattttttgtaatgcacgaattcattaatatattgtaattttagtttttatttttgaaagaaagatattttagtatggctaattaggatttttatcctttaaattttgatatgtaccaaatcatgtctaaattttttttgccgttaaaaattctccttcaactattgagattgttagatttcaggacttttgtctaatttcattcaattttactatttcaatgattatttatgtaccaaatcatgctcctcaaactttgatatctaccatataatgcccctcgtattttcacatgtactaaatcatggcccctgaactttcatccatgttagaatttttttactaaaattggacaaaagtccttaaattcaacaatctcaataattcagggggcatttttaacgctttaaaagttcaaagggcatgatttggtacatgtcaaagttcggagggaaaaaatcctaattagccttttagtattattaagtatcattttatcaaatacccaacgaataatatatgagagtgacctaatgtatatatatatatggaagag

SEQ ID NO: 204703 - DNA, 1529 bp, Cannabis indica
tatatatgccttgagaaaaagaaaaaacaatctttaataatatcaacattaattgctttcaaacagaaataataagagttttacacgcttactactatactcattttgtttttatttagcctttcgtacataataatttaactaaacttggaaagaaagaatcatatataaatatattatatgtaggtcatcaattcaaaatgatgaaatttttcatacataatgaccaagcatgttaactatattcagaaacaaaatcaacaaagttttaagctcaaagccattcatttcggccttagatgtgctatttaatcgtctagcgaaattacttgtgaagttgaattgtcttatcacgtttattttgtttaagagtctctttagtaaacgtgttgtgttgtattttaatgtataacattttgtattgggttgagttgtaacgtatcacttgtacaagagtgtacacataaatataagcaattcacggtggcagttaactgtgaaaaatagatgatattttaaatttgcaaacagttcaatagtttggaaggttttaccgcaaaaatttgaactttaagagttaggtgcaagtaaaacgatggttgagagagtttagttgccaaaactctatcatttaatacaaaactatatttggtattgacttgtattaataggtcatataaaattatattatctttataatatattatctttataataaacaaaccctccatcttggacattgaactctgccctagacatcggatctggattcgatccctagacctcggatccagactcggctcttggctcaaacccaaacctgacctcagcccccgaccccagccatggacctcgaaccatcgattcaaaccatggcccccaaccttggaccccagactccaaaacctagaccacgacctcgacccgacctaggaccccaactccagatctcaaccccaactttggacttggacccagactttgacccaaactcagccccgacctctgacctcggccctaacctcaacatcgactccagactctgaccccgaccctagtcttagggtaggccttgggactccgaaccccaaccttacgccatttaaatgtgtagaactattgacacctatgttgttgggtgttgtgctatctgacattttgttgatttgtaatgtaatgactttgctcatgttcatttcatctttagtcctgggagaccaatatagtatatcacactcactcactaatttgactatcttttcttctaataacatgtgtgtgatggtcggacagtcctaactcggtttgattgtttgatcttggataatttatagcattcttaatgaaattacttctttcaaggaaaatgtggtagatttgagaattctaataaatttttctgttaaagctaaaaacacatgtttaaatatgaaactactgtgtgaaggtcattttggtaaaatgaacctaaaattatgaaagatatattggtatattgtgaaaaaggaatcgtgtggtaacggtttgtt

SEQ ID NO: 204704 - DNA, 661 bp, Cannabis indica
aacttgtttcgcttgattggccagaatgtatagctcatcttcataccatacactactcacttttatgctagtgatgttatttttggtaattattctttttccttctaggatctttgttgaaccatttacaccaaaagacagatgcaaaatttctaaaagtttaccgtaatagtcaaaaaaatttgtccccttaatagacgcaccactattttgagttaagtattttttttttatctcttttgagtgtaacaaatcgaaccccattcattgtacacactggataagagtaaaccacaatatcatacccagatgccagagctagcagttcatcaccatgctctaaagatccgagatgatttagttcgtgcatttgcagatagtaaaatattctaacataaatttgagaatttagaacaatttagttcaaagtctacaactgtaaggcaataattacctttgcatgaaaccatttgggaaattctttctcatgtaaaagattatggttagaaactccatccctctgtcgaatctcattgaagtgttccctaatgtagaaaacaaattgttacaaattgatgtgttaattaaatatactaagcattaacgtaatagacatttattaacttactccatataaggatcgatttgagaacaattatgc

SEQ ID NO: 204705 - DNA, 1284 bp, Cannabis indica
actttcatcctaaatatatatattttgaaaatcattctaaatatattgatgtacagtattaccaaatctacacaaccatataccaaactgaaaaatagctactcctattatataccatgtatcacatatgacatatataccaaataccaaactaatatatatatagagagagaggaccacatatgacataccaaactcaaaaaggctactaataaaaagtgacactagctactccctcacatttcaaacaacttagtaagccaagatcactaactaatacaattataatagaaaaaactaatataatagttcttttttgtatacatttcatcgaattatatcaaatcattatagatatcccttcaccacggttaatataagtcaaaagagtgttatgttggaaaaataattaaaatagaatactatcaatttataatataaaaaaagaagaagaaaattaatgttctctaataattcaaatgctgtacctatcagataggaatggagaaaaaagaaaaaaccaaaaatctaggtagtactttttctttctagccacgttcaagccaagcataaaatcatctcaaacgaaagaaaagcagaaggtgcatggaccaccaaatatagtaaggtccctgtgcataattaaatgtagggattgagtttgtttttagcatttttcaactatttaaatgtctgttaattggtggggtttgggagaaatcatgatttgatagatttaaattttactattttcatttagtttaaacattttattattgtttaaaatttcactacaagaagtattacttttgtcagcacaattcgttattgcattcgcaaaaataacttttgccaatacatttcatgaactgtgctggtaaaaagattaaagttttaccagcacataattatgctggcaaaacttatttttaccagcataactcatatttgcgttggcataacgtagggattaaatttgtttttagcattttacaactattaatgtccctttttttttttttgatttaagcgtttatatattacatcagcataacttggaactcgaacccaggacctccaatacacacgcaccccctatggccacttgagctagcctcaagtggttctattaatgtccgtttagggtttgggagaaatcatgattttcatttacttttaaaactactttctttattgtttaaaggtttatgtgctttaatattttctaactcctaataactggttaacatcttaaattaatagtgaaattataaatcccttttc

SEQ ID NO: 204706 - DNA, 838 bp, Cannabis indica
ttaatattattttctattacttttttttcactaatattaattacttttttactattaatatgatcacacataaattagttatttgtacattttgggtagataatagactagttttagatggatggtgatttctaatctttttattatgatatattaaacttgattattttcttaacttgttaaaataataataataaaaaaatgtgtttatatatgttctaaacttataattcaataataatgctttgctactttcttaaatttatgggtcaacatgttgaatttggaggtagaaaattgtagaaaattggttggtagattatctctaccttacttataaatatatattaatgataatatgtatagcatagttagaaatataattttcaaaaaaaagagaaaaaaaaaatagttcaacaattattagatttagtgttgaatgttgtcaaatttctttttaaattttcaaaatatttcaaatataattgccattttcttcaaggcttagtttgagaaagctattatgataatataatcatatcattactttgcatgtagaatagattataataaatacataggactagttttctaaatttggtcacatttggtgaaagaaatcaaataacattagaaagtccaaaagaatatagtgaataccacaaaattgttaatttcttataatgaattaaatgtttttttaattatatatataattgtataggtaggaagctttttaggtaccaacattatttttgcttctattgtagtgaatattctttgttttcaagtatttagttaaattaaattataacctatttatatatctttatatatt

SEQ ID NO: 204707 - DNA, 941 bp, Cannabis indica
aaagttaaaaaataatatatgagtattttctataaatatattaatgagttatgctttgtctttctccttatcattaacttgatattctagttaatctagtgcggttggttacatgtgaaattatttatggtgtgaaaaaaaaaaatataggtctccattcatagtaaccacaccataaaaaataatcaaataactaaataaaaatatatatatataaaaaaaaagaatataagaggtgaagtgtcttctttgtgtggtgcatgtggtggttgaattcacaatataaattaaacaagtaaaaaaagtgattaattatttttaatcaattaaccacttttggatttagtaaaacctaaacaagaatggcatgaaacaataagagtattattattatataatatattacaacaataatctaaaattagttgtgattttagtaagagtttgttcatgtgggtccaatctagggtttcttagaacaaaccaattaagcaaagcacatgtgatctttgtccactacttcacatcacccatatgtatccaactaggttttggccctacctaatatatacctaccaatatttatatatatagctttcaatgattttatgactaaacaaaacgatattatatgcttcttttcatatcacaaattacctttgtctagttcaaatataaagccaaattttggtactaaaacaatatctttgtagtaaaagtatggccatgaaagtttgtgcactaaaaactctcaagtagtttgtggtttaaaaatgttatcttttttacactttttttatgtactattattctctaaacattgaaaaagaaaaatgcatgtataatgccatatactttaaatggtttttgtgcatgaaattacccttaccaactagtttgtcaaaatttgtattaaagacaatgacccaaaaaaaatggca

SEQ ID NO: 204708 - DNA, 686 bp, Cannabis indica
ttagagtaaggaccaccaacaccatgattacacaagattcctactcttaggcttctcttctccccatgccatcacaaaggtcatatctccactcaccaccttcctcgtatattatttattatattattattaaaaacaatgcctacaaataatgcattattattactattattctttttcaactataataacaaacattaacatttccatcttcttaatttccaaatatcaccaacaaaaaaaaaaaaaaaaaaacctctctcctcaaattcaatcacactcttcaaaagaacctcagatccaacgtttccaaatccattttccaaatttggaattccaaaacaaagaatttctagtgtttactttcctttttctgattttccaaattaattaattaaaaaaaaattattaacaggttataaatttcaatcattgtttgatccgcacacatgggatttttctccgattcgaaaacactcctcctcggtagatctcgttcgtcgttttcgaatcaaaattctgtttttggattctgaattcaaaaactaaaaaccagagacagagagagaaagagaggttggggttttgatttgttgttgttgttgaagatcgagaaagtaaatatgagggtggcaaagtctcaggtatggcaaccttgcaagaagaagaggttttgattaggagaa

SEQ ID NO: 204709 - DNA, 795 bp, Cannabis indica
ccttttaactaattacacccttagaaaagatggccataacactaaatagatattggaccatagaagagtcctttatgctcattgacaactacccaaagctaaactttcatgtggggttgttttgttgtggaaggcaagggttccacctcttcttagtataccttaataaaaagtcttcactaccctgaaattgactgttcattgccattttcaaaaagcttattaactatacatagaaacaattccctttgttccaaaaccataatttattattctcttttcatccttgattttctaaaacatccatttctctcatcatcaaaataaaaacacatattattactactactactaacaccactacagtaatctgtaatttatttcagaatttatgcacattctagttgactaaacacctaataatgcaaatctttgtttaatttatgcacttttattttttgttttttatttttaaattgaaaaataaaagtatttataatatacattttcatttctttaaaaaaaattatttaaaattccagtgacgtaattgataaagaccaaacaaggagggactaagcaattttgttaacatctaaattaaattgtaaacaaccgtaataaaacaatatactatacaaatatgttttccattcaatattagattcaatccttttattttccttttccaatttatcaccaacttcttattataataaacatcaatttttttttgtttaaatacaaaaattgaatttatttaagggactttctcattttttacaccttaaaacg

SEQ ID NO: 204710 - DNA, 850 bp, Cannabis indica
tagtgatgtattttaaagaagtagatgtatggtgtaatgtaaacgtttgagttaaaatacagaaaaattgtgtttaaataatgtatttaaaaaatagagtagataaggtgatgggagttctcttagactacttgataaaaataaaggaaaatttgacttttatatgtatttattaggccaaaatttattccttaattataagtgtaccaatattgttagataggtcaattttcattaaacccaagattatccctcctattttttaactcactcatatctctctctccctccattctcgctcgctttcttcaatagaactcaactgccacgaccaccgccaccatccaagaccctcgacccactaaaaatccaattgcaccaatcctctcgacttcatttcaatctgtccaagcccacgccaatttccttcctcaaccatgaacagagagaccatcgcgctgccatgaacagagaccacaaatgcagaccacgaatggagacgttctctataattttttggtttttttttcatttttttgagtcggtccgataatatctgatataggtctgacatagattcgataggagatttcaaaattaaagtttttgaggttgaaggagaaaatccgatataggtttgatggtggtccgatgcaactgattagtagacatatttcatgtttgataagggtccgatgctgttcgaatggggtctgatgatgggtatatatacatatttattatgtatatatacatgtgcttttcttttatctttctttcttgttcgaattcttgtaatatattattagttttgtttaaatatatatcgttctatatatatatatatata

SEQ ID NO: 204711 - DNA, 500 bp, Cannabis indica
accttgtgtgtttctacttttctagaacaaaagtttcccaagatctacccatgtgtgtttcttggttaccctccactcctccaggtatgaaagcatctaaactcttagacatcagcactaatcgagcttttttgcagcagggatgttcactttcatgagcatatattccctttaataagctcagatattttacataatgcatatgatcagtttttatcatttacatcaaattctttgagttcagattcgcctaattccactgatgcttctcttgtacaaaattcttctcttcccatttgtcttacatgtttcaactacacatggtcgacctactaaggtaactcagaagctctcaaatctgagggatcatcacagttttttagctaacgatcacccttctgctatgttagaggatcatgatctggttacctcacatcccttgtcccaagtgattgattattctcagctatttcctcatttttgagccacaaatctctcaa

SEQ ID NO: 204712 - DNA, 1076 bp, Cannabis indica
atttattttcctttaaaaagaacaacttaaaaatggttaaaacttaagtaaaactagctaatgagtaatggttgaatatataaagttttttaaaaaaaaaaaatagcaaacataattcaaggggtaagcttatttatccaaacatagcatttatccttgttcaaaaaaaaaaacatagcatttatccaataaaatatgtttatttattcatctaattaaaaatctatattagtcagataatattggaaaaattaaaatttgaaggggtacttttaaaaatgtgtaaaaacttaaaaaacaaatagaatataaagtctgtttacaaataaaatattttctaaaaaaaaattacaatactaaggattttttactcaaaaaatataaattttattctagtttgttgtatgtttgaaatactaattgaggagtgctaattacaacctcttattcaaccattacgtccgaaatcacatgccaaaattttttcatagcggggtatttgttatagatacagtatcatccctgtaaatttttgaaaacttttgaataggttacaatactgaaaacagaatttttaatattccaatttaccacgcgcgttcaaaaaacttcaaatgtatttttgatactgtaaactattcgaaaattttcaaaaattacagggatgatgttgtaagcataacgaacatcgatcccagtgaaaaaaaaattaaaaaaaatattccaacatatgttttcgagtgtagaggttgactaagaggttgtaacagatttgtataacatttgtaattaatgaaggagaaattactaattatacgaaagtttacaatatttttaacacttgttcgctttactttttaaattttcaattttataagacattttacattaataatattcaactagctttttcaaatcatttttacattcttttcttaaccctgattatctctttaagaaaaaaattcttcacaactctacaattcgacttcgacttctacctctgctacttcagcttcaacttcgacttagacgccacattcatcttgacttcggcattgagttcgacttcggtt

SEQ ID NO: 204713 - DNA, 1095 bp, Cannabis indica
cagaaacagtaaagtaaagactactaatttagtaagcaaaagaaagaaaaatggacaattcattataaccttctctacaaagtgcataataataaaatgtgaggaaattctcagtttaccagctaaaggccattcttaaaatccttgcagtagtcaggagtttgttaaataaccggtgtttaatggtttcaccttaaagctttttcaaaataattgggagggtgatagagtaaatctgaggcttatagggtgtttcatgaaaaaatgttatcgtaaatacttgtaccgatatgaaggtcaagtgtgccttaagagacaccctcttctcgtactaatatagtgacataatacgagcaatagtgggtgaaatatccactaaaaatagaaataatgaaaggaaaaaaaaggacagaaaaaacataattgccatcctttggtcatatgatcggagagaatattattagaatcttcaattatagaagtgaaaacagatggaatttgggatatgtattgggtggctatagttttggggcagtaactcgataccaagctattcttttatgtacagaatactgattttaaatagataacaagatagtcaattgcaaaataccagtgtactgccacaaatttgcattagcgtgaagataaaatttaacgattcacttacttgtataagacaaagtaggagaaaaactcagctaccgataacaggtcttcgttgcactaccaaatcatcagcagaataataatctgctatgagccggtacatgtatgatggattatgtcctcctctgtgaagaagaagaatttagaatggtctagtaattaattaacacaaaaaagattatgttaaactaaaaatatcaataaagagaaagaagtctgatttcataattctataaaaggctcttgccccttttgaggaagagtttcaaacttggacatcctccttgtgaggagaagtgtaacaccactaagttatgcatattaccgtactacattctttttataagaaaccaaacctttactgattgagaaaaggtaataaagaaaaaggggagagagagagagagagagagagtacaccattct

SEQ ID NO: 204714 - DNA, 995 bp, Cannabis indica
gtcctattttataacagtcagttattcgttattttttatgttgtgactaaaatatatgtggctaaatgttacacaacctttatatagaatatatttttttttttgagttaacgtcattaaaatgtatcattaaaaagtattgttaactttaacaaaaaaaaaaaatcaaaaaacgttaaaaaaaagtcatctaataattgtttataaattaaaaattgtgttatataagcacattttatataaaatagatataataattgtatgagaacaatttcttttaagaaaatgtattatcttataatttaatatggtattaatattagttttggaaaaaattattttgatgtaccatttctatacattgtttgttagtgtcaatggtataatttgggtgaggtgtgtgggagacagagagccatcaacgggggtgtgacgttgtaaggctggatgacacgtggcacgagatctcatgtgcgagcatgtcacgctcgtacattggtgggacccacttttggcaattcataaaagtaatggatgttatgttggcaatccatacatttatttatgcctttctttttcttaggggttccaagtaacaatttgtgtttgtggtttatgtcattttaagatttaggtattataactaaatgttaaatttaaactccacttgtttattaattatgtcaaaaattaaaatctacatctaactcgtttataaacaggttgatttaacttgtcccttttataaaaaaattatacttttggttaacttaccaatttattaatatgtttttaataaatttaatatgtttataatcttattttgacacatttataaactatttaacatgtttatgtcctacttaactaaaaaatataatttacatgtaataaatttaaaagtatatactcttacataggttattatcgtgtcatttttaaatttaacgtgtcaacccaaaaatagtctgtttgataaatcaattagctgtatt

SEQ ID NO: 204715 - DNA, 602 bp, Cannabis indica
aagtcgtatattttaagggacaaaatgaggtaaagttcaggagacataaatgctaattattttaaaaaaattattagtatataaataaaatattaaataataaaaaaatataataagatagtgtttagtgtagtggtagagaatgttattttaaaataagaggtaagagatccatttccaacttctacttttctatattttttagaaatatttaatgtgtagttatgaaaaattggttcaagatttttaatttttttttcaagtactagaaatattaatttgataataattaaattatttatataggcgccccaaaatttaattttgtgctcttaagcctaatatactttaggaccgatcttattggcacatgtaatactcatcaatcaatttaagctcttttaatctgtgtagtctcatacaattatacacttgacctagataatatgagattgtacaacttatttacgaaagtcaaacacccttgattattaatttatttgaatcaaaattaaaacaagaataattaataatccatttgagactcaaattcataattttattgactggaaaactctcaaaaacaaagaaaaatcattgtc

SEQ ID NO: 204716 - DNA, 1720 bp, Cannabis indica
ggtgcagctgaaacagttgtatatagaatattttactacatcaatagagcagcaaatagccgtcttacccttagggagctaaagcgaggaaatttgattgacgcaatgcagcatgtagatcaggaggaggatatcaacaaagttctgaggtttgtgtgtttgcaaatctgatgtgcaaaagtatctattaagtagaataagtaatattattgttcagttgtgtaatattctttggtttccactaaataggtgtagattgatctttatcttttggctgtagtaattatagtgaattatgttttctgtgtttgtaattaactattaattttaaatgtaaacgctagttaagattttcctcagtcttcgtttttcttttttctaaattttcttcttgtattcaaatggtggtgacgttgaacttacatcatcaatgtccaccgaatttcagatacttttcatatgaacatttttacgttatatactgtaaattttgggagctggacacggaccatgatttcttcattgacaaggagaacctcataagatacagtaaccatgcccttacctacaggattgtcgatagaatattttcacaggttggtagtaatatccttgtaacttcattttcattgtgtctgttcaaaatagttgatgcctcaagtataacatattaccttgttttgctttcgatgtatttctactacaattccatactaggtcccacggaagtttactagcaagattgaagggaaaatgggctatgaagattttgtttattttatgctgtcagaggaggacaagtcttctgaaccaagtcttgagtactggtaaatatttttatttttttagtttccacatcggggggtttctctgcctttgcaattcggtatctgatgcaaatcatatcgtgaatatttaggtaattttgtacatgcacaacgaagtttaacctgtaatgtgttcatggattcttattgctagaactttaattttgaggaacttggaatttttaggtaggaggtggcaattgctatttacagaatgtatgttaatttgagtgttttaaatcattattaaccttgctcattgtttaaaatcttattgtgaattctttcagtctgagtaagctgtattatataaatgtataggttcaagtgcatcgatttggacgagaatggagtcctgacaccgaatgaaatgcaattcttttatgaagaacagctgcatcgtatggaatgcatgggccaagaacctgttttatttgaggatattttatgtcagatagttgatatgatttcaccagaggtaaaaaacgtaccctttacgccaaattccagatctctttttcttttttgtatcaataaatatgaatttaatagatgtaaaataatgcttgcagaaggatgatgctataatgctacgagatttgaaaagatgcaagctttcaggaaatgtcttcaatatccttttcaatctgataaaatttatgtcatttgagagccgtgatccgtttctcatccgacaggtaacttctttttagatgaaaaagtgttggattcaattttttttattaatgggctcaaatggctttttatctatgaaggaacgtgaagatccatctttaacagagtgggaccgatttgcacacagagaatatatcaggctctctatggaagaagacggggaagatgcctcaaatggaagtatagaagtttgggat

SEQ ID NO: 204717 - DNA, 1691 bp, Cannabis indica
gcctttatcagaatttctttcccagcttgggagaacatcgaagctttccagctttttagcttattccaaaccttatcttttattacctcaaacacctctttttttcttctaccaatgaaactaggcagccccaagtatttcgtgtgttgagcaacaagttttacccccaatcttcaagcaagagtttgacccgattggtgagagatgcggctgcccatacttacttctgatttttctagattgacttgttgccccgagagccgagagtattgatgcagaatttgcgacatagtatcacattcttcgatatttccatcaaggaacacgaagctatcgtccccaaagaagagatgtgacactttaaccccttctcttccaaaccgaaccccatttagtttaccagccctctcagccgcttggattaggcaagataatccttccgaacatataaggaaaaggtagggagatagtgaatcgccttgacgaagaccccgtgtaggcttgaattttcctatcttttccccattaattagcaccgagaaagatacactagtcacacatcgcgttattttttctatccactcctcatcatacccaagcccttccatcatggtagcaaggaaattccactcaacccggtcgtaagcctttgacatatccagttttagcgccattttccttccattcccaactctcctcgttttcatgtaatggaggctttcaaatccaattatagcattgtcttgaatcaacctacccgccacaaaagcactttgttcttccgagatagcttggtaaaggctatttttcatgcgtcccgcgaggcatttggctatgatcttatacaccacattgcaaaggctaataggtcggaaattcgacattcgggtaggcttctcaagcttcgggattaggaagagaagagtatcatttatttcctcaaccggtttcccatcattcaggacccccaagcaaactattgacacctcatcaccaatactcgaccaaaaaattctgtagaagagacccggcattccatcactacccagagccttttgggggttaatatctcgcatagcttgaaatacatcttccttagtaaacggtgctttgaggaactcatttgtttctcgggatattttgtttgggattactcgtttgaactcctccaactcttctttagccgctggattagcttcgaaaagctgctggaaataactacaggctacctgtcccacccatttgtttccattaacccaattatcattgctgtccagaatgcccaagatagagtttttcctctttcgagtgtttgctttcctatgaaagtatttcgtgtttcgatccccttcttttagccaaagagcgcgacttcgttacttccaaaacttttcttctttatcaaggaaaatattgtttttccgttcaaggtcttttagttgttgccaatcttttgaattcgtactcaaagagaggctggcaattttatcttcaaactccttgagtctcagattcatctcttttgcttctttaccttgttatcataactttctaactatttttttttctacatcacaatttattcaatttgtcatctattcattaattttgttttaaaagaaaatttccatatccttgtatctttaaaatatatgtgtatattgcttgcaaaaaaaaatatatgtatatat

SEQ ID NO: 204718 - DNA, 751 bp, Cannabis indica
ttttcaatactcagtttttttctgttggctcaaatgctgtccattgaagatgctcgaccaccaaatgtgacgtggcatgttgggatatctatattttctcacctttgacacactatttttttatttatttattttatattggtttactttcactaatttttcaacacaataaaattgtttggatttctctaattaatttaatgtaatttgaaataattatttaatttgacatcttatttaattttattatttttttataaatagactctccataagaggtggaaatttggggaattacctgttttttttttttaattttacgattttgattttttaagatagttgtatcgctagttgtaataagagtttctatacgattttttgttgcaatttaagttgcagcgctagttacaataagagtttctatatagaattccgtaaaaatatatataaaaaaatatatttataagtgaaaataaaaaaggcctgtaaaaatttaagcatgacaactctataatcaaagttgacaactttgaaatgggagctaaataagagttccaattccactttttaattctaatagttttgagtgtgattatattttttttaaacactgtaatattattcttttttgaaagtgtactattattgttttttttaaaataaaattaatctttaatttataattagttatacatttataaatttgtattaaaaaatttaataattacatcttaatatatatatatat

SEQ ID NO: 204719 - DNA, 1127 bp, Cannabis indica
gaaaattatattattattagttattaggaaaagaaaaagtaaaaaaaaaagcaaaattctattattgggtaaaaaaatttgagtttttttttttttttttttttatgcttggtgatggtgtggcatcaatgagctctaggatgcacgataagagattgacttaggtaaattatttgaaaattgctaaatatgtcactcgtgcttagtacaatttttggtatcttggtatgattaagtatcagtctcatataatttaagaaaataatttttaagaaatatcgttaatcaatcgtaagatgtaacttatagaaagtgttgaaaacttatgagaaacagagtattgcagagaaaaattgtatatgtttatctttattgaactaaaattgagaatacaagagtaaggtctatttatagaccaagtgagtcggtgaagactctaacagaaaaagatccagctaaatgaaaaatataacaactttcctaacagaaaattaactaactcttaatagccccctcaagttggagtgtaaatattaatgacacccaacttggatacaattttattgaattgagatggaagaagagctttggtgaatatgttcgctaggttgttgttggaagaaacatgtagtagctggagggaaccttgttggaccttttctcgaatgaagtgacaatcaatttccacatggttggtgcgttcatggcagacgggattctcgctgatgtgaatggcagcagtgttatcacaatataactttggaggtgaagagagatgaaccccaaagtctttgagaatggcaaggatccaagtgagtttggatgtggcatttgccatggcacagtattcagcttcaacagaggaacgagatacaacttgttgtttttttatttccacgatatgagagatttgcaaagaaagatgcagtatcctgaaacggatctccttgtgtcttgatagctgccccaatcagcatcggcaaaaaaggagagttgaacattggcagaagaaaggctagtttctacaaaggcaatgatgttggggcatgaaattgcaggggaaaaaatgccatgtcctggtgtctttttcagatattattaaagtctatgagcagtttggaggtgag

SEQ ID NO: 204720 - DNA, 802 bp, Cannabis indica
ttaactttcgagtttattaaatacaaaatacgggcgttacaaaacaactattaattttatttttcatatcataaactattcgaaattcccacaaaacaaataaaaatatatgttataacatcaacatacaaattacaataatgtatataaagaaaattgaaagacattttttctaattgcaaaaaataaaaattttgttttcaattagcaaatgtcatgcgaatattaagtaggagtatcacttttgcttctattataaaagtattaatctcattttgatacttaaataaattatatttttttatatgacaacacacattattatatcgagtccccatcgaacactattaaaattttacgagcagatagtgcaaaaaatacaaaaaaatgcaataaacccaaatcatttttttttttcaagaattaagcaaaacaatttacgagtaagaaagagagggaaggaatgagttagggggtttgtgactgagctttcgattttgggtcttggttgtgtgtttaagcttccgttttctaggttcatagtcgattttaggtctctcggtgcagtcaaatttggtagcctcgatctcttatgcgtgcaaaaacgagagaggaagatagagaggttgcaagagaaaatgagttaaaggaaaaatagtgttttcaaatggcgtgaacaattttggagtcaatgcaaagataggcatggatttgttagggtgtccaactttgagtcaatttttaattaacactcacttttaagcataattatctaaattttcctacttatatgtgcatatat

SEQ ID NO: 204721 - DNA, 885 bp, Cannabis indica
atatggaaaaaacataagacaatgaatataatacatataagatttgaaaagcttcacaattgatttcacaaagggttctaagaaaactactaaagttgaaactcgttagttacccaaccagcatcagaagtacttttggacaaactcgcctcaatgtatggaaaaaacataagacaatacatataaggtttgaaaagcttcataactctttcacaaaggcccaaagctctacttcagaaagctactaaagtcgaaactcactggttacccaaccaacatcagaagtacttttggaccaactcaagcctcaatgatatggaaaaaaacataagatagtgaatttataatacaaataagagtgagtgattgagaagtagtacttggagaccactagtctgagggcagccattgcaggaaccacaactaacccacaaaacgtcactccctgtatcaatttggacatagaaatcttttggtggagaacccaattgaagttttgtataatacaacctataaaaaaaataaaatgaaaaggaataagaatcatatagtcaacaagtaaacaaagaacagaatctcataaacccaaatcaagacaaagaaaggacatgaatcacatttattagtactttttttaactgttgtttttgttgccaaattatgataaactaatccttaaaatgaaacagctagcttgaacatgttttgtctattaagaaatatccaaagacaactatagcactaaaaaccaaagagaaaaaacttcaaatgagtaatcaaataaagaaaatccaatttaaaattaaacgaaaacccatcattgaaaattccaagctaaatacatataaagttacaaactttgaaataaaaacaagaaaaaatgaa

SEQ ID NO: 204722 - DNA, 599 bp, Cannabis indica
cgtactcttataatttatcattaaactactaattatatatattttttttccgaactcttgaattgggctaaattaaggttatactagtaatatatcaacaaattgtttaaataaatgatcaaaattcaactgcaggggaacatttacaataatttatttagttccaagaaaattttgtaatagaaaaaaaagtaaatactattttagacctcgtgttttgcaaaagttatcgattagaacctcaatagatcttatattttttaaaatggcaaaaataagaccttgagcttaattttagagaacttttttttaatataaccaacttaaagacaatttctaatacgaacagatatagaaaatattaacctttttatcataacacttttagatcagattataattaaattttgttttgataaaaaaattaatttagagtcctaattgtacttttttagaaaatacacaatctattttgtcatttaacataacagaaattctaattattaacttttacgatacaaaatagtaattaccccaaaaaaattcatttgggcaaaactctcataattcgcgggagataaatcatatttattcaaaaa

SEQ ID NO: 204723 - DNA, 618 bp, Cannabis indica
ctcataatcaatacataaatacgtttcaagaatagttcaagtatttttttttttggcatcgtgcctggcttcaacttgcctaagatgtctctgattccaccgatacgtcctactcctggcattggctcttcatcacaggtcggctctcctagccagaacgacgatgatgacgataatgttgttaatttatagtgtgacttatattttattgctattttttataaactgtgtcagcaacttattaattacttttataatgtttactttaaatttttctaattataatatgtgatcaggattatattattgtattattatttatgaatttctttttttaatttaaattatattttataatctcaaaagaaatatttaaaaataaataaataaacgttttgccaacaaaattacttacgtcgggaaaaagttacccgtgccctacaaaattactgccaaaatgttttgttggcgaagttactagcgcctacaaaacttttgcgcgaagtaaaaaaaattggccagaatttcttactggcaacttagctcgctgggaaaaactagcagaaatagcttagccgtcggggcaatgatgtcgactactagggttgtacatcggtc

SEQ ID NO: 204724 - DNA, 772 bp, Cannabis indica
atgatcatcagtttatccactaatttagtagacagtctctactaaaatcggaaaataaattaatttatgaatcaaaaaaattgttttgaaatcaattataataaatatgaaatattcacctaaaaaatcaagttagtgattttatacttaatataaaaatattctaatacatttgaattaatttctacattaatttaattatatatagatctaatttagctagggaaataatcaattatgagagcaaaatattaaaagccaaaagtaacatgcaatataatttaatgtgatcagggaagtactgcatggtacaaaatatacataactagttcattgaacttaaaccatgaaaaatcaaagttgaaaaaacaaattgcatatgccaaaacaagataggactatatatatacatataaggttcaaattcatgatctaattaataaataaataaatagtatgtatatttatatatgtaagacaaattaaactcaatcatacaaaacttataaattatagtttgagcgccgtaccatgatgctcccatcacatgcatcacattaactctaacctttttctatttatttggccaaaaacacacataaacaattcacactatttaaaactatacgcgtaatagaaacaaagaagaaaaaggatatttcagtaataattataattgttacatgcatagaattggatagttggatagtgtcttttgagttaataaaattgtaatttttattcaattttgtcagtacaaactcaattaatt

SEQ ID NO: 204725 - DNA, 643 bp, Cannabis indica
aaaaaaaaaaaaaacatcgacggccggtcagctccatgtggggtagataatttttctatgaagacaatgagtaagaacactcacagaaatcaaatttaaaaatatagtacgagatattctaaattttttattcattttaaaaaaatatctaaaaattaatggtcaaggttttacatttatataataacattcattgcaaaatagaaatatttcaaagtttcttctttcagaaaatacgattcaatagtctaattcaaattaatatgaatttctaaaaattttagagaatattttaaaaaactgccattaaaactttcttttcagcactaaaatattctcaaattctaaaaataatttttcagaatattttaaataaatgccatttagaaaaacaggaaaacaatttagaaaaaaaaaaaaaaaaagagagaatatttgtgaagaaaaagaatagggtagaaaaagaaaaaagaaaatcaaatttgtgaagaaatgtaagccctaaaaaaaatatacatgttacgtgaattatgaaaatatgaaagataattggattcgaataataaattaatgagtaagtatagataaaatattattagtacctgtccattgcgcaaaatgccaacatcataaacgggagtaa

SEQ ID NO: 204726 - DNA, 1771 bp, Cannabis indica
gtctaacatgaatgaaagttcggaagtatgatttaacacatgttaaagttcgagaggcataatttagtaaatattaaagtcttggaattatgatttagtacatgaacaatcactgaattggttaaaataaaatgagataaaagtcttaaatctaacaatttcaatagtttagagaaaaattttaacgaccagaaaattaaattcaaggggcataataaattcaaggggcataatttagtacatgtcaaagttcaagaatttttttaattaaccttttataattattaaattaatttatataaaacccgatattaaaatatacctataagaataatataacatctcttttagtatttaacacctaaacataacgatacttttcaaactgaatgatcatattcataatcataaccgaaagcatgaaaacataccacattgtaacacttaacatgttatatattttttaatctatagtttcattatatcatattatatttcttttgagaaaaatattatattatgtttgaatttagttagcttggtgcaatggtgtactcccttttaattgctggccgcatatattatatgaagaaagaaaaaaaagtgctatggaatcagacacttttatcaaaatcagtgaagaagaacggtgaccactaccttttgttgggtcaattaacaacactaaatatgagattttaattggtcataataattaacaacactcaatttcagatttattatttgtgaaagagcttcctttgtgtactataaaacttataaatagagaggctttggcctcattcatgattattaatcttttgaaaggtaaacttagattgaataggagttgattaagacataaatataatataggaaaaaaaaaattagagagcatcatttttttcttctccaatgttgggaattttatagagaaattataaactaactttgtgtatattatagttatactagctattttaatctattttcaagtagattttgaataaatatatatatattttttatatttgttatattttatatttgttatattttacttgtatataatcaatttatttggaattttattttagataccataaaatattcaaaaaatttcggaaaaaaatatttatttcaactataatatataatgttatataaaaaaaatagaatataatcttttgcccgtagttgtttttttagtggagcaaaaagtaattactgattccacttgctccatctgcaaacgagcgtgggagataattgggcatggtttggatgcaaatatgcccatgctatctggtgtactacaggattcacttttgattagaaacaggccgagactataaaaaatggagatcatctagtgcacctgtcgacttcccactcaaaaactaatatggaactaattttgtgcactacgtggtctatatggtttgaaagaaataaggtagtacatggaggaactgcccaaccaacaattgttttagcttccttttgcctctaattatctgcagaattttcgcacatccatgggtaagtatgtcaggaatcctcgatcaacttctactctccaacaacgattgcaatcatgtgtttcatggaccccctactgccggtatgctcaagttaaatgttgatgcagcttgtgataaaagtagaaatataataggcgcgcgtaggtgccattgttagagatgcaacaggaagtgttattgctgcaatatctaaacctttagtaggtaatttggcatcaaagtgaaat

SEQ ID NO: 204727 - DNA, 989 bp, Cannabis indica
actatacaaattggcatgacaccgaacgaaaaaatatgtgtttaaacatgacacgaaacgacaagtacgaaagatacaacatgcaataagccctaaaagtatgacaaattgataactcttgaataagagttatcttttgagcttttagacttaatttctttgtaaattttaagtcacgtgtgtggtttttttaaatcttttgacatttttattggtgtttataaattgtacttagtcaaattaagtttagcagataattaattggagaaaaaaataatctaatgtgaagtatttttttgaaggtgaaaaaatgaaaaattggaaaagcttagatttgaaagttattgctatggtttgtggtgcgattatatgttacgattgttattgtcatggttggtcgtttggttatttccttcattgaataatgtggttgttatcaccaatttttattgaaagatctttgacttatggtcattaatagatgtaatttgtcacatgttcattttgattggagatttagcattttttgtactttttaatgcttcaacattggcagtttattagtattttagttgaatgtgctattaggatttttattcctattagtatgacataatttatctatcttgttgattatgctttatattatattatcatataatggattattgtcttctaataaaaatttctatttttctctctctaaaaaaactcaatcatccagtataactatatactagaatatttccaactatgctctttaaacacactccccaacttaaaaaatgagtaccaactatacaaaaaatgactccctataagagagaatgaaggaagctccctacttttcttgctaaacttttttttaatgtttttataattttattaaataaatttatataataaattcaaaatataaaatactattaaaataatcaaatcttaacttaagtgttgagcatatgattggaacaataataattattttt

SEQ ID NO: 204728 - DNA, 1344 bp, Cannabis indica
cacaaattcactttcactctactcacttatctcgtaactccaaaagtaatatcgaactcgaccatactagcaaattaacactacaaaatttaacaattaataatcataatttctcgaagaaacaaacagagtaaaatgttaaatatattaatatatatatatatatatatagaataaagcaaaacataaattatatatatactacctctgcaatgtactaggtggaaaattgagtctccaaagactgaatatttggcatttataacatcagctctttcttcatgaagtattcgaatgatctacgtagaaaatgaactgattatcttgacctgttatgagaactatctcaatgatggagcccatctcatggatttctaactttggtgatgatcttatgctccccaatcccatcaccttattattctctttttcaaaactcgaactatatgatctttttttactcattaactccttcttctccttacttttcttcacctttgcctctaagctttttatgtactttatggcttcgtctacttgatcaggcaatgttagtgcctcctgaaattacacacatcccaatatttattagtacatttttattagctaaagcataatttgcacatttttttaatagttaggcaattgttaatttatactttttttcccaagtaaattagtaattttgcaaagcttatatcatcaatatatactctcaataatatttctataatagtaaagtgcatacacacatacatattttacataaatataaacgtgtgtgagagagagagagaatgtgtaccctggaattttggggtgggaggagagagttgagcttggaaaagaggactttcatgtgatttcttctgtttttctcaacaattttcctttcaattttggtcacagaagaagattgactatgatgacgattacaatcacgatgatcctccatgagtactggttctttctttgttgccaagtcctccaccacaaaaatgcccatgcgattattcaaaccctatcaaaattttgtggagctagaccaagaattagatgatgaggttgctggtttttaaatgtggagatattaatgtatttatatttatatctaaccaaaaaaaaaataataaaaaagcttagaagataataaagtaaaaggccaaagcaacattgattgtattgtagagagtaatgtcatctcaaatacgtcagcagcaccgagtcactactagaattacaacgagtcgtccagttggaaaatttaaatggaagatttaagtcacgttggtttttttttttcttttgattcgaatcttcgtggtagagactagagaggtcttc

SEQ ID NO: 204729 - DNA, 1057 bp, Cannabis indica
aattattaaacactgtataatggtttttttgaaccagacaagtccataatggatggcatcttgtttcggtagaatcagcaatggaactaactttttacaggttttgctaattgtcatcaggtcatagatgagtttggatcctttgacaattacatttggagctttgtgggcaacaaacctatagttagcaggttccgttaccagcgccaggttccagctaaaacaccaaaagccgacgtgataagtaaagatctagtgagacggggcttcagaagtgtaggacaaacagtcatatattccttcatgcaagtcgcgggaatcactaatgaccatctcgttagttgcttcagatttcaggagtgcgtaaatgcagcagaagcaaaggacgaaaagggtaccaagaatgagcctgaagagaagaaaatggagaatggaaccaccgattcggaactatgcattgccattggtaaactaagtttcaacacagaatgataaaaagaaataaaacaacaacaacaacaaacaaaacaccacatgaaaggttgaaattttcttggtgacttggtttggtggcaaatggagctatttggttcaatcattagtatgcttcaaaagctacttctatcttagtactatacaaggtagtagtagcaaagttgattgattgtgtataaaaaaaaatcaaaacttcatgaattcttaaaagcttataagcaccatggattgatttctctacagaattagatttacttaggggtggcttattgtgtctagagcttttaaagcttaaatgtactattttttgtacagttaaaaacatgtttaaaaaccaactagactctcttattatgtcatgttctgtaatcaagatatgagaaatgaaatttttgttgtgcaaaaccaaccaaccaaccaaccatcaccgtctgatctatgtaataatgcattgtgatgatgaccctcttacagttgtgagatggggccctgatgtctagaaagagaagagttaataagcagaggtgtgatgtgatattgtgataggttactcaacaacttg

SEQ ID NO: 204730 - DNA, 1618 bp, Cannabis indica
taaaaaaaattaaaactaacaatttcatttaattctctctccctctcttttagatagagaatgacatgtgtcattttagaaataattaacaaaattgttcaaagatgaacctacatagaaaatggaaattggattttaagtatttttgctgcaaattttaaaattcgggtatttattagcaacaaaaaaaaaaaaaaatagatatttatgcaacaaatttcgtattttgtatgaagaaatttatatttaaaataagtatatatataatcacatttaaagagcatatcaatacaaccgcaatagctaaaaaaatcatcaaagatcaaaatctcaaattccatttcaaatattaaaaaaaatacattacttaattaaaataaattaaacatatatgtatcacttaacatcacctaattaaaaaaaaaactaattattcgtacattgcttgcacgtaacatcaacctagttattgataaaatgtatctatatttattatactactttttttattattaaaatgcatggtgaagtttttatttgataaattttaggttattatgtatataactattataatattacatttttacttttaatgtaaaataaaatataattttattatatattaaattatttaatatttaaaatttatatagcaattaaattttcttaataaaaattaaataataatttctatataaaattaagcaaatacttgcatgttgctattatcatttatatagatactaataaaaataaatttttttggttaagtaccatttgaaaagtattgaatatatagataaataaataataataataaaactctttcatttatatggatatttatgttatattaaatgtggtcatataacaaaaaaataattgttttaactattatatcttttatcttatattaaaatgtgtctacataaatataacatttttttaatattataattcaaatttaagcttattgctatatatactgtttagtagtatacatggaggctttattggtgctcttaggatgtatttgtttgttttagaataatgaaacttctgattcataaaaaaaaaataataaataagcttattgcacaattttttgttaaaacaaaatctttctactttcttttttttttttaccaaaaatatacactacaaaaaaaaaaaaaaaaacaaaactatctaaagtgacaactttatagtcacaactcaaattttttgtgagtaaatgtgacttttagttacaactaaaaattacttgggtctaaaatataatatttagatacaggttgatactaatttagttttagtcacaacaagtattgtgactaaacacacatttagtcacaataaattatgatttttgtgactattaaccacaaaatttggtgatgtgttgtgtgtgacaaccgtgtcttattccatacttctcaatgggaaacccttgaaacgattcaagccagagcgaggtatccgacaaggagatcccatgtctccttatcttttcctcctgtgcaacgaagtgctctctcggcttctcactttcgaacaagacagaggtctgctccatggtatcaaggtggctcgtaatgtccctgctatatctcat

SEQ ID NO: 204731 - DNA, 1149 bp, Cannabis indica
cagcctcgccagtcaccatgaatgttgtatcatggaatgctcggggtttgagcaatccgagagcattccgtcaacttagactgctcatttctaataataaacctgatgtaatatttcttatggaaactaagcttagtgtaggttctctttctaaattccgttctgcttttaattttcctaatggtattgaagttcctcgcataggtttaagtgggggtttaatgtttctttggaagtctcatgtaaatgtatcaatcttaaattatggaaagaattttattgactgttacattgctctcaatgatggcccttcttggcatttttcgggcttttatggctctccagttgtttctcaacggcaattcacttgggaacttcttagaaaattgagagattctgcaccactaatgccttggcttgttatgggagactttaatgaaatcatttcacattcagacaagttaggaggtcctttaaagaatgaatctcagattgatgacttcagaaacactattgatttttgtggtttgcaagaattaatttttgatggagatcggtttacctggcataataattctgtcaatgggattaatgtaaaggagagattggattatggttttattaactctaattggatgtctctgctaaaggttccaatggtttctcacctagattttttccaatctgaccatagagcaattaaagccacaatctcgttcttccaacatgaacctgcctctcaattcaaatcccggttcagatttgaaagactatggcttgaagatgaagcttgtatggatattattgccaagaattggaacatgtctccaggaagcgcgatcaatcaactgctgcaaaattttgcagcatgttcccagcagctccagcattggcacagaaataagtatagtgatctgccaaaaaaaataaaaaactcccaagacaaagtagcagctcttaataattcttctgatgttagcagattgcactttgaagaacttaaatcatctgaaaacattcttgatgatttgttggctcaagagaaaaatactggcagcagcgatctcgaatttcttggttgaagtcaggtgattcaaacaccaaaacttcatcaaaaaagctaataccaaacgtaaatggcaataagat

SEQ ID NO: 204732 - DNA, 1435 bp, Cannabis indica
acttttaaagcaaagtgtgtttgaagatcaaagatcacagtgttgatttgagtgatatcttcactagtgctgaggatgtcatctacatacaccaagagtagcagcaatttgttatttttctttgtgaagaagagactagaatcagtcttgctattactgtatccccactgtaacaaagatgctttaagtgtgtcaaaccaagctagctaagagcttgttttaagccatatatagccttatttagttttcatacataactgggaaattatggatctacaaacccttatggctgatgcttatagacttcttcctatagctcaccattaaagaatgcattgttgatgtctattcgttgtatatcctaaccatgtgtaacaactaaagtaaatataattcaaaatgtacatggtttgacaacagggctgtaggttttaaagaaatcaactcctagaatttgctgaaaccctttggtaactaattaagcattgaacctccccacagatccattagcattgaacttgattctatacacccatatgttgtgtatgataatcatttttgatgatggaggcacaagtgtcctagttttgtttttcttcaaggcaacaattttaatattcataagtttgttctagtgtgggttggctaaggcttctttgacatatctaggttcaaggtcagtggttaaattgacaaggtataactttagtttaaaaatgccaagttttgatctagtaaccataggatcattattatgagttggagaaagactttgagtactagaattggaagcaacagagtaagttgaggaatccaagtgtggttgagattggagagtgtgatgtgactaagagtttgacacagaatgtgaactaaggactggaggagacttttgagtagcagaaagttaaggtgagttgactgtgttgaaggattcatttgagtgagaactagtgttggtggctgagtgatttggagttagaggtgcagattgggggacttgaaatgcagcagagttgattatttgagcaggttagcaagaggtaggtgattctttagtgaatagttatttgtatgaaaactcaatttcattaaatgtgacatttcgagtcacataaattctgccactaggatgaaggcatctataaccttcggaagagatgttgtaacatatgaattaatagacattaagaacatctaaaggagactttatataattttcaaaacagggcatgcgagaagttagggggggtcaaatgtatttattggggcgaattcaagaatatcagtagcaaaaagcccaaaataacctaaaaactaagaatgtggttatcagtcgcacatgcaaatcctagcaaatactaaaccgatgtgaaaactgtaaattttaactattaattatcttatttattatattaacaaacattctaatata

SEQ ID NO: 204733 - DNA, 1029 bp, Cannabis indica
ggggtgttctttctctcttaccccaccaaaaaaaatcccaaactaaagtcatgtgatctgatttacatgacttttaattaattaatttataaataataatagcaataataatattattaaaaatatatatgtagttccattactattataatttgttgtataagatacaatatcaaattacatatattttaaattagagaaatactaaaatttattaatattattttggatgatttctctttatcttatgtaattttttcattagttttggatgatttaaattaatgaaggttccattattattaaaaaaaaaaatgtattagtattgttaagtattatctaaaatatcatattattattagtaaaattaattatcagatccaactagtttacaccagttactatgttagatattttgtattgtaaatactatatttaacaaagtagttatttcataatatatcgggtctcataaaaattaatttaataattattataaaatatcactatttatttgtaagaccaacattttctcataatagtactaaacaccactaatatttaaaataacattctttgaatcatgagaaattactaacccatttaagaatttacttatgatagtgttgcaccaataataatagagtattattattgggtatcagtaatatgtaaaagttctacaattgactaacaatattctctaaaaattatttttttaagttatacaaaactcaatagttaattacactaatagtgttataacaccgaagagagtgctaattaataatggtgtcttttaacaattcaaataacgatattaatacctcgcaagggtgctaaacactataaatatcttttaacagttctttttgatattacttataaaaatatcgagcactacttatacttaataacaatagttgagatttgaaaagaggaagataaagacaaagaattatacaatttgatattattattagaatagaattatcataattgggaatgaaagaaaatattattattttt

SEQ ID NO: 204734 - DNA, 1602 bp, Cannabis indica
tttgatatatatggcataaaaataagtgtacaaaatatgacattttttcttaaaaaaacttaataatatgagaaaaaaaaacattatatataagaagaaatgccattaaaaacttttaaagttaagttgtgttttttttcttttttaaaaaataaaatacttgaaaaaatcaaatgatttttattttatttttttttatagaaattgaagcaattctaaaataattttattgagacaataaattaataaatcaattaatttacataatcgaaaactggttttttttaacaaaaagacgatttcaaatacgaaaactcatataaattttacatcttcttaaaagctctaagacttgaccacaaacccagttgctgaagttacactcatgtcgaaaaagtcgtcaaaattcgctgagttgctgatggtttcaaaaaagtcgctggaattggcatcatcactggtaaaaatcactgaaaaatttgtcggagttattgtcgtcaccggaatttgatgtcagactcatcaccagcgtttgacattaaaatctgtctcacagaaactaactatatttattagctaattagaaatttgaacaatgaaccaaactatttaaaataaccaaaaaaaaaattaaacctgaattacatttaaaaaaaactaacatttaaatacagaaatcagttatttaatacaactaactaagaaattgaacataaataagacacctaaaaaaaaacttgttttcatatccataggaagctcctggatcattaggttgaatttcttaattcctagtgtttctagggttctggggatattcttcatccattgggatgtctctcatgtcctcaggtacttgataccttttggggtgatttgtgttggacacatcctaaagtaagcagctatgtctctgaaatatgggtgtagaggcagaactgccttctactaaaatatgggtgtaaaggcagcacgccatccaattgagggcaagccagtgtgctcattggtccctcggtggcacctcacattggactcctctcaccacttcggtctctcataccctatcgaaagcctcggtggtaataaaagatggaggagagacccaacagtctccctgtacccaaacatcaagaatctgaggcttgggagttaaacttaggtatttatttgaaactgtgagttaaacttaagtatttatgccgcaaatcactcaaaaaagtctatatgtaaagtattttgatgagtaagagattaagaagaaatagatcatattaacaataattagtaatttaccaaaatatattataatatatagaaagaaaagaaatatcaatagaaaattgaggtgtttatgttgtccattcatgttattggtactattcattatttgttgaggtagtctaaacaaatagaagaagaaaaaaaattaaaaaatatataagattagagaaagattgtgcactaaaaatcaaaagaaaagaaaaaaaaaaaagaaaagaaagagcgtgagaaagtgcgagtaataaaaatgtatataagtttaaggttatataaattggtcaaagtttaatattagatatttttaatttttttaaatat

SEQ ID NO: 204735 - DNA, 501 bp, Cannabis indica
ataatcagaacaacttgatagtttgagtactacttttacttttagtagttagttttacgtaaactaagttcgtttactttaatttaaagttttaaacgttaaactaactaaaccaaaaaaactaaaagtagttttagttttcgacttttactttttacctttacgttaaggtaacgtttcgttaagtaaaaacttttaaacgtttttttcgttttaacctttaaaacgtttaaagtagtttcgttactacttaactttaaggggttaaaaacggggttaaaaaaaaaactttaaaaaattaaaaatttaaaaagtttcgtactaaacctaaaacctaactacccaaacctaagtaaaaggtaaaaaggtacgactaagtaaaggaaagttagttccgacctactaaaacctaaaaacttaaattaaaaagttaaaaaccgttaaaccttaacttaacctaacccaacctactaaaacgaaaacgtcgtaaaggaaaagtaa

SEQ ID NO: 204736 - DNA, 588 bp, Cannabis indica
cgctcttcaaacatttttatataaattatctgaggggaaaaaatattcataaaaagtattcataagttgtgaattggtttgagttagagattgctaaaatagcagataatgaggcaaagaattggctaaatctcaataccctttccaggaatgggctacagtgtatagttaactacgtacacaactcttgttggattttgacagattcctttcatgaaaagtcacttaataaagaaatttgtggtttcaatggaccacacgtttatctctaatcaaatattaattatgacacaggagaattaataaaatgtgtctcctttgcttttatttgcctttacgtttttggagaggaatatttatcgtttgttttgtttaacataaagataataaaataaatatagtgctgatgtacgagagtgtagataacagtatatagtggtaaattctggatcacagctggtaatatttggtctaatttcttgaaggaacaactatctaaagaaaatatcaaaagaaaatttttatcacatttattgaaacttgtttccaatatttgacaaaatcataggaaaacagaactaatatgta

SEQ ID NO: 204737 - DNA, 708 bp, Cannabis indica
ttgctacatcataaatagaatcactagaaaaatgatcagagggataacggtcactggtggactcatctactgcctttgaatttggatcaggcctctcagaatgttgtttcctcttactttttttttgcccttaaagagacttcttcgcattttatttacggctccttttatttctttaagtgtttcttttttcttttcttctattaatttttgtacatcgttaaaattaaaatgaagattatgtgataatgaaaacctcatactttgcgttctacgtacataatcaaataaataaactttttctatatctacttgatatataatttgtatacacaattcatagaaatataaattaacatactaataattatactctaaaacaaaaaatataatcagtataacaaatataatcacgtagtaaaattttatttatctacactgatcacttaatattaataatctaaatatcataaaaaataattaaaatatttaaaagtaaaaaaacaaaaatatatttaattttaaaatactaattttttcctctaatttgttttttttaactagactataatttaatgtgtcaaaataatatatatatatatatatatatatttacttatgaaagtaatatatatttgcttagaaagtaatatatacatatatttacttagaaagtaatacatacatatatttacttattaaagtaat

SEQ ID NO: 204738 - DNA, 1037 bp, Cannabis indica
tctctctctctctctctctctctctctctctctctacttataaacacgcacacggaaaagcacacaatcggaccacacgacccacggatccccgcgaccacaagacccaacaccgacagtatctttgtcaaaggtaatcctatacattcattgaattgatcaaatcggatcagtcgatttaattcgattgaatttgatcggttaacaattcaaaatctaataaataattgaaatagatagatttaccctaaaaagaaagttggaatagatagattgggtctaaatccatatgatttgattcaataaacaacctaataaggaaaaataccatcaacaaaccatttacattagcatggaaattttaaacaccacaaattaatcacaaactaactaatagactcacataataattctctctcttatctcaaaataataataatttcctccaattaaccacaccacacatcaaaaaagtgtcattaatgaatcaagtttgagtttccaaactcaaacttgatcattctcctctcaaatcaactaaactagccacaaacaacttatttttattcaaaataaacttagagaacatacaagagcaagactaaacctaaacagtcactacttcttaaaattacatgttaaaaccaaacttgaagattaaacaacttgaaaataagtaagtttagggtttagctcaaactacctctgaagttcctcctaaaaattactctgtagtcttgctgaattgaagaaatcagcagcacactcctagcctctaccttgattcgaagagagagggaaaaaatgagttttctagctaattcttgattttttttccttaagggattagttctaataatcaaaagacttaagctgaaaagaaagatgtgatctaatggccaggtgtccaaaaaagcaagtttccacctaaccccgtaatgcaaattacaaaaattccctttaatttgaacttaaacaattaataggccaagggtcgcatcatctcgttgcgtctgattcaggcgaggtttacactc

SEQ ID NO: 204739 - DNA, 970 bp, Cannabis indica
aaattgtaaaatgccctattaatattaggtattattttacttatctccaccataatgtatcatcttgccaataattagggatagtttataataattattatattaaagcaaatctggtcccatatttaattctataacttttaacatctttctattaacttttttttttttttgtcaaggttaacaataaaatggtaactagtggtacatcctaacaagtaacaatactggaaacaattaaccttgtttttgttttactccacttgttttgcttgcttccgagacagcacagcacagcacgttctctaagatttgaaaagccctgcagattttttattttttttatcctttttaggcagccttccaaccattaaaaaaataataaataaattaatgtatctgtaactaaatatctcaatacatatgaggttcggtgacacacctttatttttcaatatttaaatggatatcatctgttttgttttatttctaacaaagatttgatgggatttcttttctattgccaaaacttcactttgtttaatatatgggtgattatgtattattgcttgtaagagttattttggtattatttattttatggaaaaatagcagcaaagtaaaagtatctaatattttaagttttaattgatgtagttattttttttttgggttttttttttttaatttttttactattttaaattaatttttttttctttgcatttttataaaattacacttaaaaacacttatagcaactaacggagtaacataaatcgcaactaaaaatctgcatagcaactcacataaaaaccatttaagaaacctaaaccgtgaattttaaaaaaaatagtatataaagtaattttcctatttttttttcaagcagtatctcaatttatttagtatccaatatttgtctttttttgtgacaacagtatcttgtagttagcacttatttttaact

SEQ ID NO: 204740 - DNA, 940 bp, Cannabis indica
cctgagttagtgagaaaactctgttttaagcctttcttcaaagttctagcatgcccttatttgaccgggcatttttgcgagttgattctacacccattcagggtattttctaccacatctcataccctagtaccgggtctagaaaaaaaccactttactgtttcataagttttctaatgggtgctttagttaatatacaagaaaccaattttgtgggctagtgttttttattgtgatgttgaatgacttattgcactagtctttctactttttgtttggttaattgtgtggtattttctctctctttgttctcagatttgataattgatgagtcttcttgtgctttggttatctgcaacaagcaaaggattttcttagtaagttttcttaagttggtgagcatcaacatctacaacaatagcttaatttacataatcacatactaattggttgattaacatatgatcttgtgttattagaaagacaatggaggcgcgtcctactttatccatttcaaggtctggtgcaaagcagctcactaatataggggtaactggagcgctgtcgtcgcctttgcctgtgcttccaacccatttcgaagagtcatatcccaagttacctgactctcaacaaatctcaatgggaagagaacttatgacaacaagtcctcttactcatggaggtgttcgtgtatcctctaacagcggagtaatgggtcacatattctcaacttcttcgggattgtcatccgatcttcactattcatcagtgtcactttcacctcgaaagattcagtctagaaataccccctttatgtctcaatcctcaactaatggggtatctttcccggtatcgcaatcctctcattcagccctgcctcagtctactatgtcaagtccttatggcaaagaaaccagtgcttcatggtgtacagattctg

SEQ ID NO: 204741 - DNA, 2146 bp, Cannabis indica
aaaaaaaatatttatgtttttgaaagaatcactattttaacgtcattacttattactgttaccaaaaaaaaatcttattattataaaataaaaaaaaaagtgtataatatttcttacaaaaataaaaaatattataaaattaaaaatattacgactaaaataaaattataattaacaacaaattttgatattattatattttttttatgtaaatatgagttaaattaaatatttttaattaaaaatgatattgtttattaaataacatctttaaaaaaaattaattatacaactaaaaatatacgcaactgaaataaaaattaagtacacatgcattggatgtaatattaacatagtatacacatatatactctggtatagttccatcaaatgataaggtctccgcaaacgtcatttttgaaaagttattcacttacagatgtcagtcctagaaggagtcttatggaatgatagtcgagttcgaaagggtgttcccggatgactatcaggtctattccgggttcagtcttcaagatagctagcctccctctggaaaggagctccagttggctagttgtccctcctagaatggtagatccgaatagtcgactccagcatacttaatcctatccgaaagcatcatcagcgagtgttcttggttcgtgagtccagaagctcatatatgatcccagaggctctgctgacgtggaggcttcgctctataaggagttggttaagttatttatttctaactaacttaacaacctcgctttttgcagccatcgactttagaatcttaatcctaaggctataaataccacctcgactaattattttaaaagacacaaaattgagaactcagttcagatgagattgagaattggagagaaagattgagaggtaaagagagaggtgcaaagaaaatagagagattgagtttgtgttttgaagaagaatcttctgtagatgaagaagattcttgggtgtaagtgtgagagttgaaacactttgtgagaactcaacagagaatatcgtctcgattgtattgtacctactcttgctcaatcaataaagaaggattttggtggtgttccggaactagagtagagtcatagatcacatcgatctataggacttgaaccagtatatatcttggtgttaatttctttaatttctgcatttgttattttctggttttcactactctatttgccctgtgttcatctaattgttgttttcaatttgataatcttgtcattgctaatcgtttgattgtttaaagttttgatattttgattctgcactattagtcataattttctcacaaatcagagcttggtaatcgatcaataacgcaaaattaagattcattccgctgtaattcttgaagaaacttgaatgttatcaatggtgagattcgaattggagaaatttgacgaaactgggtttgcgctttggagagaaagtctaaaggaatcctatttcaccaaaaagtttctaaagtttttggagacgagaagttattggctaaaaagaaactagaggaaaaagtagaaatggagcagaggatgtactacacaatcatcatgtaattatcaaacagtgttcaaaggaaactcatcgcagagaagacggctaaagggatctggaataaattggaagaattatacttaaaaccatcaattgctagcaattttaatttgctagaaaggttaatacgattttagaatgatttcttccctttctttagatgagaatactgatagatttaatgagattattattttggcaaatataaatcacaaggttaatgaaaaagctaggccatcattgtgttgagatcacttccaatcgcatatcaataggtcaaggcaatcatcaagtatggcagatatgttattgcttttgaaagatattcttgccgcacttaagtcgaaagattttgaattacagttggagaaggaatccaaaaagaagaaatgtatttggaaagaggaagatcacccagaaagtgagttcaaaaattaaacaccatcactctctgttaggttataattaacctatatttcgggtctttaaaagttagtcattatctcgtctattggtgtcttttggagtcagtttttaaagctttgatttttcatta

SEQ ID NO: 204742 - DNA, 845 bp, Cannabis indica
tatatatttttttttataattttccaaagatactataaaattaaattgtggagatattttcataaatacctaaaatgacaaatttatttattctattcatgggctatggatttttgaatttgggccaaatttatcaatgtaacttcctattggtttcatttcctttttttggtcccaatattctgctgcaaataagaaaaggattttagtaatcaatttgaatattatttatttatttatttgttattattgtaatgaatcaatttgaaatattaaatatgaattttttgtactcaatgtttagagagtcttgatagaaataaatgtattaacatattttatggtactttcacaaatttcataatatattgtgattatagtagatatcttataattatttattttttttaaaaaaaaatgtaatttacaaattatgatgtcaaaaatatgattcaaatatttttacatatatgttttttattttactttattttttatatgcaggctattatttatttgaaccatgtaaattattaaaaaaaactatggtaagatatttgttatatatgaatataacataaaataatataacataaatggcaaattatgttacataattacataattttccattaaatttcaacataaaatatgtatttttggtattcattagtgataatttgttaatggaaaaaaagtactctaactgttatttttctttttaataatggttacctatttttgttgtgccatttatttatttatttatttttcaaattttactttatttaaattccttgtctcttactcttcatcaaacccattgcagaacatttgctttttct

SEQ ID NO: 204743 - DNA, 1018 bp, Cannabis indica
atttgagatcactgattttttttttctggtaatgcgtttgtttcctgaggaaaaaggactggaaagatatagaaaagctagttttggaacatttttgtttgttgcatgttgttggaaagtagaaaaaataaagaaaattgaggcgaagttttttgtgtttttcatttttctctgttgtttgatgatgattcattgtgttgcttaatatcatcattttgagttattcattaggaaaaaagaaatggattttatctgagattattgaatgaaaggaatgatttaatgttgaaagaactgatttttgttttctttttttaagtttcatgtttgtttgtagagaaagttttggttctgaatggattcaattcttatcagattaggttgattcagctggtaatgttgtaacagtcactctttgctttacatgaagaaagctgatgattaagtaattggctcacatcactttatcgacttaaaaggtgagttggacctcttaataggttgcagtctttatacctttaggttgatctgttttctcatttcacttaaatgaaatgatttgagaatctagaatgtttgagttgaaatgcatatcgtggctagtagaagcatttacagtatgaatacatttattggtacatgattatccgtggatgatattgtgaatgcttcgacttaaatgtttatacatgttatcagcgactagcttttacaacatgaatacatttatcattggattataatcatgttctgtgggtatatcagtggcttgcaaggagctacatttatcggtgatagatttttgtggttagatggacatcaagtccatgaaaaaagtcttttaataatacgaatacctcgttgaagaaagaaactgtttaattttatgcttccttagtatgccttctaccttcctgcatagtcattcatttcattgaggatagttttggaaacaactcttaccctacctatgatttttaactattaatttttaacatttgaattggatcctgcaaac

SEQ ID NO: 204744 - DNA, 921 bp, Cannabis indica
ttagctcgtatttatagcaataagcacaacacatttcaatattaatttatttgaataatattagtttttagcatggattttcaagtcattgttatgtttttttattattatttgaaatggagtgattataagaaagaaaaaaaaaatcaacttactagaaagatggtgttaaaaaaaatttaggattttcttttgggtggaacaagttgttcaattttagcgttatttatttgagatagttaaaagttgggtattggtgacttgtgtttttgtttgtagctgttgaaattaatgttttaattatggataaatactattttagaccctatgttttgtaaaagttattaattggactttctattttattaaatgagaaaatagactctgtattttttaaaataataataggattctaagcttaatttttgacaatttttttttaatataatcaacttgaaaatacaaatagatacagaaaatataaacagttttgtgataatatttttcattcggataattattaaattttattttgacaaaaaaacagtttaaggttttatttttaccattttgaaaaatatataacgtctattttatcatttaaaaaaatagatggtcaaatcaataacttttacaaaatataaagcctaaaataatatttactttttaattattattgaaagacgaagaaaaagaagagagcgcacacagaacagaagaggtgaagaatgaaaacaacttttaaagacagtgggctaatgtatcaaacaattaacggcaaaaaagttactcctctgcttttctattattactatactatatttgactatttttgtgttgttttgtcactttttaggatttagacttataataataaacagccatggtgcatggtgtcactaagcacatgtattttttttt

SEQ ID NO: 204745 - DNA, 942 bp, Cannabis indica
gatgatgatgagtttgatgaagatcctctttcttaagagagattcaagttgaagtacttccacccatttttgaggagtcgggtatgacaccaaatgatggtacaactgacttgaagtaccatcttggatcttttaatgagctaatgaagatgaaaaaagtgtcatgcaagtagaggtgccaatgctttgcggtcacactaaaatgagctatatataagtggttcaaaaggctagaatctggaacaatcacatcctggaagtaatttttggaagaattcctccaacaacatcatgcttcatgtgattatgttatgcctatcacaagtatcactaatatgaagcaaggggaacaaaaaagcttgtgaagctacatctagcgcttcaacgtcgaagacaccaaattagggaaagtgtccaaagatgagctcaatattaacgtagctgctggagtaaaccgtggaagtggactatgggggaacatgttgaaaagagaatgtgatggcatagatgaattctacaacagagcggagaagtacatccgtgtggaggagggtaacagagtcttgaaaaataaacacaagtgagtgttcttcaggaagcttgtcagacccttatagggtctgataggcgatacccccaacacttgtaagttgatacatttgagtgaagcctttaacatataacctgtaaacattaaacatccaagatattcttcagagtaaagttctttaatttccaatagaaaatcgaggagagcactcctaacaatggaaatcctatctttaatacattgtactaacttaaagagggctccaaagttgatctccaaaaatagaaaatgcaccaaggcgcttacatatttgaattatcaataaaatattaaattttcactttacaggtggcattcatcactctccacctacccattcaacttgttcatta

SEQ ID NO: 204746 - DNA, 1995 bp, Cannabis indica
ttttttattttttttaattgatttctgatcattcataattatagtggatttgtttgtttgcttccattttttttttcaaaccaaactagttttttaaaaaattaaaaccaaaacagactgataaaatcaaacaaaactaaaccacacaaaagtggattggtttcgtttagaattatagtttgtatgtagtagttgttctaatttttttttataataatggttcatttttcggtaatttttttactttaacaagtttataatgtataaataatgattaaaaagttattatggtaacaatatttaagagaatataaatagtctaccaaaattgttcttaaatatcaatatttcgtcaaaaataattatgcggactgatttagtttgaactcctatcgagatatttaaaaccctaatcgaattagagaatttaaacggtcttgattgaacaaattatttatacattatcagattcatttggtccggtcttaaatgatttggttcgtattgattgaggtttggaatcacggattacaaattataagaacactcttagataattatatatgttttgaagaaatattataaactctacatgtatgtattatgaaaaattcaacacgtaagtgtacgcatcgttaataataataataataaacaaagattgttactaaaatttgaaacaagaagaaaacaagtgtaattctgtattgtatttatgtatctaagagaaaaaaggttcattttgtcgaattgattacattcaacttttgattcatggaggagaatgcaattttgttatttatttttatgaatttgaagctattatttcattgtaatttgcatagattagtatctaaagggtttaatgaatgtggagcaggtcctgtggctgatgatatgtttcattggcaagcaactatcatgggcccagctgaaagtccttttactgggggtgttttcttatatctattcacttcccacctgattatccattcaaaccaccaaaggtattacttcattagtattcatgccatcttacttgattacttcttaatgctgtttcgaatgttaatatggtcaaccatgtgctttgctctcgaagattgtagggttaagcagggattcctaaaacagttctagatttatatatatgtatgttatgataaaataattactttatctactatatggtagtcgatcgatataagcaaatagtcaagcatgtggtttgctcttgatctcgagtctttccaagctatcatgtgacttgatcttctatatgctggtgttctgggaatcgatataactgtgtatctaatctactttgtttaaaccattattcgtagctataatcaatatatgcaaatggtcaagtatttggtttgctatccactccttccagggttaactgtgtactagttagtttggtgttctaggaattatgggcattgttagtagttatagtcgaaatctgtatcagaatatctctggttttatacaacacaaattttcttatttctcgtgtgttgctgcttcggttgggacaggtttctttcaagacaaaagttttccatcctaacatcaacagcaatggcagtatatgtctcgacattctgaaagagcagtggagcccagctcttacagtatcaaaagtaagacagtttgtttatcttatcttatcttaggtagtttcgattcaatggtgttaaggcttattaaattgaaaatatgttgggggaattgtgtggcaggtccttctgtcgatatgctcgctgctgacggatccaaacccagatgatcctctggtaccggagattgctcacatgtacaagtcggacagagctaagtatgaatctactgctcgatcgtggactcagaaatatgcaatgggggggttgagagagagggtttaattatggtttattctgctaagtggtttatcctagacctgtgttggtagaattaatagtagtaaataaatagagaggtttgagt

SEQ ID NO: 204747 - DNA, 1377 bp, Cannabis indica
aaagataatagcaaactcttaataaattataagatactaggcattttggtgtgctataataatgttccaaagtgcttaatatcattaaaataagtagaattcgatattaaaacataccgataggcgataataatattatattttataagggtgctagacactatgtgtaccttctagcatttcactttggttaatattgtgatttttttcaaaatattaaagttcatttttatttttgcttgaatcattttctgtggttttttattgaaaggtttgcttggtaatagcatctgttattttattttaatttttcttttcataaatgtactattattttaatattgacattcaacatcttaaaattgtaaatggattcattatttcaaaaaaaaaaaatattgatttaatcaatcaatatccttgtatataccacttttgttaatgaaatgagaaatggaaaaagacaataaatccgttataaaacggcaggaaaataaataaataaatagaaaagatgaaagttggaagtaaactcgtggtgacttaaccaaaaaaaaaaaaaaaaaagaagtaaactcgtggtggtgccttttgactaaaaagtaaataaatacattcttttcctttcttcctccactttcaaaaaagcaaaaaaccctaattatatgaagcattattatggatactaaaatgtctaacactattataaattgtatactcattttttattttttatttttatttttattttattactttttaatttatactcagttttataagttatatttttattatgtacgttaaacactttaattttgataaattatgtgagattatatttgatactttaattataaaaaagagtatttatcaatttaaattattttaaaattatatttagttaatgtgtaaaagtaattttctacttatctcacaaaaaaacaaaaaaaatagtgtcttgtaattagttaacaattttttctataatctttattatagtaaaatagatagaatttaatatagtagggcactcacaacaatttctttaaagtagagattttctaatttttttttactaaatgtgagaaaaaactcctttaaattatatatgtataatagagatacattcaaatcaatacaacttgatgtagagcatgaataatgtattctctaaacttatttaaacttattttaataatgtataagtaatattttatttatgtgtattgtatatatattaaaaatttatttatttatgtgtattgtatatatgaaaaaaattactattttagtaatgtagaaaaataacaataaatattaatttaataatatagaaaaaaaaatatacaataaattgatgtatgatttgatgta

SEQ ID NO: 204748 - DNA, 1040 bp, Cannabis indica
gcttcaggaccagtagatatctgcacagcaagatatatttcaatcaatataaatcaaactcaaccattgtgtctagacattaacattagtatttttcatattttgagtaattttcagagaaaacttatgcatgaactttacggcagaaccaatgtctttcttttttataaaacaaaacatcagaactagtactaataacataggaaataatacaagaggtatgggagtacaaagaacttactacccacaataacaaacaaaacagaaaacggaatacgtttgagcatattacatgtaccaaagccagcttaattttaaagatataattctattacaagttaatttactaatattaacatatagtttattacatgtaatatttctcaataaaatagtaataaagtcgtccatgcaaatcaatctgtctataccttcaactcttcaactccacttactgaacatgttaagtattgtaggtgttactctcaagtctcaaaaacaactgaagcttacactggctatatattttctaacacaataccctctttgtttaagatgtcaagtattgagcctatttttacatagctatgttatttttccaatgaatttccctccacgtttagcttagtaagaatatatttcaaagtatgaacttttagtaagtcagactaaggcccacgaagatgaacaaatacagctaaaattggatgggatcatgggatataaacaaatgactggattggatcctaaaatgaaaaatccaatgtgttccaaatctacaattgacatctttcttaacaccaacgatttcatatttcataaaatgaaattcattgtactcagagtaccttgaaactgaagaaaaagtgaagacgtgagttttacaagtatatgattctgtcataaagttccataaaattaaacttaactaaaatcgtcaatacattcaaaataatttatgtttcctaagtggcttaaaaaaaattacctggtattcagctcgttgtgccagaagttggagaaccttgccaatttcacgc

SEQ ID NO: 204749 - DNA, 1492 bp, Cannabis indica
aaccattgcctattttacccgttttgcgacggtcttataagcgacagttatagaaaccaacatgatcgaatactttaaacgactgtttaaaaacgtacggaaaaaccatttttatagaagtttcagattttgaagtattaatgacactacaaaaaactgctacttttagtgacaacataatttttttgtgactaaatgtgacttttagtcacagtaaaaagatacttatgactaaaacataatatttaattacaagttgtcactaattttgttttagtcacaataaatattatgactaaaaatacatttagtcacaacaaatcataatttttgtgactaatactattagccatgaacattttagtcacaatataataatgacaatttataattagccataattttttcatcttttgtgactaaaagtaagtttttttttttgtagtgtggcaatatggttagactggtctttgatacaattcaaccaaactttcttaattttgagattaggtatattaattaaagacatcatgcaaaatggtgttttgaagagaagagtgaagaaatatatgtagaagaagctataactaataattaatatatatgtacgaaactaattattatgtgataaacaattgtttattgtgacaatgtaataagtcaatttttcattcaacctaagaattgtaaataattatacaataaagataaggctagtcatcactattaagactgagcatttggtatatcttaagatatccaatagattatttatagctagattgcctaatattgaattacacaaataataatatattactttttgttagtgtttgatattcttcattagcattttcccatgttttgcttatagctacaagatatataattatttaagattatagttacaagatatgtaattattaaaaaaaaattaaactaaaaatctttcttaattatcaaaacagataaataatctacttgaatgaaggatcctttaaaaaatctactacataaagtttcatataattatatttgtaacggggaaagatgaaaacgtgttatataggtatatgtactcatcttcatatataggccaaaccttgtgaatatgtgtgtgttgggtagataagcaggctgaaataatgtaactaaccatgctattagtattaattataatattaattgataaattaataaccctattaaaataatatcagatcatacagacaaaccccacttccattggtccacacccacttttttttttctatataattatataatatcttgaatttttgactgtgacgggtcattgatttatttcctcattacaaaaaagtaagaaaaaagaggttgaagttgaagaaaatgtaactacctttaagcctttagattttctttatttcttaaaagggccattagaattttaataatttttttctgaaagctttagaattttaatattgattaattatatacatatatatat

SEQ ID NO: 204750 - DNA, 572 bp, Cannabis indica
gtagttttttttctttgtatatttaactgtaatttcattgttcacgtgtgagtttatacattaaatatatatagtatgatctatatatacatatacttttcaatcttgtgttaacttttttaatttttattattaaaattaccataaagaacgaaagtcacaagtttacatgcatatttgcatgtgtatggttttaattactatatatatcttacatgatatatatatcatatttgtataataacacatagatatataataactttaaactaataataataataataataataataataataataatatacattaaaatttgacaattaattaataattaattttgtatattaataattaacagcatagatattatgggaaatcaataccatttggatcaagagaagaggcactaagcaatgcaagcacattgggttactttaactcagctcaagccctaactgattatgctaatattcttcttcatatcaaatcaacatatcaagctcctaattctccaatcattgtcattggtggatcatatggtggaagttagtattttttcttttttt

SEQ ID NO: 204751 - DNA, 579 bp, Cannabis indica
tttttttttgggtattgatatcagaaactaggccaacacacggaggagttgaaaaatggggcagaggactttgcatcaatggctaaacaacttgcgaagtcgatggaaaatcgtaaatggtggcaaatataagctgaaatagcctacaaatctttatatccatcttcccaccaagtttttttattttgacatttgatagtgttgctatatattcttttgttgctcattttggttccatgaccactctttttatatgtatattgttttcccattcttcattcatttgttttttatgtctcaaatggcatcatttttacataaatacttaaaaaaaatattttaataattacaataaataatattgtgacacggaaaaaataacttttgtattgtgtattattttttttcaacaaaaaaactagataaaactaagcagcggcccacgtgttgctttctgcaatagcagcccatcttattgggacccacagacagcacatcgtcaaccgactctctcttgagtgtgtttgtctagccattttgtacatactaagattacggtgttcataaaatagttaattc

SEQ ID NO: 204752 - DNA, 1340 bp, Cannabis indica
atacaaaaatttattatctttatcgatattgaaagtactacaataatgtattgtcattattatgttaaatacaaggtgtattacaacaagaatgagtgttggacttagattcagtcgcaagaaaggcactaaagagagggaatgtaatgaccaacagagtcatctctaagcttgtaaaggccatctttaacttgttccttgagtaaaaatatcataaattttttgccttaacaagacaacaatttcgttaaactcaagaaaaactttattgcctttagtgagtttagaaacactaacaaggttctttttaatagcaggaagttgaagaacatatgtcaagtttaatggagaagaagaagatggggagtttcttaccatccaagacatcaagtgtttctattccattgtatgccataaatgtatccatcttatccaagttgcttgcaaaatgaatgttagcccatgtgtttgcaaaccaagcattgttatcaccgtagtcaggcaccattgtagtgacatcttcttcaagatcagggaggtgcacacgagaaccagaagcaccaggtttaggtgtgatctaattcttgtcaaactgataatagcatacagcagccgaatgcccaaattttaagcacagttgatagagaagcctttgaaagaaaggggtgacacgatcacgaccaataaattttgaagtagagttagtggaatttcctcaaacaaatggtggatatggcctgaagctaccatttcgtaatgaaccaagtgtaatattttcttgcatcttcaagggaagattgggcatagcactatgatgctccaagcaactttcatgggacatgagcaaggcctgtacttcttaaacaatcaaagaatcactacgagaagtaatgcctaaaacgacagaatcgtaatatggccaaaggccattcaggaattgtaaaaccaaatcatgattgtagattgtagagccaacaatagtgagagcatcatccaacgattaaacattttccacatagttagaaattgaaagactggccttctgaatgtgcgagaattgaccattgagttggagaagttgggcgcaagattgactcatgaatttttgctccaaggcacgccaaacctccaaaagacgtggtgtgattcgcaaccgaagcaagaacgcccatagtcatggacaaccgaagccaagaaagaattagttgatccctttttttccattgagcaaagatcggattggcttcaccagtaacaaaagtgaagggaaggggaacaccactgaacatgatttcattaagttcatgaccaatcactgttggcacaacctatgatttcca

SEQ ID NO: 204753 - DNA, 1160 bp, Cannabis indica
agagttatgttggaaacaaataggtgtgtgtccatgcgatttaaactggtattttatgccttcacaatttgtgttttgtaaaacgatctgcaataaataagttgactcattgcttggcaagagactcttgtttctttacaggtcgtgtgcttcagttggaggactgttcctctgaagtgcgttctattattttgaacgaatttattaattaatagatcttatgatttttattcaaaaaatatatatctatatatacatatagtttataaatttattttgtagaattaataatttatttaaaattgtaatacatgtataaatattatattttctcaaaaataattttattatgatataatattgaagattatttattgttacattaatattttttaatattttaagttttttcttaatgtaactctatttaattttaattcttaattaaagtataatattttacttgatctcaaatttattcgtaaataaatgttgtaatgtaactttaaatttttgaccatatgatatgcctatttaaatttccatatggccagccacatgacttcttctcatccattttccataggaatattcttggcaagtgggaaactgtcaccccatgtgacaaattgtcagtatcttacactaagatagtgtattttaattgttaaataaataataccaaaatgctttctaaatcaatatttgaatttaatttcttgatctagagctgatttgtcaactgcctattattttggagtttttgttttctttttattagttgcattgcaattttcaataaataaatatccattcacaaagtgacaactggcttttgtttactcaaaaaatcatatacacatatttgtatttatccataatatttgccatatataatattgtactttactaaaataattatatggaccaattctttaaacactgatcatagcatatttgtcatacataatattgtactttacgaaagttataattatatgcaattatttgctaaggcaatgagatatttattgtattttcaaaggctttttaagttaaggagttgtataatataacattgacttataaattaaaattagttaacgttccaacaacctaaaaattatttgtgtctttcatactatttctcttttgattat

SEQ ID NO: 204754 - DNA, 910 bp, Cannabis indica
gttttttatacttaataaaagtgtatttgtactattttttttttttgaatttagtatatctatctcaatgtagttagtataccttatttaaaatgttcttagaagacaaaaaactagtgacctctaagttttccttatgaggtgtatttgctttttatattgatctcttctcttccttttagatttcctcaataagttctttagggacctctctactaaatttacccctaaattagtaggaaaaaataaataaataaataataataataataatgaaagctttaaaaaagatcctaaaaaaccatagttatagtacttttagaaagaaagtgactaaaattattactaaattttcaaaaaagtaacttttcttaaaaaaaaaaaattgcaaatgtaacctctaaagatgttttaactattgagcatattcatgtacttgtttactaaataaatataaatatgacttggtattcttataggttgttaatttttctaaaattattattaagaagaacataacaaaatgggattttttaaaaacctcaaaaaaattttaaattggagggcaaaagttgaaattttttaagaaaatatatttagtctaatttattattgttatatattataaatgcttcttcaagagcctcaacttgaaagaaaatgacaaaataaatgccttacatgacaattgattttgaagtgtttggtattaatgattacgattacaagagtgattatccaaaaattaagaacaagtaatataatatatcacatgacttttttgtattaaatgattatggtagcaaattttatgaaccagtccaaaaccaatcaaagatattttctttcaattatatatattgtttatttgaatttctattaagatacacaaacacacaaggtccactga

SEQ ID NO: 204755 - DNA, 1116 bp, Cannabis indica
taattcccgggagtacagttagggctctaccaacacagtacagagttggtactttagtgcatttggtacagtagtcgtactacccttaagaacgttcttaaccatttggtgagcttggttattgagctcagggcggcttaatcataaagccgacattgcaatacttttatatatttcttgcatatcttactgagtctgttgactcatcagtttgctaccttgtgtaggtaaaggaaaagcaaagctggaggaacagtgaggcagaactcggcatgattgtacatatcgcggcagtgcaacctggagggtttcgatttcttagtattttggagtctgtattttgaggatgcatgtccgctaaacttttaaaaaaatatatatatgtatatagtagtaaagtacttttaacttgtattttgatactcgggatcccgatccatatgattattaatatataaattattaaaattaattttcgagtttattattataaaatacgggcgttacagtttaccaaaaaaaaatggacaaataatttttttttggagataattctaattaattttgtgattctaacataaatcataaactaaaatataataactaacaaataatatatataatctcctattttctaattataaacaaataatttcttgttactacaacactttaaggattcttatgaatgaatgaaaaatctttcctaaaacattgtattttttttttatttaaataaaaatgtaatctccgtttctctaattataaaagataaattttttctttcgacctaatattgattctttggaataaaaatgtaatattttttttaaaaaaaataacaaataattttctttttctttttggaaataattctaagtgattttgtgattctaacataaaatgtatatactctgatgttttaattataaatattaatttcttcactacaagactttaagaattcttataaataaaagtattatctttcctaaacatttttttaaaaaataaaaatgtaatctctgtttctctaatcataaaagataaatttctttttcggagcacattctgatgattcttagaaataaaaatgtaatttttccaaaaacattt

SEQ ID NO: 204756 - DNA, 651 bp, Cannabis indica
tggagaatgactcatttctgattccttttctttttcctttgtattgtaaaagatgagcttcttattatctcattcaatcatccatatataaaattatatatgtacatacacacgacctaattcttatttactatatgtgttattgaagaaattgaaattttcagagaaaatacctgttatagaaaccaaagcagagtactaattcttctttcaatttaagagagatctgcaacaaaagctgaagaaactcatgctttgagctgctcattcatatgtagggttatggtgagaaaaatatgtatttatatatagggatttttaggtgtgaaagttctttcttgtccttgctaacattttttactttttctactatttattattttgataataacgaagatgtgcaatctcccttgcactaagaaaatgagcaaaataatggttataatgaaaagaaaaagttatatatgcactaatttttggtgcataatttagtctctttggagggaaaattctagtattctacactaatttagcatcttgatagacctttaaacatagtaacgatatgttgaggccgcattcttcagggcggtctcaaaatttaatgggtcataaaaaaaataatttttgaaactttattaagaaaaaaaa

SEQ ID NO: 204757 - DNA, 1107 bp, Cannabis indica
aattccaacagcagggctgagtgacttcacaaggagaatggccgagtgacttcacaaagagcgtggccgagtgacttcacaaggatcatggtcgagtgactttacaaggataatagtcgagtgactttataaggagcatggctgagtgactttgtaatgagctgggctgagtgtcttcacaaggagcatggtcgattgacttcataaggatcctggccgagtgacattacaaggagcatgacttattgacattctcccttgacttggtcgagggactttaaggataccttggccgagtgacttccttgaagccttgtagtccttctatatttttcagcaaaactccattaatattaatctgatgtagatgattctagttcttatagaaaaccaagaaagagatctacaaagctgagatttccttggatgagtgacattctcccttgacttggccaagtgacttcaaggacaccttgaccgagtgatctccttgaagtcttgtaccctttttgtattttgagcataactccatcaatatgaattcgatttggatgattctagtttctataaaagctaagaaagagatctacaaagtcgagatgtcctttgccaagtgacttcaaggtcatcttggccgagtaaccatacacgtacgcttggccatgtggcccatcactatgtgagcatgtaccatgctagtgggcttgcttatttctctgacatagccatctcgttgctaatatttaaagctgaactattttgtattttgggttctcctttgaatacttaagagaattagccttgttaatatttagggttaacaagcacaccaccaatgagcgcaattatttgaagcatgaaattgggaatctatttagagctgaacacttgggctagtggatccaaatcctaattatctttcttggacaaggggttgttcacgagaaattgctcattttgggatagcagggagttgtaaaccctccacagagggtaggtcggcctcaagctttcggaacacaactttcggccttacttactctgccagctcatgttgtagtagcagttctagctcttggaccagggaactcatatcacctaggcata

SEQ ID NO: 204758 - DNA, 687 bp, Cannabis indica
tcttcttcttttccattgttacatggtatcagattgctactgactcacgtcaatggagtcctcctcgattgatcctgctccgaattcagcttccgttccgcttcaagagccaatggctcagcaaaatccgtctacaaactctgcttctgctactccgtctgcgaccgtaactccagcgattccttcttggaatcctttttcaaattctttatcttcttccctcacaatcaaattagatcgactcaacttcttggcatggaaatcacaggttgttcctactgtgataggtcacgagcttgatgagatcttgtttcacggtgttcctcctccctccactctcgttaatggcagtcccaatcctatgttttctcaatgtcgaaagaaggatcaactccttctatcctggcttcgctcctctatgtcagaaggagttcttgcatctattgctaatttccaatcttcttatatggtgtggaaagccctcgaacaacgatttaatagtcaatctcgtgcgcgtctccttcagctgaagaatcagttctccaccatccgtaaaggtaacctttcgatatcggattatgctgacaaggttcaaaatcttgcagattctttagcagttgcaggttctgccatgaatgaccaagatataattctgcaacttttaaatggattgggacccgagtacga

SEQ ID NO: 204759 - DNA, 610 bp, Cannabis indica
tcctttactcctactaattcatcgcttgcggatctgattttgagctttcttacagcttcaccgcggattcagtcatgaatccattctcctccggtacccgtttgaggttagatattatcagatcgtcacactgtatatgtatatacttgaattatattttatatacgtgtgcttgtttatatttgtttatgtaatttgaattttgttgagtttggtttctataattgaaagtaaggcataatttggtgatggaagttgtttatgagatggttttgtttggtttattggtgaatttgattaggcaagtatatgcatttccttctattagattttgattcgtgtcaatttgaagttagtggatttggtaaatttgatattcaaaatgggatcagcttcgagcaaattcgtgtttaggtttttttggtataatcaaaaattgatttccattattattatttttcaatgcgtttgatcatgtgtagttccgttatactgtgaagttgaactcatttggttgttataaatttaaacgatagacaattcctatagtaattaacctctttcggacatttctattagccgtcttgtattatatgtctaccttttaagg

SEQ ID NO: 204760 - DNA, 609 bp, Cannabis indica
aaccacaagccgtatacatattaatcaatttcgtacgcaagaactcgtttttctcgagcccattgatccgaataaacgtatggatttgtttaccgtggtcgagagacttcgcacggacacaagcggtgataagggcggcgaatgtggtagggttgacgggaataccttcgtggttgaggtagtccaagatggtgatagcctgggtgagcttgttttgcctagcgaaattctgaatgtccttgtaaacgaaaactgggtttttgttgtgaagtggtaaagactctggaaaagcgtccttctcagtgaaaaacggcggcgttttgggtttcctttggcgcttctgcggttgttgctgctgttggcctggaactctccgaaacgacgacgttataggagggtttggcgggaaaggttggaagtgaagtgatatgggtgaagaggttatagatttcatggtctgaattgttgaaccataatctttcgtttggagttggactaaggaaaacagaataaaaagactcaaaaaatgtagtaaaagattttttttttgggtaaggtttatgtaatgttaatttttcaataattaccgtaatatttttatttttaaat

SEQ ID NO: 204761 - DNA, 1131 bp, Cannabis indica
taaggcccatacatgtagatttagattaggggaatttcttttcgggaaatttacatagtatactaacttttgtcattttttacaaaaatactgttaggtggtatttattactttttactgtatttttttataagtttcataccgccgtataatgtgttaagttttcactgttgttctactagtattttttagttgttctactgttattttgagttgttttgttttgtgttctactggtgttttgtaaaatctacagtagttttgaaaagatttccttgtgacagtatttttgtaaaaattaactcaaattccagtatttttgtaagtttctcatttttttataggtttttatagcttttgtgcaaaaatatgtttttacaaaaagtatttttataggaaaaattcaaaagaaaaatacaaaagttaaaaaaatatagaaaaaaaaaaagtagtttcgggtaaccaattaggctaaccagttacaaacaatttttctggtagtttttgtttttatttttattttttgaattttttctatatttttctatatttttgtataaaaatcaataaaatgtgttattttcaatttatagtatgtgcggcttgctaacggtaacaaaattgaaactctttcttttattttcctttatcaagtagagaatggttacaactaatgtgtaaatggtgataccgatcaatagtctccaaatttatttacaaaatccaatccaaatatagagaattgctacaaggtattattagtagtgtccaaaatttttctctgtatcatactactattagtatattttttttttgttgagtatcaaatatcatataactttagaaaataacttttaaacaatatcactaaccaatcgtgaggctctacctataaataccggaaactattcatgcccaataacaatactcgctaacaaatacacccttaagagaaagagtattgatcctcttctcgataacaacaaagatcaacattactctcaatgtgaggaacaaatacttataaatacatacaaaaatatacatacaaagtgcgagggtcaggtcaagcaatttaagtgtcttgagcgataaattaaaattgaacttttttactttttttattttttt

SEQ ID NO: 204762 - DNA, 542 bp, Cannabis indica
attattattgttgttgtttttgtattatcggcaagaacttctcttgacttgtacctttatgcttaatcaaagaaagaagactctttattgttatatagtagtaatgataaagtgtttgagcattggattactccaacttctaatcaggtcaaagttaacgtcaatggtgcaatttttgagcaatttggacaatttggtatgggctgcattgctcggagaagcgatgagaagtttttacgttccaaagaggaagagagggttgggtactgccgaaaattgcaaaaatcattggaataaaagaggctctgagttggattgatcaatatgagcgggataacgtggttttggaaacggatagctaagttcctgtccaagccatatcaagtgttatttcaatgttttctcaatttggtttaattattttttattacaaaacattgcttaatcatttgagttatgtttctttaaagtttgttagtgatctgctaacaagtctgcatattacattgcgcgtgattcttgttttctaattaagttataat

SEQ ID NO: 204763 - DNA, 870 bp, Cannabis indica
ataataataataattgctattaagtattttaatggacccaacatatatcatatagtgttttatgagtggttaataatttttttattatttattaaattaaaatatataaaatctaacattaaattacatcaataataataggtcatatacatatatataagataacttaagatctatctcttaacatttactaaaaagacaatccaaatatattatttaaatatatgatataaatagtgatctatgaatgaaaaattaaaatagagtttgtcaatgaagaaaaaatctctcttatatatatctttttattgtctatatatgtttcttttttatcgtcttatatctttaataatggtgatttatcactgttttgctagattagaagaatattaattgtattgaagattgtagagtttgttatctttttggaaattagggcttcatagattatgtcattatttctctggttgatttttagatctggctatatattgacccaaatctcaatcttttggagttgactacttagttggatatttgattatttcgtttatttataatttaaataataaaatcgtcatttttttatttttattagaagattattaattagttgataattattaatggtatggtaagtggattttgttatgttcatttaatttagactatactttacacactcttttgtatatttgatcattagtaacttattgtatttttagttgaagagatattggtgttagaattttttttctttatttttgtaaataatttaataagatccattattgttgattctaatatttgagcgattaattaataatgaactttcggaagatttatttatttatggacatttccattttt

SEQ ID NO: 204764 - DNA, 1227 bp, Cannabis indica
caacttctactttctaggctgggatccacaaccactgtggctaaggtgatcaatcatgcttatattttaatatttcgaccgtttaaaatgataaatttttggtcccctacacaattaaagtttgtcactttgcaaaaacaaggccactttatatttaaaacacataatttctttctttttcttcatataatttttgttattagagaaaaataattaaatggaatcaaattgctaatcattccaagcatgccagatcatgtgatatagtctgtcattgacaacctgttttcctttctctcttttcttttgtgagtatctgtgtggagtgtggtaccctcttcttcatcttcttcttcttcttcaattttagtaataaagaaaaaataaataaaaaaaaagttcaggtgggctagttgggttgttgccaaccatatcattctttttccttttttatgatcttcttctttattattgcaaaaaacccatcaaacaagctcaaactctcactttactagttcttgaatttatcatggctactgagactgaagtaccccatgaaacttccattactgatgaggttagtcacataatatgtatagtttctattactctgtagttaaagtcagtgatcaagtatgttatgtatgttgtttatataccagtttcatatcatcagatcatatttctttgctgttgattattataatatttgattttttacttttttttgaaacatggattttctatatacacatatgatctttgtttaatatgatgaacatgcatgaatatgatgagtaaatttacagtctgttagtcactctgagtaatttaaatcctctgaatttgttgtcttaccatgtgaaaattagaaaaagaaaaatatgataaatttataagttgagataacaaaatataaataaagactcttcaataagtaagaggatcttggtattgaatatcagttgtgttactctatttgtaattggatcaagtaaagatgtttatggtttgattcagtgaattacttggtgtgcttcttctgttttgacattaatcctagttggtctgttttcttagttgtttttattttactttttgtagaaagttgagcttgagaataaggtgaaagaagatatagtttcttcatctaagattagtggagctgaggagtcacctattctagctgacccttcagttaaatctgaagctacagaggaaaagcca

SEQ ID NO: 204765 - DNA, 1726 bp, Cannabis indica
tattttgtttaatgtaatagtgatattgaaaattaaatcattattaccaaactttataatggactaataataaaatgaagaaagagaataatagtaatttttgtatgtggcactgattttgtagtagtcttctcaaggttattttaatattcttgagtagacttttgggttaatagtatctctaatgaaagattttaaatatgtgctaaatttaataaaaaaaaaataagtttgtaatatatttagtttattattgcaattgtgtttcaataaataagatgtaaaataatgaaaaataattaattatattaatagtcatttaatattttattgaaaaaatataaaaattattattttttactttaaaataataatagtaataatatagtaaataaataatgtaaaattcaataaaagttaaaatacaataattagtgacattatagtaaataaaaaaataacacttattgtagactaaatttaacacaaaagttatataaaaaagtagcacttattaaatcttgtgttttacaaaaattatcaattgaattttttttttaaaaaaatgataaattaaactctatatttttttaaaacaatacattgacctcaatttttatcattttttctaatatattcaacatagaatttagtttttaacacaaataaataaaaaaaatataatcaacttggttataacatttctaagtcaggttataattaagttttattttgatgaaaactaagttcaaggtattatttcataccattttaaaaaacatagaatctaaataatcacttaacagaacaaatggtcaaattgataacttttataaatgcatgttctaaaattgtatttactcttattaataaatagtgagttaatgtgtgtatttttaaaagcattattattagcaccaatggtgcgcctagcactatcttcgaggtgacatattgtaaatagttagtaacactctataataattattaaattaaattgtgtggtaataaaatgtgtcatcgtgtcgtatttgtgtcatattttatgggatttgcttttatattttgtattaggcgtgttgacccgttttttgactctcgtctaatatttttaaccctaaatcaacccgtaaaaaatagtatcgtgtttatgttgactcactttgactcgttttgctattgaagttggaatatatagagaaaaatgataaatttaagttccattaaaaaacttatatacatttatttatataaagtttttatatatataataaaaattaaaattttaaaaatattttcaatttcatttttaaaaaattaaattaaaatattttaactaacattgaatcactgaatatatattttaacataattatattactattaattttttattttattttatttaaaaaaatcgtctctaattcgtgttaagcgggtcgtatcgtgtttgagccgtttttatttcatgtcaagtcgtgtcgacccatttttgactcgcgtctaatttttctgactctaacctgtaaaattcgtgtcgtgtcgaaacccgtttttccaccactagtaaaatacgatatttaattactctaatagcaatataacacctattagataatgttagacaccaataacatttatcgtatttttatggacaaatactattttaaatcatgtattttacaaaagttattgactagaccataattttttaattttttttttt

SEQ ID NO: 204766 - DNA, 1059 bp, Cannabis indica
tttaagtataagagatcataatatcactgaaataataatataaaatattattttagatattaataaactttttaacccactatataaataccaaatcttttatatgtgagaggcattattaatgaatgaatgaaagaaatgtgggtgaacagaacttattcgtaactatatatacgtaccattggattgagtttgatttattatattcgagggagtatgtgtgtggtaattataagatgggcataataataagaagggtactcatgaatatgatcagatatgtcgatatgagagagggatatgcggtcttagtccaacaatctcttttcacaggtggcaggagacaagtgttacacgtgttgattatggaaagctgacgcagcagtgcctaagacgcaacgcaaccacacaagttgtagttgggcgggtggtactctgaagactcagttgtcgttttgttcccattttgcaaaatgcatacgtgtcgcaaccaccccttctttcctttcctctttatatgggaaggacattctgagtcacgaaaggatcatagtcgtcgtcggacatctcccatgtgaatcttccataaataaatattaattattatttacaccagccacaaaatactactatagtagtgatcatttctattagagcattgttagtaccttttagatatataatctgagattttttagcaatattaatacctaacaatacatctttcaaaaaaaaatcaaaaaaaacaataaggttgtacatctgtcggtttgggctgttaatttattatatatattttttaatccaatctaaagttcggattgctaaaatttaagtgtaacccgcccactttaaaaaaaaaaaatctgtaaactggctaacggtttgggcggtttgatcgggttgtcaaacttttttttttgtttcaaaatcaaagccaataaaaattaaaagttaaattaaaaatattagattccaccaaagtatatgactttaaaattaaaaattaagtatataactttatattattacagacttaatcatttatgttatatataa

SEQ ID NO: 204767 - DNA, 504 bp, Cannabis indica
cacggccatccactcacccagtgagcagggaaccgtcaaaattagacaggttaacattcccaaacaactgagagttaactgcccagcgagccacacggtgggcaacaccattgagcctccgagggatccacgaagcctcccaaaagagaactagctgaaagctttaactttggacaattgcttggacattatggtgtaaggccttgatgtccatactggaaattgcagcaattgcattctttgagtcgttttggaaaattacatttcggaagtgcagtctatttgcctcttcagccccaaagcaaagtgctgcaatttctcctgctagggggtcgcagtagttaatttttactgtggagatactactaatactgcctgcctcattgtagaagataaccgcaccagccgattatgttatcggtgatagcccacatcagtactacagatggtccagccagggggggcggagccacaggggctgagggaggttggaagtctcgtggt

SEQ ID NO: 204768 - DNA, 669 bp, Cannabis indica
tcactgccacttactcggtatataatagttctttttttagtaccattgttcataatcatcaatatacatgaaaaatattacatttctataattgtataatattaaagctaaatgatcatccatgcaccaatcaattgaattgatactctaacatgttatttaattatattttgtaagcgatatatgttatttattttatattttgcgagtaaaataaataaaaaaaaaaaacaagatttgaggtgttaaaatttacacctatattcatgtatctgtttgcttgatgggtagctacataaaataaccttaaatatatgggcctcttatatgtagtgtaaaactggtgaacagagtcatttttttttttggtggctaaaactatatttatcaattaatgtacgtaaattatgatttcagagtagttaatataatattaatagtaatagttgtaataataataaatatgtatacttactaattaatgctggtttgatgctattaatagggcactgtagcttcaggactaatggtgacactgatttcttggtgtgtgagcttaagaggtccagtcttcgtctctattttcaatcctcttcttcttgtcctagtagctatggctgggtctcttatcctcgatgagaagttacacctagggaggtaatcatctac

SEQ ID NO: 204769 - DNA, 816 bp, Cannabis indica
tactgcttgaggacaattggacaaggtgacacgttagtgacgatggggacaggaaggtttgatctgaaccatatgttgagaacgatcggagggctgagggtgagccatgtggcattggctccgccggtagttgcagctgtcgtgaagcgtgagattgaaagggagggctatgatttgagctctcttgaagccattgcttgtggcggcgctccgctgcccagaagtattattgaacagttgagcaaacagttgcccaacgtccaattggtccaggtaaaacaaataatttaaaatattaatttatgtttctttttaaataaaatattattttatgttatttgaaatttgtaacttgcttattttttataattaaattatttaatatttattaaaaagtatattttttttacataactaacaaaaggaaaaaaattatatatataaaaaaaattattacaatttaattcttattattaaaattctttttttttttaacctacttagtattacaattctgctcgttttagttgtaaagtttttgtttggaataaatgattatagtaatgaagttaattatgttcaaatataaatgatttttgttgatatatcatcaattttcaataaatatttaatatttaataattttttcttatggttaaaaaaaactctattaaatatggcatacttaatcagtatttgcggtataaatactttatacctttctgttgctaccactatattaagagcaaatagagaaatttaaagaattgtactaaaaaacacgctacagcatatgctctaaattctttttttttt

SEQ ID NO: 204770 - DNA, 1999 bp, Cannabis indica
ttgacttgttattcttctttatctaactaagatctgacacttagaatttctgtaatttcaagccggcaactgacagaagaaatagttgaaaacgcctcaattaattggtcatcacagccacgtgcgacaaaaccagtcccgacctcatttgtgtcttcaaaaactaccccatccacattaatttttaactgtcaagcagccggtttggaccagtgttctcttgtgtcagatcgattagaagccagggaaaccaagtccagcgtctcaggctgagtacacgtccattgtcgaagagtgttacgagccaaccaaacaacatcagcagcactacaacttttgccattccaaagcatatcattccgagccttccaaattacacaaccaaccatgacagtttcttcaaccaattccatattgcctactgccaacacttttataaaccagtcaaaaaaattggttgctacaaactggccaacacctaatgttgatcggatccaacaagattgagcaaatgagcattgaaccaacacatgaaaaattgagtcttccctatagttgcacaacacacaatgtaaatccacgggaacatgtttactatgaagttgagtacgtgtaggcaaacaacccgaaatagctttccaagcaaaatgtaaaaccttaggaggggctttattgtactcttattaatttattattttgtgttatttgtaagttattttttattattattttgttgttgtttggatgttattttcttattattttatataattttttttattattttcataaaatacaataaatatatataaaaaatatattgaatgaaaaaatattaaaaatttataaaaaataatactttatgtaattatatatatatttataaaagatcagcccatatttataaatacccacataaaatggactttccacctaaatattattattgttatttatttgttttggtatgaaacttaccatttaattattacacttctacttttcataaaggatggtggttttgagttcttctactatagcataagattattaaatttagaaattttatagttcactaaaataaactaaaataaattgatgttgctgagagaaataattatcttgaaagaacttgggtcattagttgtagtacgggagaattgttgtagtacttagtacgtaccattagaggtgtacatggatcggtttggtcggattatagagtatttttatcaatataatataaatatcgggttgcaaatatctaattgtaatctgtctaatgaaaaaataaaaaagtgtaacccatccaatgatttttgtcggtctggtcgagttaacgcgtttaaaccgatcttatttttttttatttttttcattgttgttagtttttgatgttcaaataattgatttgaaaaaaaataaatatatagtatatgcttttcaaaattaaaatagttatagtttaaattaatgttaaaatataaatatgaattgaataaacattaaagtattaaacaatattttttaaaagatagaataaaaaaatatacttatatgtatattctaaatttcaacttcaatattcaaatacaatcaaaattatcaactataaattctaaattttaaaataaacactataaaatacaaactttaaatgtaagatagtttaactattaaatgtaatttatatattatgttataaataattttagtaaaaaataagtaaatcggtttattcgggttatttgggtaggttagaataatatccaacccgtctaatatagtcattgagcggtttgagtttttcgtaaagttattcgggttgtattttttgtcggtttattcggtttggtttgagcgatttattcgaattgggtggtttgttaatttttttttgaacagccctacgtaccatatgtttgcaattgatgaaaagtgaggaaaataaatataagagagaaaaagttgaaaaaaaaaataataaaggctatgtttg

SEQ ID NO: 204771 - DNA, 1024 bp, Cannabis indica
aagtattgatactgtttttcttaattttataggttgacatttgacaacaataacaagaattcttgatctgatatatccagtttttgggatataatagatgatatctcttgtggggtgtttggtatgggtgttcgggttcttatgggaatgagaatgtaaagtcaaatctatgtttggtataagcttagtggactggaaggcttatgattaagtgagtcctatttttatggttagttttggagtaatctcaaactctataagtacttgagtttagtttgagattctcataatctcaaccccgagtgaaattgttacaccaaacactccattgtttataaattcaagagagacatagtatctctaagagagatgctaacaagatcattgtatattgtttttttttttcttttgaaagttaaccgtttatagataggaaaaagttagactttacggtcgttacataaaatgttttcaaatatagttgagagttcaaccataccttttacatcattagcaaaagtctatttagtcacattatgatagtaaaattataattattggaataaaagaaaaattacaagaaaataaattagagagttgttaatgatgcacataattactaatactccaattatgtgcagtacaaggacctcaagaccataggttgaattatttttaaattgatctttttataaataggttacaaaggtattgtcgagtcaactaatattttcttgcagtacaagaacctcaatacaagaccaattttaattgaagaaattcttccgatcttatatgatcagagtttataatgtgactaatttcatttgatgtttttgactaacgctttgggtttaagctctcacagttttatttttgagcagtgtctcaaactaatagagcaggtagaacatttatattttaggcaactcttgcctatttttccaatgtaggacttgggttgatacctcaataattctcccttcaaaccaaagaccacatacttctgacctcctcttcagca

SEQ ID NO: 204772 - DNA, 1231 bp, Cannabis indica
ggatccaatcttagtttctggtctgcaaagacacaacaggtcgttgctaggtcctctattgagctgagtttcgagcattagctaatatagttgctgaaatcaagtggctttgatctttgcttactgaattacaagtcaagttagcagatgtccctatcatttggatttataatcaaggtgaagtttctttacactacaagaaatagggtcattacctacaaaccataaatgtgggtaaaactcccaaaatgtaggccattacctacaaacaatcatagcagctaatcccatcttccatgcttgatgcaaacatatagaaattgaccaacattttgttcgtgatcaactgctagataaggaaattgactaatattttagttagttcggttagtcatgatcattcattaactaattctgttttataacagaattcttgttttgcatttgtacactttctaaagctataaataaagagttggcctctagttaaggtaagttttgccaagcgtttcttgtgttctctttctatctcccctatttcatcttcttcactgtcttatataaagttgtaaaaatctaaaaaatttattgcaagggaaaaaggcacaaaatttgaattttttttacccattttacaacgtaacgtcaaaaaagaaaaccgacgctataaaatgcaaaagttttgatttgtagccttcactattgtaatgttaagttcaatgcaatgatataactcaaacaccaataacatccccttaataggttttagctataataatagcccaaaatttaatggcagtcaacacatgtaaaaatataaaaaaatcatttattttagtaatttttatacatataattagaagaccacagtaacctttggcccctagttccctcaataataataataaggttatcagaatgttgattatgtgtggtgtttcacacactatttacaacaaagtgtgttcaaaaaatataataatttcaaattgtaagcaaagtttaatgtaataataatgtatcaccaccatcacacatagtagcctcttagagatcaagttagaaattagcgaggttttactgagatcatttttttttaaaaaaataaaataaaaaatctagttagaaatattataaacgcgtttagtaacaatattttaattaattttttatttttattagaaagtaaaatatattccaaagatatgttttataaaactatttttatttt

SEQ ID NO: 204773 - DNA, 897 bp, Cannabis indica
aaatattgtttccaacaatggaatattgtattggcttcaaaccaaggcaatgattgcattttatccttttaataaagatgaaaatcatcatcattatttcattaacaatattccaacaaaatatagccaatttttatgtattggaagtgtttgtgggaaactgtctttctgagctttatttcaatcaaatttggaagaaaaatggtttgaaagtttgggaattgagtaatgaagatggttttaataaatggagtttggtgaagaatgttaagttggagttgaataataataattattgttattattttgataataatgatattaaaagatcattatgtatgataagttttcatccagataatgagaatgtgatatttttaaaggtacaacttataggagattatcgaaatgatgttggttataatattggttatggtattattttatgaatatcatattgaagaaagaaagttaataatattggttatggtattgtttatactttaaagcatccttcttggccaacacattacttccaactcccattctacaataattttatttatttatttattattggtttaattagttctctctattgtttaattagtactttttatcctatttattactattataattgaattttattatgttgtctatctttgtttatttactctaaagactgttttgaattttgtattttgtaaaaattatagatacttatttttaataattatgtattcttcaaaatagtatataataaagcatgaactcaatttttattatttctttttaatataactaacttgaaatacatttttagtatgaacttatgcgaaaaaaaatataattatttttgtaataaaaattaagattaagttattattaagtttt

SEQ ID NO: 204774 - DNA, 537 bp, Cannabis indica
aataatatctctaagaaaatgtataatggacatttcgaaaaggtaatattagagatatcacggtctttagaaaaaagaaaaatcatagtaataaaaaattaacatacgatatacactgcttataaaacaactactacatataaatattgtgttgtactcatttattcacacataaattaaataatatatggatgtataacaattaaaaaactaattttagaaaagaatgggtagtgacacaagaatacatatatttagtagtatttttgttatatattgttctttctagtatatagttttctttgattagttacaaattcacggcaatagttttctattaatctgtataaatatccatgaatcaagttacttaaagaaaaacatagtttattcattctagctcattaaattaaagaaaactagtgtcctaagcataagagaagatggctctaaaatttaatctaacaataacactttgttcattgttattaggcattacttttgctgtgaatccttccatttttgatgtaagggcac

SEQ ID NO: 204775 - DNA, 1079 bp, Cannabis indica
aaaaaaaaaaaaagtaatagaattgtggtctaacaaattattttttctatataaagagcttaattttaaacttttgctcaacgtcccaaaatacttaaatctagatatggtgggtgtaccttagaatttttgcaacctggctagcctaaaatatatgaagttttaggcttgagtttaacttatccaatagtctcctcctcagattctgttttgccacatactaatcagtaatcactaggtctagcaagatacaaatcacaattgctctctcataaacttgcttgcattcatgtgagcttgttggctcgacggttaattcacaactgctctctcataaacttgtggacttggtggctcgaggattgattggcccaacacagcatagtacagagagtcatgtgcaattttgagactcggtgcatatcacatcactcaatcttgacttatattttcaagtttgtataaatgcagcttaagaacaagctagagcaggaaaaaaaaaaagaaaaaaaataaagaaaaagaaatacagttcatcacatgatatatacaagatgacaaaggtggtcactttactgtttaggaacaatgttgttgtgacaaggctaagctcagcaacggatgaagaatgcaaagattttcccctacactcttagtatagacccttttcaagtctgttataatcagtatacaagcatctaaagaaaccacaactgtcatggaaaagcaagtcttaataagtaatagaagaatatgcaaaggttttcatctatactcaagtattccttcacaagtttggtgtcattttagtatcaattaatacatcaacagcaaactatattagtaaagaagaaaaaaacctaactcttactggtaaagtacaataggtaattcgtgaaacttttatgtcatctgatcactgtgaaaaaatggttatcagatgctgtaaagcttccatgatatacgagaatgaaggccgttgacacaactcgctgcattaaaccaacatcagtataatcaatagagaaaaagataggcaatttttacgtctagacagtgaaagaattgcttcaatcatc

SEQ ID NO: 204776 - DNA, 931 bp, Cannabis indica
aaaaaaaaaaaaacttaataactaaggatgaagtaaaatttgacaaaatttactaaacctaactacatgcatgaaaaccctttacgtggcaagatctaataatttgtttttttttttcattaaaaaaaaaatcacttaataatttcccataaaccaaaaattatattatatagcactttatatagaatagatatatttgtcacatgcaatataattcattaacaattatagttaggtacacaattattttaagctatatttaaaaattttactattgtgtccctaaatttttttattccgttcaaaatgatgatacctaatattataaaatagttatcaaattttatcacattaattaacaaaatgataacgtgattatttagataatttccatatcattgcggcatgtataatttaaaatttgcattttaaaaaaatatcatactaaaaatctattaaaatatgatcatactaaaatcagttaaagattaaaaaaagttaagtaaaactaaattaaaaatatttattttttcaaattaattacaaacacagcgcttatgtgacaattatctaaatagtcacgttatcattctgtttactacatataacaaaacttaataaaataaccacttcacaatattgtgaatagttcatagaccatttttaactagcaacaaaattcaagaaacacaataatgtataggtcattagagcgtcacatttacactcgaaaattcacccacccgacaaactcacccgacccaaaacccaaaaaactcaaaaaatacatgggtttaaaaaattataggacaagttcgggttacacccgcttacccaccgggccggtttgggtttcattaatttaatacccaaaaaagttgaattatacctgaagctacccaaaaacatatatgtatatttcaattatttt

SEQ ID NO: 204777 - DNA, 1227 bp, Cannabis indica
gggtaaaaatcctaattagcctacttcataataaatttattaattatatattttaaaacatctaaacttatttattttttaaaataaaattagttagatatatttttgttataaataaatttaaaaataaattaaattttatgtgttgaccgagattggcaactagatatttaacgtaataattatagcttaggaagaattaatgcaaatatttttacgtgatttgggtattaatgagcctcagtccatgagtctctgttattaatatgtgggtgtttcttacagagaatgttttgtgttcttttttttcctatcccttcattaaataagaagaaatgtctcgtttgttctaagtgccagccttgggcacgcacaagttcccaaatttatgaaatagggcatgcataacctacgtagtaggttgcctaggctttaggtgagattagccttcatcctttcttgattgatgtgattcttcataatagagttgtttcttgtacccttaattatcgtgtaatttctaaaagacgaatttatgatgtctgacacgtcctcttatgggtgttctcagacgcttcctccatgttgtattaaaatgcgagcggacagttcatctctagttccacaaacctggaagagtttatatgccttccagctcctggagaggaagtcgagatggccttcccatgttcggaagctagctccccagacaagttgttggttcctttagaggggatttggcctaagtacttttattatcttcaggtggggggtcttaatttgccacgtgtcctataccgagactgccacgtatattgaaagaaacttggggcaacattatgtatttaaaaaataattgaattgcattagagttaattttatgattattttttaaattaataaataggtaattaactctaatacatctctaagtaaagatgcattgtatgttactctgatgcggacctaaaaattttgggggcaaaaaaaaattagaaagggaagtaaacttaagaattaagacaaaataaaaattaatttatctaaaaaagcataatatagaaaaaaaaatacaaataaagaaagcataaatataacaatatttacaaaattaatatataaatgtaacaaacaaaattattaaaatgaaactaaattacaaataaaaactgaaatattaaaatttcagcatggagatataccatccttagtatatatatatatata

SEQ ID NO: 204778 - DNA, 360 bp, Cannabis indica
gagttagttagactcagccttgatatatgagcaaggtcaaagcataaaaaccaaaacaaatttcctctaccttctttaaagccttgtgactctcatcaagtcaggaaccaaacactgaaactagcctagtcccagttaggcagagatcaagggatgagcggagctcaatcctttttgttaaggttcgggaatcatacataccttatctgtgagtcaagagtgatttacaaacacactcttaattaattactgagagaaataataaagaaaatctaatttgaatgttataaattgatgaatatgactcatttaattacaagaataagttcttttttttttttttttattttttttttttag

SEQ ID NO: 204779 - DNA, 584 bp, Cannabis indica
tatcatatttttattttattaaaaataataataaaaagacatatattaggtgactacttaataattacatttttatgtaatcatgatcattttttaaacttgtaatagtaagttactaataaataaaaatttattttttagagcagcaaataatggattttagagtaattgaagccaatagcacttttggttattgaatacttgacttttggttagcaaatagcttagttatttgggaaatagaaagtatcacatgaattttaaaaaaattgaacaggtgtcattagctcattattgtgacagaggagagacataatattagtgacagaagattttttcattcgtcttcataaggcgagtgttgatattttgatcagctagtagtgtagttgtttatgcagtaggaacaataactcttggtgcaacattagagaggcatgctagtatttgtacaatctacattatgaacattagtaacaacatgtgcaggaacaatattagaaacaagagcatgatcaaacaatattgatccagtactatagattgagaaaagatgctaggagtgagtgagttatgggggattt

SEQ ID NO: 204780 - DNA, 602 bp, Cannabis indica
ttttttttttttatttgttgaatgcattagatttttctataaaataaatgatagtcatattgaacaaaaaaatatgaataaatataataatcaccttctcataaataaaaattatatcgagacttatcaattatccaatcttcttacttcttaatattatgagacttttacattctacaaactttaatttttatgttctaattgttttagtatttaagtttgtaagaaaaaaaataccttatcatgagaaaaaagagagaaacaaattaaaaaaagttgagtagtaaattgaattaagaagttaaagagaaatactttaggataggaattgattggaaaaaaaaaacaatttcaaaaaaataaaatgatgtatgagccatcctacagaaatggaaaggttatttaacaaaaatattttttaaacgtgatatatcagccagaaaaagagtttttttttttaattattatagattaatattatttaaaaattagaaaataaatatgagaaaatagataatcatgaacctaatgtaaaattaaaagaaagtgagaattaagaagagaccatatagtgatatttggagcaattttagagcatcatt

SEQ ID NO: 204781 - DNA, 1021 bp, Cannabis indica
agtatgcttagtatcttaaaaactaaatcaagtgacaatagaaaattatgtcggtaaattattaaggttatattaacaaaattatattattttgaaatgtttattaattattatatttgtttcgtatactaatcattttgtatatttataaattttaaaatacatctagttcacaatattatacgatcaatatcatatatatgaaatgtaactaattagtaacttatttatgaaatgttactttttttttttttttgatgaatcagctttaatttcattactccaataaaccatatttacaatcaaagagtatcccgattaaagggacctcatctagaaaacatctgatttgtacatttgtatatctattttccaaacactttctattacatctataaatttctaaaccattccaagtcttttgtctcaacctgtttcggccatgtataaaattatttaacgtgtataaaattattttgtatgtatatttgaattgtgtgtaaactagttgttttgtatctcatttggtgtgtagttttttcttaagtttacaaaacttatttttattacatgtccaactaagttgcttgtcgtttgaggatatgacctccattaatgaacacagtaatttttgggtcaacttttctgaaattttgatagctatattcctttatctagctatgattttgtctctaatttgtatataatgttgatggtttgataaatgatttcaatgttgaattcttgagcgatcttccacattattgtgaaattatgaagtttttttttcattaatggagttttttttttgttagaatggttgtcgtttgtgatttttattttgagttgttactttatttagtaacagttatgtctctaatttgtatatactatcagtagtttgagaaatgattcttggtactggattcatgttcatcttgtgctatttgtgaatgaagtttttttttttgttaatggcggttttttttttgtgagaatagatttgatttgtaatttaatt

SEQ ID NO: 204782 - DNA, 721 bp, Cannabis indica
gagatgatgagtcacgagtcatgaatagcttgctagctagctcattattttaacatgggataggagttatacatctatatgataacataaacatatttcctcactaatcattaaaacactatatgattacaaaagggcccaatgaagatacgattttatactaagtgtatcatgcatggtgagacatatacatagatgtgaacatatctatacataaagtggtccataaaagattttttcagaaaaataaaaaaaaataaaacgaaatgtttttcttcttctttctagtacttcaatttttatttgtttttctagaggatctgttggcagttacaaatgaaaatagttttctatcatgacattaattccaactatatatgtaaacacacacacatatgtgtgtattcataattgaagttgagtcagaaaaataagactcacatcataatattatttggtttttcacattagagggtgacccaattcgtttcactttgtgggttcaattcctcctaggataaagtgatgcatctcttttggtccattttgcatgcatatacaggttacacagacatatttattcattattattattattattgatcactaacactattcatttattttgtttgctacttgacaaaatgaaaagcaacacattgtatcaatcttatataattgggaatgggatatttcaatgatttttctcaatgtttaatat

SEQ ID NO: 204783 - DNA, 779 bp, Cannabis indica
gttttcattcaacaaagaaaaaacataccaaaattcattacaaagcttaacaataagcaaaagcaaatcaataccaacaaggacgaacgaacggaaacaaggctaatagaccgaccaatcgagatcgatatatcatagtcattttcaagtaccataccaccatagatgaaaggtaaagaactaaaacaaggatacaaaccctcaaatctctaacaaaagaagatctattactagaccaaaaacctaaactaaaaaaacaacataaagcagtagatttgaaagtagatctaaaataatacaacatcaataaataaaaacaagaccatataacccacaccaacgggagaggaagagacaacccgccaccaacaagctctgggtgccggagggaaggcagaacccgaccgtccctccatctcagcccgtccccgagcttaaaaggaaaggaagagctagagccaaaaatgcaaaatctggcaaagaaaaagcgtctgacattgttggaggtccattggtgccaccttcgaacctcagccgctatagaccatgaagccctgaaaaccttgacctccctcgacggtgacttcgaaaatcttcactgttgccggcttctccttgtttgtcgtgcaaggaccatgaccacgagtaccaccatccctctcggctagagaacaccaaccgcacagccagactggtggctaggtctctagccgagcaaggaaaagagaaagagatgggccgagatggggatggggacaatttaatttatttatttcttt

SEQ ID NO: 204784 - DNA, 303 bp, Cannabis indica
aatatttaaaattagatacaaatctatcctcatacaaatattatgaaatagtggatcaataatttaaattcgaacaataagaaacacatcaaacaaacaaaagttactatattcgagttgtttctaccgtatcttttatatatagttgctactatattgaaagttattgtcattaccgtatcttatttataattgctaatacattcaaaactgttatcaacaccgttgtcttcataatgtacggcaattgtatagttattatttacaataattgtatctcattttacttttgaaatcgtaatt

SEQ ID NO: 204785 - DNA, 1092 bp, Cannabis indica
tggactatatatatatttatatattaatacacaattgaccttagttttagttctttttctgtgttagatatatatataatgataattattattgtgatatatatttgtaatatgtatatatatatacactatataggcttactagtgaatattatttgtgacaagtgacaagccagttgaatgagcaattaattgcaaatgattcattcatagtgcctacatgcatgaatgtcggcacaaaatgtcacttcttacaattcatgtaattaatgtgttatatatatgtatgtttaagaataattattggtgtttttattatttatttattcattgatacgtatatatattttatagaaaaatatttatgtgaaacaaagttaatttatgtgtatctatatattatatttgaataatttattaattacttcattcaactttagttacgttgtgaccttaattaaattaatctcagtagtaatttattatcgcgatcataaacactatcactacgtatactattaattataagcaaatttataatataatatatatatatacaatagtaataagaaagaataaatatatatctacaattatttatactataaccatccttctcgagttttatctttgatttttctttttgaaaaaaattgaattatagaatagcgttgtaaatgtctccttcattattttgttttttttttttttttaagaaaaaaaaaacttgatgtaatataaatactatattatactattgtggcgttaaagtgtaattcaagagttcaattaaaaaaaatatgtataaatatatagtagtttaatgaagaattttgcagtataatattatttggatatttaatatgaatagattagattttggctagttttaattaaatattttatcaataaaaaagttaacttaatacattcgtcttctaactatatctttaacacataagaaaattagttataaaaaaagtaaatttaaaattacttttccctaactgaggtgaatattattttttgaatttttctagactatccaaaaaatttccaacatgctattgaaattaattggatgacttttgt

SEQ ID NO: 204786 - DNA, 538 bp, Cannabis indica
tagtatttataggctaggaatcgggtcctagtacatccgttacctgctagggtttcatgtaaacttgacccgctaatagagtaaatacatgaaatatgtgactatgggcccactaactgaggcctagtttgtgtggcggaggcgatccgtacatctggagaccacacggtccatgacagatgtcctatatatgtgcactgttcttatgtagtgatgtccgatggctgaggcccagtttggtggtgcacgcactcttatgctctgacacaggggacaagcccttgattctatgggatcaggtgtcagagggctgccacatcttcctgtagcaagcttccgaggtgcctcttcgggtgccctctctggatgtatcccaaaattcattcaaaaggttttaatcactttgcatttgggatgcaggaggccttcctggatccaaatcagccctgtcttggagttgcatcctttggggttcagatggttttgggtccatcctttcgtatgggttggatctatgggtgggcatcatccaatccaa

SEQ ID NO: 204787 - DNA, 624 bp, Cannabis indica
aatgacattagggagaatattacatgatggatggatttgtggtgagaataatgtttggtgtgaaaggaatttatttgagggaagaaattattagctggttgatacatttttttttgacaaaactggttgatgcattttaattaatcttctaataatatatttaaatagaaaaatgtaggtccacactaataatttggttgacttaaaattaaatagaataaaatttaaaatgtataataaatattaaattttttcttattttacattgaaatatagtttttctttctattttaaaatgtattttattagaataacattttaattttttaaaatgcaacaaaataaaagaataaaatgaaaattatttcctttctactttattcagtttgattaccttcaatcaaaagctaattatttattttaacatctcctatttatatgtaaattgtctactttattaatttctctatttttttttctaccaaaccatgaaagtaactaagtaatgtgtgatttttttttggacgtaagtaacgtgtgattttctttcctttacaacaaaaaattacataggcataagttacaacttttttttttcctttttagaaatattgcataataaag

SEQ ID NO: 204788 - DNA, 553 bp, Cannabis indica
tcctgggattattttcagaactacgactcattttttctaaatgagatgatgaatcatactacccaaatgattattagctatttgtaccaccttttttcaagtttattgtaaaatataagagcgtgggttactaaaaaagtggtataaatcaaatgtaaacatagtggtggtataaatcaaccattgaagtacgaagagtccatcttcatctaattccttctcagttggcaatgttagaaagaaatatatttaaagaaactcaagtgcatatgcagactttttgaaagaagaaatggtcactaaagaagacactgaagacaagtgccaatttggggtttgcgtagccaataactcatatcaattgtcggcacttcaattttgatgggatcactcttgcttccatcaacaatttctttgtccaaataaaaaaaatagcaacaaaatgggaagatcgatggacttggcgttggttgatgattggatttgatacaattttttggggggagaatttttgtttttatggtttttaaagtacgaatttgtaaagatatat

SEQ ID NO: 204789 - DNA, 625 bp, Cannabis indica
catggatccacccacttactttctatatttatataatgtatgtataaacctataattacaaagatataaatacacagattaagaatcacaccttatgtcacaactatacacattaaataaatcttttgtaaaggtttcaatataatgttatacatatatggccagtaaattaaagaatatttttcggtaccagaaagagaaaaaaacaaactagtcaaaagtgacagttggaaatgatatttatttagggtatcatgtgcagaaaataataaaagctaattaggatttatgattcttgaaatttgatatgtactaaattatgctttttgaacttttaaagcctgacatagataaaagttcaggagtatgatttagtacatatcaaaattcgagaagcataatttagtagatatcaaaatttgaagagcgtgatttagtacataaacaattatttaaatagtaaaattgaataaaattagataaaaatctttaaatctaataattttcaatattttaaaagatatttttaacgaatttaaaaatttaataaagatgatcgtcaaatcttaattagccaataataaacttgcaagtagaagaacgaactacctgagttaggggcagt

SEQ ID NO: 204790 - DNA, 597 bp, Cannabis indica
aatgtgggagttgttggtactaatatatggcttgcttatcctgtatatatagcttggtattaattagtattcaagtagagtgtgactctactcatatgattccttgggttgccatttcgttgagtgatacttgtacgtttggtactattaattctgtaggtgtggccatctttaggcagtcttattctcatttttttcaattttttttaatgaaatgctacaattgattttgcttgataatatacccttcatttgtgaaaatataaaatatatatttttttaatttaagtgtttatattataatcatgtaatataaaatatatatagtttttatagttttactactctcattacataacttaacattttcagttggaaaataattggattaggcaataacagtaatatcaatgtaacgacaaacatgtataattatttaaacttaaattactactggctaatttattaaatgtgagctatttttacttttatttactattattgttataagattggtgtctaacactatttaatataagaaaatttgatataattaagtatcgaatgttgtatataggagtttttttatttttacac

SEQ ID NO: 204791 - DNA, 1981 bp, Cannabis indica
ttacttatggtcaatttgtagttgtcgtgaagttgatttcgcgtttatttttagttggttttttttttttactttttactaaacaaattgtatttttgtaattttaaaattttacaaatttatttttataattaaaaattatagaccataaaataataaataaaacattaaaaaaaattatattttctccttaattattacgagtagataataatgaatttttctaggttatttaatttatatttagagatgaccatttggagaatgatcaataaaaatattattttattatttattcaattaatttctaggatttaattttaattaattaatttatataatttttagatttttagtattaaaatacaattttataaatttttctattttaatattacaagtcctatgaaagaacaacgtgcatgtgttgttctaatcattttaataattttttttggtgatctttcacatccacattttgaacagagcattaaatcacttttggttccatgcatattagtattttccaatctagggcatttctctggggattacaatccagaagggaaggaatggatgcggcttttcacccaggggcagtgcacccttgtgttgtttaaacttctatgtcggatagtttccattaaattgtttgctttttctaattattttgttttgatcactacaaaaaattttacttttaattacaacaaaatttgtgactaaaagtaaaatagttgtggctaattataaatcataattcttatcctttaatgatatcacatatgaaggaataagttgccacttttggtgtgggaaaaggaaatttcaaaaagtaattggtattcgtatcccaatatttatactcttcatgtaaaggtcacacctttacctgatctacagaggggataggctatagtgtcattccaaattaggtaaccgtcttgagcgcacttctttgccacatggcaggtaaaagatctgcggtattaagtgacccaaaagcatccgagatcaacttacaccgctcctatagacgatgcccatgtccaagaccacatgtacacccagactcctccgaatatggtgtgttcttatttcattcgcatgttacttgtatgcagagaagacgcggggcctctccataggatagcaacctaggcttgcaaaggctctagaataatctttaagatatcatttcacaaattatgctgactcatcttcatgacgacatgtcactgtcatttatctgtccatggtggcaacacacgtgcttcaggaaacaaggacaacatactttttgtatcttagtagtttttctacgaaatttaaaaattaagtattatttatcaatcaacatgctaatggaaaaatctatagtacactccctgaagtttcaataaactcttcatatattttggcatcaaaaatagtcttcatatttcaacatatttcagagacggagtaatatttatcgcttataactaatctcatcatccgccactgaaagctattagtgatgggaattcgtcaccattgtcttgtcagtagtagtttaatgcaaataatgattattagtggcagaaacaagctacatccctaatagtctattattagcggcgaataatagcaacaaggttcgctgctaatatatatttattaattacttttgaattagtattgttataattctatttttaaatgataacaaatattaaaatacaatcaaaataattgtaacatttgaagagtattcatttttttcacattctaaaacacaatcccaaattgtaaaagaaaataaagatcgaaatactagtcaatgagaaatgaaaccaatcttagagatacaactactgttaagaaaagtggaaattcaagaacatcaaatgcatgtttgtcttctccgtttgtcgcttctcttttgtcattgatgccaagaacaaatcttaaatatgggtttgtcattgatgttgtaggt

SEQ ID NO: 204792 - DNA, 1063 bp, Cannabis indica
tgcatcacagtttagcatataggtaccttcttgaggagccaaccatctattgatcttctttattttcgttgcttttctgttttcagtgtctccctgcagaatattagcaatgtaatcaagagcccaaggagtccaactttccaatggagtattcttgttttgaaaaatttgttgattcctttggctccaaaccatccaactcaaccccagaattgtttcaaattcctctttagagcagttttttctcataaaaatgagaaattcaaccaggtccgtcatcaaaccgagaccttttgggaagaggtgccagaatccagccgctctccaaacactcttcagcttagggcagttccaaagagcgtgtccaatggtctcatcatggttccaacaccccgaacaagttctatcaatcttgatgcctctcttcaccagctcactcttcgaaggaatccagttgtggcaaactcgccacacgaaattatttatcttcggagttaacttcgagtgccaaactgccttccaccaattcctctctatcgttttgttagaagtctccgctccttgtttctcaagttgtgttaggatatacccgctagctaccgtgtaatcaccgttaattgtataatgccaaagtaattcgtcctccccacaacctcttcgggcttggatccccaaaatccaaggaatgtcgtcttcatgcatcttctcctcaatagactctagattccaatcaccattgtcattcatgagagaattcacataagtattgggggacaccttgaccggggctcgaaggaggaaaggggctcatctaggaatctaacgatcttcattaattctaactttactaccatccgtcacacgccaccgtatcccctttaaaagaagctcccggccccaaagaatgcctctccaaatattagaacaccaagtaccgaggccagccttcaagaattcagaattcagataataaagagcctttgacacctgagcaaacaagctatctggttttgtaacgagtttccaaccttgctttgcaagcagggcttggttaaaatcttcc

SEQ ID NO: 204793 - DNA, 860 bp, Cannabis indica
  modified_base (854)..(854): a, c, t, g, unknown or other
ttttaaaattcattttattaactctttcttctttcttttgccactttaatacaatatgattccacatttttctttttattcaactatatatgagtgatatttggtaccattagatgttccttagtattttttgttattgttgggtaccatatagtgcttaatgctatatgtagagggttacaattaattaatagttttttatattatattaaaacattggatattaaattttaatatatatatatatatatcattttttgtggtatttgaaaccataagatatacatttaattaagtagggacaacgtacccatttgattttgtattttcttaaaaaagaaagaaagaaagaaagaaagaagttatatgtgttcttataatttagtgtattttttatttaagctttgtattatactcttactttaatatgtattttcacatttagatttttctgtatattttgaccgaataatatattcttaagttacagtaatatgccgacttttcaggttagccattgggtggtagattaatactaaaagttatttaataatgtacttcattagattttattatcaattgaccgtaacaaagttacactaaaaaatatttaaaatccttttaaaaaaaatgtttaaaatccttttcaaaaaaaaagtttaaaatattaccattccaaaatgtaggttgttaaatcgtttctccgtcatttcattcatttcatcatagtactatatatatcttaaactaagttaatctataaaaaaatggagtgcaactgtctaatattatttatatatacagagaagaatctaaacacatggagatctaatcaaatgcttcttttttttttntatttt

SEQ ID NO: 204794 - DNA, 616 bp, Cannabis indica
acacttcacttgagcaaccatccatagaaaccataaatcttctaaatcaaaagctataactattctcttattaggaaataatcagagtcagacactgaaaattcatctccaatctggctagcttgatgttgcttttccgcaacaaaatcaacttgcgattttcgcagttttgactttcgttttcgatgactacgaccctgtatgtgttgttcccactcatgtgctcctctaaggactttatctccacaagcctaaaccgataaactaactcacattaacagaataaactaactcgaactattcaatggaacaagaaaagaaacataagctttgctgaccttgcatacatactgagtccacagttccctttcgagtattcttgttccaaccccgtttggacactcctcacccgggaccgaagctaccttcctggctaaggaaagatctaacaattttcacggcgggctcaactacctgttctgcccatatatcatctgatttacctgcaatttagagtgatagttgagacttgaaatgattatacgggtaatgtgaaaatttcgaaaaagagaaaaacacaatgagggacgaagagttaatacttagaatagagtct

SEQ ID NO: 204795 - DNA, 1021 bp, Cannabis indica
aagtccaccttggaaggtacctacttcttcttcttcttaatattatcatataataatatgtatacatagatatatatatgtattagttacaaactacaatatataataacctactttttgccttttacttttctaacgtgttagtctcttttccttctaaattgggaaaaatcagtataattggagccatattcatagtgatgggactctacactgtggtttggggcaaaagcaaagatccaatagaaccatcggcaccatccaaaaatattgatcaattgccaatcacagacaccattagaccaattagtgttgttagtgttacttctaacaatattggaggaggaccactagagatgtccaagatttctacgtcttctcagcagagttcataaatatatacatgatattatatttaacatttggggctagctacgtacgtagttatatacatatcttagttatagagcaaaagattacgtacgtacatctcctagaggagatcgtaatctgaatataaatggaacttgttccttcctttttcatctttcatttagctgtttctcaattcttcttccccataaatgtaacttgagagtaattacaaattataatggcttgctcctacatccattttctctttatatttgtgatatatgtcattatattttattggttctaagttatattaaatatgtggcccgtggattgtctgaccattacatacattagatagaagcctcgaattcgaatccttcacaatatcaaaaaaattatattaaatatatacttatccagcttttggcttcctacaataaattacaaaattgtttttattttttttgtttttgttaattactattaaatcctgacatcatttcatcacaagaaaaaaaaaaaatcagagctccactttttatataaaatattatgcatacaaatacactttttttatttcttttactaatagttttttcattaaaatcttttataatttaatataaattaaattattttgata

SEQ ID NO: 204796 - DNA, 1704 bp, Cannabis indica
aaactagtcactcaagcacttcctacgctatgccatgagtgtgtttttgttaccacttgacataagccgtgacatggagcaacatatggctaaatttggtggaaaacatcgaaaggaaaagagtcagggattcattggcattcgtgggaaaagatgacacatcataaaagtgttggagggatggggtttcgaagtcttagagagtttaaccttgcccttcttggaaaacaaggttggcgtttgcttactcggaaggattctttggtgttcaaaattttcagagctcgttattttgctaatggtaactatcttacggcaaaattgggtaataatccaagttatgtttggcgaagtgtgttggaagctcaggacttggttcgaaaaggggtccggtggaaaataggtaatggcctggatattcatgtgttgggagaaccttggttatccgataatgacaattcttatgtcatatctgatcaccctggtcttcgcaatgctacggtagctagtttattgtctatggaggatcaaaggtgggacgatgagatacttgctgacttgtttgttgatagggaccgaaggttaattgaggccattcctactcatctttttcaaggagatgatcgctacgtgtgggctcatgaaaactcaggcatatactcggtgaaaagtgcttacaatttaactcaggtaacctttggtcaagggaataattctgactcttctaccttttggaagactttgtgggctttaaaagttccacctaaaataaaaaacctgatgtggaggagttgtacaaattgccttcctacccttgtatcattgagaataaagagagtacaagtcactaatttgtgtcctgtatgcaatctggaggaggaaactattacccattgccttgtttcttgttctttgatcaaacaagtgtgggaaagaacaggtattgggacatacctctcggctggtatgtgttttctggattggtgtgttgaatcgtttaagggactggacaaaggaaaaaagtgcagaatggttactctctgttgggcaatttggggagcaaggaacaacaaggtttggaagaaaaagtccactactgctatggaaattgtagcttttgcagagaactatcttgaccaatggttagccgctcaagatcacaaggtaagttcagtttcggttggacttatggaaggtgatggtgatgaacaatggtgtgcgcctcaacgaaatggtgtcaaggtgaatgtagatgcatcaattttcggaagagaacgtggctttggagttggcttggttgctcgagatgacagaggactgttgatcgaagctcacaccattagctttaatggtattgttcaacccttactggcggaggcaattggagtaagggaagctcttagttggctaaaagataaaccttggcagcaggtgtttttggagacagactgtcttaatgtggtacaagctttaagaggttcaagtgaaatgatatctgtgtatggtgctgtcatacaagagtgtaaatctttgcttgttggtatggaaaatgtttctgtttattttgttaaacgttcagctaatatggttgctcatgctttcgcaagagtttctattttgtaccctgggcgtattttcagtatggggggtcccaactgagttgttgccatgtttggtaacagaagttgttggttaataaagatt

SEQ ID NO: 204797 - DNA, 1108 bp, Cannabis indica
acatgtataaatattatgtgtactcaataataattctattatgatatagtattaaggattgtttattgatattattattacatttaatatttttttgtgtttttgattttttttttttgaacttctatttagttataacatgtcaattagaaattctattgtatatgtattatgtgaaaacaagagaaaacatttttatcaaaaaataaaaaataacaaaataaatagttccaaaatattaaatgatcaaactacctattctttaggtttcttataaataggaaagaagttaatttgtaaaggctccaataaatgtatggatgagattatgactttttattctattttattttgatctagtaatttttttattttattacacaataattcttttcagtaaattttgtgcatattaaaaaaaatatgtaaataatttacttagaagaaaaaaatgtgtaaaaaataattaagtattttacaacaatacatcaaaaagtaatataattcttatgaaatatacaattttttttaagaaaagcatggactgtattaaatcaaatcagctgttataattcttatgaaatatacaattttatttgtattaaaaaaaaaaagtcatctatatatcttacacatatcttaactcgagacaataacctaaaacctaattattagtttaggaataatttgtagtacacccctaaaaaaattattttgttttggtaattttttatttgtttataactttcaattttttttttttttgaataatttacagaaataaaaataaaatttaaatatttatttaatgcaacaaagtatttaaatgttatttttcatactataaaatattcatttttttaaaaaaaaaaaaaaattaacttcatatgttatttttttggggaattacctaatatactgtttttttaattttttttttcaaatttatggtttaggtttctaaagtggttccagcgctagttacaataggagtttctatacgattttttgttgtaatttaggttgcagcgctaattgcaataggagtttctatgtagaatttcgtaaaaaatgcaaaaaaaaaaaaaaaaaaaactaaaatagatat

SEQ ID NO: 204798 - DNA, 525 bp, Cannabis indica
agattttaaaaaaggtaattatgacttaaatactttctaacatcatacaaaatggccaataatgacatctttgtgtgcttattgcttgtgctatcatagtttggattgtttgacaaaatataatgtaatgttaagattcttctttagtactcaattagcttcacttagttggatttcatgagcagtgagctatattaattgtttgtggttcattgtcattttatgttgtacaatttgaaaattgtattaacacaataattgtagaagatgtataactttgacaccaaatatcggtgtttcttctatatatatatactttaagtttctttgtcggatcaatggctagtttcgacttatatttaatacgattttatcaagagtctgttacatattcacttcttaggtagatgtttatagaatgaacttgtttcaaacatagtctggaaaaggtaacaaacacatatgcttgtattatttactaaagaatataagaaatttgatgtttgttatgtagcttatagtctc

SEQ ID NO: 204799 - DNA, 856 bp, Cannabis indica
ttacaataaaaatagaaaagaatgcctatctactggagatacaaaaataagtaatacaaatacaaaatatagttcactttattaaaagtctactccaatagtgtgataaattataatgcaaaaatctcacatttaaatcaaaagtaatccaaattttgcatcacaatatagcattatgcaaaatttgcatcacaataaatgttatgcttctatatatatatcattatgtcatttttaatatttaattattaaattttagctaacatactcctttgcattaaatgactggcattattcttattattattttattattaaattttacatttaactttgcattattattattatatattttttattaaattattaagtaagcattaaataacatattaaattttgcatcaaaatttacaattatgtattggagtataatagcaaaaattaatgtaaaaatatcacaaaattactttttgtacaaaatataacttaacttttatatctttaatacaatgagcagaaattaaataaatgttacaacaatatatactacaatatatacataaaaggtgaaagaataatatgtatatatagaaacactcacgtactcacaacctgaagcctaaattctcactaaagacctcacattacaaccaaacaaaagataagaggtatgagctaacttatatgccactttattaactgatcgtttaacaaaaacaatctctctacattggagtataattttaacagacttatagtcaagaataacagttcaaaaggataaaatcccaataaaggattactcaaagtatgaacaactttcagcctgtgttattattataataaatttata

SEQ ID NO: 204800 - DNA, 570 bp, Cannabis indica
atagtgtcaattattataaaatatttgacgacctaaaagcagtaacagactcaaaatttttaaaattaggtaaaaatctttttatcatttattgtaattattattattattattatcattaattattacttaattaatcttgaagatcatttattacaaaaaaaatttatttattagttaacaaaatttacaatgaacaatattaaaatgaacattaaaataaataaataaattattgcaaataagaatgaaaattctaaataaatggagtccattacaacttttagtttttaaagttgaataaccacttttattatcaatacagagaaattagaattaaactctgagactaaaaatgaccaattttgtaacccttatgtttaaaataaaagactaataaagacaaaatagcttaactagtctagaagcaattacgtattaaaaacaaattaaactcttagattgaacaaaactcaaataaaaatttaaatctaatctagctagggtcgatgccctagcatatctcttcgcttgtaaagtagttcattccaaaccttgatgaaatagaaa

SEQ ID NO: 204801 - DNA, 443 bp, Cannabis indica
ttttttttttgacacaaatcaatatctttaatatattaattaataaagaaataaattaaaaagtgagagacaatgaaaagaatgtcattattaatcaatgtttaaaaaagattgcatcacacagtattggaaaggtgatgatacataattaatggatatagatattgtatatatatacaaatctttattgaggaatctttagggattcttttaatttaatttatgaatttaaacccccaaaaggtttcaggactcttacatatatatatgtacagataaagatttatatagagttcagttcatcaatccccttctttttaagtctttaaccttaaccacgcacaagagggtttggtacaagtccccgtgtgctgtatatatatttatacaagaatataatttaattatacttgggaatcttatattatatataatatattcta

SEQ ID NO: 204802 - DNA, 1032 bp, Cannabis indica
ggagaaaaattacaattttataatattggatatttataccactaaaacaaattattcagtttatgttgtttgcaaatttaaatattttagtacttatctcactatttacgttttttttagttaatttagatttttgcatgctaactttgatatgtatcaaatcatgtctttaaatttttcaggtgcgcagtttaaaattctctttgattgttggattcaaagacttatgtccaattacatttaattttacttacacgacaattgtccatatgtattaaattttgtttcttaaactttaatatttattaatttgtatcttaaactttgatatgtactaaattaaatatttttaattttaatatgtactaaattataccgtataaattttattcacgttaaacttttattaataaaattaaataaaaattcataaaagtactttgaatgtggtcgtgattttatatatttaatgtcttgcaaactttttttattaattatatattaaaagaaaaaacaataaaaataaaatgagatatgtaaaaaaaaaaggagaaatagataaggatgagtttttttttctttttttttttcatttaattattcattcatacaagtactaataatctatgtagattgaaaacaattcttgtatacacttcttgaattgttttttctataggagaattttctattatcttaaaaaagaaaaatctatgtaaataaattaattaataaaggtcaaaatagattttgtgtttattattttgtgagagagcgttattatatgtattttaattaaggtgcaatttaattcatattacataacaattttaattggatataccaagctataaataaataatattttagtatgattaaatctatcgaaaaaattatagtataatatatattattaataataataattcggtcttaataaaaaaaacaatagtaaccccacttcatatctataaattttataataaaaaatatgtaaaatgtgataatattatcttaattgtatgtatgttg

SEQ ID NO: 204803 - DNA, 710 bp, Cannabis indica
gtgtgtataatgtgattaaaaaaaatcaaaatattattgaaaaaaaattaaagaaccactattcatctagctaaatgtggagaaagatttaatttaaaattttgtgaagtaaaataaagatgagtttacctcatctctcaactgattgagctaatatttaacatcattccttacaaattttatatttgagctattataaagtatcagttgggagtgctcaaaccttctcatgcacttttttataatttattttattatttaggtagaagactgagttagtaattagggtagtcttgagtggtcgagtgttgaccatctccaaattaagggtggaggacataggcactacggcaggaaaggaatagcagtagctcttaatttttttaatataaaacagcccataaattattaaaaaaaatgttatttttccaagtcacaaatatgaattttatggattagaatttaaaaaatttaacaagactcaacacgacttcacacaaataaaaaaaaaaaaaagtcaaaatacgatacaatctctttaatacgaatttaatattattttttaaataaaaaaaaaaattaataatatataactatgtaaaaatatatattaagcgattcaatattagattaaaaaaaaataaattaaattttatttaaaaaaaattaaaaaactatttaaaaatttagttttaattatatatacaaaa

SEQ ID NO: 204804 - DNA, 686 bp, Cannabis indica
aaaaaaaaaaaaatgagttaactcactttaacaatgaatttagaatttaaagtgagttagacactcctacataataagtacaacaataaatgttaattagaaatagatcataatttataattaattattatttatatatttttatttttatttctttgaaacttaagagaattatattttgttgtacttattaaagtattaagaatcggtttagatttttttatttgaatatttactctttttgtaatatacactactacaaaaaggagtttttgcgtcagtcaacacgtatggtcaaactagctcgttgactgatgtaaaagtcaacactcacttttttgcttcaattattaaccgacgctaataataattaatttacttattgctactttgacactaaaataaaaaccaatgctaaagataaaaaatttttaaaaatgttataggggttgaattttgcgcagtttgctcaaatgcagcttttagcgtcaatttaactgatttttacatcagttatgcaccgacaaacatttttcatcggtgcaaaattgattctaatttacttaaaaaaaacttacaaaaatcgtaatgggcttcgggcccatttaattgatttagaaaatgccacctactaataacgaaccctaataaactctctagctgcacatcaccttctctctctctct

SEQ ID NO: 204805 - DNA, 546 bp, Cannabis indica
atatatatataaataaagaggatgatgatcattatttggaggacgtgaggtttttgagttttctttgcatacaagcttaattatatgagagtctagttaattaattagagatatataaatcaaagactaataattgttagccacatgcaattgataatcattattaaagtactgatatcgaatagtatatatatgtgtgtggtcatcaacttattaattagtcaattctatttctatgactagctagcttagtacagtaactttgacataatatcgtaaactgacaaaaacgtcttttttatttttaaacaacactttttgtaatttaccaagagtataatataagagtttaaattaatcaatgtctccccaatttggtaccactttaatttagtgtaaatatgcatggccgagattttcaatgtaggctaataaattataaattaaggttagttttaaaatcttattacataaaacgagctggttaaaagattctattttaaggaatatttcaatttttagtattatatataattatgttatctg

SEQ ID NO: 204806 - DNA, 1848 bp, Cannabis indica
cccttgaagaagggatgcttcttgacctcagcagctccgcgtttgccctcgagatgcttggtcgagtccttgtcaagcaacccagtagtcaactcccttgcgtgaagctcaagctcgcatgatagcgtcaaggtggggaaggctagtagcatattgataatgtttgagctcgttgtcttgtgggattgagctactaacagtgtacgaccgtaaatcatttcatagataaagacaccatatgcctaccagtctcgtgggacttatccttagccatcttaggcgaaatgtactcgtgtgtaccgacaatgaacgaaaacctagtcgtcaccgactcgactacaaagagctggttggtagcattaagtgtttcaactaggcccgaacagaagacacggttgaagaagaaagaaaataaggatgaaccaggtgatgattcaggtgattcgacaacgatttggattgtgtccaagcaaagagaaaggttgaactcggtgagcataatgtgttcgcctgacttgttgagcatatttttcagttttaaagctctgtagatgattcccaacatgtgaagatatttcaaggctactagaatttcggcggcgtaaaatctacaaataaaaaatatgtataaaaatcaaataaaaaataaaagctatttgagttttctagttaataaattaccttgcagagttaagcgaaaattgtttgcgaggttgtttatggcgaagagagttaagatcaccaccggagcagtactccatcactatatacgagaaatgcaagtcttcgaactcactggagagagtcaaaagtaataggtgatcaagcattttcatgattttttactccgtttctgctttgttaaccttctccttcagcgctataatcttcttgtttacaactttcgtgtcgtagtaacaagtattactcgagttaagtagtctgcataggtagaccttgttgatgtcgcccgcgctaatttctttgatgatcttgaagtgatcaaatgccaggctagatttcgagtggcagaccggatggcggagtaggcaaaattgaagggtgcgtgtggctttaatgagagctccatgagtttcttaactatttttgtagggagaacaaaaatataaagtgaagaggatataattagtgattaggatataagaggagagagtggaaacatcaattacatatattacatttttttttttgccaacttagtaaaataatgtattttctaacctttttttttttattttaaaaaatagaatttaaaaaaaaatagctaatgcatatttttttgaacatattgtatatgaaaaataagtatgacttaaagatcataaattcaatatcaatatgggaagtgagattagtttcatagaatcttagtacatttacttcattgatttataaaaaaagcaattagatatgcttattttttgttatctataaatactagaatgacattaactatcgataagtttatttagatgatatatatatttattgatttttattgtatgatgcgctatatcattaaagatttaattaagtatataatgtcatttaagaagaaaaatagttaaaatgaagtactagtgtcaaatattcttttatgatatatatttccatctctcagaagtaatggacgacgatgatattataccaaatgaagttgttttgtgcctcctaggatttagggaatcaatatgattctatctctgtttattccgtttgcagaaaggaagaatcctaaagaattaatctttcgtttagttgaatctctctttcattgatcaatatgtgatattctgaatctttattactattggaatcaaatgatat

SEQ ID NO: 204807 - DNA, 1190 bp, Cannabis indica
agtttgtcgtacttacaagtacactacactactacacacatcactattttaaaatttcatgttaaacaagtttaaaaattcaacagtttttataccaattttaagattttcttattgtgaaatatgttgtaattatttttctatttctttttagatttaaaaaaagtaaaatatatatatatatatatttgtaattgctaattttttaatttaattttcttataaatgtctttctatttttgaactgatatgatcatgtataagtattgaattataagttggttataataagttaaagttcctggacaaataatcataaataggcccttaaattgttatatattgatcactatacgtcttttaatctcaaatttattacaatgattattagagttattaactgcaacattattcgtggcataaaaatattttacccctggaaataaattactaattgtattgcttaacatatagatcacagactatatattaatatacaaataaaaaactataaattttcttttcaattctttgaatgaaggaaaatataaccccataaattcatgttcacccttgagtatggagacacaatatataactgatgtgttgtgtgttaaaacaagaatcacattaacatgaaaattaactgatcagatgtcaaaatataaatattaaaaattattaattagtcataattaaatagcgataaataagctagttgacgttgacgtacatatatacatagctgtgtggagttaaccatgtattaattaaaatcatccaacacagctctctcacaaaaaaaaaattcatccaacatacagcatataattatacggtagctaggtagttatatatgtttaaaccaatacggtggaagttgagaataaattgtatttatagtaataaaaatttaggttttaattcaatcgattccacatctcaacctaacttgatcaattatctcatttattttgggacaatcttatacatatagatatgtacactgacatacacaaacaatgctgataatttatatgtataggataacagttataaaaatataaaaatatatatatatatatgcaaatttactacaactataattccgcttaaatccaaatgtgtacgtattttctagtcaactttttttactaactaaaataataataattaaaaaaacgaaaacg

SEQ ID NO: 204808 - DNA, 916 bp, Cannabis indica
gtaatctgcctccttcagtcattgaaatgtttagcttactttgtttgaagcttttgtctttgcttttatggaaatctcattcattgtgtatcttgtctctcttcagtgcagtaattaagagcttttaattatgtatgtcttctctcttttttcttttcttcccttcttgaatttcttttgacttttgtggttgagaattttagaagcctcatttaatcaatcagaaaactcgtgcaagttttctttattatttataacgcccccaaactcaacaaacaaataagcaaaaatcagataagacaaaaaaaaaggtttcatacatatttctccttttgataatttaggttgggaaactaataatgatgactgaaagaaatagcatgtaggatttgctgtagctttgaaggtgtctcagtgcattcaagggaattgaaatctttggttgcaacaattacactgttttggttggttcaatcaccctattaattgattttttttcttatcagtacgagagccttctttaattacttagggaaaggcatctttcagaacttaattacagtaacaacaacgtattttctttcttctcaatataaatggtttttagctagcttaacggtctagagtctagaaagtcttatttacttgttctgcttctcaaccagtagttgaaggcattgccttaattactatcttatgtttctttttgttattaccccggatatatacattttaaaatcgcataacatggagatagtatattccactgacatatttacagttcttaattgaaagggctattgagctaggtagtgaacaatacatatactgcctatttatcgttaagcaagatgattgtaggactatttatttttggttcttgaatgaataaccacatccacatatatacacattc

SEQ ID NO: 204809 - DNA, 632 bp, Cannabis indica
tcaacaaactatttcattttatttagtatactaataacagttgtgattagttaaggattttgttgacagttggcacaactttttagaagctcttctattaagtagtaaaagctcatctaaagtgcttataagtttaaaaaagctatttctagagaagaaactttttgagaagagaaatactgaaagatagatgtttaggactacctagaggtgtcatatcatcagcaatgctcttttgaaaaaacacttctctataagctaaagcctaagttcagttgatttgtcagtgttagtcttggttgtttatatctgttagcatcttggtcttataggcttgtactcgatcactattataaataagatctataatgcatttgcttattatatctctcccttctcactttcccaagtcatatttcaataaactacagaaagggtggaaatatttctctatggaaaatgttttctgatatggttcaagccaagttccttttcttagttttgtttgttcatcaaaattttcccaattataccaggactgatatataaaagtaataaacaaaaagaagaaaaaaggaaaaagtgacataacttttactttcataactaacattctaatttataatagatac

SEQ ID NO: 204810 - DNA, 804 bp, Cannabis indica
ttgttctttttacagaaatatcccaatctggtttcgaaatttcaactccagaattcttagaaatagaatgctctaaggacgtaactctaccatttaaacaaaaaatcccaaaacctcaatcctttcttgaataaatgatgcaaagattagggaccatttaataaaaaccaaccaggacaaagttgctagtcactataggaaattttcacaagagataactgagggtaaatgtcgtttcttgcgagatgcagcctagccaaaacctcaatttttatcttctattcccctcgcgacaccaatatttttacccaaagtcactgttgttttttcatcaggtgaccttgactttgacattatgtctactaggcctcgtaagtcaaagaccccacaagatcccatgtcacattcgaagctgaacttatcaagtccaaggtcagatccattggagcatatgtcggtggcatattaaatcttgtggtattgaacaaaggcacgaatgtcgtattagatctatcgcccctggggaattcagctgtttccctcctgaaagggtacttcgcaaggagtgtggtggtactaacactagttgctcgtcaggaataggcgcttagagactcaaacaaagcgaggctggagcagttctcctcttgagagattattttaaagaattctgtaattaccttggaggtgctctctttcagctgaatccaatttcttacagaatttatgcaagtctaaaggttttatatcatattttaggacgggagtgccccactcctcctaatattgtatatttttattctg

SEQ ID NO: 204811 - DNA, 1065 bp, Cannabis indica
tttttttgttggagagtatggactctttgtttagatggggacctctttaatattttatttaattttgtaatatatcttatttaagcaattttatagtattgtggtaactttttttttttctcttttttataaatctttaaattgtatattggacaaaataatttgtatattaaaaatgcaatattttatttttaatttagtttttttagatataaattttctttctacataaatggatctgtgttgagatttcttacattgttctcgatgaagaatatgtaaatatggattaaaattcttaatgagaaccaagagatgagagacacttcatgccaattcttcgccagtgcgcgctttcctgtgttttagaaatttattcatcagtcgacctcatttattagattcaaagtagtggtcattacattaaaatataacatgtataataaatattattatcaatatttgagattgaactactatttcattactctttattcatatatatgatttatttattattatccaaactggtgttcaacacaaatatacctagtcttttttcacagctttcaattcatatctcaatgtaaattttaccacactcatttttcaccttaaatcatatatatgtgaccaaaaaaatatgatctttaagtctttatttatgtacatttgaagttatcgatttttttggcattggatacgttctaatattggacacattttaactttggtttacaaataatttttattttttgattaattttcattattattatttttcttttgtcaagataacttacaaaagtcacaaagaaaaagtcaataaagttcctcatctattcaaacagcacaataagctaatccatggatcacaatatgaaattagaagacaattaaattttaacaactttgaaaaataaacaactcgagtaaacccttacccaaaaaaaaaaactgaaaaaaaaaaaaaaccttagagtcaataattattatacaataattactattagtgcacttgggataaactttgcttgcataagcaagatggtagagtaggttccg

SEQ ID NO: 204812 - DNA, 592 bp, Cannabis indica
aaaaaaaaaaaaaaaattggcccaacccaacccaaaacctacccgaacccatcccaacccgcacccaagaacccacactcccaattagcaatttacacttttcaaaactcgaaatctgaaaaaccctaatctggtcaaacactagatgtgcactattactcatcaaacttttggttcttctatgtagcgaagaaaaaaaaatacttgaggctagctcaagtggttataggagggtgcgtgtgtgttggaggtcctgagttcgagtccaggatatgcatggttgtaatatataaatgcttaaataaaaaaaatgtagcgaacaaaaaaactacttttgtttctttaataatcgggtacgttctataactatttttaaaatcgtattatgtttttctaattagagaaataaaaatatttttaaaaataggtttcataaaattgttcttattttactcgatgtcgaagtcccatacctcgactccctagcccaaccctaaactagacacagatacatactcgatgccaaacaaagaccctaaacctcaacgctcgactcggacttggtgcaggaccccaactcctagcccaaacc

SEQ ID NO: 204813 - DNA, 766 bp, Cannabis indica
aaattaacttaataattgatcttattaaggccttataataaattaagttagcatttcattgatcatgtcctccaaagcttgttctgcaagtgagtatatcagtgtatacctattactttctcaacatctgtcttaatgaaggcatggtgggaaagttaatcctacgtgtggtatcaagcaagaggatctcctttctctctatatctttatctgggttgttgatatcttctctcgcgtttttggaagatgctttagacaagggagaaattaagggcatcaaacttagtagaaatgagcctcgtatttcccacctcttcattgcagatgacctaattctagtgggaagggcaaactgtaatgaagtgaaaggttatcgggagtgtcttgaaaaattctgtgagtggttcggacaacgtatcaataaaataagaactttcatattcttttgcaataatactagtgtcggcgtgaaaaatgatgcaaagagattctggggattgagggtgctactggtaacataaactatttgggtcttcaaccactctatgacggtcactgttacaaccaaaggtggcaaggaaaatgctagagtggtaatctgagaaagaaacgggataatggagcatccaagcttccctcgttgcttttcaagcccattcagtttcaaagtctcggaggtgagaactctcactaccaaacaaaaatttttagaccgaggttcagacccaatggaaacatgatcaaagttgtggacaaggttttcttc

SEQ ID NO: 204814 - DNA, 1001 bp, Cannabis indica
gatgttgtaatattattgatctattaaatttaagacattttatgaattttaaaatcacaatttatcaaatgtttaacactacttgggcatcaaaaactttcctccaacctacaatccatagtaacataaaattaggggttgtattgacttagtatttgagctaaataaatcacatctaaaaatttatcacaccaatttaaatttaggattagtagagaattcaaaaaaattaattaataaatagataaataagcttatattctggaggaacaaagtgtagtcatcttaattattttaactaaaaatatttagaaaaagaaatccctataaaaaggcaaaaaagaaagaaataaagatttgaattaagacacaaaagtccaaacatagtttagtttttatttttgaaacaccaaacatagtttagttgaataagaaagtcagacaaaaatagagagagaaagagagcaatgataggggttgatccacgtggcaaaatatcttttattaaattttccgaaaaatccgaggtttataaaaaggaaattaaaaaaaaaaaaaagactggtatttatgcatttataatttttggggggtttttgataaaaaataaaaataaaactcatccgcttcgctccggaagggagttggaatttatggctccgaagcgggagagatcataacaataacatcctttcattctcaattcttcattctcattcctcaccaccattcattgatctctctctctcttcccctttcgccatcctctttatccgattccctttcatctaacggcggtgcccgctctccggcaggctccgccgtctgactttcccccatctcatcattcatctctggtaagtctttatttatttaattattatttatttatttatttatttgtttgtttcctgtatttgatttcattcttatttgaaaatttttttggattatgtttcttaatgtttttcttgtaaatttttgatttgatttatgttttg

SEQ ID NO: 204815 - DNA, 620 bp, Cannabis indica
aaaaggatcatctacctaaagaacttgaaataaataatatccaacagactagacttttctaacttgtttaaacttgcacaaaatcctaaaacaaccctcttcaaatgggataatcaacccccaccaccaccacccaaatgactagattcattagaagattaaaaagaagaaaaaaaaaacttataatcctaattatattgcttcatggtagtacatgatttgatttgaggttttaaaaaaagataaacagatttttaggcagcacccttcctacctatccttctttctacaaagaggagaccagtttaagatagagacataatggagagaaaagtgagtgagagagagaaagagagagaaagagagagaatgagagagtgacctatttatcaacggtcagtcctatcctcataccaataagaggccaaccactatcgcttggatggtctctcatcatcctctccgccatcatcattgtcgtcatcatcgtcggaatcatctttgtccgatctctttctctttggtggtgcctccactttcccgctaccaccatcatcgtcttcatcttcctcctcaacttcctcctcaccttcttcttctccattctcttctggttcaaa

SEQ ID NO: 204816 - DNA, 1061 bp, Cannabis indica
ggatgtactatttaaataagcaaagcacatgcaaaattttataataccaaatgagaattagtaacttacaccctttcgtgaagcatccattataagattcggccacaattcactctctactagcacaattgcatttggcttccaatagcctaggaaagcatccacagcattaggggtgtcaattggcgcaaactggtacacatttgacgataacaagaaataagtgactgagtagataataaaaaaaaaaaatcagggggcatttggcatgaggtttagatttgatgggaatgtcaaactaaattaaattataataaccaagaggtttgtgtttccaagtagatcgtacttaaattaaaatggtagtaatgttaatccccttcaacacttgtgtttcataatccctccaagtctactctctctaactctactctctccaattcaaactcacccataaggtggcgtttggttgaaaggaataaaaacatagatagaataagaatgacattctaatactttaaaatgaaaccaaacaaaagaatggaataaaaattgtttcatttccaatacattccattttattacctcaaaccaaacgccacctcagtgactggaagtcaaagttttgacttttggcaaaaaagccatatcaatcacggcactgagggataaccaaactagaaactagacaactaaataccaaacattgatgcagaaaacagatttcagatcttatttactgttatgaaagtgattaaaaaatcagttaactagactcactgtcctaggtgtcctaactaattctgttatgttagttgcctaggtttacaaagaaagttaaatacagttaggactaagggactctcttactcgagccattagctatataaccttagattagctcaattcagggggtccagtttatgcttttgagttcggttttgcaaaaccagataagagagaggaatagattgagagagaaggagggctgtaaaatagaaggcatatgtgtctcatcatgctcttcagcgtgagttattttgtaaggagttaaactccat

SEQ ID NO: 204817 - DNA, 854 bp, Cannabis indica
attgatttttccctttgaccaagttgggtttatagactatatagttttttttcacatcaataatttttaaagatgatgctaataataataataataaattaatgatgctggattatttattaattaatttatttatttttactaatagtcaatattaataattaaaaaagttttttttgttttttttttgtttcttttttttttttcatctttatcaccaatgagaaggtgtggtactttaatttcattatttgatttgacaccctctttttggtattttgtaagttaataattaactaatttgtgccatttttttttaaattatgtgaagattggtaataataattcataagagttgaatactaatagtacttaatttgtatatttttgtatatatatatataataattatgagattttgtctcatgcatattttcctgcctctacagtctagatatgtcatcattttcaagatggaacaaaatatatatacatatatatatataatttatgtatgcatgattaaaacatatcaaatctatatatacatatatgtggtgttaattaatgacctcgaagctagtatatatatatagcttagtgaagagacttgtggccgtgggcctaagaaaaattgttactgagaactttttaagtactacatatttttttttattaaatataaattttaatcacaacaaaatgttatttgtgataaattatagtctttagaaataagttgtcactaatttagttttagtcacaataaatattgtgactaaaaatacatttaatcacaaaaaattataatttttgtgactactacgttttgccacagatcttttagttacaac

SEQ ID NO: 204818 - DNA, 919 bp, Cannabis indica
gtgaaggttgtgcatcattgtcctgccaaggagaagctggccagccatacacctacaggataagttatggccggccatgcaaggtctgaaggttgaggtccggccagccatgctcctgctaggacctggcaagtcatgtgcttgccaggatccaacaggtcatgtccctgtcatctttaccaacaggaggtcagcctttagatgtggaggccagcctttggcgagtagaggccagctttgtacacctttttcttgtaaatggcaggttaccttgatcgaacgaaagctcatttagtctgaaagtcaccttttgggcgggccggccatacaagctcaccttggccgacctttacgcttctcttggccagccagacatgttggtacaactccttgatggctcgcttcactcatttcgattgctgcttgatagttttgtcataccttgtaaggagaccttgtcttgctattggcaaggctgtgttccacatgtactctgtcttagcttacatggacatgtcacgtcagatggtcaaaatttgagataacacatttaaaacttgattttgtaattaattgtggtctctctattttgtttatacatgatgatgatgatggtgatggaatgttttgttttaaaagctaaccatacataaatttttattaaattaagcgtcctttgatattagttatttttctcttaggtttttataagctcacccttgattttctcccatctcaagaactaaattttatgctagtggatgagaatagtaccattgagaaagaatgtcgttattaatttagtcttattctaattatgaaatttttccttaaaaattatttttgtaattaaaattaattaaatgaatgattcaaatgacttaaattagctacatatatagcagcatacaaggaaaaa

SEQ ID NO: 204819 - DNA, 834 bp, Cannabis indica
gagagattctctcaatcggttatgagaaataaatatgtataatttagttatattatttattcaaataattaatatgatttaataaatactttgaatttaaataattaattaaataaatacatttttaataaaaacaaatgagtgaaatacccttattattgttttttgctctgctaggtttatgaccacagcttctgttgtggccatggccaatcgtggccgtccgtgcaagatccaagtacagtggtcaagcaatcgatcaaatcagagtacaaacactcatgtgacgaggaagcaagggacgaaggaaaaacaagttccatccttcttagatgtatcaagattttcctgattcaatttcctttacgaatgaaatcactagaagataaaggtacctatgaaatatgaatggttgcctattgtttgtgtacgtaacatataaagggttgggacatcgaacttaaaatttttgtaagaaggaagagtctaaagtaatttgggttgcaaagaaacaaggaaatgagtagctagaagagcaaaagaagcaacaagataacaaagtggatagtaaagacttccaaatggtaaaacaaggccgcaagaggcctgttaatgaggaggatcaacctaatatcgttaacaataactttcaagtattagagacaattggggaatgttcaaaagtgatggaagaaagtggtatcaagaaaaggtggggatctgttaatggataagattttatcatggaatgtccgagggatcaacatccgcgtcaaaaacaaaaagaggtcaagcaattgatttctaaacttaatgtggagaataaaataaaat

SEQ ID NO: 204820 - DNA, 471 bp, Cannabis indica
ccatctattttcttaatcaatgaacaagtagttctttaaaaaaaaaaaagtagtgtcacaaacattttaaaaagagcaatttatgactcaatcaaaataatgattatgcatattatacacattagaattaatagttaatttattatccaaatataaaaatttaagccaaaacattgactgcgcttaacttgtctattttctttttcttttttgaaaaacaattaaggtacgtattatttgtcaaaataaataaatttaaaaaagggaaaaaaagtatacgtacttacttgatgagcttaattatctgaagttttagattagattacttattcagatcattatcatattaatgtcactaatatatatatatatattatatttaaaattaatataataaaagaggactaatttggttataaaatgcaatgttaattataattaagttacctacgttagatttaataatattat

SEQ ID NO: 204821 - DNA, 673 bp, Cannabis indica
tgtaatttttttgtttattttaagatcatgtaattttgtagcccataatatagccaattgggcttttgttatgaatgtttagagtatggtggaatttttttcaataccaaacaacgttatatataataagcgtgaaatctaattcttttgttttaatctataaaagccttttattcaaaataaaaaattacttatactaatataaaaaatgacaaatatcaaaatttgatatagttttataatattagtaaataaaatactaggccaactaattaaaaattaattaggaagataattatgaattaagttgaaaatttagaataatcattgagcatataatttacacatcgtgcctgtagatattttaaaaagagaagctctttaattttttttttgatcatcaagataaaattaatcaacaaagacaagggcattataccactagatcatgattcttcctcatatccagctagtaataatttcaactacactactacttgaaatcaagggttagcaggtccaagacccagatgcaaatccaatcccaagcccttgtccaaacgatgaccaccatcaccactaataattagcccactatcattcatagtcagatctctatcatgatcaaaatcctccaaaacacgataattgtcataaacgacgccgtccgaca

SEQ ID NO: 204822 - DNA, 1206 bp, Cannabis indica
tagtcaaagcacaaagaacaccataagtggaaagcaaaaactcgttctgacgctttttgcctaatactgctcataatcaaacaattccatatatcctcacccacattaccaatccaatttgaaaacatgaaagcagcaaaagagttggccataagccttttgaaataccttatgacccaaatggtgttgtttaaacttggcgatgaaggatacttctgaaaagtaacttttctccctctgtcaaaaatccaacgagcagttggtgtatttctgttttcgatgaacaccaaatctgaatgcgagaaccttcctccaaccacccccaccttcttttccgttgccggcacttcggtgtagtgagccaatagtacctcattcttgtaattccccaagggtggagtcgtactactcccaggatcccaaaccatatacaattgacctaattgaattattgggccttgagtaatgtttaatgggctgtcatttatacccaaaccccaaacaacacaatgacctaaagcacacaatgggccatattcaagggctgagttgggccttaggtaggctttcaaaaattcaagcccacatgtctccaccatgtacgcagctccaccacgacctggaacaaaatcaaagcacacgagcgacttttctgattttttcgtcgctgatcgccaaccgaggctccccggcgaaaggaatgtctttctcagcactggtggcgacttcttctcttcccccgtcaacacccacgccggcaataggtagttttctgacgacactttcttctcagacgactccaacaacaaacgaacaacaagagtccatgaaaacgagccctccatgttgcttctccgacgttgcttccaacctctcgttaaccatcgcgtgacccggttgcattgaatatgtttcaccaacaccttcgaacctttcgaatctgcaattgattccagcgtgagtcctttgatgcgactccaagtttcccaatgatggtggaattggcggaggttcatttccgttgcaatgcttctccatctctaatatcctgttcttcccaatctgtagtcctatttttgtgttgctggaagtctgtgattggacgagatgagtttgcaattcattacccacaatttttaatgaagaaaccaagtcaccaacagttagaactttagcatcgattgagccatctttctcgtaagtact

SEQ ID NO: 204823 - DNA, 1194 bp, Cannabis indica
gcccttcaaacactgttctacaacagtatttctctactacctaaacctcaaaatattggactcaatatgacaatctagacccgtcacgaaagaaaactcctcaacactgaacctaattacttttcgcataacattactcacttttgcgttccatgtggcgtgtggcctttttgaaactttacattcatgtcctatgtggcctgagacctttttagaacactttctttcatgtcctatgtggcctaagaccttttttttagaatattactttattttcaactccagagccttcatgttcgtatctttagccataagtcctgtgttttttaacactactagtatttgaccctattgcttttttatatcatgaattgtgtgaatatccaggcggtgtttaatcttggcttcttcttatggccttaacaagtaagagtctggatttacttttccaagttgaaatatgcatgcacgacttagagacaagtttaatagcttatactaagcatttaaatttatctacataagttctttgtactagttcgatgcattgtacagtatgggtgccccccaagtgatcatgtagagaaatctcttggtcacttgctattcaccaagtttcacagactttgcctgggttctatcttgtagggtaccatagtacgcatgtggaactaagagaataactttaaaaagttaatctgtgagcaaatggttcatagacacaataaacaaaatataaatatcgatatcattcattaattggtctttgttgctgtgcaacttacataaattgaatctacaagcctatattatacaaatttagctttatcgaatctttatgctattagtaaatatgtgtgggttattactaccaagaaggacaacttttagttaaaattggttaacgagatgtatcttaaaaatcaagattgatgggactactaagtcccttcggaggctaattggtattggaaaagaatagttcaaactaaggaaaagataaaacaagcactacaaaaaaataggtatatgtcggcgggcccggccccccgttattgatctatctcgacgggtctggcccgccgtaaatttcaatgccgagattggtggtgaatctatctcgacggtctcggcccgtcgttattgggggcagtctcggcgggcaatgcccgccgttaataatgatgcaatctc

SEQ ID NO: 204824 - DNA, 1104 bp, Cannabis indica
agaaaattaataattacttagaataattatagagaaaaatgtgtataataataatgtaaaattattgattatgtattacaataatatatgaataaatattatgtttttcagtaatttatataccaaattttatttaggatcattaatatatatttactcttataaattagtataatttgcaatgtaaaatagtcatcagcattctaagcaattgcaaaaattattagtttttttgacatattcttttctttctgttaatattaatattgttattttctagtttgcctaactaatgttagttattataagtagttagttagcttaggtgtcacattctaataggttagtcacggtctgttgttagttactatctctctcaacattgtaatcccttgttctataaaagggcatgtaactccactctcatgactaatgtaattgacaccattcttgtacataatacaataacagagcattgctcttttctactattttgtgttaagtgttctggtttcgataaaatacatcttaggttcattcttgattgtgtgaattgatgttgaaccgaagtgaacttatgtaacaattggtaccatagcttgggagttcgaaattggatcttggatctattatcaagagcctggtgaactggacgagaagaaatggggagtacaaagttcgatcttgagaaatttacagcgaagaatgattttggattatggagaattaagatgcgggcattgctggtgcagcagagattacaaggtgccatttcaggggagaaagaactacctgcaagttggtctaagaaaaaaaggtctgagattcttgaaaaggctcacattgccattattttgagtcttggagacaaggttctcagggaagtttcaaaggagacaactgcagctggactttggttgaaattggaaagcttgtacatgactaaatctttagctaatcgattgttcttgaagcagaaactgtattctttcaagatgacatcaggaaaaagtattaaaaatcatttggatgatttcaataaaatcatctttgatcttgagaacattgacattaagatcgaccaatggcggaaggagtgatatc

SEQ ID NO: 204825 - DNA, 838 bp, Cannabis indica
agagagagagagagagaatattattaatgtcttttaaacaagtaattgtagttatgaaaatgaacatatacagaaatccaaatatgctaagagctaggtacctgctcaatgagaacattaagagttcctctagatacgtgatgagtttctccaagaatagggttataaggtgcaactccaaagtttaaaggacgcaaagtagagatgttccatgcaaggactgctttaaatctctctattgaattctctccaatgttgcacttacccaacaaatcatcactaacacaatatgctgactcaccataacactgtaattgtgattttggaatgttgaatacgggtggcaactgtcaaacaaagttaacaaatttaagggagagtaataatatcaatggcttagataatttttttctaaggtgtaaatgaaattttcattaatgctaagatagttcatataaaaaattgtaacgaacaagatcaacgatatatcatgccttcataatgttcaaaagctcaaaaaggaaatttgaggtaaagttgaggtattaacaatattaaatacattaaaaattaccaatgttaaaacattgcacaaaaacgtgtcaggccgagcctgccttgtgtccaatcatattaataggagtgtgcataaatcgatccaatcaaataatgatcgatcgatctaattacaaatgactgtcaaatattaaatatttagttgtgatcgaattggattaaacgttatttttaatatttaattggatcaaattagatgtttgataaggtctctgaaaatataatacatccaacattaaattgaactaattaatattttcat

SEQ ID NO: 204826 - DNA, 784 bp, Cannabis indica
ttgcatatttacaacagtctcctcccgccttaagttgttcattctcaactcattcatctcttcattgtgtatgcaagtttgacagcttgacattacggagtaaactcgtttttctttccctatcctaggatgtgaggtctcgagatcttttggtgctggtggcggaggatgtctcataagcaatgggactctccgtctttccgacactccttctcttgtggttgtaatcaaggcaccctgtcacgttgtttgtctgtcgagacttcttcatggtgattaccttcccgcctcgcttgagaccctctcctacttgagccttcactccttgcttgaggtttgcccatgttcacatcctcctccattgcttgaggtatgtggtcattcacaccctcttctccaacgacatgtggtggtgggtcttgcactgaagcgatcaactgattggcgttgaggcaaatctcaatgtcttgaagatggtgagagcgtctaggaattttatgatgattttatgcaaagaaacaacttgactcgagcttgttgttcccacagacggtgctaaactgttgatggtgagaactcgtcaactagctttgtggccaaaaaatctaagtgaaactcagaaataagatgatgaggaagatgaaaggaaatatatatttttatggataagagatttctttctattgtattcaatatctgaggtacaccataggatttccaacccctctcacatttaagaatgaggtatttataagtcctaatggcctgagttacatagtggtcc

SEQ ID NO: 204827 - DNA, 1246 bp, Cannabis indica
ctgctgacaatgatcttttgacgaccagggaatttgaacttagcacgacgaagagcctcctgagcatgttgactgttgttgtccttgcaacgaacagacaaaaggacttggccaatgctaactctggcacaaactccctgtggctttccgaaagcacccctcataccggtctgaagcctatcagctccagcacatgaaagcatcttgttgatacggaggacatggaatgggtgaacacggacacgtagatggaaagcatctttcccagcaaacttggacatgtacttgttgcaagcaatacgagctgcctcaagagcttcactggaaacattctccttctcccacgaaaccaagtgaacacagaatgggaactcatccactcctttcttcttcattccaacatcataaatcctgatcttgggatcaggcacaccacggcaaaaccgtgattttgggtatggcttatcttaatctgacgataacatctggctggtcctggtgtgcgaaaagttaaaaacagttacagcaacaaaaagaaatacagagcacaataacagaactcaacccatgtaatttaaaatctcaaacgttgttcctcaccaaacataaatatatatatatatatctttgtgctttttcataacagcatagtcaaaaccggctatacaaataatcctatagctgtaactcaacgattattgcatagaataagatacgaaaaaaaccctaaaatttcacattcagatccatgcacatttgatcctaattcctagctggaaataaatctatatcaatcttattacaattgtaatatacaatacccaaattgaaatcttaaatcaagcaacaaatcagttcatatctcttacaacgaaaacaaaggcaaacaaaatccacttacgaaatcaacaaagcaacaaaactagtgaaaggagaaaacttactcctgcccatggcgaaattcctctgtgaagttctggccgaaaccctaatcttagaaatgaggagagtaggaaaatggcgtgtcggctatttatatatgaatggtagtagtcgagtctaaaaccctaacacgttcaagggaggagagatacgtgtgagcgtgcgtaagcggcatagatgaatattattgggttccacattgaaatcggcccaccgacgtagtctatggacttttgagcccaaaatcttcaacgtgataacttcctcgaaccgtctcttatatcattggcccataataatttaa

SEQ ID NO: 204828 - DNA, 1193 bp, Cannabis indica
tggagccttatctccagagagctagaaaacagcctgttggacttcatcaaaagtaaaaggctggtctaagaaatcaacctccgaatcctcaagagggggaccgagacaatcaagaatatggttgactacctccgtatcacagccatcacaatggaaaaaggtccccaaaataagaagtgataagatcactcaaatcttctaggctactaaagacatcaccattatcatcctgaagaaattgaatagtattatttcgtttcctttgagaggcaaaacgatgaaagaaagtcatgtttctatctctagccctaagccaatgaaccctagccctttgacgccaataaacctcctctttatacaagagagcatcaagttgggactgaagatgtttaacatgtgagagtatgttcctatcgctagaaagagtagattgaattctctcaatttcctgttgaagagtagtgatccgagacttgaaacaatttctaacagactaccaagatttaagagaagagatacaagctttctgagaataaaggaatctagagtaaacacctaaattggacacatcatgggaattcatatcccaacaactcctaagagtggtgtagaattctggactctcaagccaaatgttctcaaagtggaaacacttattaacagaattaacacaacttttactctactgattaataagaactttaatggctctatggtcagagccataaaatggcaagtaatataaaaccgcataagaaaacaaatctcaccaagaattagacccaatggcccaatcaagtctcttaaaaacagtattatttttccaggtatatttattacctataaaaggaaaaggaagtaaatgaaacttatttaaaaaattagaaaaattatccatattagtattatcaaaataagtgcttccaattttatcactatgtagaggatagttattaaaatcccccatgatgagccaagggagattaggagcattgtaaaagattttatcaagaagatcccaagtaaaaacatgttgtgaggcaataggagaaccatagaatccagtaaaatgaaaagtttcattatcataaagagttatatacagtctatatgattacaagaaaagtttaaaatattaacatcaagacaatccttccacaacagcataagtacccccccccccaaaaaaaaaa

SEQ ID NO: 204829 - DNA, 945 bp, Cannabis indica
agtgttaccgtcaaccttcgatcgcaacctctcagtcaatttccgtgctcgaaaatacatgttgaaatatatttttacaaaaaaaaaaaataataataaaattatggcggtgttcgttataattacagcatcatccctataaatttttaaaatattttgaataatttataatgtcgaagataggtttggattttttaatactacaaactattcaaaaaatttcaaaaagtttacaagaatgatattgtaactctaagttataatgaatactattatgaaaatattctaagaagcaatttcgaacatgaagataagaggttgtaatcaacactcttctaaatacaaatggtcaatcaaatttgataaataaatatttcaagtcttgatattataatatgaattatttgccattcatattacatattttttcattaaaatgtgtggtaataaaattttatttattgttattttgtaggacgattttatagaggacttactagttactattacagagactttgtcaataagtttaatttaaatataatttgtttgagagtaattatctgctaaaattgagaatttcttttattagtgtttaatatcattgataggggattaattcacttttctttatcttattttgtagatcatttttaatatgttaatgagttgttgtgtagtttttttatgttacaagttgaagttttagttctttcggtgtgttgtttgaagatattataattttattgtctaaatttttagtctcagttttatcttatattgttcatttactttaatagtttataatttgacaaagcatacattttcaagttagatgatgagttatcataattcaaggaaacttttatactatttgttgtaaatatttgggtttattgttgcattttaaatttatgagtgcttataattaagacaaaaaaaaaa

SEQ ID NO: 204830 - DNA, 1060 bp, Cannabis indica
gaaaaatatctgaaatccaaaaaatcaaaggcttaatattctctttaacaattaaaaaaaaaaaaaggaaaaggttacatatcagtacgagatattcaataatatatgactaactaaaaattattacaaaaattcatatttttttaaaaaaataataataaatattacaaatttcatttttatttaagaaaaaattaattattacaaaattatcatctctttttgtatctttattcgttatttttggacgatgttatattgatgagatcaaatttatggaggcatttctcgtgttgctcgttttactttaatattttatggtctcacaaaatatattttttgattagacgataagttattctaattcgaaaaaagtacatgagaaatactttatgagatttgaacctgacctctatcttatatataatttagtttaatcattataccaatattaatattatgtccatagtagatatcaccttttatcataaaatacatgtcataactaattaaaatatacataattttttttttttttttgaagagcgactaccttgtctcgcttctatgtgtcaaaccatgtcagttttttttcttcaagtaagaagttaaaaaatatattgcttttacgattgatgtacatgattttatagataaagatttttttttttgagagagagaggataattaaatttatttattaaatacatatatatgtatagtttttctttcttgttctctttttgctttctttacacatcttattaataatgattttaaaaatcaatttttttttctttaatttaattaccattgaagatagatatgataaatatatttcatttatataattaaggtgtgttttaacttgtgaaaagttgatcggctagaaaaacaagaagatgataataagagatactcaaattaagctatatatatacactagtattttattcatgttgatcatttaattataacccttaatatcgtcattgatatttttgttaacaacaacaatgtccatttaagcattacctaaaatgtaattcatgcactaatc

SEQ ID NO: 204831 - DNA, 1454 bp, Cannabis indica
ttggttgttgttgttgcagttaaaattacgaaacatctctccaacatctgttgagagagtgagtttgaagcttgatgattacttctccggtgacactactccggatgttgttaaattaaaagttaaaggtgtatccaagtctgttggtgaacctgacttgatgggtgcttcttcatcatgtgctcatgagcatgtctcccgacttgagtatgaggaattagaaaaaaaaaacatttctgttgttgtcagccaaaagggattcttatgaaatctttttctgaaatgaacaagaagctagacattcttattgaggttgtttttttttattttacataaattgatttttttttattgttttactggtgttttcatattttctaagtctcttatgaattttttcttttgtattttgcagtcctcgcatgctgctcatactcacactagaactcagtttgatgatgctcttcgtacttctgaaaatgatgatgatgaagagtctatttcagaggaagatgatgatgctaaaaatgaggatgacaaaggagatgatgatcatgaggatggtactgatgatgatgatgatgatgatgatgatgatcttgatgaagctggacttggtgttgggcaggatgaggctgcttttggagatgatcgtaatgatgagggtgttgttgttgctaaagttgtttcaaaggataatgatactgacaaagttgattcttcttccaaaaatgtcaacattgctgatgccaagaagtctgaccatttcaaacctcttgcagaggttaatcgggtatattaattttgttccacttttttctgttgttgttgttttgttgttttttatgttgttttaatatatttttttactgttttttttttattttcagtctgaacaacatcaaattgatggtgagaaaattgatgttgatgcaactattgcaactgttgttaatgctggggacaatttagtttgttttacattttttatattttttagtatgtttttgtattttttattgttgttttgctagtatttttattgttattgtttatacatataataaatcattttcttatttttttttcagatagtttcatcaaatcttgtttctggttttgctgagatttctaagaagaataatcttgaaatggttgtttttcaagagactcctattttacgtccgtagaagagggatcggaagaaaggagcagttttgaagtctccatacattgagattgcttctggtgcctctgaatcaggttcatcttctgtttctcctgatgaatgtgtttataaggtggttaaatatgtaggtggtttgtgccccttagacaacaagattggtgaagctgtcgatccccaattggagtctgagtttgacatttggcttggtacagggcttagaaagcaaaatcttaagtaagtcgttttaggtgttttcaattcaata

SEQ ID NO: 204832 - DNA, 490 bp, Cannabis indica
ttttttttttttcttacatttttatagaaattcacatagcaactcacataataaccaacggaacaacctaaatcgcaaccaaaatctacatagtaacttatatagaaactaccggagtaacccaatccataaattaaagaaaaaacaagttaaaaaataatatataaactaatttctcaaaaaatatttaatgtagttattgtgtaaaattatttattatttttcttatgctgtattattattaaaaaatttcaaaatattactaaaataaacatacaatattattatattataaacataaattataataatttaagcattaataattttattattgtaaataaaatattctattagtataataattttatataattttattttttgtttaaattactggttctttcttaagatcaattttttaatcagaaatgtacttcaactaatattaacaattattatgagtatcaaataagcatttaaaggccac

SEQ ID NO: 204833 - DNA, 843 bp, Cannabis indica
atttttgtttttaataatatagagggttgttttatattatttttaatatcaacaatgtaaaaataatgtttttctatatatataaaaaaaatgaaaaaaactgtaaaaaaaatagaattggtaaaataataaaaaaaaattaaattgaaatgtattgtgtaatttatctaaataataataataataatttggatccacacaattaagctatgtctttgaaaaattcaaaactatgagtaattatatttcgttgtaaatgtgattaagggtaattactcaatttatttaacttattttgttagaaatatcatcaataaatatcattggcatctgctaaaatgtgcttctgatacagtttactaactatttttttataataattatttaacaatattattttttttatatattaaacaagctagaaaataagaattcaacagtaattattatgttacatccaaatagagttttaattctaaaatatagtataaaaattaaattgtgtaattattactttagtaacaaatatgtgacctaataattacatgacgagtttagagatattgtagtgcttacccacaagatatttgtgattaattagtataattaagtaatatgtggttacacataatttatttatttataaaagaattgttaaaagtattattggtgtctatcactcttctttgtgccatattatttttggtgtcaattagttctcatataacttaagaaactaatttttagagaatatctctaactagtcatgagttgtcgcctataaaaaagtgttggacactattagtacccaataacaatgttttatttataataatgattaaa

SEQ ID NO: 204834 - DNA, 807 bp, Cannabis indica
ctcttcattctagttgtgtttgtatatatgtctaggaacttgaattaatttactttctcaggaaaccgtaaccgctgcttcagtgtacactttgtctgatgggggccttggtgattggtttggtggagtttcttttttctgctggtcaaacggctaatgacgctgttcaggaccaattagcagcactaagtttcactaggttcagctccacttattccccttaatttcaaggagaatctgtgaacatacaagtcagcatttgcttgtttctttattttaacgtgtattatttttttgcagtgtggcagtaatttttggagcaggacttgtaaccagcctttcaccttgtactcttagtgttttgccactcacccttggttacattggtaagcaatttgtgcttcaaatttacggcaattgtatctgtctttggctatatccttttgtatcttttttacatataaccatcgcatatactgattgatgatttgtttacaggtgcatttggctctgggaaaagcagatcagaggtaaatgtttcctaaccgagttattttcatccaaatgttcctttattattttccattgctgaactggtgagcaatagaaccctagggtcactgtggacgtttgctaaactatattaaaaaaccaataaaatgagaactaccattttttgccagtgttggttctttacgagtatagaaaaactacttgtagctatatgtatgtaaaatgaaagtcacatactaaagtgtttctttgcaaattgcatcatagaccacacgtgaatttgttttatgaatt

SEQ ID NO: 204835 - DNA, 1122 bp, Cannabis indica
tctctctctctctctctagcttttggctgctttgcgctgacaatctcttttactgtttgaactgagttgaaaagagagtgagttttggtattgtattccatacgacaaggaggagaccattactatccaggttggcttatatggacaacaagatacgacgtcgttttctcgagtccaaaacacttttttaatttggatttaaccgcctgaaatcgaatttaaacttttaattaatttaagataattaggtttatgatacagcaaggtcacgaagaagagtacatctcacaccactttcttctggaacatagtcaaccatccacatcaccatgtatataaaccacctttttatttatttatttttatgtcccatctaatatttattattattacataagaaatatttattaaaaatatgataataagcaagaattgatacttaattataaattaaaataaataactaccaattgcaaaagaactcaaaaaaaaataattaaaaaagtaaatatattttcaaaataaatatatacaatttatacactaaaatacactaccaccaaaacaaaatgtttttgagaatctattatgtgcttaagttacaagctttgtccccactaattaatatatttaattttaaaatgaattaaaaatatacttaataaatttaatgtgataatttctaatgagtcttcgcgtgactagagaagacaaatttcctacaaaagatgaaaaattcttaatatttggctatagacatatgagttgctaagaataaaaattggaaacaaaaaaaaaagatattcctaattcaaagacaaattttttatataatttccatagtatatttctaagcaagatcattgtatttcttcccttaaaatttggaataaaaataacaaccatctctttaaaatcagaattcagcaacttaatcataatattaatagtattctaaataaggttatttttagactttagggatgtgcataaatcgattcaatccaataagaatcgaccgatctaattacaacggactgtcaaacattagatatccaattgtgatcggatcggattagatgttatttttaaatatccaattggatcgtgttagagagtctc

SEQ ID NO: 204836 - DNA, 1642 bp, Cannabis indica
tgagagtaatgtgaatgagaaaatgacactatacaacttatagatgttgaaagagcaagtaattaatgcaatttattaattgattggtcgataaatgataaagctgtacattatggttctggaattctagttatagctatatacaaacacacgcagtatagattttttttcttaatttttatttttaagtaaaaaccaatacaggcattgaatgattcttttttaaccaaagcctaactactgattagtaaattatgtatagtaaatgttttttaaacttttgtttttctgtaatatgcatcataacattgacttatattcagttgttaatttagcaagttgatctaaattagctaggagcattttatacttgtgatatatatgtaaatttaaaactgtggatgttgacatgttgggaaagagttactgcaaaaaactaaatctgaagaattcccacatgatacttattagttaattaagtttcatataatattacatatttatatattaattataatacgtataagattaaacaatatataacacatcatttgtgataatgtatgttttgtagtagattaactacagcacatgaaattcaaagatggaagcggacccgaggtttgactcatatgtaattgtacaactctactaattaataccataaaatagtgaatactataatatttcatactccaaggagacatctcccatgagaggaagtgtaatatatgtattccaattcccaaaacacacctcttttcacaaaaacaagaataaatccaacagagtaagcacagagagataaaaccatattttttgagcatgcagaggagaatgtcctccaaaaacccaatttcaatatttcatcatataattaatacagaatataaaaactaaacaaataaaaatcttttaataatactagtactactagctaaactagctactactactagccctaaacttttcagttatacaactttcaacttaaaatttctatccaattagtccctctccctattttttttttggttatttatttatttatttttgtttagtttgcctagtaattaagaagtaaaaaacttaagcacaaatccagtggtggatgattcatctctgtctgaaatgtgtagggaaaagatgctgctgtttctttgcattgatgatcatgatcatatgatctcagcttattattgttctctgatgattctgagtcgtctgattccccaaatggatttattggaaaaagctgcagtgtttcaatcactctctccggctggtcatccgaaacacgatcatcatcatcatcataatcatcgcgatgacgatgggtggtgatgatggtgatgatatatttctgcataacctgcatttatatatacacagaatttaataaaaaaagaaagaaaaaaaaatacaatttaaaaggaaaaaagaaaaagaaaagcgatacgtttggtagatgatgaaatcattcctctcgaagaatgaggaaatcgttgtggtgatgatgatgatgatggtcaatagaaaccgttacgacgtcttcctgtctttctctagctttatggttctgaaaccagtaaagacgttctactctctaatcttgccataaagctgagctgagtagagtatc

SEQ ID NO: 204837 - DNA, 1090 bp, Cannabis indica
  modified_base (1010)..(1010): a, c, t, g, unknown or other
aagatatcgtttttttttttcttttcttttttttgacaaatttagagatcctaatttttcgttaaaaaagcaatattaaaaaattaaattaaatttacatacaattatgttaggagtgtacctggttttaattgattgaagtgtgtttaggtggtggcaacaaattatattttcttgtagctataaaaatgcttcggcatatatgcatatttgccaagttggatgttgatgtggtgtgagtgagcgaataaaaatagtgctaattaggttccaaaaatgtgagtatagtacaagaagttcaaattaaactaattaagtgaatattaaggtggacaatatgattatttggaaacttgtaaattgtatgtgattgtacatgaaaatatttagttagattcttattaattaaatatgatatttgtcctctaaattatgattttttttaaaattttgtcaataatttttttattgtgaaaatttttctcgaactatacaaattattgaaattatatccctccaattacattctactcaatttttttaaaaataaataatttgcttatgtggctataagttacaagtggaattacagtataagggtctcattaacaactttgagctactgaaaatctaatttattggtattaaacatacaaatattatatattaaagatcgttgtatttgttattttctattacaagtttgtttgttaattgtaatgtaatccttctttatataaggattagttccttgccattgcgaattgaatcattttaatgataataatgaaaataagttttttctctatttttctaattaatatggcatcagcagaaacaacatagcacttcaagaattcaattgaagcttcatcaagaattcaataatggtgcgcactcgagcaatcacttcagctaccaccactgatttagatcatccagtggtcgatgcttctattgctccaccaccatctcataatttccccaacactctgcctcgaagtgaaccnttgttccagtttcacgatcagaataaatcgatcgccctaccgtatgaagacattagatctccatctaatctctgcagcgc

SEQ ID NO: 204838 - DNA, 586 bp, Cannabis indica
aggaagattaaggatacaatttacaaccacatcggtcaggcgtgatgggcatttaatttttttttaaataaaaagcataaaaatcatccattttattacaaagaaaattctaatacttatatttttcacactatcaatgtgtacttataaaatacaaagcatagaaattacaaaaaaaactctacactattttttacactatcaacaataaaatccagcctttgattcaatgctgtattctcaaactcggaatccgaacaacaccaatgaacagaattaaagtaacagaccatcaattacttagcacaattagtcctcaagatgatagaattcctaacggtcattagtccaagaataacgaagaaaagagattccaacgccaaaacaataaaatttcttgtaattacatccccaatatctgtttgtattggcctcatgaattttttaaacagacttaagcaaagtcttgtccattttcaccttatactttgatttttgaactaatgaatttcttgtaatggacatttaattaataattaatatataaatctaatagttaataagtatataatttacatattatgta

SEQ ID NO: 204839 - DNA, 850 bp, Cannabis indica
ctaatctatgctacaaattattcatatttttatcaactaaaaaatattttctgcattttgttgtatgagagaaaaaaaatagataggaataggaaaagaaatatacgtacaaaacgttcgtaggcatgcacgtgaccagaaaaaacgacatcaacgcgggcactatagagaagttcctccatagcggctttcatgtcgtttgactcgggctcaccctgatgagcagtattcgagttataccaaggcgcgtggacaacaaccactaaccaaggcgtcttggttctattcaccttcctcaagtcagcctccagccacttgtactgggcggagtcatggctgaaatcagtgtaggaccccaacatgatgacgtggatgccacgcgcagcagcgtcaaaggaatagtagaggttggattcggatgcgctttgctggaagggcattggccagcgtgagttgtaggcagtgaaaggggtggtgtgtacgaggggaattttctccacctcgtgattgccttgggtgaccatccacgggcgctggcttgcgagttgctcgaccagacgcccgaaggaatcccacctcggctggatcgcgtcggcgtaggacaggtcccccggtagtaacaatatgtcgtagtttgattttgatatgtgatctagtgttgaagttgtccaatcagtttgtccaagatcacctatatatatgtagatacatgcatttataatttatcaaatatttaagtactatatacttggattggtctacaattaaacttagctatcttacattttatcatcttttcgtaaaaaaaaaaatgaaagtattacaaaaacaatggtattgcttcagttca

SEQ ID NO: 204840 - DNA, 861 bp, Cannabis indica
ctagtaaagcttctctgagccatgataagaactagcattgggggactggaatgtacggaaattgaaactccactgaatcatctgtctcagtgctttgcctaagcttcagacccgaatagttgggccaacatattttccctggcgcatgtacaaatcatctggagtttctatctgggcaagccatgcgtaggtctccttctcatcccctaactttacttggtttgctggggtaaaatgttattggcttccttagcaacacttgatttttccctagtgaaaattaatggtggagatctttaaagaagattaaagctctctaccattcatttcacttgagaaaaaaaagtgtcaccaaaaaaccaatttttaacaaccaaagctcaacacatcagtactttcttcaaaatatagagaaattaaatgaaacataatccagctacttacagaatgcactataagggtagtcatgatagtaggtacatcttctaccagcgttttctctgtaaggaggtgcaagaacatcaagaacggcacaaggggtaactgcagtaaaacaatgtagatttcccccactctttggatataacaccgatgtgtcacaaggtgcagtaataacattgtcagcgaccagttttgccagtctcactgcaaaaattaaaaacattttcactttgaaataagttgtctggccccttgaattgtgaaaactaaaagcaatatatcaagcaagctattattaaaactggcttctttaaagtctaacggtatatcataaaactaattaagaaaactgcgtattacaactggaacgactctttgttcgatcacagagtcaccaacgtgccatacatcctgataatg

SEQ ID NO: 204841 - DNA, 689 bp, Cannabis indica
acgtcttctttggttcttgttttcactctcatagtggtctctctgtgaacgacctcgcttaccactttcacccataactgcaaagtttgaagcttttgattcctgaacacaatacaatagcttaaataattcaaaccaataaacaacaagaagtttccctaacttgagagtttaataggaggaaactagtaaagaaaaaaaaaatacataaaaaaatacaaagaaagaaattaataaagggcaaaacttagtgagagaaatgaaattgaaaatagtcattataagattagataaaggtggaatgtaattgaaagaaagaaaacctaaaattagggaagaagcttgtgtacctggtggtcagaaaaaccctaagtctccaatagatagagagagagagaggagctattgaagcgcctttgtgtttggatattcagtttcagagtactgctcaataatcaatatgaattattattattatttacaaaatcatatattattggatgattttccaatgcacttcctttagaaatgtattggtgtaccttttacttattttagcatgaagaaaaaaaatttagttcaatttttttcatattcatataagttatacctatttaagatattttataaaattttaagaaatttgacataatttacaatatagaaaacatgttcaaaccgtctatttt

SEQ ID NO: 204842 - DNA, 792 bp, Cannabis indica
gtgaccctctagcgcatgtcactaaaaattttagactcctcattgcatgtcactatagactttcagcgtgtcactatttgtattttttcttatttttttttattattttctggataacaaccacaatcaaagagtgtcactatatacattaatttttttaaaaaaaaaaattaaaattaatattcaatgtatcatgattttattttttttaataaaaaactaaattaatatacattatatacaatatttattttcttttaattttcattaaaaaaacataaaccgtgtatgtatgcatttatagttttttttttttttttttgaaacaggtatgcatttatattcaataactaaaaattaatttacagaaaaagaaaaaataaacaaatattgtatattgaacaaaaaaagattcgttttaaaatcaatattaaatgtatacatacaacacagaatagttcaatagttcaatacaaaatacatacaaactcaaaaatacattgaggattggaaacaaaatagacctaaaaaaatatcaatacaagttgtaacctattcttcaccgcaaactaagaagccaacggagttaaacgccgagatcaatccgcgaagagcttcagcgctgacaacctgcaacacaagagagagaaagagaaagagagagataaaaagttgaagagatgtcgacctgggatttttggggttggaatctcagatctgtgatcggcgtggctgagtgaggcggagaggctttgtgatttttggggtttcaaggtctctcgtccgccggtg

SEQ ID NO: 204843 - DNA, 1169 bp, Cannabis indica
ttttatcaatgttctgttgtaatgtctttatactgttcttgaaaatattcttctccttcccccaagagatcatgttgttaatgcaattattctgtatacttaaaaaaatgtcaagaatagaggtgggattgttatggttcctattgacagcccaagtgttttgaaccaagttatagaaatcgggctcagtgagccaatcattctcaaaatgaaattgtggtgtacttttcttgaaagcatgattaccatcgtgaataagtttgatggccctatgattgaaaccataaaaaggaagatgctgaagagtagcatgggggagaagggcatcccaatccttattggtgataccccaatccaaattctcatgaagagtgccatgtttctatgtgaatcggttaccagtaaatggcaacagtgaaagattatacttggaaacaaagtgctaaaaataatggatagcatgggaagggggtaaatagttactattatgatcattatagcccaggtagtcattgaaatcccctaaaatgagctaagggctgaagggggcaatatcaaacaatcaatccaaattagtccaagaagtatttttatcataaatataaggagaatcatagtaacaagacaagtgatagtttattttcccattaatggaaacattacaatcaatatgatgcaaagagtatgagaaaatatggatattcatggcatcattccaaagaggaaataaaccacttcctaaaccatttcttggcacctcaaagacatcatcaaaaaattgcctagctaagttaaggaactagagttagcaactaacttagtttccttaacaaaaaaaagatatgaggttgatgatgcttggttaggagtgagaagttatggaatgctcgggaactccctaatccacgagcattccaacttatgatactcaattttctaggcggggttgcagagcaacacctgcatgttcctcattgtcaaacatggattggaccacggaaattcagaatttgaggctcggacctgctttgcatgctcctcacagaagagcccacctggcagttgtgacgggtgtaggatctcttcttggtggttgtagtacttgtgggagcttttggctgagtcggtttggggttgatagagaggttcctgggaacttcagggaacat

SEQ ID NO: 204844 - DNA, 1217 bp, Cannabis indica
aacacaaacattgaagactttcccatgtcagataaggaagacaatatttcccacaacactaatcagaataaccttcctgctgaaaccgaaactcacttgactgccactcctgaaggagatattgctgctacagaccaactgctgcagcaagatgaaaacaccactgtcccaaggcgttcaaccagagatactgctgctacagaccaactgctgcaacaagatgaaaacaccacagtcccaagacgctcaaacaggataccaataactccttcttatctccgtgactatgaatgtcactctgttatacaagacaaaacttctactccacattctctaaataaatatttgtcttatgaacatttatcgcctacttataaaacgtttattcttgccttgacagctcattttgaaccaacaaactacaatcaagcatctcaataccgtgtatggaatcaagctatgcaacgtgagctatttgcccttctaaagaataaaacttggacatatgttcagcttccaagaaacaaaagggtcataggatgtagatgggtatacaagattaagtacaatagtgacggatccgtcgaaagatgcaaggcaaggctcgtggcacaaggttatacgcagcaagaagggttggacttctttgataccttttctcctgtcgcaaaaatggttactttcaagctccttcttgctattgcaaccatcaagcaatggcacactttgcaactcgatgtggacaacgcctttctaaatggcgatctcaacgaagaagcttatatggaacttcctaaaggtctcgatctacccgaacacatggataaaaattccaacatcgtttgtaagctcaacaagtcgatttacggattaaaacaatcctcaaggcagtggtaccgaaagctttctgacgctctcatacaggaaggattcacgcaatcaaaggctgattacaccttatttaccaaaggtcacaatgaatccttcattgccttactagtttatgtcgatgacataatcctagcagggccgaaccttcaactgttacatcagttacaatctgctctttacagcaggttttctctaaagacattaggcaatctaaaatatttcttgggttttgaaatagctcgagcagccgaaggtctattcctatctcaacgaaagtatactctaactttacttgaagatcatggttttactggcagcaagcctgc

SEQ ID NO: 204845 - DNA, 927 bp, Cannabis indica
taaataagggaaggacagttatcatattagaaaataatatcatatcgcgatgaaaaggaaacttcccataataagcgtagggcagttttttcagaatattctctcattataatcagatacatttttgacatgatcaattcaagcccgactcgtctagtcagcaagttgtatccttcatgggttggacttcatgagtaagatcatggacattattcagttgtaaactcctcagtagagggaaaaggggaaacctgaatgtaattctccaatcactataaatacccaactaatctcatggattaggggttgaattctcttacgtacttttgctcaggcacaaataaaaacatacactttgtgtacttctgagattattgtatttaagacactactgaataaaagtaactcatagactaaggcttgttaacgccccaaccacgtaaaaaaaatgtgtgtttcttatcatactttctctgtcgttaattatttcttcagttcttattatttcaatctgtttctaaaaatctcgggaaacatattcggttacataatattgataataatgaattatgaatgagtgtgtattaaataatgaaaatttaactaaaactacaaaatatgaagaaaaaaaatgagaaagcaaagaaaatgtaaaaaaaaaaaactcatatgagatgtcacatataatgttttaaaccttcctgtatatatattgatatttcaattgtacaatcattgtttgttacttataggataccaaagttttttatgacagcatctcacttctagaagcatgagggtaattttcaaactttatggtgtctcaactacaccatgtttgtctactaagatattaaacttgtgattacctaagctcttggttaggccataaaactatttgatcactggagggaacatatcaaattt

SEQ ID NO: 204846 - DNA, 692 bp, Cannabis indica
tctttataaaaaaaaattatattaaatcatacttttttttaatttatttttcattattctaaatattttaaaattttattatgaaaagtttacattattacttaaattttaacaacaaaacatttaatttttaacatacataaaaaaaaaatgtaaatcaaatacaatctataaatttataatacactaataaaaaatattcacatattccatttaacttaacaaataataatataaaacatacatttcacaaaagaaaaattgtgaacaccttctccaagatgctaaaaatctaatttaaatcttttgccctaacagaaactaatataaaaataatatatatatatatatacacatatgaaataaataaataaatctatatatacaacaaaaatagaactaaaaataataaaaaataataaaacaatacacggttaattaatatacacaaatcacctatctatacacaacaaataatttagatatgcacatgtatatatacacaaaaattaatacatacatatacacatatatataaaaataaatatataaacacagaaattaatttatatatgcacatatatatacatattaatttatatatacatatgtatatattcacattaaaatccctaaaataaaaggaaaatttgaatttctatcaatatcttatacccaaattaattctctaa

SEQ ID NO: 204847 - DNA, 687 bp, Cannabis indica
agagagtagagttggaagaaataaactttgagagaatatataaaagtcaaagtattgaaaatagattaatattattaccattttaatttaaaagtagatccatttaaaaacacagatctcttattattaaaatttaatttaatatttttttaaccgataatggttaaaataacaaggtaacaaaagttacacaaaatgtggaaaggtttcttaaaaattcattgtctatcctaaatgcatgcttatataagcctcaacaataaagtttgatgcgcacgagagagatgtcataggaaaactagacaataaaattttaatatcagaaaagataactgcaaatacattgtctgatcctccaaagttgagacgaaagaaatagaatgagaaaaatttaatttagtttgacatttacattctcatcgaatcgtgccaaaagccccctttgaatttagggtgggaaatggatggtagggttaaggatgggtactacactacacagttgggagtggttacgttagtggtctatttttgacagcagagaaagagcagaaagttctccccgtagggtcgctccttggtggagacatttgtggaaagctcctaaattcccccaaaacttaactacttaataagggtctcattggtttattataatatttttgaaagaggacttatatataatatttt

SEQ ID NO: 204848 - DNA, 1449 bp, Cannabis indica
gaatatagatgctgcagtggaccgcaacaacaatgctactggtttgggcgctcttctacgggacaactctggtatggtcatagccgctttctccaagaaattgctaggcagctttgaacctcatgaaatggaagctcttgctatgttccatggtgtgcattatgctctaaactttcaatttcctcatctgcttatagagacagatgcacttcgagtgagaaatgcaatttgctccccaacagtagcttcctcagtttttaatgatattatcatggatgtttctagtcttctttcttttttccctaatgtaaatgtaactcatgtcaagcgcacagctaatatggctgctgatggcttggctaaatttgcactaggggtagatgaagattgtttttggtcggattgtattcctccgcctataaattctgttattgtaaatgactctctggtttgatttataatagcagtttttttcctacaaaaaaaaaaaaaaaaaaacaagttatttgaacaaattctgatttaacttttcggaaatattttttatttatggtttgattattttttttttacagcacgacttaatcaggttgtaattttatatagaaagaataaaataaattattatgaaataaataccttattaatatatgatatttctttgtatttgatatattttattctatttctaataagatttgcattaatctctcccgttcagattcatggtgtccatagagaattcatgaaataaatttcgctttgatggagtctagattgacaactagtcagatcgtaattacgtttgtacaaatcaggatttcttctacacactttccatatcagttcaaacagaatttcttcattttatgagtttttgtaatgaaattatttaataatggcttctctttgtattcaaacctttttgagctcaattttgggtgtcatttatccctataaatatcacataaaccagtaataaaatgtttatctcttccattcttaattttctatataatttaaaagagtatttcttttgtaaattaatgatagttgttctgctattccttgataagtttgtgtatctttgtgattacttttatgtgaaataaatttcaaagtgaagaacgtgaagaacaatcttcgaaagaagattcatctaagttttgcatcgggaggaagcaagcattactatctttgggtgaggatttttacgcgtcttgcatcgggagagggagattcattcaacaaataggtgtacatcaagcttgtgacaaaatcattaaagggattataagctttgtttaagttaattactttgtacttgttgaaatttgactaatgaatcttatctgcaaggattgatgtattcttatttgagtgtggcctcgtagactaataccacgtatagaatattgtgtatcattttaattttacaactttacttta

SEQ ID NO: 204849 - DNA, 789 bp, Cannabis indica
tgttttgtacgaccagcgagatgaacaatcaacatagaagctccatctcgagatacacaaagtacatgacagaacgacagtatgtgggaaaggaatgagttcttaagagcatttagctcattgacctacatactcgtgagtatgttgaaagactaaggaaaatacacacaatataatttgtctcggagttatcacattatgataatgtctcgcgttcacctctcataacattacagaaggacgcgagaagtacttcctagattatacttaggcacaaaaagttatcttcaaagaaaagcatcgtaagatgattatttgtgttgccagatgaagaagtggagtcaacgtaacctcatatagataaagacaagagaaattatagcaattatttatttttatcacatgtgatgtaaatataaaacgtggggattgtccatattttatgagcggttacaaggataaaataccaagggaataactgaaaccctaagactcctataaatagggacatgacctaaagaaaaaaggatgaccaattttagaaagaaagaatataattcacaaattatatcttgtattctgtattctgtattctgtatacactttgtaaaatttcagaaataagatgaactcgtagagtatgaagatttaacttcaaaaccacgttaaaaaccttcttgctacttatatttattattattattcattatgattttagagtttacttattacattaaggctcatttattggttaataaaaacttgtgttaacaacttggtgctttcatt

SEQ ID NO: 204850 - DNA, 806 bp, Cannabis indica
taaaaaaacccttctaaaaattccttttactttttctgttttgagattacccaaccaatcaccaatttacatttttttttaaaaaactcatggcatcattactgccaatcaggcttttaaaactaattttttcacatacaaaattcaaatttttgtttcaaatttactcctttggaaaacacaacttctcaatcaccaaccaatcagcccctaaattttttatgttttttcaaatttctatgcagtttttttgaacttggtcatccttctcatgtgactttttatgaacgcatagaattctacttttaatgaacgcattttttgtttcttagtaatttttgtttcaaattttacagtaacacattttttagttttttctaaaaaacaaaattttaaaaacaaaaatttttaattttcattttttgtgattaaaaaattaaaaaataaaagtgttaccaaccgtcacctaaataaatattatgttttaacttgtaattacacatatacattaatttaatgatttattttaatcccatttgaatattgcaccactttcacccccatccaattcaaaacatacattcgacttaactgaggaaatcaactgtaatcccaatacatttttgtaaaccttgctaccaaatagatttgtcactacacaactaacatagccaagaactaaaacatgcatgaagcaaattttctcaatacaagttatttacacattacaacaccataaactatcaagaaccagaccactaaagataagatacaaggttttcttgtaatataaaaaaaaaaaaaaa

SEQ ID NO: 204851 - DNA, 687 bp, Cannabis indica
tttcatttcttttcatttttttataattattttttggtatatgatcatgtcatgcctattatttcaaattaagaatttggataacgtttaaatgaaatatacactatagcatattataattagcagatacttgaatacattattatagcatatttcttttctacgcatataagcattttgattttgatactcaatttttctagagaccatagccacttttatttttttaaatcaaaacagaaaaaattgctgggagctcaaataaatcatttttttaccaaaatattagaaaataaattacagcagaaaagaaatcaatataatagtaaatatattttctttaaaacaaattattaaattaaatttagaatattcaatctaaaagaaagttaacaaattagattatacacatatatttatttaaaattttattcaaaaattagataccaataattattatgtattaacttacatgtttgcccccaaaaaaagtcatatatgtatatactagcacatattaattacatattattattgtataaaatgtgtataattcaagtgtgttacacttcttattctattattttatctatatatattcaaatataattaataagctgacaagtggtattatatatttttgtttaagtaggtcacccgaatgctattggagtcatatacaccgat

SEQ ID NO: 204852 - DNA, 1237 bp, Cannabis indica
atggcagcaggtgtgttcaccaaagaaagcagggggctaggcttttgaaatatacatgaatggaatactgcagcaatggagaaatatgtttaggcaattgtcaccaaaaaatacaatttatttgtcaaatggatcaatgaagtatacttgatggggaagaagtggtgcgagtaccagccaccaactgattgcaactcatactggaagaggatagtagcagtaaagaacaccctcacagctaagattgatcaacaagcttttgcgacattgaggtatgacatcaaaactagtattgatttattgtttaccaaaccagtggatgtgaactggagtaaatagttgaataggccaactataccaaacacagggtgattatatggctgatattgttgccaaagctcagaacaaaaaagcaaatacaaaagtttaatccattggtggataagacttgtttattatgtagcaatggctctgaaacattggaacatctcttctttaattgtcattacagcaacatgtgtgtacaaggcattaaagaatggctgtaatggaaaacaaaggcaagtagcccgctgcaactagctaaatggactgataaagcgaagctatctgtaactcagaagagcatacttcatgctgcacttgctgtcacggcttaccacatttggagggtccgaaatgatgctctttggaatcaaaagtgtagtgtattcggaatactgtacaaaaaattaaagtagatttgcaatatagaatttatcatgtaatgccaaaaaaggataaagctatagatagagaatagtttatgggaagatgtatacaatagtaattgtttgatttgtaattggtgtatgtaattggtgattgagaaatacaatgatcctcattcataaaagaaaaactcttaacatttttttaagattttttatctaaaattattttgtgtcaattttaatattaatttcataattttttttaaggggaattaccccatatactatttgtttaactttttttttttttctaaatttacggtttgggtttctaaagtggttgctacgctaattgcaatacgggtttctatacgattttttgtttcaatttaggttgcagcgctagttgcaataggggtttctatgtataatttcgtaaaatgcaaaaaaacaaaaatattttgaagtgtaaaaatgaaaaagccccttttaaatcatgtgtaaactttttatttttttaataa

SEQ ID NO: 204853 - DNA, 765 bp, Cannabis indica
cttctctcattgactaatgatgatcatgatatcacatctcatgagctctactcttgtggtaaaaaagctaataattattctagcggacttggttctcatcgttcaaccaaaaaatattcttgtcctaacaagtatgtagctgatgatccaaaagccacttgccctgattgtggaagtttgctcaataaggttctgacttttgtgccaccccctaattctaccgaagtgggatcatcatcatcatcatcttctagggctaatgatgatgtaggtattgtgaatggagtggttacttatatgattatggatgatcttgaagtgaaacctatgtcttctatatcaagcattgctttacttaacactttcaatgttaaggagattggtgctcttcaggagaagattgtttcagttggtttcaatgaggtttgtgttgaaactcttattaactataaagtattattgttattgttatatatatgtactttgtttttctttggggtttattaattatttattattgttgttgttgttgttgttgtttgttttgatatatatgaacagggtttgaggttgttgaaggcttccctgtggactaaaacggttcttactaatgtgttcttggggaattagctacatatataagtcttcaatgggaaacttatatccatcattattgatcatcttttgagtttaattaagagttttgtatttgttgcttggttatggaatgttgttgaaatgttttatacatatgttctcttttct

SEQ ID NO: 204854 - DNA, 837 bp, Cannabis indica
gaatcatcatataaaagctgcatgttttcatatgtgaaccggtttatattttgtcttgtcattattgataacttacacatgttattttcaattgttattttatttgtttatttgtttatatatataaatattgtggctaggtttgaaacatcccaaatgattaattatgatatataaatttgaaaatatgaatttaaatagttaagtgtaataagtcataaataataaagaaaaattgtacaaatgcatcccttgaaaggtcattatttatttgggtatctagaaaaaaaaaaaattagtctaaatttttttaatgactatatacgttgtagttatttaagacatgttgtaaaattttgaaaaattacggaaaaatttaacaacactaaaaaatagagttcaagaagtctgttgcacgcgtgagttttttttttttttatacacgtgtaaaatagacggtttgaacattgaatttcgtattgtaaatcatttcgaatttctcaaaattttacaagatgtcaaatagctatagcgtacctgactataaaaaaaatgggctaagaaattcttctagatgttaaaatatttaagggttgcaccaatacacttatttgaacggagtgcattatagaagcatctaatagtatataaatatttatataaagagggctagatagtcatacataacagaaggtaagtctataacgcatctcttaaagtggtcttttggtagatctcttatcttttttgacattcaggagagttttctattctattttttttttccatgattgcatatattgtagctatttaggtttacttgtaaattttcataaa

SEQ ID NO: 204855 - DNA, 512 bp, Cannabis indica
agagagagagagagatttcaggttcatgtaaacacaaggaatctaggcttgaaagtgggaaagttggaaaaccaaagctatatatatacatattcatatattatatgtatatatatattgtggtatagttcctccaaatgaaaaaagtctccgcaatcgtcatttctggaaagttgtttactcacaattgtcggtttcgaaaggagtcttgtagaatgataggagtccggatggaagttcccaaatgattatcatgttcacttcgggttcagtctttaggtaactagcccttctctggaaaggagttccagctggctaattatccctcctgaaatgataaatttcgatagtcgactacagtagactttattctatccgaaagcgtcttcagcgagagtccgtggtccttgagtctggaagatcatttatgttcccagaggccattgcacttaagctgacgtgaagacttcgttcaaagaggagtttgtcaagttagttatttttaactaact

SEQ ID NO: 204856 - DNA, 881 bp, Cannabis indica
ataatgatttaactatttatataaagggtctccaaatttaattttacctttaattctatatacttagggtggtctcaaagcttttaaagggcctagagtaatatttttaaatgggaagttggtgatctatctgctgcaacattatcagtagctggtgatacagatgtacatgtatttaggagtattcacagtgcaagcgatatatattttgacaattttttcgaactaaattacacatgcaatttttataattttttaaaccacgaccaccctacaagatctcacaatcacaaaaaccacaccgcaaaagtaaggtgtgggcggtttatactattattaaataaataaactatatattaactaactaaataaaaatacagatattaacacactaatatatgatataacaaaattcaaacaaaaatatatctaatcttttaggacatgaaataaaaaaactaaacaaataatatttaatgttttaaacgccacaagtatgtcaattattattattttttttttttgtacaattattattattgttatatatagagcttttagaacatataaagaaagatataatatttaaatcttactttacatacacaaactcaatgttaatcacttggagaagacttagatcaatatattttgaaatttaaattaaaatttaactttacaagtattgtagtgcagtgcagtttgaaccgtaattattaaatttaaaacttagcataataaattagtcagcgcgcggtttgtacaaaaataacaaattaacaaccgcacaaccaatgtgtatcgaattgtaattttttattgtgatgtagtatattgtcaggcgagtttgtgtcagtatatgcgattttatgtaacaccct

SEQ ID NO: 204857 - DNA, 551 bp, Cannabis indica
gtcgtagagaatatgatattgaagttgatacaatcgagaatgtgtttttctcttctcaataattgtgaatatgtcacaattgctcttctagaattcaagttttatgaaaatcatttgtgaagtcactttttttgcagcttatggtgtgtgatttccttaagagttcaagcttttatgggtttatcaaccgtaacaactcaatgatatagacatttataaagtcttaatctgtgacctctcttttttttgtgcatactagaaaacaactgcagaggagctacttgataaagaacttcctcttaagtttgtggaggttgatgaagaacaagccaggcttgttctcagtaaccgcaaggccatgcaagacagccaggcacaattaggaattggatcagtggtcctaggcactgtccagagtctgaagccatatggtgccttcgttgacatcggaggaatcaatggccttcttcatgttagtcagattagtcatgatcgtgtcgctgatattgcaacggtgcttcaacctggtgatacactcaaggtatagatac

SEQ ID NO: 204858 - DNA, 718 bp, Cannabis indica
gaattagaaaatagacaactctggtaaagatttgcaaaacgtattagcacttaacggattttaatcatagctttattctcagcgttcataactcctaaaacactcatttatgtgctgataacagccatggagtgatatgagtgttggatttaaaattgttgttaccaaaacattataaatagagatttgtgggattcatattaagatacattagtttctattaagagagcacattgttaaaaactctctttagatatttttataaaattatttttattactctagctttttcttaagtgcttatagtgtaggagcaataattttttagataaagatgttaaacctagttcaagtttagtaattattatatatatatttatagtgcatgtggtgttgagattattataacatctcttgtatatatattatatatatatgttcttattttgcattctgttataactttgagttgtaattctcctaacttcgtattctttatttaatgtattatttttattatagagttataatattatttaatttttcattttggtcttctattattttacatttgagtttttaatcttgtggtttgatatttgtattagttacaacacattttccaaagataactaacggtaagattaattttgatatatctaatacatctatatataaatagaaaatgaatgttatataaaacaaaaataataataat

SEQ ID NO: 204859 - DNA, 361 bp, Cannabis indica
aatatttttatattttttttaaaaaaatttttgtttgtttcataatttttttatatcttactattataaaaatgtggtaatagtgtgatattgccataccattttttttacctcttacaacaatagtgtaaaatgtaaaatggtgtgatatatttacgtttttgaaaagttaaactcctattgttaggagggtatgatattttgacaattctaacattttgcattgtacataattcatattggtattagagacaaagtttaatattttttaattttaggagactcacatcaacttctttattttatttttaaaagagtaaatggcggaaaaactctccatagttttattttacttgcaatt

SEQ ID NO: 204860 - DNA, 1183 bp, Cannabis indica
tagcattatatactttgaataggttatctatagtcttttgataataaatctataaataaatttttcattaaattacttttgaatctaaatataaatatataattaaagttagaaaaataataaaaaaaaatcgggattatttatcccacaatacactagtgacaaactcagaaattttaatatgtgggggtttaatttttattaaatatatatatacttatttaaatgagaaatataatcattcttaataaatttatttagttttagaagcttaattgctataaaaactttatttgtgatggctattttgttattttgtatataattattaaattgtaataaatgtttatttttttaagtgaatttttttttcttcagcactccatatctcataagtcgggtttgttattgtcttaattacactgaataaatactttgtaagtccactatgtatatataatatatattgtgacatagtgttttgactactatttcacgtataattaataataataataaatagtaaaaacttttatttggtctcaaatcaatcatatattttattatttatatcttcttcttattccctcacatattaattaatttctctaacctaataaatcgtgaaatattactaaaacatatataacatgttaaagtatatcgaaggggtatatttacttggatattggatttgataacctacctaagctataaaacaatgcttatagacttatagtgcggtagctatatgcctatatagctatatatttattattaatccttttactatgttataaaccaaaccatatatatcacttaaattttcatgcctttttatcttctcaatgataaattcattgacaaattaataactttattcttctctaaaatcaactatatacacaaacatatatagatatcatgatcatcatcgagaacttattctttttggaaatacatatatatatacacacaataattttttaactcataactcactataggaaagatttgaatacattatatcttaatgtacagaaaaataactcataacaaattcctgtacaagcattggtttttcatttgttacaagtttaagcaataaattatagtggtacgtacttttcatttgttaaaagctaacgtaaatatagtgatatatttggaggtgtttaacact

SEQ ID NO: 204861 - DNA, 1296 bp, Cannabis indica
agaattggagattataatttaaggtctctcataatgtaattatgtaatcaaacaaatacgtaaaattgtgtaattactttccattacattcaatttcaattcttggctttctaaacaccaataaacatataaataaaaaaaataaataattatttgaaagaaagttaaattgaatactagtagtactaatttcaatttatttaattttttttagaaaagctaattgctatttatttatagactttaaaataatgtaattttaagctaatgagagatgcttaaagaagcttcaataataagattctgtgacagtaaatttacactactgattttcagctttccttttcttaaataccaaacaacactctggtaaaacttaaagagagaaagtgagcaagagagagaaagcttttctctttctcattattgttctaaaaaatccattcttttttggtgattgtgagtgttgaacttgtaccaaatcattttgagtagaagctaagcaaaaccagtcgaaaatgaacgaagacgccaagagaagcgtccccggagctctgacggccaagctcaactccgacgacagaaaacccttgtcggccgccgccaccgctgcacccgccggaaagcgtgtggtcatcaagagcgccgacatgtttggggacatgcagaaggaagctatcgacatcgccatagctgttagctttcttttttttctttttcttttccacttatgtttttcgtttttgttaagcttaattctataatgggcatcgttttttattgagaaatttgttgtttttggtttttgatttgcaggcgtttgagaaaaatggtgtggaaaaggatgttgcagagcatataaagaaagaattcgataagaagcacggacccacttggcattgcatcgtcggtagaaattttggtaattctcttcaactttctttcaattgatttttcttggttttctgtgatgggtcttgttctgatttagtatgtagtgatgatcaacttgttggaaagcccccttttgcttgttagtttccatttggggttttcaagttatagggttgtgtgatcagaactgtgtagatctaagcattgatctaattgtttttatgtttatccttttgtgtgagctattttcattaacttgactatgtttatccctataataaggtgggtgtgtttctagagtatctaatggacattcatttattgtctttcttagattacataagcccttccttccctagctcattgaggctgttatgtctaacagagcatgctaggcatata

SEQ ID NO: 204862 - DNA, 571 bp, Cannabis indica
ttttatgttttgtttatttttgtttatataaaaatcaatggaataactaatgagttgctatataacaagctactaaatgatttttatttaatatactacagaataattttaaatatataatatacattttaattattcattttttttaaatttaaactaaaaatattttgatcaatggagaaaattcttaaggcctgtttagtacagaggattgggctggattagataagctaattttttcagtgtttagacatgttaaaaatttggataactaatctcattgggattatttataccatataggtgagattttttttaattgtttttttaattttaatttttgttggtcgagattttcgacagctaataattaaagttgtatgaagtaattaatgaatgttagaagaaaatatttttacataattaaggcattaatgagcttcaattcacgaattattgtatttatgagagtatttattatagagagtttttcgaccgatctctatttgttttacattattggggtatttatagactcgtaatagtgataaaaggccactattgtcgtgtt

SEQ ID NO: 204863 - DNA, 1077 bp, Cannabis indica
gccgtgcaattgtgatctaattccatatgtggtatttcctttgaaatgttattgatattgactttcaaaaataataggccttttttcttttctcttaataatgaaaacaataatttgtctttttttttaatgaataaatgtcacctaatagttttaatttatggtttaggcttaatttgttagactccggggtagaaaatctgggtagctttaaataagatttaactccataaaagaaaaagttaataataaataaataacgagaagatatatattgcaaaacatttataattgaataatttgagatgattggacagaatgttggataaatatttaaactttttaactgctttcttttcttcatattgaatcgttaaactggtaaatggtgttgtgtgaaaagacctgagacttagttaactaaactacaccacttcatgcacagtacacaattttatcaaaaatatcttctttttttttttccgtaactgtggaacagtttgaaacaaaaaaatattctaattactatatatatgtgtaaaaagagagaacaacttcttctacactccacttccaagtggggataaatagagcttatataagaacagaacagggccttattttctttctaaaagcaatagttaaaacatcttcatcttatcacaagatttgagtttgtgagagaaaagattgaatctttagagggctgaggtgaagtgtctcatcatatcacatggctaagattattggaccaaaatggtgtaataatatgagggtgattggagttcttgttgtagcttcatcagtgttattagtttcagctaatgaaattagtattgaacagaaagatattgattccaattatgtcaccagagtctccaagattaattcttcacatccagtaactcgatcaggatatactcatgtttggccagtaagttccataaatatatataaagatattgatatttggtgcttggctttgaatcattcctgtattttcactgttcttcttctaagcaaagaaagttgaaattttggtcaggacatgaaattggggtggagaattgtggtggg

SEQ ID NO: 204864 - DNA, 1858 bp, Cannabis indica
tttcattggattgaccacttatatttgctcctttagggtgtctttgcctttagtgacattgcctaagtttttttcagactggtcataaaattgacaacaattctatctgtttatggaacattattgccatttaaagttaaaattgaaaagctgtgcctttgatattatctgtcatgtatgattgtatattacaaatggggtattaaagtgttgattttatatggtacattttcaaaatcatacctttttttttgctgttgtattcaaggttggagctgatataggagaaaggggcctcaactgtgtgttgcattgcttaggaaaactggtcacagttatggtgagcttaagaagacgtaaactcctgggactatgctctggtaatattactgatgttaattagcttttaactctggctttcatgtcatttgtttctactagataagaaaataaatggtgtctttgcagggaggaattcctttcttactccacttcccaggttttctggcaatggaaagattccttcaaattcttcattgaatgccaaatcgatcagtgtgcatcccatatattcggatgagataaagccaccaaatggggtaagagttaataacatgaatcttatgaagcattgctttgttttgcctggccttgaaacaagtatatatgtattggtattatgttatagtaagaccctttagttgccttacacaaatttacaaacttgagttttcagccatatcagattttgcattttgaatgtatgaactgtcataagccttttgaaatcatctttgttttgttccgcgatttttatcagaatacaagtgtgaagggagaacatggttcaacaaatgtatctgattgtggctcactcaaagaggaccataatcagcaagttgcaggtttgttgctgcataattatcaattggggttttaagattcattcacatcaacattgcataagaactaaccccgggattgagagttctttacttcttctttctgcatattcagtgtttcttctacacctgcatacattgtttttcatttattcatgtgcttcaatgtgaattctattatgatatgtcatatcaaatcatggcagggccgccaatcaaacgcaggaagcgacacaggagaaagaattttcagaaccaagaatcatgtttgatgaggggtgtgtatttacaaaaatatgaaatggcaggcagcaatcaaagttgacaagaaacaaatccatttgggtactgttggttcacaagaagaggctgctcgcttgtatgataggtaggaatttacacctttatcttaattgatactaattcaagagtgaggaaatgctgaataaagagcttactgttgtaggatatttctgtgttgttctgccttttgaagttttagtagaagcttaaagtaacaatgatatcatttgttgttgccttcttctactttagatgtaggttaattagaatttccgccctcaaaatttgacatgtgccaaatcgtgttctctgaacttttcaggctatcaaaaatcttttcatgaactaatgagattgttagattcaaggttttgacttctgtttaattttgtttacttttactaacgaacacctaacgcggcgattgtccatgtatcaaatcatgtctcccgaactttaacatgtaccaaatcttgtttctcaaactttcgtcccacgtcaggtgcttattagtaaaattgaacgaaattggacgaaagaccttgaatccaacaatctccatagttcgggaaaattcttaacggcttaaaaagttaagaagacacaatttagtacatgttaaagtctcgcggtgggattctaattagcctttt

SEQ ID NO: 204865 - DNA, 1126 bp, Cannabis indica
gtaaagtcagaaaatgtaatgggagaaaataataataaaaaaataaagtaaatattactaaaaaaagtacaaaataaactatgattaaataattatatatgaacagattttcaaataatttatgtttgttttcaaaattttagttcttcttttaaaaagtaaaaaataaatataattttattaaacatatatatatatttaaaaaattgtattaagctatattcgaaagttgtaattttttttttttttttttagttatgaagggaaaccgtttaatttaaaactaaaaccaaacttacaccaaagtgttcaaaccccaaagaatcgggagaatttcctcagtagaaagagattgacaaactcctagggacgcagcccactttgcaaactcgtgagtcgggagattacggtttctaggcacccaagatacattaaccccattaccattacacatcattgaaaaaagtctagaaaaaagaggcgaaagtctccaggaagggcatctgcggtcttcgaaggcctgcaccagaatcttacaatccgaatggaattgcacttcattccaccccgaggaaacacagaattccacagccgagagaagaccatgggcttccacttccaagggcgaagtaacctggaaattaaaggtcgtagcacccaaaatttgaccctctaaatccaggataatagtggcagtgtaggctaaggagcctcgaacaacagcatcaatgaaggctctcacagaggctctgtaaggcaagaaagaattcagggtgaggtcagcagcttcaggaatcaatttggaacgagagactctccattcctgcacatcagataaagctttgcacagaatgacctcaggggaaaccacaattccttcatggaagcaagagttacgggcattccacaaggaaatgcagagagtaaccgccacttgggtgaacatctctgtatccgggggaataacctggcccggagatctagttaacagccacaacaccaactctttaggattatttaaatttagacaatcacttctaattccccattgcgtgctaaactagcattttcgggccaacgggcatttgagaaagaggtgaataaccgaatcttcctcatcatcaca

SEQ ID NO: 204866 - DNA, 1391 bp, Cannabis indica
taaactttggtaaaaaaaaaaaatcttttgcatgatgcgcagatgcccatgtgtgctcaggtgcccacgtacctcagtgtgcaagcaacagaaactcgcagtttgtaaggccatatataatttatttagatgaaaactaaaagtcaaacttaagaaaaaaaaaaaaaaacctatacaatacaaagacaaacttagtaaaaaaaaaattctgcatagtacgcatgtaggcgcccatggtgcattgggtcgtggaatccaccgagtgcacaagcaaagaaaaatcgtggtttgtatggccatatagaatttattttgatgaaaattaaaagttaaatttaagaaaacaaataaaataaaacaaaggcaaacttagtcaataaaaaatcttctgcatggtgtgtaggtactcatgtgtgcataggtgcccacgcatccgagtgcgcacaagcaacgaaaattcacggtttgtaaggccatatagaatttatttggatgaaaactaaaaattaaacttatgaaaacaagaaaacaaaacaatacaaagataaacttggttaaaaaaatatcttctgcatggtccgcaggcgcccatggtgcataggatcgtggcatccaccgagtgcacaaataacgaaaaatcgtgatttgtatggccatataggatttatttggatgaaaaccaaaagttaaacttaagaaaacaagaaaataaaacaaagggaacacaaacttggtacaaaacaaatcttccgcatggtgcgcaggcgcccatgtgtgtacaggtgcccacacacaccccgagtgtacaagcaacagaaactcgtagtttgtaaggccatataagatttatttggataaaaatcaaaacttaaacttaagaaaataagaaaataagaaaacaaaccaatacaaaggtaaacttggtcaaaaaaatcttctgcatggtccgcaagcgcccatggtgcacagggtcgtggcatccaccgagtgcacaagtaacaaaaagttgtgatttgtgtggccaaataagacttatttggatgaaaaggaaagttaaatttaagaaaacaagaagaaaaaaacaaaacaaaggtaaactcgataaaaaaaaaattacgcatggtgcataaggtcgtggtattcaccaagtgcacaagcaacgaaaaatggtggtttgtatgaaaaaaataaagagaggagtataaaagaaggagaaatgctaaagggcaccagtagtgtctagtactttcttatgtgttaatatcactattagtctaattaagtatcgggtcttatatagttcgatgtaataattttttaaggaatatcgttagttaatcgtaaagcaacatatctaaaagtattaaacactagtggtatctaatagcaat

SEQ ID NO: 204867 - DNA, 384 bp, Cannabis indica
tactgtataatattatacagtatgatggtataatgatatgattatgatcatgaatattatataaatataaatattattctaagatcaaatggtacaaccattttccatttataggctaagctggtgatcaatttgtatctgaagttttggattctaccttcgataaaattatacttattttgctatatatatatactgtatagtgatccctatgtgcacagtaaaatatatctactgcaaaataaactatatatatataataaattaataatatatatattttgtttgaaatagtaaaatatgtatatttgtttggggcacataaattttttattctgctcagttggtgagtataaatatgaaaaagtaattaattagatctag

SEQ ID NO: 204868 - DNA, 997 bp, Cannabis indica
caactcctttcagccatcacaaaatctctcaaccatttgggtcctcctatgtgctagaagctcttgcccaccttcagctacttcctcccctttgttgactgttgaagccgaagactccacctcttggtgttgagcacaatgatctacccattcccttattttttggtccatcaactttttggatcaattggtattgggctcctcgttcaattcttttgaagtcatttgatctttttcctaattcgagactttgctaaattataactttaaactaaattataagattgcaccagtatattaagttactacattaaagaagctaatattttaagatattcaaggttaaactaaatcataagatgtcataccaaaaaaaaaaatcataaagttggtggatttgatgtatatataataaaatatctacaaaaatggagattttttttttttttttagaaaaaaaaatatgaaatggttttctaacaaaactaacatcattgttaaaatggaaaaatttcacgaactaaatttcagagtaattactagttttagtgcgtttgtataactaggtaattgaggagtctaattaccaagtgagtgtaattacgatactatcaaatttaaataattaatttttaaacaatttgttctgtaattattaaatttttgccaaatataaaattaaattatactgtacatgaaaaaataatttaaaatcttccaaacgcaccatttataatgttaataattatattctaaaaaagaaaacagaaatcatgcaatgtatataaatatgtataaaacatctttaacattgctaaattagaattcgtatgatttatttatatgtatgaaagctcaaaatttagagaaatacgtaagtgagtttgtgaccgttgctatgtttagctcccttctctccgcttataaatattaataccttcgtttctctctcatcaattctcaagaactcatttgctcacccactctctctctctag

SEQ ID NO: 204869 - DNA, 780 bp, Cannabis indica
aaatatttaccctttatatatacatgctagctttcaaaagactactcattactataatcaattaaagactaattaaggcaatatttacgcatatagattgaaatgtccttgaaatatcttgttactatataatataatataatataatataatataatattgtttttctatattagcatcataataaccttaaacataatcatatttattgtaatatatatatatatatgtattatgtatattatatgataatgactacaaaccataataaaactaactgataacaaacttaactaacatatagctaaccgaagccaatcttgtggttttatttatttatttattttaaaaaaaacaagtcttatttattcttaatcataactatatattaaattattttaattaaaactcaaatatattatataaggataatcataaaacaacaaaaccatgcatttttaatgtttgactaaataatcctaaataattatgtcttagggttttcaacttatacataatgcttcttgaataatgttccaaatataattaaacgataaatatagtaatacatgtaattaattaatgcaagggattgagtccatatatatgtagaaataaatcaattaatgcattatataaaatattatcaaataattaattaaaattctatcaagtactaaattttactaaaaaaaaacacttatattatttagtgactaacctttagtcataatataaattttttgcgtactaaatgtgatctttaatcacataaaaaaa

SEQ ID NO: 204870 - DNA, 1465 bp, Cannabis indica
tatttatgtgttattttttattaacatattttaattaatttttaaaataaaaataaaaatgtaatgactttaactaattaaaaactatcatatggtaatttatttaaaacttaacaactaagtacctataaattttttaaaattataacttatatattattgcacttaaatatttatttataattaaaaattaaacttaaatatttatatcacaaattaatcaaaaaaatgaagaaaaaataactaccacaatttcgatctaatacaaatattttctaaaaagaccttgcaaaaattatctattccatcatgaaatattaagaacattgaagcctcttttagtacattgcattgtattgtgttgtgttggattgtattgtattaatattaatattatttaatacaataatatgtttagtattgacttatattaatagcttgtgtaaaattatattatatttactataaactcgatctcaaccctaaccccggtccgggaccgaatcggggtccaacgctaggtttgggtctgagtatgggtttggattgagtccgaggtctagggctgggtttgggtccgagtctgaggttcagagttgggtcgaggtctaaggctggctccagcttcagttggctcttagtctaagtctctcgtctcgaccccaagcgtcgggacgaggtccgagtcggggagtccaggtcttggattcgagttgggggtctggacccgggtctaggttcacgtcagggttcggagtccaggggtcgagtccgagttggggtcggggttggggttcgggtccaggtccaggtcaaggtctgtgctccacggttaggtctgagcccgtgtctaagtccaggtcaggatttggggtcggggctgggttttggggctaagtttgggatcgcggtctccaaccctggactctttgtaaatattataatagaagctaatataatataatattatatctaaacgtagtattacttgttatttaatacaatataactcttacatggcctatcaaacgaaccctaagcaacaacataacacaatcaacttttttaaaaaaatattagttttgttactaatatttttgtaaaaacaaattaaaattaaaaattttgttgttttaaaatttacttctttatatatattattctaattattggcttataattttaactttaatacttttgtcaatgtgtaatttttataaatatatgcacgcatatgtgtttggggaaatattgatgggccaacaagagacctatagtgttaaatatatatatataggaaagatccaataaataaatataggtaaagcccatgaaaaactacgaagatcaagatcaaaagtcaagatataggaatatagttaagaaggtcaccccactagatgagtcaaagttatatttaggctaatttagattttctccctttaaactttgacatatactaaat

SEQ ID NO: 204871 - DNA, 1352 bp, Cannabis indica
aattattccttaaataaaactatctcttttttttctttctaaaatgctatatttcttctctaattactgaaatgctaatttatctatttaacaattacaattaattattaaacaaaattaccatttaaatatatttgttaattagaccattaaaagtctcttaattaataaacaaactctaacttatcttttctttctaaaatatgacattgcttagtaaaatttataaataagacatagtcattatttaaaatcctaattgattaaataaataaactaattgaagtctacaagataatattatctcgggaaccatgagcttatgtaaccaatctgctaataaaaaaatattaatttctcctaactccactataaatttagaattgcactcttaattactcatatgtgtcatttactacaaaaaatttactaatttttatttctatattaccaattacttcaacataacaataaatacatgtcgatctcgtgaggactattatcaatttattatagaaaagtgggggttttagtttataaagattaaacaataaattagaaagcaaataaagatagatattacactattaagaaatagttaaggattaatctccacccttaataatcattcaagatcaataataataaatactattctgatttttcaattaaactattaaccccgctattaatgctgaagcaattaattttctcaacctccctagtacaattaattaaggcaaaacgctcaatacttaattttttttactaagcaatagatcatgaagcatgcaatctattaaacctaagaaaaatattaatttctatggaaataagttaatctaggtaacaaatcaatgaaacatataattcattaaacttaggtttaatttttcatcacaatcaataatacatttgacattactattaattacaaatgattattctacttagaatcctaaactattaggtgagaagtaattctaatatgataatagaataatgacaaaaattaaattagttgtacacctaacaagaattcacaatattcatttcatagcattcaaatagatacatagaaacaatttagtatgagagaatttaagaataacattcattatcacaaatcaagaattcattattttagggttttgaaataacccttaactaaaaagaaattactccataataatcattataatcaaaatcataatcaagagtaaaagattaaagacaagaaaagaactaaaatgataaacaattgatgacgcaatcttcctcttctcatctctctcggagtttctctctaaaaaacacagtctaaaagtccctaaaaatgaaccctaaaagtc

SEQ ID NO: 204872 - DNA, 973 bp, Cannabis indica
ctcaccagcccatctcattgtcttttctcaacttctcttcaagtggctattggatcgtggaaaggaagtggacagatctggattgagtttggtcagatctagactggagttagttgaatctaggctgaattcccttaatctccccttcttctcggatccaatgacagattggctccaatagtggtagtttcagcaatatggtgtaatggtggggtttctgtatggtgtaattgtggtggtagttgtaggttttcagatcacagtatgggtttgtaaggattgatttgtatatggttttacaagaatgaagtttgaaatataaagtttacagtatgttcattgtgagactaagtaattttgtatatgtaaatctaaacatttaagctctattaataatctgggattttggagtttgatgtgttgttagtaaagcccatgaccaaggcccagtagaaattaatcaagacttggtagatcaaaggtgtaacgccctaactcaataggcacgctacccaatatacttatgaaaaccctaatcccctaatcaggattactattaaaattagcgcagaaattaaactttaattacaaatagaatgaaaataaacttgcaatactttttcactttacaaaataaaagatacatgtgtcgggatcctgaaaatactttacaaaatgttgctacaagttcgttacctctagccgacctaagcagcaaaacagagctcaaaaatatatcactagtagaccccaacccgcttaatctcaatatgtataacacataattaatggtgccactgcactatttgtctatttgctatagacctgcatgttacgctcacatgcctatttatgtctacgtggtgtagacctacttgttgctctcacacgtctatatacaataaggccttagtagggcttacctcgcttttggttaccgagcctaaccaggttatgccttgctcgcataacc

SEQ ID NO: 204873 - DNA, 624 bp, Cannabis indica
taaacatgttttattattaataatttttaaaacattaatataataaacataaggataaaatattacaaaataatattagaaacattaattacaataatctatttatggtaattagtttaatcattaatgatttatattatttaatgattaaaatgtatggtttatgtaataaatttcaaaatatattaagtttttaaattaatttttttttgtcacattttttataattattttgtttttgttgtacatttatgaaaaaagacccttatagaaaaccaaattatgttagaaatttagaccaaacaacttaaattatccaaaaaaaaaaaaaaaaaaaatgcacccaatctacatgatcaatttaaacaaacttacaaaataaatagatagagtagaaagttgattagcacattaaacaacaaaatgttataagattttatattataataaaatatccaacctatcattacattttgacaagaaataaaatatagcatgtaataaaaatttctttaaaaacttcttaattaaaatattcaccttagaattgaaattaatatatataatttgaattttggatatctcttctaagacaaaaagtattaaacaataaaacacctacaa

SEQ ID NO: 204874 - DNA, 500 bp, Cannabis indica
tttcaaccaaagacgcatgtatcaatgacgaacagtattcctaataaaagcgatctgaccgttcattgcaagtcaaaggacaatgatctgggtacccacgtaatccctttcaataagtcgtatgagatagtatttcatccgaatttattagatacaactctcttctactgtaactttagatggcctaaaaataactccgaccatttcttcgacatatatgacagtattagggataacaggaaatgtaacaaatgtaagcactatgattggaatataggatctcttcgtccttgcatgaaagataatgacaccaaagaatttactatttgttatgattggaaaaaacaatagacatgcatatgcatgcatgcatgcatgatacgtactaatattgtattgtgttttgatcatgataattatgatctctttaaataataataataatattaatagccccaattaagatatattattattattcttcttgttgtacttccttt

SEQ ID NO: 204875 - DNA, 756 bp, Cannabis indica
ctatatatattgacgaaattgtgtacatagttcactatacacttttactttttctttctcactaccaaactccaataagcattaatccaatcaaaaaatttatctatcaaattcctctaataaaaatatataccacacattctttcactgaaaaagagttaaatattattttttttttggtcaaactattgtttttaactttttttacttcttattttttttttattgttctttttcttcctgctttctcctgcgttatctgatgacatgatcaatttattgcacttattttaatgatcaatttcaattttcttttgggttttgccatattaaagtccattattaaaaaggcatatctcatgtattgatgaattataagtacaataatttatgattatggactatttttcttatggtatcttataaaattgatttaatttttttttttttttgaggtaaaatggtgacattttattagcaaattgaatcaaccattacaatgtttaaaagatcatccggagcagtactctcggtaaacatacgaactgagtgaaaacaagagctgcgagccatataatgggcagccttgttagcagaacgtttaacaaaatgaatctgaacagattttaaagaatcaagcaactctttgcactcttgaatcaccacgccaaagggggaacgtagaagaactgaagagtgtacagctggacaaccacaagacaatcggttccagctgaacatcatgccactgctttg

SEQ ID NO: 204876 - DNA, 535 bp, Cannabis indica
acagcccgtccaagaatgaaaagccacccgtgtacttgtagctatttagtcctttttcagacacgggacgaattcgagaggaagaagaatttttataaaaatactgaattttaagtaaaaatttataattttactgataaaaaaagtgacatgacaaatatgatgacatgtgttacgagacttttcaagactaaattaatagatgatacgtaaagtcacttgacaaaagatataattccaaatgaatgggtgatagactcgcggtttgttctatgtatgggaatgagatagagtaactactctaaggatgtgttttatgtatggggttaagatagaataactacctccaaggatatgttctatatatggagatgagatagagtaattattccttaagaatatgtcaagtgatcaatccccccaccacccccaagggtaggtaatctaccctaaggtggtggctgactaacttttcacccctacattattattgtcctggtatcataccatatctatgtatgaacatagatagtgc

SEQ ID NO: 204877 - DNA, 1335 bp, Cannabis indica
caaaagtattatcaaattccacctatataatacattaatttgcttgtgcgcataagaggttatatctttcaacacgggtaaataagtattatattgttattagttttaattagaatatattaacggtaaaactactaaaatattattattagtaacatttaatactacaaaattttttactttaaaacacaacaatatttatgactaaaagtaaaaaagttctgactaattataaatcataattcatatgttgccattaagaagttcgcggctaaaggtattagtcataaaaattacaatttgttgtgactaaatgtatttcagtcacaatacttgttgtgactaaaattaaaacagtgacaacttgtgtctaaatactatgttttagtcacaagtaactttttgttgtgactaattaaagtcacatttaatcacaaaaaaattatgttgtcatgaaaagtagctattttttgtagtgtaaaccgattttttagtggtaaaactctcaaaatctcacttctgttagctatttatccctcccgatcaaaatgttatgttaagttgcacagtggacataccacagtgtacatgtggcaaattttagtggaggatatattggcgaaaaaaaattacctgaactctatatgatagtgacacttaattacataaattgattttttagtgttaaaaccctccaaacctcacttctgttagctatttaccccttccgttcaaaaaattatattaaatgttacagtggacatgctatagtgtacacgtgacaaattttagtggcgaacattagtaggtagggatgttcataaaatagcaaatctaatccaatctgcacgacccaatccattccaattcgtaaagcacaaattggatgttgattgacatataaaaataaccgatatctaattcaatccacacatatttataaaaaattatacataagttatcattttaatgtaaaaaaatagtaatttaaaaatctaatacatataatataaatatatttcaacttaatatatcaaatatatattctattcttatatatatatattttttctacatacaatttaaaacaaaattaaacattactttatacatatatatttttttcctttgcatttattattttattttattttaatttattgtttggagacataaaataataataatttattttattttgttactgttattatgtgaaaagaaatatttttccataaatattaagtaatttaatattgaaagtaaccaatccaaataatcaattcaatctgcattttacgtagtggattagtattgaatttagtcactattaag

SEQ ID NO: 204878 - DNA, 811 bp, Cannabis indica
ttttaagctatggtggtcccaagggtcctatatataaaggccgatagcatatatcgatacatacatacatacaatcaatcaataatatataatatggagagcaagattaagattagcaacttggtggtggtggtcgcggcggccatggtggttctgatgcttgttccgtccgcctatgcaaaatgtaagaacaacaacaataataataataataatattaaacttgtcacttcatcttcttctgcagctcaggaactcgttaatgagaatactaatgaggctgaagtcgaaactgatgagactactatatcgatgatggagaagactaattataagattgcctcatcttcaccaatagatgaggccgtgtcgaggatgttgagccgccaggaagctgaggggctccgtcgcaatgatgggtgtagtggttcctcttgcaatattctcaacgacccttgttgcgaaggatgcttttgtattcctgttggaattctagttggggtctgcgctggttcatgttgttaattaataaataaaattaattgtagtacgtactgctttgcttagttagtacctacctacaattactatataacttaaataacaggatccatgctatacttactatatgttaagtatatataatcctataaataatgtactcatctttgatccatctttatctatctagctatgctattttccccctttctaattataactagttggaacaacatgtgcgataatttattttgaaagaaaacatataacttttatggaaaactatgagtaactatgttagcatatcgtt

SEQ ID NO: 204879 - DNA, 681 bp, Cannabis indica
ctcttcgttcgttccaagtgcattgcgggcgagatcatgagctgttgtgtttagagaccggggaatatgatgaaccgtaacacctggaaaagaaaacaaagaggagactatcatggtgataagaccggagagggctgaacgatcaggagaatgcttgtgaatgcggtggaccaaattctggcagtctgaagcgataacagctataggaaaacgaactgcttgacaccaaagtaacgctcggtggagggcttctgcttcagcaaagattggaggaagccctgaagatgtagaagctgtaaaagtggcaactatgtgaccttggcagtctgtgacagcagctccataaccatgcttatttgaagaaatggctgcatccacaacaagctggaacatggatgttggaacttgaagaaatgaaaggggtgatgggttgtagaaggcgatgaagcgatacggttttgagcattcctgtattcctgcaaataacaactgacagaattctccaaactgaaatcagtgggactattatgttgaaatatagctttgtttctgctgttccaaatggcccaaagcaaacccaaaaaagtagacaattcaaatttatcaaaacaatcaaaacctctaagcataaattctttgatatcacaatttttattaataagataaaactgatgaaaagaa

SEQ ID NO: 204880 - DNA, 1040 bp, Cannabis indica
attctcttgagaagttttgcaattggtcgagataacaagtaattaaaaactttcaaattttttagccccaatacaagtccaggattggaaagaaggatccaacaagcaattagtattggagattataaatgaatatttgctatctttgttgtctttattaaaaatccgacacaagtatactgatttcaactatatttgggataatttgacctccaaactttaaaggtggaaggttaaaactgtaaataattaatttttgttattactgtttgtaactgtattgcttaggtagttagttagttagttcctttcttttctctctgtattaaaactctctctataaataagattgtaagtctagttgttgattagctttgcttttggctaatctcaattagctctgtttttcattctttctctggttctatgttcttacatggtatcaaccgccattgactgccgtcaatgtcttcgacaactgatcctgcaactgtggctcctgccactgctccaatggcttctgccaatcaattcgctgctactgcactccctcaaaccccatggaatctgttttccaattctcttactgcttccctcactttgaaacttgatagattcaagggggaagagcttctctcatcaaattggttggtctcaccatgcaaacaactaagttgtctttccacttgggagctaagattgatggtatgtttacaaatttttggtgggacaataagaaaaggaaacaaagctttttgccttgaatcttagtgtagcttgtgtctgtcgaagtctcataatgatttgaggttcgtaaaactgatgagatgaagtaggatcttttggctaaatagggttggcaattcctctcgagcgggaactcacattgctgtcaagttttgagggccaaatatttgagacattcttcgttcttcagctgtcactacaagaactcttattcttagtttttgaaagaatgcgatcaaggcataagatactcttagtagaggagcgtgtaagattgtgaggttaggccataa

SEQ ID NO: 204881 - DNA, 1365 bp, Cannabis indica
gacacgttgtactttctttggctgggtgactactatcttcagtatcacttatcattatttttcatattcatcagcgagatcacactctacttacaaaaaacttgcactgtctacgtctatatatacaaatgaaaatagctactagctagctactgtctaaatagatcacaagagtgagcttaattataacttgtttcacgggtctgatccatttttaaactaattataattattgattacatgcatatccatcatatgtgtgtctaccattaataatagtaatatataatacttaattgtatattaatatatagcttatattagaatcaacatattaattcgatcaattaatatattaatatataaatacattaactatacatatacatacttatataaatgccttatatatattaactcttttaagtcaaatactagctagacatattaaaagtatctctacgactcattatgaaataataattataatatatactactaacaactgtgttaataaaaagaaatagtaattaaagattggaagatattaattccaacaattccaactgtgtgatatctatgatatatattatatatattgtacatatgcctaggcatgcatgagtggcacatagaatcttagtcaactggccaatatgcgcatgtgcgccaagtgtctctattttatatatgacgaaggtatatataactgaagatccaaaacatagaattcaacgagcatagtataatagaggtttaaattgtaggatcaaactcatgatttttcaacaatctcgagatataccatgcacaaaccagaaatttagaacacaatataatcacaacacatgatgttggacatcatgatattcatatcatatatttatttgggtcaaagatcttaatcaaaactaaactaatccctaaactaaattaattaaataaataaaatgtttgatgattagcttgaatgtggttatcagtgaagagtttttcttcatttgatattcactgtcgttttctagctagatcttactatcaataatggaatctcctcgagacactgcagccaaccgaatctgtaattatcagttgaaatatttatatataaacgtatataaatgttctgaaattttaatcggtgttgtccatatatatatatataaatcatcgacagaagaaaataaagactgacaatttaccaatcaaggtgttgtggattttagttatagctgtatcacgatcactatgtgtatatacatatatatattatataaatatatatttgtatagattcccgacaaatgaacggatggcaaattaaaatgcccatatatggaattataatttatatataaaataaat

SEQ ID NO: 204882 - DNA, 1495 bp, Cannabis indica
tttttttttctatttttcaaaataggacataacaaagccgctcattgtattgctagaaggtcttgtttaatatcagattgtactttcagtaaacttgatgctcttctcaccttaaagtagtctattatatccattattcactgaaagttattgaataaaattacctaaattcaaaaaaataaaacaaataatattctaatccatcatttaattattagtagtaggaataataacaaatgcattaggactatatatagctagactagtggggagggtgtggagatctcatattttcatttcatcaacgtaggccctatctattattatgtgatgatctcaatattcaacataattactgaatttggtagctgtaatatacaacatattattgtaatgtacatattgtttaataattaatttattttttttgacaaaccatgcataattgcatattgtttaatattaatttacttatttatttggggtcaaattctaaaaacatatataaataaaataatagtacctatctaacacgcgcaagggctaattaatatagtggccaccccaccacaagggctgttttttggtgttaagtttggagtaaggcatatgcctactttgtcgttttggtgaagatatttctttattattaatattattattttcattttttctctctttttttaaagtatattttatgtgctttgcaagttgtacaaagcactaaaaactgtggtgtctactattataaaaaaatatatatatatatattaaaaaaaaacttattacagcagagagacatttttatatataatgttaagtttaagcctttacatttaattattaaattatataatttaaagggaatctttccatttagagacacttcttatgttataagaaatggtcacttgccatttacagaacaaactcttataaaaacaaaagaaaacaaaacacaccaaaaagagaataataataacattatacatcaaattaatataaaagtatttgttattacataaatttatatattatttaactaaaggagatggacaaagacttctttctctttctttctttttttgggtacatttttagtgagtgggaaaagagtcattagagacaaacaaagaaaacacaagttaataagcataaaagcagctggctaagtatcaatggagagtttatggttcacaaataagttttcttctcttctttatttgccagcctcaaccgaccaaaaccctaactagaccttattctctaaagccaccttatttatatataatgtatacatatatttatatatagtttatggttataattaaaaaggtctctctttaaacttgggtatgacatttgtaaaagaaaatgttattgttttatgttggtgtctaatataggtaacctacctaacccataacctaaaacctatatagttcttttgattaatttagttttatatatatatatatatatgtaaaggcaaccc

SEQ ID NO: 204883 - DNA, 1168 bp, Cannabis indica
aacaagaccaagttcaaggatgagtttttttagactaatggtctttctcctatcaacacaattgcattttgcattgtacgtaagtgatttttgtctcaaaaacttggttttgagttctttttatatttagaaaattgaagtcgcttacttatttcacttattatgttgtagcggttaccaaaagaccaatctccacccccaagattactaagcgtcataaaatcttgctaggtcttccttttggactacggtctgcagatttccttctgaactaggccaatttgaggaccgtcagcctccttggcttggaccagttcacttggccatgagagtgacaatgtcacttggccttgagaggtatatttttttaagaatatgaaatggaagaaccggtcacttctaatagacatctcttttagacattgcttagacgattaagtgacaaagtgggtgtggtacctcatcgggtgggtggggtacctcgtcgggaatctcaaatggatcaattttgataagctttagaggagagttctttgaatcctttagattatatgggtgtttgttttacctagaagtatagtactagtttagattctattcaagaacgtttggatcgaggttttgttaattcaacttggagtattagttttcctgaagcaaggctgtctcacttagatttttttagttcatatcaccgagtacttagtattgatctaggtttatgcccaacttcttcttctaaacaccattataaacgaaagaggtttcgttatgaagcattgtggaaggaagatcacgaatgttaccaattaatatctaactcataggtgccttcatttgaatttttcaccgtagatactgtggtcaccaacatagcttcttgatctaaaaagtttggctttttggtgttcgttatcccaaaatatttgaaatactacgcaaaaattatcatcaactgaaaatatagatcaccatatgtataatagggaggaagtttcacagttagaaacttatttgtccaacctattagaaaagaaagaaattgtttggcaacaaagatcaagaatccaatgattacaaagtggtgaccaaaacatcaagctttttcattgccatgctagtgttagatttcaaaacaatcttgttcgaggtagttaagatttgagtt

SEQ ID NO: 204884 - DNA, 766 bp, Cannabis indica
ctaaaaatcattctttaatagtttgttattttgatcaaaatggttgattattggatgatttatttatatttatatttttttaaaaaaatacaagattattttaaagacatatccactaacatttttgagtgaaaaaatcaacaaaactaatgatgatatccttatataatttatagattttggtaaaagtgatttgtatttatttattttccttcatgtccctttcatctgaattttgatggattttcctctcatgaaaataaatgcaaagtagaaaagttagtttacttactttcttacaagatgacactccactaagtttaaagcattatctaaaacactaacgataaatatgaaacatggtcattctactctctctctcttttctttctaataaaatacataagatctattaattaataaattcattcaaaacaatagaacgcacttcaaaggaacaatctccaactgaagcacacgacctatagagaaacaagaatctcttatcaagcaatgagccaacttatttgcagatcattttacaaaacacaaattgtaaaagcataaaataccgctctaaatcgcttggacacacaccaagccatctgtttcctaacatgactctatcctacgaatgagttgcaatccaactcaatgcttctttaatgcctattatctcaacaatttcgggttgaacacacatccaattttccccttcttgaatgcttctaccatagcaccgtgataattctgagctacacaaccc

SEQ ID NO: 204885 - DNA, 1354 bp, Cannabis indica
gaaaaaaaaaagtataatagtaaaaaactttgtttttatatatatgtatatgttttttttatttaaaattctatatcaaacataataatattatttatttaattaaattccgtctttatctaataataagttaaaaattaaaattcattatacaaattaaaagaagaaaaaaaaactaacatataagtaagttgtccattgtatgtaacgacaatgtaccatcaaatctaattataatataataagagaaaatgatgaaataaataaaatttaatgctgaatttcttgtagtcttagaaattgttgcaaacatcttttctttatctttttttttttttggaaaacttgcaaacatctttttttggttacattctatttttctcaacaatttgtgttgatatggctttaatgtacactagctaatttggcgtagttagaattgacaaaacatttatgtatgaattaaaatattttagctagctccataaataaataaatggattggagcaactatgtatgtggcctatataattacataaataattttctttttataaaaaaaaagtagaatataataattggacatttattaagagttttatatagcttgatgataattttcataacataataacaaattaaaaaatataaaattccaccagatttataattagaggaaaaatactattattcctatatgatttctctttaataatacaataatgccaccacactaattataactccttttctattaattcatatagctgcgaagtgcagtattgatcgacatggaaaggggtgcaaaattatgaagaagaaaaagtctaagaagattgctggtaagtacttttcttttaattattattattgttagggatgtttgttggatacattcaatatttttaagtttatatatattagatttattatccaatctaattaattttaattatccaatcgatccaatatttattggatgttaaattgcattggttgtatcgatttaatgtattttatatatatttattgctttattttaaatttatctaacattttaaatataacatttttagatcagatcatatttatctaaagattcagtatgtattaaatataattggatccataaatttaagaaaaaaaagagtaaaattttaattttattttttatatatacatatatcttttaggtataataatacatatatcataaaattaccttataatatttatttgatgtagatgaaaaattaaagtgaagttttttcttttttttttaagtaaaaaattgttaattattaaaattgagagtcattaatattaactagagtagattggggagaaaatttat

SEQ ID NO: 204886 - DNA, 880 bp, Cannabis indica
  modified_base (75)..(75): a, c, t, g, unknown or other
aattttcatggtgactatagaaaaatccattcgtgcaattgccagtgtaaaaatgcaattatagattcacctacncaaaatgcacctagaaaaaaatatattgtacttactatagatgcaattttctaaaaaacttatgtgtatatataatattactatttcatgggttttgaatccttttaatggtaatgataaagctcgtcatgcattataggcctaattaggcctacaatcacggcctaattagacttaactaaccttaaatgtgagtctaaaatacacttaaaagtaagacactcgtggaatcacctacaaaaaatgtaccagaagaaaatgtacatagatgaattaattacaggtattacacaaatgacggttgcatgacgggcctaattaggcctacatctctggcctaattagacctaattagctttagacgtgagtttgaaatgctcctaaagataatgcacctatgcatttacttatgcaaaatgcacttgatcaaagaaaatgtacatagacgaacatccagaaggcaatttcttgtggagaaaatataacattcgaaggagacgaatgtccaatataactagaataattcaaaagggagatgacgtaagaaaatttcctcattcatatgtttcacctagaatgtatgcatgatatattaacagtagacttaataagtgtcctaattgtagatttatatttacttagtcatcttatataaattttaaaataaatgtaatttggttcaaattaaatatagtatgtggtttttttttctttttaataacataattatttttatcatatatattcttcaattaataatgtatttagtttaattttattcgaacattaattatgtataacttta

SEQ ID NO: 204887 - DNA, 777 bp, Cannabis indica
gatgctcattcatcaatccttcttctcataatccatcaattagccatgcacctcacacaacattccatgtccacccatttcaaagaaatcacacatctctcaacctgaaattacagcataaaatctacaaatatcaacataaatgaattagtgcaaatcagagcccctccaaagcctctattttagaagaaaagaagacaaactcccttttctgcaccataccacctctttcttctattttccttttccttcaacttgtaaatgacgatttccctttcaagctgctcatcacttattatcgctggaaaggattagatttctgggtttaaggtttgattacacaggtacaatgggtttagggagaggaatttgcaattgggtttcttctcctttttggtggtgcaaatggtttgatcgatttttatgtggtggtgggatggtggaggagtgcgtgggtgggtggctaagtcaagtgagattagatttactgattcaagtttttttatcatatatatttaaaaatattattaatttgtttatttttatttaaattaattttatgtattcacttaattaattaggtgaagaaaaaaggagcaattatgaagacaatacacgtgtccttaataataattctgtttagtgtgtaccagcggtacaatataaaagtgtaattttgagtattaatgctataatttttaaaaattaggtacttattagcaacaaaatgaataaaatgagtatttatgcggtaaattttttttaaaaaaatacatg

SEQ ID NO: 204888 - DNA, 787 bp, Cannabis indica
agcccaaatattaaaaaatatgtaaatcttaataatttaaaataattttttaaatatttaaagaattatcaaatttttaaatctgaccaataatttttaaaaaaataattaattttaaatttaaatatcaaaaaattaataataacctatttaaaaaataaatattattaatttaaaaaatgatacttatgtttaaaatatattaaaaataatattttattttaattttatgggtttgaaaaattgcaaaaaatctgaaattgggaaaaaatcccacaaaaatcgatttttggtgcaaagcaccaaggctgcccatgaccaggctgcaagcagcctaggacgcgcgcggatggggggaaaacaacctcaggcgccgagaattctcggcatttgcagcctcaggacacgccatttgtagggtgtgacgcgcacgtctcccttgtctgaacgaggctgaccgtgcgcttcagacaaaagttgtctgatttccgcgcgcgaatcaccttgtcagaaggtgcgcgcgcctagtgctcgaccatatccacctaatttttcaaaccaccataactctctcattttttatcggaattaagttccgtaaaaaacgaaagttgcttaatttctcacaaggaatacaaataacatatttttcagaaataaaataaaaatattttcaaggaaaaattttgtaaaacacatacattcatcaaataatcacataaaccaacatgaaaccatccaaatcaacacaaacatcgttttaattcatatttcatgaaagtaaatc

SEQ ID NO: 204889 - DNA, 1098 bp, Cannabis indica
ttcggttatctattagatcgaatgtgccatcaaacaaccaagccgatccaattgaattttcaaaatttgcattcgatctgatccaattatgattggatattcaattgtattaaatcgattgaaatttgatcggtcgattataattggattggatgactttctgcacacccctaactatagcacaaacatgacccttctatgcaaataattaataaacttataggcaacaatctttcaagagaattaataatgataatgtaattaaagaaagatcatttatgtacctatgaggtatgtatttgaggcaactccaaatgacatagccaccaagtgaggatccaaggacataaaatttcttgccaatattcaacttgtcagcaagttgttcaacatcaaaagcttcactctttacacttcgacttggatatggatcactatctccataaccagctctgtcaaaatgcaacaaatatatcccaagctcctccacaacatcctaataacaacaatacataatatcatacactaaaaattcacataataaaactaatagcaaaagtaataatatctatatttattgataatatatagaaaaaaaaattatggttcaccctttcatattttctatatctagatatatatattttaatcttattttttttttatatataactatgtacaagtcgaaaacaaagtagatattatttgaatattttaaataactatattgtaaaatcatataaaaaaaataaattaatattatctaaatgtaagaaacataaatgatacaccctataccatagacacaccaaataatataagtatatatagatttataataggtagtacttttggggcaggaattctttgttctttggaagaagcaaagccatgaacaacaatgattttgtattttgctttgtgtttaggaacaccatcttctctataagccaaatgtcttccatcattgagtttgactcttggtgaagtaattggtggaccatttggtgagccacatattttgggaggtggtggttttagggctttgtaaccactaatcataacacccaacaatgctatgatgatcactataatcat

SEQ ID NO: 204890 - DNA, 1446 bp, Cannabis indica
atgtgtgcatgagttacatttgagttcataatattcagtaaggctatgagtttaaatttaagtgtgtgatcttaaacactataaataaaggtctttgattcacttgtgaagacactttatttgtgaatttctatcaaagagagaaccttactataaactataagcttgataaatccagaaagctatgtccgttattttcttcccaaagtgtttgtggtaaggggaataagtttttggacaaagatataaaacctagttcaagttctgtgattctctacttaacacttggtgttagtggtgttgagattgttctctcatctatagatatatatatactatttatattgtgattttatttattgtgtttgtaatcttctcttcatcttcatttttatatttatgtgtatattttgttaagagatgtaatattattttattaatattattattcttgtatttcttgtctttgagttatattttggccagggccagtcttaggctaagacgcttagggcccactcctattagagaccgaataaaaaaaattaataatttttaaaaatactattattttttagagaaaaaaaaagcctaaaaacttattttttttttagggtctaattttactgaaggccgcccctgattttagtattggtctttctattgaaacactaataaattttcaacatatatataatttataataattagtcaaatctctttttatatttaaatatttttattatgtaattgataaatatataattagtgtctcaattaaatgaatatgcaaatgcagagcatatatatcaaaatgattcaaaattaataattttaatttataattagtacttttttaaccttggaattggaacactttggtgtaatttttttttgaacatttaatgaaaaaaaaaaactaattattaaaaatagcatgcggagaatatgccactaatcatgacaacaacaaaaaaaaacgcactctaattacaattctttgtataattaccaatggtgatttatttatttattttatttatttttagggataaaatataaattagttatatattacttaattataaattagtatattagttacagatatttacataattaaaggaatatataaattaccttttctttagaatcatctcgaatcttcccgctttcacaatgtcattaatgtacataaaaaccacattcatatctcaatacttgttttgaatagggtataggggttacttttagaaactctccaagaaacgtgttggaacctatgagcattttatatgccatatcacacaacataaataaaacctattaatgctacatgcccaaaacaaacctaaagtcataagtgacttgaactgagtaatgatatgatcctgaaacttttattagaggtgtgaatacatatgttaatgtgtgtacaccacatac

SEQ ID NO: 204891 - DNA, 1435 bp, Cannabis indica
gctcgggacccaaatggagctgtcatgtttgcaacttcttcgcattcgatgggtctttccaatgcaccctttgctgaaatgataagtatcaaggaagccttaagttggataaaggcatcaaacttgtcggagtgtatcaccattgagacagattgtctcacggctgtccaagctttgaactgtcagcttgatatgccttctctgtttggcgctatcgttcaagaatgcagaagttttctttctcttttgtctaatgtttcaatttgtcatgttaagcgatctgctaacaaggccgcccactgtttggctcgtggctcttgttattggtctggtcgtcattttactgagagtactcttcctagtactcttaaatcttttgtaattgcggatttggtttgctaataaaattcccattcccattcaaaaaaaaaagtcattttctatgctaattaaaaagatacttgtcttttgattttttttccttaattaatttctatatttatgtaaggatatcataatttcaattttcttagaaaattaacgggtagactagggaatagaacataatttaccagtaattcacttttactacatgataaaataattacttaaaaatcatacatataacagccatttgaaataggtcaaaacattaacaagctactaaatcaatggtggagtaaccacttcttttatatgggtgagggtagcggtggctccatttggttaaagagggagagactgagaattgtgatgatgacctatctttcaaatcaatttactttaattatttagataaaaaattgctttaataaaaaaaaaaaccagaagtgattgaggattagagatagaaattgggcaattaatgtaccgtaaatataaatcccgtccctattttagctacctatttatgcccatattctcgccccatcctgtttaataaccagtgaatctgaagtagggtaatactcattcgttatgggaaactcatcggatatccattaagataaaaaaaaaataataataacttaaaataatttaaaaatatttttaaatttaaattaaacgaatattctcacaaatatttattatgtcttcataatctataaaagattaaagacaaatctacctaaaaaaaaaaaaaaactaaactgaatagaaaattgaaaataaatttatctcaaagtttaataaccatatatatggtgcgactaacttagagtattacgtacacacttgcatcatatttagataatttcttgataatactctcgataatactctctaggtaattaataattttgatttataaataatatatatattatatatacgataaaaataaaaaataaaaaaaaaggaaaatatatattaagattggatatggtgcgaattgtattatacccgtcctcgtcctattctcgctttgggtatc

SEQ ID NO: 204892 - DNA, 1048 bp, Cannabis indica
aactaagaaagtaataatctcctaattttactgattggctcttgccttactgtaataatctccttctcatcggcagcaagggttggctcaatcaaaattcgatggtttgatatttttaaaattaatatttataattaaatttgtttagtaaccatttatgggtaatacccattaagaagtgttccatatatatatatcaaaatattgtattcagaaaaacaaaaacaaataaatattgaaatatttgtaattactatattattcctctcaactttttctatatattatgccttttttatttttggattgactacattcaaggtgaacgattttttaaaaaattccttctaaagttagtaatttggtttggagagcaattttgggtacattgcaacatgtatttaattgtccgagagatatgttcctgtaagtagcatttgtcaaatttgtaatacacgtgatgaaattattttccatgctattatcgattgttctgtggcttgagcttgttgaaactgtttggtggtggatctttataattggtctggtactaattttggcactggtttatggagctcatggctaggctaggtaatggaactttaaggttggtgtaagtacttatatgtattggactttatgtggtatttttttttatcaatgtaaatgttgatggaactttacttaaattagttggtcgatttggaatgggttgtttagcgtgtgataatagtggtaaagtccacaaagctttcaccgtgggaaaaaggggtcacgttaagcctgaaatagcttaaatcatttatatcaaagaggcattgagttggataaaggattatgctaaaaacgaacaatttaatttgcgtgcaagctattaagagtaatttgtgtctttaaaatttcgtttgttagttcatgactttatgaatcttttgaataatcttaataaaacgatttgtatataattgttcactgattggtgtgtaaattttgtttctctccgaattatatttttcaagcttctaatttattgcacgaattacacatt

SEQ ID NO: 204893 - DNA, 1075 bp, Cannabis indica
ttctcttcgtacttttcatcataattgtgatgatacacaaattaggaattgaatgttttttttcttctataaatacaagatgaagaagatgatgatatatatatagagaggatttattaccaaaaatatcctaatttgaagtggaaaaggcatttttaatatatttattattattataaggaaacgattgattaaaaaaaaaaatctttttaaattactttatttatctttttttcgtttttacgttctctttttagaattttcaatttaataaacccttatttacataaatatttctttcttgacttttcaaattcatttttacattttgttctgaatttatctctttcaaaaagaaaaaaatcacaacttttttactcttctccattgtaaagatgctacccactattttgtcgccattgtttgagtcggagctacctctagaccagtttctgaagagaaatgcaagctcagttcgagcgatgactgccagccacgccatctccgacaacaccgacctactccaactgctcccagcgctgcgattggtggtgacttccagttcggccaaccatcaagtcgacttggctgagggccgtcgctgagggtttgggtggccaatattgattgatgtgcttagcaaagttgcctccgaatcgctgcgtcagacatgggttctgaaaagtcaaataggagattttcctcttgctcacaaggtaagcactactacttttttttagggaaagatgcaataattaagaatatcccatatattatatagctgtaatttaacaaaattaagaatttgtcaaactaaattttgctaactccacattatcaattcaaattaccatttacaattacttagaattaagtctgacaacttgtttagttagataaaattcaactttttcttttaggcatatttagattttgtaggttgtaccacataaagttttttatcattgcaaaataatagtaataataatagtaaaaagaatcagggttgttaattggctgtgaagttggtaaaaggcttggggcatttggctgtgaacttaattgctcattcaaa

SEQ ID NO: 204894 - DNA, 1142 bp, Cannabis indica
tagtcacaagttttgttgtaactcacagtaagattttttatagtgaatcttaatcactaattatcactaattttatttgtagtcacccaatagtcattaatcaaattatataaaatttaatatttaaaaactaaattaatattttataatatttagtcactaattatcactaattcaatttttaatatttaattatgctagtagtgaaatgacacctttaaatagtaataggcacccgctatttttagtatttctctaaaaaaatttatgattagagagaatgtaatatctaaaaaaatgaacaaaataaatgaagtacttttccataaatataaaaaagaaaacatgaattaataaagtgtaattattcgttcatattttgatagatttttaattacacaattaacagaacatttaataattaccaaaatactattaaaaggttaaaattggatattattaaggacaaaacacacaaaaactctattttgataattacattttttagtaaaataaaaagatatagcattgtgagataaaaaatcaaacaaaaccatattcatactttggtcaaaactaggaccgacaaataattttgcatacatactatatgacaaatataattttgtaatttaatactaagtttcaattattttattttaataaagattttgagacctttccgccaatatgtgctaatttttaatgttagggtcttcaatctgtttcaaaatatacaaatttctcaatgtgtacactcacaaatttctcgatatttggccttgtaggattctttcaagtgtcacgttcagtcctgtggtttcttaaaggtcgttcgttatacccacactttccagacccaaacgtgaggaaagtatattagagttagtcccacattgctaatgtgtgcaaataaattgtgatatataagatattgaatggactactcctgcgaattagttttgagatgaaactttattcatcttatcccaaattctaacatgttattagagccacttgtgatccgttatgagcttaaatgccaccgccgtttgtgatttgttgtgagccaaagtgctgccagtccaaaaagatactcctgctgtctgcgcctccccccccccccccctttaacctccatt

SEQ ID NO: 204895 - DNA, 901 bp, Cannabis indica
atgacttatctaagaaaagatgacaaaatatcaacaatctatttaataactatctatgctttatatatgttatagataaatattctagctgtctgcttaggttctgtctgactttgaatgactaaaacaatacaatagtttttgggttagttatattggagaatattgtcccacatggattaaatgtgaaagtattgagccatatataagaaacatgggctacttcactcattgccaattggttttgagttggaaccccatgattctcaacatgatatcagagccatatccaatgttaagtattgagtctgagctactccactcattgccaattggttttgagttagaaccgttccatattctcaacaagctatgaccaagcagagcaagagattaatttgattatataattaattagcggttaaatgaattaaccaaatatatggctaagaaacaaaaacaaaaaaaaaaacgttttctcaacctgtattattttaagttgcaaaagtcagaaattagtgaagctgatcttaatacgcatgcctatttgtcatattattttgtcttagaaaataactaattcaaaccgttgaacttttgacacagattatatgcatagtcctcttaaaatggttgcgtattgcttgtctttatatttaaaattatatatatataaaactaacaatacattatatatgtaagtaatttttaatggaaaattctacttttgttaatagttcagtaaaaaagatttattaatctatatgttttttttttttctttcgaaattttgagttcatgtgatgtgataaactattggttcatttatgttcttagaaattttgtgttttctctggtaaggaatctgcaccttatgtggcagtacttttctaattaatga

SEQ ID NO: 204896 - DNA, 782 bp, Cannabis indica
tataatatttacaatatttttttttaccatattagacattcactccttctaaaaaaaattaaagtttcagtttattccaacttaacatcatataaattttctaattcgatgcaatcttctatatctctgccacaaactcattcctccaatctacaagctatatcacattctttccctttctctctggttctcagccatcctgtcgtatggccaaatccaatgataatgcacgttgttcataaatcaactgacaataataacaaaatgttactttaccttgtttaccttttttaaataattattttccacatattttgttttttttttatttatatgatgtcgtttttaggtccatgcatttttaaatgacatcctagcatgatcattattccattcatatataatacttgtattttttttttttttttgctaatctgaaaaacttcatactaaaaaagactaaaacaccaagttcatagtagagaatccagagacaagaggctccacctctatcaatcaatgttattctcagtgatagtttcactatgtaattttgtcccacttgtttcaaatattttttcaacacgatgaggaaagagaagtaaaaaaataaaagttaacttatctttaattttataattgttattagattttaaactattttttatataaattttaatttttttttaaaaaaaaactaaatgacttgaactaatttgacacttaaagtattgaaaataagattaagtgtagagttatgtctaattagatgattcttactc

SEQ ID NO: 204897 - DNA, 2267 bp, Cannabis indica
tctaaaaaataatagtaaaaaataacctaacactaacaaaatacattcttaaagttaatctttatttttagttccacatgcgtacaaacaagtccctccaagaaatacataagtgaggtctataatacttggtgaattataagtgaacaagggaccaaagtccgcacaatacttagggggcacccacaccgtacaacatcgaacaagcacaaatatacttaggccaaaaaatttaaagctttgctaaagccaaaaattaatggctaatatgtgcatccgggcacgcttccaggtgaacataaaatgcataaacatgggattaaaggttcccagtcagctacatgttcaaaaagtcgaaagaagataaagccaagattaaagaccacttggtcagtcatttgtttgaaagtaaagggccttaaggccatagtacaagaacaaaaaatttgttcaaatccataaggccaaggccatgcaggaaccgtgcagctagagaaaaaccggatagagttcttataggaataacgtactgagcaaaatctctaaggtaggttccaagccataggcagagttccaatgtaggttccaagccataggtggagtttcgatgtaggttccaagccataggtagagttttgatgcaggttccaagccataggcaaggttctgaagtagattccaagccataggtagagttctgatgcagattccaatccatgggtagagttctaatgcaggttccaggccatagaaagagttccaatgaaggttccaagccataggcagagtttcgatgcaggttccaagccataggcagagttccaatataagttccaagccataggcagagtttcgatgcagattccaagccataagcaaagttctgatgcaggttccaagccataggcagagttcctatgaaggttctaagttgtaagatagagtttctatgaaggttctaagttgtagatagagttcctatgagggatccaagtcatggacaaagttccataacaagatccaaaagtcgcacatcgtctctaataagatacctgtccaagactcgatcttgttcatcaaaaagtcaaacattatacatcttaaaattatcaagtagattataatgtgaaaagactacgtgagaatcaaaaagtttcgaaaagcttaaaaagcttgaaacttatcaatggcagattcaaagaagagatgtcgaagaaaataagatgaggcctatatggagagagaagatcaaaggtctaaaaacatgtcatgcaaaaagctagatacttggccaaacaaggttgctcggtaaagatccctataggcaagatgacagttgaaaagtgctaatctgtacaacatacgaatagggacttataaggaaaatgttatctcaaattttgttcacccgatgtggcatgtccacataagtcaagactggggacacgtggaatataaccttgtcaatagcaggataaagtcatcttacaaggcatgtcaactatcaagggttttaaagcaattgagcagaattgtcaagcaataagcaaaaggagttaagaaagcggtcaagaccctggataatcatatatggccagccaaagcgtgcatatctggccagctaaagaaaggttatatgctagacaagtcttaagtataggctggctagccaaaaagtgattgtcagaccaaaaagggcatgttcaactaaggaagactgacctttgtaagaaattttttacaaagaagctagaaagactggccagcacataccaaggctggcagacacatggaaaagctgacatgcacatggaaaagttagcagacgcatggaaaagttggcatgcacatgggaaagatggtatgcacacataaagctggcaggcacatgctgaggctgtaggaacaatacttggccggccataaaggagcatgtgttgcccagcctctaacaaagggtaggtcggctagctcccatgttggtagacacaattggtgtttctgcaactttcaccctagatggacaatggctcactctcagttgtgaatccactccaacaacccacgaaagtaggggttcaactttagatattacctttttatagcaattaattggtattttctgtatatatgatatgtgaaaaagaggtgatatatcttccttttacgggatctctctacctatttgaattagatcttttgtaagccctacactatataaagggtattaggtctctctaaaatcctaagtcattccaagtcactcc

SEQ ID NO: 204898 - DNA, 635 bp, Cannabis indica
agcgtcaaccaaaccacccataccaacaaggcgatctcgccctagcccatcatatctcctggaggtagtactagtagcaacactctgactaagagcatctctaatagaaatactttaaagaatgtttgatgacatgaatataattttaatatattttaatagatatttatcattaaagtgaaaaagaatgtcaaaaaagaatattataccatgaaattatttacataatttttttcttatttttttattattattttgtcataaggtaaaaaaattcaattatttaataatttctaaaaatatttactattataatatttttaaaacaaaaaatgtcaaaaataatatgacaaaaagaaaatataattctatatttttaattgatgtgaaaatttttaacaccaagaatgccaccattgaaaatgtttaacactccaagcaaggaagagagagtcccctttcccctatttttttttttttttttttcatgatacttgacccttggttttgcaatttcttttaccaaaaaacttaaaaatcataaacttgtaatgactttattttatgtagaaagaaacttgtaatatataataacctatattcaaaattgttaacctcttctttttacaagtcac

SEQ ID NO: 204899 - DNA, 795 bp, Cannabis indica
agactcccatgccactactcctgacccaattgttgaagctttgcggttttttttataaaaatgctatacatactgctgcaatttcctttagaatctttttaggaagtttccattaatctgacttctaatggggaatgtattggtgagcagtatagagtttgatcaacatagttgacgatcctgcaaaagaaagattcctcgagctccaacttttgatccttgttgatattttatcacctagtatgctacattccgtggctgaaatcttttttgctcaagcaggaattccatagtatttaaaaggtactaggctttcagcaaaacctaatgcatcaagcactctttgaacttcctttgaatccattctactatagtatatagcagatttggacgggttgggatttaggcttgaagtattgaaaactagtttcaagccctgcaacataaagtagatgctcttatagtctcttttgcaaaatcaaagcacatcatttgcaaaggagagatggtttagcttcaggtcagcacatttttcatgaaagccaaagccatctttcttccctacatttttcattatccattagagatactccatacctaatacaaataataggggagacattggatcctcatgtgtcaagcctctccttgcttcaaaaaaaaaaaaacatgaagggtgccattaaatagcagagagaaacgaggagtgctgatacaagtcataatcaggtgtatgaatttgctcgggaacttgaaggcgtattgtcgcaaaaattaaactaacgctaatatcat

SEQ ID NO: 204900 - DNA, 1530 bp, Cannabis indica
gtatctagtatttcttcctgctacgttacttagattggaaaccctcttcttgttatttttatagtaaataaaaggtttaatttgggtgatgaaaataaattatctcaaggacgagcctatatatgtgtggatagatatatatttattattatttcaaccatattaccactaacaataacaaaaaaaagaatctattacttttttttacgagaggatttttttataaatcaattttgtttctttatatatttaagtaaattatataaataatttcatttaatattatttgattttattaaatatcttgggtgaataatatgactattgttaaaaaagtggataaaatagagtttgattaaagatccaaagatactttgcctctagcaagataccaagaccatttaatttaagtaattacttttcttttcaaataaattattattttttatatttttaaataaataataggaacataaatggtcattggaaaagtattctttggttggaataatgaattaatagtgtaatagaaaaagtaaaagattgattttacattgataattgttaaattaaatttttgaaataaatgacacattttttttttgtaataaactaaaaagcttatataagatataaaaaattttgtataatatataattttatataaagtttataaactaatatactagcttttgtttgtctatagctaataagattgttcatgaattagttgtgtatgtacttagagttatgtattaaccgtttattcttattaataagagtgaaatttcaaataaaaaattataaatatttatgtaaaataaagagaataattaaattaaatgtcaaataaataaacttttttcagagacattactttaccttccgcttccacaaaaaaaacaaaaagttgaatatcctctctcgaacccaagaaatcaaattgatgcgaatcggtatgaatcttttgtttcttagtgtatgattcatttttctttgtcaacgtaccaagtcggctctagttttattttttatcattgtcttatgattcaaccttgaatccaaaaaataacgaatatgaaataaaatatcaaaatcatgcattgtttctagttggatatggtaaagaaattataactcaccagacttaaaaatgagaaatgagaataaatagaccatatttatgatgaagtaaaatcatattggattgttaggaactcttaggaactaagtgggaaagaaatggttttggacggattgcaagtgatttacccattacgacatggaatgtagaactggagggtgaatagcatctttcttgtttgattatatcgcaatggttctagttttattttatatcactattgattttgtatattacccgaatgaattgggtgcttctttcaaagtggtaatactgattttttttttactatggtctatagtatacatacatttatttaagtacaacaaagtaaagaatataaatgtacttttatttctaatataatatatatttttatttttatg

SEQ ID NO: 204901 - DNA, 1627 bp, Cannabis indica
ttattatttctcttattaattatatgaaaattaagttcacaaacactcttattttataaaatggtattaattcaaacaaatcaacaaaaagtatggctaattaacatttttgattccgaattttgcatgccaaatcatgttttcgaatttttcattaaaaattttctccggactattgagattattggatttaatgacttatgttcaatttcattcaattttaataacgtaataattgttcttgtattaaattatgcccccgaacttatggaatcatgttctcaaaactttgacacgtataccaaattgtgttctctaaactttcatccacatcagttttctattattaaatttaaataaaagtttttaaatttaacaatctcaactgttaaaaaaaaatttaactatgtgaaaagtttaaaaaatataacttagtacatgtgaaattaattttaattttaattaatctatatatcaatgtaaatatatatatagcttcttcttaccattgatattcccaaagcttgatattctttacggcaaatttctgaaatatatgcctaaaagaaaattacattcttaaaattaatacatgcatatgaattgaaatatatcaaattaaaataaaaatgaagagcatataataatataatatttgtaccatcatagaaccaagtattccacacatacttccaaggagaaatcttgttgaaagtgccatccaatagtttatactaagcccaaaaaatgtgttgaaaattaccctataatcatcatcgtcataatacatatataagaaaaattgttaacactttaaattaaaatcattttataaaaactcataaaaatactaacactgcaattatgccacaaagcataaccggtttgcgaccatatcgatcagccgttattccccaaagaatagaagtgagacctcttcctaacaagaatgcacatccttcaaaccaaaaattaacacaaataattacttaattaatcatataatccatataaatttgtttttaatccaatcatacacttaatatttaatcttttatatattaatattaatacgtatttaattacctagaaagccagcataataaccaatgtcttcttctttttttgtcaataccgaaatcccttatctaattaataaaaacatcaatttgataatcatgaataatcaaacatatactataaattaattaaaataatttcaaacaaaaataaataaataaacttatatactcaccatgaaatacatgaaagggaacattgatgttattggcaaagctgcgaaaaattaacaacaaatcaaaaagcgatattatagggaaattaacatggtatactaacttttgccattttcttacaaaaatactgtcaggcggtatttttactttttactatgtttttctataagtttcatactgctagtatactgtgttaagttttcactagtattctactggtgttttactagtgttctactgttgttttgagttgttctgctctgtattttactggtgttttataaaacacaacatttttgaaaaattttccgtgtgatgtatttttgtaaaagttaaccgaaattccagtatttttgtaagtttcccatatt

SEQ ID NO: 204902 - DNA, 571 bp, Cannabis indica
ttaatttttatatattttgaaatggaataatcattcaactaaatggttgtaatgccctgcttcaagcctctaatgggtatcctcccacggatttaattatagcatttatatacatcataactttggttgtttcctggcactacaaaaaattagacttttagtcacaacgttttagtcacaatgttttagccacaataaaaataatgactaaatgtattttgtcacaactcatgacaaatgctatttagtcaatgaattatttgtgacaatttttaaaattttaaattttataattggtaaaaggttctaactaaatgttgtgactaaaaatgcattcaatcacaatcataaatatttatgactaaaatttgtgactaattatcatttagttaccaattttttagattgtgactaaaactgtcttttagtcgcaactacttatttttggagactcatttagacacaacaataattatttccactgtcaccaaatgtattaaaataaaatttaaaatttatatttacaatacaattgaaaaagaatactctaaatccattctctctctctctc

SEQ ID NO: 204903 - DNA, 951 bp, Cannabis indica
atatatatatatattataataaggaaacatatcttcaacaaaaaaaatggtgaatctcatatatattttgatatttacataaattatttttttaaaaaattaatatttacataaatacttatattaagagataaactaaaattgagaataattcattatcttacaaattttatattattttgtttatttttgatatatggtactttaaataaaataatttttttagtggtagtttgtattttttgatttgatattgatggagaaaataataaaccaattttaattaaattttgtttatatctttattgaatttacaattaataatatcattatactattaaaaattatcattaatacatatagattttagaatttatacatagaaaaaggaaagtaaaataagaaaatgaattaaatggataattttttattacataaactaatatttttaaaatgaggtatatttatgtataaaattttgaaatataaatttgtaatattattgtacattttatagtataataataaaagaagctaatattttatggtaactaagaatattgataattttacaaataaattataaataaaaataacacatatttatgtggcatgtaagtaatttcaaccaatcaattttaattaaaatatgccatgcttattaaaaaggagttaaatttatgtgtgcccattttattattcgataattattaaattttaggtaaatccttatacttaatcacaacaaaataaatatttttttaaaaaaaaaaattctacgtaatgccctgatgagtctgttgcagttatgattttttaacaaacttttctcctggtaactaactattttcaaaattcatcatctccctccttttcctcttacggttttgttccctttgacctccctgattgtacgattcatgtccagattttttgctttttttttttttt

SEQ ID NO: 204904 - DNA, 509 bp, Cannabis indica
gagttttctcgcatctgggtttcaacccccttttgacatccgccttctcagctcaaaattctaagagaaacctcgttatctacggatattaggaccacaaaaatagggtttgcgaatcgttgtttctttttccgtgaatctgggcctctctagaatctccaaaggaattaacgaaaagggtctaccatttcagtctcaaaacgattaatttctggtccaaattgggcgaaagaaagggaaataaaataaaagttggtgttgtcaagaaagtgtttgaatgtgggtcaatgagattatggtatgctttttccgtaagaagatgaaaaaataaaataagaaattggtcaaacgagggattggaggaaagcaatgatgggaaaatatgaccagcacaccttctcagaaatggagaaagaagaagatgaatcagatacagagagagagagagagagaaagaattgaattgaatagagaagtgggtgatacatatctcatttttcaatccaaat

SEQ ID NO: 204905 - DNA, 588 bp, Cannabis indica
taataataataataatataagtgggttttaaacgcaagtcctatcaaattatcaattataaccgctaaacccctaattccatagaaaaattcgaaataacatatccaataaaagattcaaaacaaagagaaaagacaataattaatattatacactcattttaacataaatgactagccttttatatgcataatgatcaaaggaacaaatgatccaaacaaaacataccgtccagattatgggtttttgttacactataaaatagtgtaggggcttattagtaatttgaaaaggatgtgaatgactataaatatgtaattgtgtagttattgtgagatatggaatgagtaaatagaactttggtttaaatggagtttggcactaactcgaagaatgcattttaagagatttgtcctgtctcgaagaggactattatctaacaattggtgctttcattgagagaatttcattgagagctctgcaatatgactgacgaagagcttcgtgagtttgtaagatccatgattagatctgttgcatactgaccccatgtttgagcgccacggcttgtcgactgcggcactgctg

SEQ ID NO: 204906 - DNA, 516 bp, Cannabis indica
aaaatttataggaataatattataattataattaataccgagcgctatgaaaaaatattccaacatgtaatttcgagtgtgaaaattaatcaagaagtcataagaaatttttgatacttaatataaaatttaatattaagtcccatttattttattttaataaaaattataaaaaattactgactaattataagtggcaacttcatagtaatacctaccattatactctttgtaattattaattaacactctcagaattaaattaattgaataaattgtatgtggctgtagagactagtctctctctctctctctgtctgtcatagttggccaacacatggaaccaccccatatcccatctcttctctaaagctaagtgttcttccagctagctttttataagaccatatcacatacatattcaaaaagtgggtactggttttcctttctttctttctccatataaacttttttgtttttctcatacatatcctcttcttctctttctctctctct

SEQ ID NO: 204907 - DNA, 1403 bp, Cannabis indica
aattttagcatgccttaagaatttagtataatttatttgttacatggtcagttcagtaaaacataaataaaaaaattattttattttcattacctatatatagttctagtacagtctccaatatcaattaattaatgatgaatatcatatgattaactgtataatatagtacaaagattaataatatatatataattaattgacaatacggaatattaatggatatattggatctgcatgtatgcattaattaatcgaaagcaaaatgaaaaatactacaaataaaaagaagactaattaactgatctacaacatgcatgttacatatgaatacttgtctcactcctcttattacaattaattatatatatatatataaatggaaagatgagaagagtgttgttagagctgatgattagaaatatatatattaattaattgataattataaggagaatgtttgctggatttggtgagccagttcctccgcactcagttgacattcaattccaatctagtaaaaaaaatacccaatcattattagtactttaaacaatattatatatataatgtaattaattaatcatcattttcgaggcatatttacagtctgcacatatgacaacgttatttttatttatctttaacacttggacttaaatctatatatttaaaataaatttactctctctgctagccagtacccagaactcattaattttttcaggaacactaatagtaatacatattcttcttttatacagattacagagagagggagagggtggtaattttttttttttgaagaaataggggaaattaaatattatgaaagaaaaatacgatacaatatttatgcatttccacgtacgacaacaaacttttgtgggacaaaaatttatgtatatgacatattttttttcataagaaatgtatataatataattaataaaccttaatgtttaaaagcaataagttaaaaatatatacgaacaattattaataagtcagtacctggtttttttaattattataacttaactacatttagatataagctttaaaatataatttgaattattttatcagtctttagatctttttagataaaatattttaatagaataaaatatattaaaactgtaatagttaaaaaatgttagaaaaaattaaaaagagaaaaagaaaaaaataaaaaaaaaaagagagagatagtataaaaagttgaaggtaaaaaaaaagagagaaaattggtaatatgttttgagataaagactccaaaagagacaagtatatggccattattttaactaaataaaaattttaaagcaaaataatttttcttttttgatttgtttagattgttttcagtgatttgtcttaatcgtgtacttcataaatat

SEQ ID NO: 204908 - DNA, 504 bp, Cannabis indica
ttcacttgtgtttaaagaaacaatatatatccaaatcttatagttttttttagtgaaacaaatcttacagattatagtaattaataactaataataataattaattagctaagataatttgcccactagcatctgtatgagcctgaattaaaggctaggtacacctatcatatttctacatatatacaccaatttaaaagcaatatatataattccttctataaaataaaccccaattataaaagtgttatgggtttacactttacgattaaaattaaagttgacattaggatggcttaattagtagatgtatcttttttcccctttccatctctgaaaataattaaatgttacattggaatggtcattccttttgctggtttggggttgaagttgggtaagtgaaagagactgatatttcagaaatattagttgactattaggaggcgtttggttgggaggaatgaaaatataggaataggaatgggaatgggaatgggaata

SEQ ID NO: 204909 - DNA, 1146 bp, Cannabis indica
tataaatatatatatatatgcatctaatttacaaagataacacagttaattaaggatgattagaaaaaaggaaaagactttttcgtattctgaagctgagagtaagaaaagaaagtaaaaacaacctcaagcaccaacctttaagactcagaaaccagaaacttgtctttttctctttgaagaaagcaaacccaagaatttactatagcttcatcttcaaacctctcttccactcactttctctcactttaagtatcaactatgcaaaatattaaaaggaaaataccccttaaaaaaaatctctcctctctctcttaactccaaaacccactttcatatctccacaatgattccaaaaccagccatgaaaatacagatgtggaccttcacaaaaccatcgtcactcactttcatcaagcgaatttctcagaatcagagagtacccagaagctaaaatagtttcttattacaaaaaaaggacacgagagtggtagtagatatgaaaaccccacttgccactttgacttatttgaactcctaatagaaaaataactgattcagaaagagcaagcagggaaggagacaatcaaatttgtatttgaaaaatcttcaaactctctctatttctctctccaaatggaagaaaatgtcagtctctctcttcccctgtccctttagattctctgttaaaaaaaaaacatattgccattattttactgttttagctggacagctaagagatgtaaagaaaagcaagctttaaacgtcgaacatgattgaggatcaaacggctgtgattacgtgtatgtcaaaaaatccgaccgtttaaattttgaatatgctttctttttaaatatataaaattttacatttccaagaggatgacgtggaaatttacgccacgagtgaggtggagacgggttgccacttttaaaggttattttaagttttaaacggtccaaatatttcccacgtgtgagagcgacagattgctgtaaatgttatctcttatattttttttggtattcaaatttaattttttaaaaaagttattttatatattattttttaatttttttaaatttataattttgattggtccaataattgttatgttagttcattagttattgtgtgaatttttat

SEQ ID NO: 204910 - DNA, 671 bp, Cannabis indica
ttatcaatatatattctttttctattatattaatttaaaacatgggtggatatcattataactaaattattacttgtgtacactgataaaaattaattggcggtgactgcattaccatttaatgttacttatgcataatcgggttgtctttgtggttttattaactcaatatactaatataatattataagcctctactagccgggtcaaccatgaaaagacgtagttcaaacaaaatgcactataagattttcatttagcgttcaatccactttaacgcgcaattattattttattttttgaaaacccggcttaattaattggttttacattaacgagagaggacataataaactgtaatttgataatgatgtacgtatttgttgtgcatatatgagtattaataattgatattaatttcgtagaactatttattaaattttcgaaagcaagaaaatagtgaaccctacacaaattatagaaaaaaaaaaaaaaaaaaggaaaaatttctcctattttttatagaaaattggtacacttttttttttcttaacttattttattttaattttaattttattaattaaaaaaaataaatacgtcctttaaaaatttataaataaaaaataattaaatgttttaataataataataattttatcaaattaaag

SEQ ID NO: 204911 - DNA, 713 bp, Cannabis indica
ggtaatttagaaactgtaactttgaaaatagtgattttaaattaaaaatttaaattttgtgacagataaaatgtaattaacgtccgaccattgcatttttagtattttttgcaactataatatgaatccttccccaattttttattatttgggaagttttttatttttatacttcaaaacaaaaaaaaatttgtatttatgcggaattctacacaaaactcccttgtaactaacggagaaacataaatcgcaaccaaaattcgtatagtaacccacctaaaaattattggagcaacccaaaccgtaactttaaaaaaaaaattaaaaaatagcatatagaataattctcctttcttggcacccacagtacttaacacatttatgaagtgtaatctcgttattggtgtaattcaatatcagattatcaaaaataactaactaaatgtcatagatatactaatattcttaagcacttttcattgttaaaagattattattaaggagaattaaactcgaacacaactcagatctattaattgcggaaaacattgcaatatgatatgaaaccccaattacaatggttgtagaattcaaaccaaacccccccaccccttccctcaacacacaagaaagaaaccattaccatatggtttccactcatgaaaacggatcctatttatgatttggtgtgtcaccacatgttatgggggtac

SEQ ID NO: 204912 - DNA, 802 bp, Cannabis indica
ttcgggtcaaaaggttaatctcagtaagtcctctgttttctttagctccaacacgggtgatgggattcgccatagacttctttccactcttcgtatgcgtgctgctgatgagaaaagcttctatcttggtttgcctagtgtgattggtagaaacaagaatgtggcttttggtttcttgaaggaaaaagttagaaaacgtattcagagttgggatagcaagttactttcaagagcgggtaaggaagttttaatgaagtcggttattcaatctttaccatcttatgccatgagtgtttttctgattcctcttgagatttgtaaggatattgatcggcttatgggaaggttttggtggcatactaaatcttcccaaggtggtggcattcactggaaaagttgggacaagttatgtcttcacaagcataaaggtggattgggttttcggaacctgcgggatttcaatttggctatgcttggtaaacaaggttggcggttactaactaatccaacgtctcttgttgctcgtgtttttcaagcaaggtattatcctcgtgggtcattttttgaggctgagttgggctctaatccaagttatgcttggcggagtctttttgaagctcaggaagttgttaagaggggtgctagatggaggataggttcgggtatctccattccagttcttaaccagtcgtggctcccttcaaaggataacccttatgtgtcttcttctcatgaggcccttcatcattgtactgtgtctaatctgttacaagttggtactatgtgttgggatgaagagatc

SEQ ID NO: 204913 - DNA, 679 bp, Cannabis indica
attaacaataaatcaagtattaacggtagtagtggtagtagtggtgtgaacaatcacttcttcttctggatcttcaaagttaggatccttaacatccatgacttccttctggaaacccatctcagagggggaataaccatcgccagcccaagtgaactttcctccatggccacctttcttaggcgatccattgattccagtgcccgatttcctgtccttcttcacctccgatttaccatttcccttggaaccttttcctgcgctcttcattttcttctctttttgagtactgagtagtgttgtggtgatgtgatgtgatttgggtttaagaatcggtgctgttatatagtaggaaaacttgggggctaaagtgtaatttcgtaatgtagctacgtggtgtagtataattggattgaagaacaatggataagaacaagcattattaaatgattttttattgtgggatcttacggtggtaactgggtctgtctgttgtttgtttcgtttcatcaaaaataaataaataaataaaaaactgggtctgtgttggtgacgtgtctttatcgagcatttgagagagagagatatggtttattcaaattggttatggttttgtgatctggtcagatcaggtgcatcttgtccgtgataactttacagtctcagcagataagatgag

SEQ ID NO: 204914 - DNA, 864 bp, Cannabis indica
aaaaaaaaataataaaaggaaaataactgctcaaaaaatcaattgcagtttaattaaaaataataataataataataataataataataataataataataataataataataataataaagaactaatgtcactaaccacctcttcaataataattaaaatttgttacataattgtcactaatttttatcggaggcctcaataaatggtcatctgagagccgatcccgcacccagcgtcgtccctgtccaacttaacaacaacaaggatcactttccttagaaaaattccaatcagggacattgcggcaagaggaagcatgacaaagaatggagcaacccaattcagacaaattgaaaagaacctcaacggcgaatagcaagaccaaacccataactagaggcataaaaaagaaaccaaatcacaaatgtcacggatctgaatagcatcagaaccaatgaaatccctagaagcagagaagtgaaagctgttgggctagagacttgcgaaaaaatcgatgcatgtcttgatgaggatgtcaaagccacccgcgatgatgatgatgatgatgatgatgatgatgatgaaggagaagacaacgtcgttctgattcttagcaacaataacttcaaacactaatagagaactttgtttggtttgtttcgataaaatttttagcaacaaaaacttcaaaaactaatagagaactttgatttgatagagtttgagaagatttttgatggtttgatctctgaagaaacccagaacagggcaagaaggaaagaaaggatagagagaaagagtgaaagtgaactgaatggaagattgagaaaattgatgactgctcattctaaactattgagg

SEQ ID NO: 204915 - DNA, 1065 bp, Cannabis indica
agatgagctatttcgaagatttgccaccaaaactttttgacattttaaaccttctatatctcttataacctcttgtggaatcaaaaaacactcatggcatagcttgggagcgcttgagaaatcgtttttatcaaaatttccttaccagccctggatagaaactttgttccccaaccaagtagtcttttcctcaccatgttcttcaagaaacccaaagcagcaaatttgttatgtcccgtagagctaggtaaccccaaatacaaactgccctcagtagccgtgaccactcccaaaaggaagttaatcctatctttcatagaactcaaagtatttgaactaaaaaagatagaagagttggaaagattaaccttttgtcccgaagctaattcaaatttgtgtaaaatttcctgaatccgaagggcctcatcttctgtagcctcacaatataggtaactgtcatccgcaaataacatgtgagagactctttgagcaccattcgccaccttacaaccatgaaaccaatcacgttgttcatattttcggagcaaagttgtgaaaccttcagcacaaagaataaacaggtacggtgagagtagatctccctggcgtatacctcgtgtaagaataattgggccgacttcataattaccataagtttcacaataccttgcagactttacgaatttcaaaatgagttgaatccagctttcaataaaccccaattttagcagcatggcctcaacaaagatttattaaatgtatctatatacaaaaaaaaaaaaaagaaattaatattacaattcaaatttaaacttgttgcacatattaaaagaaaagattcatttttttataaaaaaaaaattatatttctattattattattaaaaaaattaattattattatgttttctgttttaaaaaattaattatattttcattttataaataactcttaaattaaagattagaaataattttatttataatataaaaaaattaaattataaacttaaaaatatacataaccaaaataaaaatactaattttctctcctaatcgtcttct

SEQ ID NO: 204916 - DNA, 690 bp, Cannabis indica
actcgaactcaaaatctctaacatgtacatatttttattctatgtacacacattgccatagccatcaatatcattactcattccatttctactaacaaaaagaattggtgggtgctaaacattaagggctggctttaaaatttaataggccaatgaaaaaaaaatacatacttttaggtttttatttaaaaaaatgtagtattccttattatttaaaatacaaatattttaaagggaaaaaaaattagatctctcagctaagtaaactttaggcacagatttagtcagtctataccagtgttaaaccttctaacattctatttctaatatgcaagtgaagtgattcatttcattgagttttttttaatgatataaattatttgagaaatagttaaaatgtatgttataattataatgtataatattgagggatgtcctaattattttggagccttagtaaaagttgaaaattagtccctttatgaagaaaaaaaaaactcctgtgtattagaacataattctgtcactaacttttttttaagatacattctaatcttttagttatatttaagactactatatataagatttacatgaaaattaattaaaataagtaatggattaatagggaattttttaaattgctaactcaaaatctaaataatgtattttataattaataagtgattt

SEQ ID NO: 204917 - DNA, 2317 bp, Cannabis indica
ttagtaacatccatccgaatagtagcctctaagagtaggacttataaagtatagaaacaatagtagaagctcatgaaataggaatgaccttgactaaacgaagcaacgtcaaattctcttttcgatcaaataaaaggttgctagaatgatttcttttctagatgagttgactaatctattcagtgaatgatatttttaatcctcgcttattaccaagcattgtattagcttgttagaaaccttggagattatttaagatgtgtttattttgtattttcacatgtctttattacgtgttaaatatttgataatttctgaatgtgtataaatttatgttgaatcatgttattttctgttattgatgttgtagtaataattttgaatcttcattgttggtctaacttagcttgttgtttttaatggaataaatcccaaaggattgtcatccgttagacaaacataacagtgttagatctcgacagataagtatttataaatgcaacatctagttgtatatctaaagatgacaacttagactagtgtttacaatatgaaacaatgaataactttgactctcacctaaacaagaaatcgttggattcttattttaatcgaaattatctttataaccgaagcaaatagtaaagcactgatgcaaattagttttttccttcagttatgaaccgaagcaagagaaataaaaaaaataaaaaaaaacaataaactttcaaaccaccacaacccttcagaccgcaataacaacccaacaacaataacaataataataaataccaccactacatggattttttgaggctaagtgaggattgaggtagggtgatccaatgtcacccctcttatttgttctaggaatggaatatctttcacgaatcatgaggaagattgggaaaaagcaggacttcaaattccatgagagttgtgtggatcttgagttgaatcattaaagtttcgctgatgatgtcctcttgttctgcaatagagacttcaagagcatctatgacatgttgcaaggattaaagcttttttctcatacattaggcttgttacctaatccttctaaatcggctttttattgtagtaacatgtctgatgcagatgtacaaagaatccttgatgtatctagttgttagagacaagagttgccttttaaatacttaggagtacctatctgtctgaagagaatctccccagccaattgcaaggtattgctaggcatattgtgcttatcaactcagtactaatggccagacactcttattggtgccaagttatgatgttgccaaataaaattgtaagtgaaatagaaggcatttgtcgtagttttttatggaatgggcaatacacattaacaggtgttcctgcgattgcttgggctttgatttgtcagtcaaggagctcaggtgggctggggcttagatgcatctcggattggaaaacaaagtttcaatgttcaaatatgtttgggccattgctaagaaggaagataacccatgggttcagtgggttcacaatgtatatgtaaagaatgaggtttggtggatcctataaacctacggctcaagcgagttggtattggaggaagttggtactagtcaaagaacaaatgaaaaatttaggtgacttaaaccagtcacattgtcagtacaaaagtggttgttggttatagtgaattacacaagccggctaaggtggagtgtagcaagcttgtttggaatcgttttaatcttcctaagcatagttttgtactatggcttgctatgcttaggaagatgaagacaagagaaagattgaagaagtttggtgtggttgacaatgacaactgtttactgtgtagtgatggcagcgagacaatggaacatttattttttaactgcctgtttttgaaaaactgcttagcacaaatcaagcagtggcttaaatgggggactacgtccgtgactttgaagagaatcagcaagtggataaagaaagcaaagagtggacagctacaaaaagaaggtatttgctgttgccattgtattgctggtggtacatgatttggtagcaccgaaataacaagttttgaaagggtgagatggaaaattagtgattgtatttggccaaagaatgtaactaatattaccttgtcacttttagtaggaaaaaaaatatctattatatatataaataaagaaattgttttcaagaaccgtagggtgggaccctagacatgggtgtactctgtctatctctaaaaaccgatgttgtccttgcacatgtatattttagaggtattctaggctccgcttagcttcat

SEQ ID NO: 204918 - DNA, 972 bp, Cannabis indica
tggatcgaggactattcttgaaataccatccctatcctcgtaggttaattatatacccatacccatcccaataaccatcagtaatggtgcatgtaataactagtagcctattgaaggaaaactatgattacctgtaactgttaatagtcactacaagaaatctcacttttaccagcacagttcgctattgtgctggtaaaagcaacttttaccagcacatttcgcaaactgcgctggcaaagaggtcaaagttttaccagcatatatttgcagtggctaaaatctaacttttaccagcgcatttacgcactgggaaaagttatttttgccagcgcttttcattttatactggcaaaagttctaataccaacattgatttgccaacccccttttgccagcacatcacaagaaaattctattttactagtgcaataccaacttttgccagcacaaaaatgtgttggcaaaagtgacgtttcttgtactgagtaactatatattttttgaaaaataattataataattaaactaaattttgataaaatctaattaaacaatattttaaatgtttttcaaacttaaaatccaaccatatacatttatttttaaaaaatattaagtaaacacatcaaaacattaaaaataaaaatcaaaacaataattaaccataaacttaatgaagttctaaaaaaataaactataaatatgatacaataataaaataaaataaatatataattaataacaaatattcaatatatatatatatatgtatatattacggcgagtatggggtgatgtatactaataccgtacctacaccatacccgcatatgtgcaatgcagttattccccgcctcagtatttttcccatttgaacggttatttccctcaccgtttggatggaataaccatgtatactcgtaaccgtagattatattgccatctctacgcgtagtaagtaattgttta

SEQ ID NO: 204919 - DNA, 1162 bp, Cannabis indica
gaccacctttgcaggagctttctctgattaattgcgctgattttagtgggtaattgctttctgagattggaactatgtgcaaggacttaaagttagctactccctgctaccaaattcatgtgtccgtggaagtttttcattttgacaacacatacttcatttacatttaaataccttttttgtttttagatttttcataattggtatttctatatcatacacaataaaatataaatttacaagccgtaaattccacttggaggcgcaggaactgaagacgccgtggtacccgcacccaaaatcagtcgacaaggcaattctcttaaagtctctctggttctttttctgtgtagattttatatgtttgtttgtttgaatctgataagtgtttttttatcaaaattatgataaaagtgattgtttattatatcgttaacatatgaattagtttctttttgttttttttattctcaacttatcagtgacaataaaaaaatcaccttttgttagttaaaggtttgaatccatcaaaaacaatcaataaagcaaatgtcagaggagacgaaggcggtggagcatcaattccgaggccaatatggtggcacaataaattgagatttttttggcatatattttgtaattttttgtatctattaattacaattttattttaatttcctttattttaatttatcatttataataaaagatttattactttaatttccttaatttaagtatgtcatttaattttttaatggtatttatctctttttcggcgttttatgtttattaatttgacttttcaaaagaattttaaatggtaactatataactatatatgtttaattttttaattttaattatttttataataataatttttattattttattttcttaattattttagatattatttgccatctttattattgtttattttttaaattatttttataccaggtttctctctattatgtcaactttaaaatttttaggtaatgattgactaaatcacgattttaaattttgtcttaatttcatgtcatttagttattattacaaattaaattaaagttttaaatgatagttatatttagaaatttttagtattgtttttacaattcaattttttcagattatttatatttacttcaaa

SEQ ID NO: 204920 - DNA, 655 bp, Cannabis indica
aacacattgaagtcactggagcctggggcgggagatgttaccctaccaccaacctcaatctgttacaataagtcagcagacaccgtatgacgaaactctaaaactccattcctcaccttttgcagaataacatttggagcctccaccactccctcatgaaacacttattccgagccaaccatatgagaagatcatatccatgcccaaacgaagttggtcgaggcgagaaaaattatcagcaatcttcggaacaaaccattcatgtaatttggatctatctaacattccattgctcaaaagagaattaatttctaagccaattattttcacagagagaagatttccaagaagccagtagcccgcttgctgaatcaaggctctcaaagaaataatagctcgagctactatcaaagctgaagcatggagattaaagttccaaaaggaggatcctcgtttacatggtacttaccacggaaaacattacaccagagatcttgatttaatattttagtctttaggccaagatataacactaattcttgtttttgtctataaaagaataaaagaaaaataaataccaagtgtattaggataataacaaattgtaacacctataactctatagtttttttttttttcatcttttaatttttta

SEQ ID NO: 204921 - DNA, 1533 bp, Cannabis indica
cattttttacatttaaaaaaaaaagtcctacattaatctccatatttcttcacaaattacaaaatggagagattcataagaacacaaacaagactcaatttttacttaattagattacaaagactttcttcctaattaaggaaaaaagtacaaaaaaaaaaaaaaaaagagtttttaaaactcaaaaaaaataccttcttacatcatcatcatcttcttcttcttccttttctagctttaattttattcctcaaaataaaactttccctcatcaaattacataaccatataattacatatacaaatgattacaatctttcaaagattaaaactttaaaccaaaacaaagaaaaaagactcattctttatatacacaaatattacaaaagacttgccctttttaacttctctaaatcacaaaacttgattttgtttatagttttggtcaaaaaaattaaaaataaaaaacccattttttcaattaagccacagctgagatgctacaatttcttctgtctctgctcaaacaatcgaacccttcgattcgaacagctgcgggcttctgcccaaattttattcgggcacagcccccagctgttcgggcagagggagacggtggcgttggtgttactaagatggacttagtaacaccatagccgccgttcccgaattgttcgtcttggattaaggggtttgaggctctacttggtggtgaaccacaaaagtatggtggtgatgaggctatcatttctacactattatttccctgttgttaacaaaaacgacatcaaaatgttaaaaacgacactaagatcataaaacgacatgaaaatgttgaaaacgacactaacatcttaggaaaataacataatgataatccccaaatcaaatcaaatcatacagttgtgcccttttttgtttttttcccatttttctaaatgaaggaaaaaatattattaaattaattactctcttaatcataaataatatttttttttttaacaaattaaattaaagggaaagagttaattaccttggttaaaatgatatcaaggagttctgttcctgcttgagaatctctaccttctgattgaaaaggactaaaaaattacagaaaaaaaaattaatatttttaagaaaattaaattctaaatttagggaagaaaaaataaaaaagaaaataataccactcaaattacagaaaaaaaattaatattttcactctaaaaaaaatcagagtagaagaaccataaaatatggaaattaatattagtactaaaaaaaattgaaaaaattaaaaagaaaataataccactcaaataacagaaaaaaaaatgaatattttaatattttcactctaaaaaaattaaaaatttcagagtagaagaaccataaaagaatgttgaaattaatattactactaaaaaaaattgaaaaattcaaaagaaattttattaaaaaaaaaaaatgaaaacatacttgttagtagggcacctaaggggtctgatgttgtcgtttatggaatgaaatgaa

SEQ ID NO: 204922 - DNA, 653 bp, Cannabis indica
tttttcaccttgaacctctcacaaattaactacttggaatttgtaacacaccccaccaccaatactaaaattaagttattatataattcattttatatatatgtgtgtgattgtgtgtaattatagtttggaatttaattaattgcagattggaacatgctttcgaaaatccaaaattacaagtccactttctctcttcaattaatatataccaattaattctgaatgagagatacagctaattttcttgtctaagatatttttgattaatatatttacaaatattaatttggtatttttggtaaattaatgtgggaatacacacactgtataagttggtataaatatatatatatatataattaaccaattgacaaaaaagagggaatttacacgtgcatgggaaaaaccagcttaattatatataattaggttttgtgaattaattctattctttccatgcaaaacactttaaatattaatttatatatattatgatcgatcagagaatgagctaatagcatacttgaggttttattttattttatttatttatttatttttgtgtgtgttatatattttcttagattaaattattctaatggcttcgaaattagtaggggcacctatttattatataatatgtatatata

SEQ ID NO: 204923 - DNA, 1532 bp, Cannabis indica
tgatatcatataagaagagaagtgttagtagcactccttttctcactttctccccagttctctctagatgctgtttgatattggcaataagattccacaattcaaacgttgagcggagagagtgggaattagggtgctactagctcttccatatgaaaattaccaagacaaattgtagagtatttcatgcaacttgagtttttagcaagtattccaagtgccgcttgacttgatccaagttttggagcatcactgtctccattgaaattgcaccgagagggtatactggaactaatgttgattcacaatgcagggtagggagaactgctcggttgggcgaaaaaggagactccttactctttttacagccagttgaaatggaatatttaaatcacttggagaaacatggcgtgtcactatcagagtaccccctatcgaaagtgttggatagtttcccaatccacaatgagaagcatcgtgccaggagttttatatctgtagacttgcatccttgggtggcttgtttgcaaaaagcacttgaggcattctcatctcaggtaaggatgtatgcaagttggtctcatgtatatctgattttttatgttttaatgttcgtgtctcaataatatctagttcacttaacagattctgtgtaatcacgtttcttttattttaagctgagaatcatttctgacttaaatagttgggtcaagctttcatttcttggttttgtttatttaataagtttaccaagggactcatctaaacccagtagtagcaggtgtctgattcaaaaagaatccaagtctatctgtttttgctctgcagtaacatatctttaatatgttttctcagccaaatgtgaagactctggcgcagaacgcattttgctcatgggtgcgtgcatacacagctcaccgtggcgagctaaagaaaatcttcatggtgaaaaagcttcacctggggcatgttgcaaaaagctttgcattgagagaacaaccttcattggtgaacaaatcaattcaaaagcaagcgaagaggaagagagacgaaaagcaaaggcgacaaccacctaaaaagagaaaagtttttaagaaagcttaatggcggaacagctgaattgataacttgaattagcaaagctcgagagagagacacacacacacacacgctggtggtggacaattcctcctctctttcctatacatatatagcaatatttgctgacgcagcttcaccattacccactttataaagtggtggtgatcagataactgtgtttgtggaagctgacaaagcaaaagaatcacctgcttggattgtggacgatccttattgcgtatctaaaaagggtaatacttttctttcatctcaaagctgacatgcttatgaggatcatagagaagcttcaaattttgttctgctatacaattttgtttgttataagtgagtttatagatatctttatgtcgtttgagtttgaagtttttagttttttttttacaaaattgttttagatttcattgtttctt

SEQ ID NO: 204924 - DNA, 1171 bp, Cannabis indica
ttttgggtgtacactcatttcagttttgtgttgatgtgagaaccgaaacttgaacttgaaaccacacccaacctgattagttttgacctgaatacttattattttttcatttcagcatcatgtcagtgcgagtggtcagattttcaggtcaaaaagttcagccctactaaaaagataaagggaatgtatgtacactaaattttaggaggtgtgccataaaataagtattcggatatcaaacatacgaaaaaaggatacctaaatagggatgtaaacggggcggcggggattgctcccctacccccatacctgcttcctatatttaccctcatacccgtcccactacccgtttaaattaaagcaaggacaggacagggattacccagcgatgaaagaattcctattgggtacgtacccattacatatatatctttgaaaacaaaataatgtatcaaagagaatttttttaaaaaatatcatcataaaaactcattaaaacaaatataaaaatagtgtgtataaaatggagttagtaaatataaaattggtattaaaaaataagtggttaagtgtcattttttataaagcaattaaatgtgattattaccgtaagcatttatatgaaaattaaaatgtctctgttagaattttaaaaaatctgcaatctcattaatataatcaataaaaagcttaaagcatgaaattattttaattgtaatagttatgattttaaaatttaaaatatatatcatatcggggtaggtatctattcccctaccccaaacctaattcggatgtaaatattcaaacctatatcactcttgcccccgaaattcgacctccatcctcatctcattaaaggcgagttcccaaacctacgagtataattgttatccctatacctaagtacacaaggaatacactcaaaagcacccattaattaatgacaattggttcaaaaactaagaagaaaaaaacaaaagaagttggtctggtctgaacatataaaaagaataaaaataaaaaaggtaacaaaaacaagaatgatgcacacacgagtttaattaatattgaaaagatgtgtcagaaaattgactttttttttatctttactttatattaaaaaaaaaaaaaaaaaaaaaacacatatagtgcaaattgatgtgcacat

SEQ ID NO: 204925 - DNA, 647 bp, Cannabis indica
aaatttcagcctcaaccacctcttagaagctatccattggaagccattggaccactttcttgcacaaaagatggtgtatttctttcaggtggagctctatctggaaatgcttatatatgggaggttggtataattaattaactagcacaacaaaaacacttataattataataagtatttttcacattgaaaatttctgataggtttgtagtggaaaactacttaagacttggcgagcacatcatcgatctttgacatgtatgttgttttctgatgatgggtctcttttcgtttctggttcagaggatggcatcatatgtgtttggtctatgattaggtaatgattgatgattattataagtttcaattgctcttaattatttaattaaataaagtttaagaaataagaaagaaagaaatcataactaaacaagtatatatatatactaatactattaataaaaagtttgctagatgtggaagatttaagctcaagttcaatattacatttcactttggagcatagttcttcacctataacaggtctgtcaactacatcatcagtcagctcaagttcaggtttagtatcaagctccaaagatggcacatgcaaggtaataactaaccaccatttttcttatgagcta

SEQ ID NO: 204926 - DNA, 742 bp, Cannabis indica
tttttaatgaagaattaaaaaaaatcactttcactaatttttgaaactagtttttttttttctaatcattattttggacaccccaacctagatcgttggggcccgaactctggccccgaccccaatcctggacatggaccacgtttccagatccgacccgacttaaataaaataaaaaaatagaaatgaaaataaaagttataaaatacacttttattttctgtttttaaaattaaaaaagaacaatggttataaaacacatttttattttttcaaaagacaaattttacttttatttttgtgattaaaaaattaaaaaccaaaagtgttaccgaacgcctcctaataagtgatgttttacttattttgtttttcattaatgactctatactcttatttttctccatgtacagcataggaagcctattgaattctggaaatctgcttccctatgatataaatctaccaatatgttgtattgttttgactgtttaatagacttaaattattggagttgtaatttacaatttacaattttctttttaattttattttcaaataatacattgtacttatcaaccattgtctcaacaataaaaaaaagtgtaagaagaaaaatgaataataaaaatagcttttttgtcaggtggataacaatttataatagtagaaagttgaatcttcaaagctatcaaaaaggagagagaaaatatttttgtaagcgaaatttgtggcgtaaata

SEQ ID NO: 204927 - DNA, 617 bp, Cannabis indica
gtagtctctcagccgagcaaaactctctcgcattgcatgaatgttgtctatcccaaaaaaacactatctggtcaaatataacacaaaacaaagaggacattaacatcatgctcaatattgaaagatagaacactgttaaggcttccaaatttacatctctaaattcaaaccaatgtttggctcaaaagtatctgagagagagaaagcaaagttccaatctaaaattaaccatctataatacaaaatttaaaaaaatcaatatttaattaaaattttacatctataatattcaattaccctctcagctgaagtttcatgatgggaaacgagaggtttgatgagcaattgctgcaatttcaaacaaccaacaggaaataaaaggcaattacagtagtaactacagaaagtgtaggtatatgtgaggtgttattgaattaaatagaaatggaaataagcctcacacaaggcagagagccaaggaagctctctcctgatgcaaaagagaatttctccttacaaattgcatacccaaacaaagtatcactgggtttacattgtttacaccttctagtatagatgtgttggaattatttaactaggatcttagatttactaac

SEQ ID NO: 204928 - DNA, 637 bp, Cannabis indica
tatacaggatgagtattaagacagatttgaaaattctattagttaaattaatttattatattgttttcgcaattagagcgactgatttttttggagaggaatttaatgcggagttacatatagttgacggataaggacatgacatgtacagtgctataagtattatatcgatattttttttacttgaagttctactcatgagctttttattatgttttcattaacttcctttaatatatatatatttatttatttattatatacatctcgtttttatatatatattattatggttttttacaaaaaaaaaatcatataaatatggcgaaggattgaacttgaagggggatattttgttatttaaataataatatattaatatgctaactaaaaataattttgttaaaaattaatacgaatttgcagtcagccacaatttttaaaggagcaattttttatttttatttttttggttaaaagagattaatgaaaatataatttttgtagacataaaaataaaataaaagtaatgtaaaagaaaaaaaaatgtaataaattttattaggaaaataaataaattgtgtattagcttgtgtatctcattttcatgatttgattgatgatatttttcttttac

SEQ ID NO: 204929 - DNA, 707 bp, Cannabis indica
gttatagaattttaaggattaagtcactctcccgactttctataatgttaaaaattatcatgacaaagcattaaattaaacaaaaaagtacttcaaatcaaagagagctttaatgggtggttccgaaaatctaaagcaagttttgaaaataattaacttcctttaaaagcatgataatatatataggatatttatacctcacctaatttaactttggtttggagaaaagtcatttcatatatgaatttttatttattaaaacaaaaaaaaaaaaatttgaggaaacatagtattcatttacattattaagttataaataattttattcataatgtataacaatttcgttaatcatatatgtggtgtagcgaatctttggagttcaatcacatccccaactttaaaaataaaaattatgggatacaatgagataaatacgtaaattatgatttcgactaaagccaataagcaattgaataagatgaaagtccttaatactactcgatcgttagtttcgcatatgaaataagaaacgatttcgaatgaagggcaccacccaatcttaattattgttgtttataaaacccaaagaatactaattgtaaaaaaaattaagacaaggatcctcaagcaagataaaactaatgaaaaaatgttaaaaaggcacttatcatgatgactatatcacttttgtgagttgttatatc

SEQ ID NO: 204930 - DNA, 1240 bp, Cannabis indica
attattaacatatttttaaaaatcaatatttccactagtctagtttgaactaaaaatagtaaaatgatccatatttataaccaatttaataacaaatcattatagggtatattttaaaatcaacatatgatcaagatatttatgtttaataaaatcaatatatgatatattttttaaagattaacacattatttaacaaggtattttctctaaaaaaaaaaaaaaaaaaaaagaataactacattatcatgatttttaggtataattaatacattatagagaaggaggtaatttaaaaatttggaatcaaattactcaaaattgttatatacagtagaacctctatccaagaatacagtttgggaccaagaaaatatattctaattgagaggttataactaaatagagttacacttagaaaaaaaaaatcaaaatatcaaaaaatatcaatgtaacaaaaataccaataaacaattcttaatactatattatattaaagtttgaaaataaattattaattctacataagtaaatttataaaatatatgtatatatttttttaagatgtaattattcttatatagaggtatattttattaatacgggacttaaaaaatgtataactaattacaatatagaggttattcttatttataactggcccaaattgggacttcatttttttataacaaattagaggttattcttgaatagagtattcttgaatagaggttctactgtatatagcacgttgctgtatacacacaccatttttttatcaaaatatcttaatgtcattacaatggcattgagataaagaaaaagaaaatttcaactatatgaatgtcatttgtgaaagaagtttatttttttcggcatcaatcaccaatttctttggagcacaacggagcaacaaatctcaaatcgtaagctactatacataattttcagcaccgataggtaagaatcgtatatgataaataaccatttgtttaattttgttagtatttctaattattattttagtaattaaatatatgatatatatatatatatatgtacaaaacatatataaattagttaataaatttattaaactgtagaatacaaaattagttgcaattttaaatggataaataaaaaatatttatttcaatactaacacaataatttatttaaaatgtttataatttatttttttgttgaataataatgttgttattgtttattatatattact

SEQ ID NO: 204931 - DNA, 795 bp, Cannabis indica
gaagggcaccacccaatcttaattattgttgtttataaaacccaaagaatacttaattgtaaaaaaaaaaataagacaaggatcctcaagcaagataaaactaaagaaaaatgttaaaaggcacttatcatgatgactatatcacttttgtgagttgttatatcgttattaatataattcaatatcaagtttctcttattatatttcaataaaaattatagaaaattatttactatttatagggtgtcactttataattagtattaatcattttagtgtctcataatagtgctcgtaactaatcgaatgtataagtgcataaacattacataattagataaaaagaaaagtgggatggatgttagttagttggggtgtcatcctatgatgatcatggtgatttgattaaatcttgatctttgttcatgaaattaatcttttatttttcttttttcttcttattgtgtgtgttttcctattattggccaaaaacaagtaagaatttagtaaatgtatgcatcatatagatgaagtcaaatgaattgaaatttagagtgtataagtgattgaattgatttgatgtagtagctaaggttgagtttttgtcaaattatggttgtaattaactagtgttgatgtgaaccaaaaaaaacctccacaaaacacaaatcaaggcctaccaaattagtgagtttacatgatcattttttggggaattatatgttactaattgttggaatagttatatgttatagtatagtaaaatttgttaccattatttttttgcatatcacg

SEQ ID NO: 204932 - DNA, 800 bp, Cannabis indica
aaattttaaaaaaaactcggaaaaatagggggagtttaaagttggtgaaatgtgtttgaattgatgttctttatgtgaggttgtaggagagatatatctgctcgtcacgtataatcggtatatgcatgacatgctaacttctcttgatcttaatttctttactatgatgagcatagtgtgcggttagaccttgtatcagtcacacattctcacaaatttctttcatgcgaggatagctctattggaagtagtattgacacatcatccttttctgattgggaatcgaatccacgagtcaattaatacgagattgtacttatatttttaggaaaaaaattcgtactataacaacttgtaagcctggagtatcaaagaatctcttaaattctcttatccacaaaacaactgacttgtaatcacccttagaaaataagatatcattatttgcaaaacaaggaagtgttagtctcaattctttggatttgtggtgaagcttaaaaccatcatgatcggcaacttaagaaagagttctagagaggtactattcattgacaaataagagttgggagagatgatctctgtcttaaattcctttcgaaaaaaaacatgaaggtaaacattaatcattaggaagaatttaggttttctcacacaaaccatgaccaacttgataaattctgaaagaaaatttaaagcatagaacattttctcaataaaattctactctaagcttttcgaagatttattttgattatgcaactaaaatgaacattattattaatatttcataacagacacat

SEQ ID NO: 204933 - DNA, 1651 bp, Cannabis indica
aaagagggtaggtactccaaccaaaaggaagctctctagattcaaaagctaaagcagcagacctggaatcagtctcaatccacaccttaggtatattccttgaaatagccatctacagggcacaagcgatgcctaacagctctccttcaaggacaccatcaacctttgtaaagccaaccgagactcgccagaacacgttattgacatggggttgatgcagagttatatcagttgccagaggctccacctgatctatccataacttgttttgcagaaattcagtcgttcttcgaaggctgtcattgaaaaccatctccaaattgcattgactcccgttgaaaatgatatcattacgccatttccagatcatctcgcaagaacaagccgtgaacagttgaaatttaaagtcctggaggttgcaccaccaagaaccaaactctaggatattattccaatggaatgagtcaagtctaacaccctttcgaaaccatagacccatagtgaacggacactgacagaaaatatgcagagatgactcaatcgcagaattacaaaagcaacacaaaggactttgaacctgaataaaactggttctactagtagtagggagaatgtccgagaacaatctccaacagaaaagcgtcaaacggggatgaatataagtcttccatagtttcttccagatttttgattcatcctttagacgatgtttttggctgttccagtaagcgcttttcaccgagaaacttcctgatttagacgcattccaaaaaagtatatcagggccttcttggatcggtttaatcttcaagatctcactagaaatctcctcttcaaagcattctctaatcagattttcattccacgaatgagttccttcaatgtacagatctctgactttccaaagagcctgattgcggacaaattgaaagcggtctttgatgtctgcagggttacgcctagggatccaaggtctatcccacaattcgcaatctccttcagcaattaaaacacccacactgtccacacagattttcctggcttgtagcaaacttttccacactcttgaatctgtatcttgttgttccacttgccaagcgttaatcttgtgacatcatttatccgaaagaagtctcacccacattttgtcattttcctataagatcatccagaaaagttttgcgagtagagccatattcatgtctttgaaactacgaaagccaaggccaccacacttcttaggctgacagatttcatcccaacactttaaagcacaataattcctttttttcgaattgccattccaccaaaacttagccaaaatccgatccaattcttcacaaagggtagtagggactttgacagtagacataaagtaagtcgggatactttgtaagacagagccaattagaatagtcctacccgcttgtgaaagatgcttagccttccacccctcaagcttcgacaaaattctttccttcaagaagaggtaataattccttcttttagctgtgaagaagaaagggttaccgaaatacttctccgacgctttaattgggttcattcctatgattctcttattgtcctctcgcatccgagaggatgtgtttggggaaaacacaactcctcttttctgcttactcactcgttg

SEQ ID NO: 204934 - DNA, 611 bp, Cannabis indica
agtataaaatagtataacaatatctcacaatccacctctttaaaataagtgcaccaataaattagaggcacattacgagccttagagcttgtttggctgtattttcaatttttatttttaaaattgtatttttaaaagtaagaataggaaaatagttttttgtcattttaaaaatttaatggtgtttgacacaaatttttaaaaactgttttttagatttttttcttacgaaaaaaatcaatattttagcaccataccatgacattaaaccatccgggtctaggttcgggtctaggatccgagtatgtgagcaaaatataaaatataatatgttagacaaaaaaattatttttgaaaattgaaaacaacattttgatgttttctgttttgaaattttttaaaactcaatttttaataaacagattttaaaaatttttgccaaacgactcctaatagtttttaaaaactgtttttcagttttaaaaaacataaaataattttaaactgtaaagctaaaattactctgcaaagatattaattcataatttttgatggatgaaaaactaaaaaattagcatttactcattcaaatataattttattatatatat

SEQ ID NO: 204935 - DNA, 1178 bp, Cannabis indica
tagggcacaaaacccaatacttttccgttagctttggaaagaattatggattaattaaatatacgagaaggtctgtgagagctatatttattttatatgtggacaatatgttactaagtgatgataaaagtttcttatataaggtaaaaaaattcatatcttaaataattgtttttgagataaagaatataaatggtatatataattttaattaattaaagagtagccacaacatctctaattaaataaaattatgtataattcatcttgtgttatttttatctttaagggtgataaatttaactcaaaccagcttctgtaaaatgatctggaatgagaataaattaataacatttatttgcttatatttttgaagcctagtgtatacctaagagtttgcataagacttaacattgtatttatttcaagtatgtaaagtagtatcagaataacttagttttagaccgctttacatttttatacgaaatgatgaagtatctttaaggtgataaagattacatttatacatactttattaatataaattaacattttgaaaatattgttagcaacttacattttaactttgctggctacattcattcatgtaaatcaacattcgaatacgtgcaatgattttaaattttaatagtattaatatagctacatgtaatgtaagagagataactacaataggtataacagagtagtacttgcaataggcaacgaactgtggattcttttagaaatattataaatactttttctatttttatttaacaaaaaataataatagaaaatatatttgtttggtaattacaatagatgaagtagtcacaataatgaattcttttaaaaatattataaacagtatttttattttattatttttttaataatagaaagatagtttaaatttaaattgcaatgttttaaaaaaaataaattcttttgttatatggatacattcaatagagatttataatagagaggatttatgtgtggtgttgtgattcgaaatcatctcggtgagtatctagcatttttgcctctccctttgttggttctccttcaccacgagttgtagaagccttagttgtgcttcatggtttaatattttgttcttcagtttattagaattttgagataagatgaatgaggaatcatctcaaaaacct

SEQ ID NO: 204936 - DNA, 1267 bp, Cannabis indica
tatatagttggggaaagaaactatcatatggtctctctgtaaacaatgttgtttgtagcaggctttacttattactttaatatatatgtctggtctgcttgtctcctcctgtcccaaaaaaagcaacccagcgtgttaacacaaagcattgtataattagttagcgatattgcttaaaatttatagcgatatgataccgaaaagagtggtagtataaaaatggtctttctcatgtattagaccctataaaagtaaccccatatcacgaggctttgcttatttaattttactcgagaaaagcagacaaaagagagaataacatatggagaagtgtgaaagaagagattttgaagatgactattatatgtattataacatagttttgttcacagcagtaatgttaatggcttgtttgaaaagagccattgtggtttttcttttaaaggagtggagagcttgggtttttctactcctaaatcttcttctcttagctattctttttacttcttcatctctctccaaaaactcaattgaagaagaagaagaaaaagacaacaaagaagaatgtggcactaaaaacaacaacaacaacaacaacaacaacagcaacaacaacaacaatgaaggtgagtttgaggttaaaaaatgcagaaagagtagtagtagtagtgatgttattgttaaaaatcaatttcatcaaagttgtacaagtaaagaagatgaaattgagggtcataataagggactatctaaggaagagcttaatgaaagagctgaagcttttattatgatgtttagacaacatttggttttggatgcaagaaaatgtggtggtcaacaacaacaacaacaacattatttgtataaacaaagccctcatcagagatctgtagtagggtgcaatgttaattttagaagtactgcttgttcaagatgattttatatttgctacttattacttaattaattctctttttgatgtgagtaatgggagttttgagatgttgttaactaattaagttctttatgtgtttcaatttttggtttcatttatgcaatattttgaggactaaatatcccatagttttgtatttctagttataattgttgtttatataaagtagaaacataatgagctgtctacccatgtttttgttttttgttttttgaggaaggtaaagggttgttattaagagatttaattcaagtattctaagttacatcaagtgaaaaagggagaggttatgagttcggcaattaattgatt

SEQ ID NO: 204937 - DNA, 743 bp, Cannabis indica
aaatctttacaagggtaagtgaagatctatgaatggatcaacgtccgatttttttttttttttttattttttaacgcaattaagagtcattctaaacccttttgattcattagacttcaaaaaataagttgatgttatatataatcaaaaggggaaagaaaagactaacattcttatgtaatcaatttttatcataatttctatatttctctttgattcactaaactttaggaaataagtcaatatgtgatatataatcaaggagaaaaatatgaacttttcatggtgttatgttgcctaattcatgataaatctttatggtttttcttatttcactagacttcagaaaataagtcgatgtgtagtatataagcaaagggaagaataagagattcaaaacaattatcatgctgtcaaaattatcactaagcatgggttttaataaaaaataataagtgtgggttttaataaaataaaagcattgaagttagaaaatatgacatttgtgaaagaaaagataaatagttgaataaaatgataaaattataattagtggggcccacatcctatggccgaccacttaaggtgtatttagccatttatttatcaattttttaatgccatataattcaaacctaaaccttgaagaattcctataaatacatagtgatagactatatacagggtgataggcagattaaccttttagtcaaaatttattagaatcttctctctctctctct

SEQ ID NO: 204938 - DNA, 732 bp, Cannabis indica
gtaagctctaaagtccattttcccacattaattaaaattaatttattattgaacttatgatttaacaagaaaggattaatgtgggggcgatgaatgattcatcctatttcgtgagatgtgagttagctcatactttttttttttttaccttgtaaaagggtcaattcttcattgatcaacaacaaacatactcaccaacttggtgagcaatacaacttttaatttacatctataaacaaatgagaaaatcatctcctggattgagttttgtcaacaaatgtgctaccttatttcttcatagggcacttgtaaatataaaaagttggaatgtatagtaacagtatacatactgaagtttataaataaataaaatagaatattataattagcattaattaagacaattactctatccctgaagcaccatcagagagtaattagctagctaataatactaagtttagttcttaatattatttttagtaatagtatagttcttaaaaaaaaaataagagttaaagaggatattttggtaatgatatatatatattgactttcataaatattttttttaaatggaggagagcatagcaaaagagagacaattctagtagattactattagctaggtagctcacaaggtgaaagtacagagaaaacttcagcttttgttttcgtatatacagaaatatatataattcaatttaggtgagatattctctcaaaaaaatt

SEQ ID NO: 204939 - DNA, 548 bp, Cannabis indica
atgattagggtttcttgctaaaaacattgtaaaaacatcaaaaacaccctttgaggctaatagactaactcgtggactaagactaattaacacctgaaccacgtaaaaatctccatctcatttaaatctgtattttattatttcttaagttcttaaatatttagtttccaaaattatcgataaacaagttacatttcaatttccactaagtagtttgtttattttcttaagatgtctaaactttatcgagacagaaattttataaatagagagtttgaaatagttttgtgaaatttaaatagattaattttaaataatttaaaagtgaatctttatttgggtagactttaaaaaaaattaaaataattttgtgatatattcaaaatagatttatgattggttttagcttggtgtgttgttaattttagactattttattccattaaaatattatcaataataggttataaaaatagtcaaaccaaaggagtttagtgattgactcttttacaaatttcttataatgatttttgcggttaaaaattaaa

SEQ ID NO: 204940 - DNA, 1191 bp, Cannabis indica
taccgtactacatatatatacattcattaatagctagagccaagccacgtataatattagccctattttgaactttttatttgtctaataaatatataatttataattatcataattaactagattaacgttaactatatgttacattaatatctagatactgtcgccctattacacattatatttccctatatacccccctactaattaattaaatattacattttctaaaataacacaccacattgagcaactaaaaagacttttatttacgcataaaagtattaaagtagtgaaaaaagaatatataataggaatttatatatattaaaaaaagtagctaaaaacattcttaatttttaactcgttataattatgaaaagcactctattataattctattcccttcttttaacaaaatatatatagctatatattatagaccaaatattatataattaactgtagatacatatatatattaataaagttaccatatattttttcaaaaaaaaaaaaataaaaaataaaaaaataaagcatttgaaggataattattttatatgattataatttttttagagggatccatatatttccaaactgcaattatggatttcattcaaggggtcaaagaaaattatatagggaattatatattgccattaaaaagtccatagtgattattgtgttgctttttcttttcttttggctcatgatttgctgtaattagtaccaacacgaattgtttaataaatattaatattaaaattaattaaagagcttgacaatcataataagagagccattaattatattttcacttttaaaaatataacaatatttcaattaaaaaacaaaaaaaaaaaacgctatcttgaatttcaatctagcccaataaagttttaggatatcaattattattattattattagatgcattaattaagtagtgatcatacaaataacgaaacacgatcattttcttattaagctaattaagctatatatatatttagcgtggtagagagggcatcattaattgaatgttcttagttttcatttttcacataaaaaattatacataattaaaagtacgtagttatgtatatatataattttgtattactctcatttcagtcttacatttttatttatattattttactaaatatatatattttaaaaaaa

SEQ ID NO: 204941 - DNA, 932 bp, Cannabis indica
acattattatgattagcaattaattttccttattaattattaactaaattaaaatatatatatatgtatagaatcatatctttgtatggtagcatcacaaatgtcgtcgatcgtttacttcttattaattaaagtagtgtaacattaaataataatatccatatatgcatggtcaaaaatgggttccagctcgaagtcaaagagaagcatgttcacacttatataaatatatatatatatattcttcttttgtttttcattttagggaagtgatcgattaaaatggaggaagaaatagttggttatgagcaaagaagaagaaataaaagaaaagcttttgtagtttttctgattgcttttgtagtgtttcctgtggtgttagggtttgttgtttacaaagtgagattagtactaattaataatattaatcataataatgatgtgattaatgataatattgatgatcaatggggtttggtagatttggcttatgaaaactctaccaatggtggtgtgattatttacacatgcaccactggtggttgggtaaaacgagttcgtcttaatgacgtctcgcgagtgagcgagaattgggtcaacacgggcggtacgccgctcggtatcgttcttgactataacaacgacaatcttgttttcgttaccgattctcaaaaggttagcctctcttaattttgacatcataaaagattatttaataaatgtgttgtattattattagtataatttaatatcgaattttttatttatttataggttccatatatcacactcgtttataatttaaattaatgataattatcaattgatatatcttattaattaattgttcacaataattaataaaaaaattgtataaaactccacatggtggctaggtactgtcaacccatcatggtggatatttatatata

SEQ ID NO: 204942 - DNA, 278 bp, Cannabis indica
ttatgtttttttttcttatttttgggagtgagataagaagagatatatagagatagagagatattgggagaggtagttaggaggaagattatgactttagaaaaagagattagtggtaggttagggaagggagaaaattcttaaccactactttaacataattttaaaaataaaaaacgacgttgtgtattgacttttttaactattatttatgagtattattaaagaaatgatatttttatttaacattacattaaatattatatcgttatttgtgc

SEQ ID NO: 204943 - DNA, 862 bp, Cannabis indica
gctggtttttggttgagcaataatattagataatctccaattacgttattagttgcatggcattgttgagacatgttagttgttacattaatttacatattggcaaatctagctattatttaaatcgaaccatatatggatatgacatagttaaatataatttatttatagaattaatattttttttatcaaatttataaatatgtatttgttatatataattaaatacacatttcacattattcttagcctacgtacataaatatatatatatatatatttataatatgataattatttgaatgtaattagagaggatgtaaatgtaataaataattaccatatgtaccaagatatagatatttgttgccaaagactcgcccaattcgagcttcccatcttccattgtgatgatgtctattatttcaaccaatgaaattaatcaccaaaattaagaatattaattaattaatatgccaataattaaaaacataattcgaaaatggaaaatgagtatattttataagtcactaccaataacttaaaaatttaaatatcagacaataaaaaaaaagttcaaagtttttttgtggtaaatgccaattaatcctaacaaattttaatttttttttattgtaattataaacttataaaaaaaaaaagtatttctacatacatccaattaaaatgagatgtactgatgcaactaactgttttggtatcaataaaaaattttagtctaaattttttatagttatttaagatatcttataaaattttgagaaattcacataattcacaatatagaatcaatgttaatccatctatttcacacgcgtataaaataaaaacgtcacacgtg

SEQ ID NO: 204944 - DNA, 827 bp, Cannabis indica
atcttccacatcccatgacacatctttctcccctaccattacttcgagaacaagttgccccatcaaaacaccatctcaccttgttgattatgtatgtaacactaccatcacacaagaccctttgtcttatactatgacaacttatgcaacccttccaaggttgttgttcttgaagaaaactccaattataaactcactacttacagtgaggcttcccaatatacccattggataaatgcaagggattatgagacaaaggctcttgaagctaataaaacttggattatcacaacccttccccttggccacaaggccatgggttgtaaattagtttataaaataaagtacgaacctaatggagaatatatcgatataaagctcacctagttgataattaatcgtcgccttagggttggtatcgagtaaatttcattgagcctatgagacatttctcatctttattttttgaaacctaaatatctcatattttcttttcaaaatataaagtactgctttctgaccaagttaacaactaaccactatgaagcttagttgtactttatgagtgtaacccattattttagatttcatgacttaacttagtgtgccaccttaagggtcagtgtcacactaaattacatcacttcctcttatcttagtcaagagatcaactttgagcaacaatatagacacatacctttcttatggggacaaaattaatatcgtctcgaggtcagtgtatactctctcagtattgactaataatcgaggtcgcatgttaccttaacatatactccttctctcactcactattttaggttaatatg

SEQ ID NO: 204945 - DNA, 798 bp, Cannabis indica
catgtaacattaagttcttcatcaagtgcggggcactttgattgtcacagtgtactaccatatcttcagatttaaactctagttctctagtgaggccttttaactaaataacttcttttattgcctttgtagtagccatatactcagcttcagtagatgacaatgctactaccttttagagatttgatttccagcttatacatttacctggagttgtgaagatgtaacttgtgagggacctttttgtattaatacaacctgcataatctgagtctacaaaacccttaacttcacaactttcttttcttccaactttgtagaccagtgtttatgaatctttttacatacatcatcacccacttgactgcatctcaattagcaatgaatttgctaattatggtcatggtataggctaaatttggtcttgtgcatatcatgacatacattaagcaccctacacaactagcacatggtatgctgtccatatgctttctctttcagtctgaggtgattgttcgtttgagaatttaaagtattgagccaaaggtgtgacaactggtttgacttcattcatcataaatttcattaacactttttgtaagtatctttttcggagtaagcatgattagactagactttttttttattagtttttaatggtgttaaatcttgtgttaaatttgattcgtattaaaatttgtattaaattggcacaaaacataacactgacaatacataaagttttttaattataaatttgtctttaattactaatactaagctttaatatatattttt

SEQ ID NO: 204946 - DNA, 2848 bp, Cannabis indica
ataatcacatacgttttaatttcttaaaaccacctgtaaatttttagaaaatttcgaagagtttactgtgctaaaaataaagtttaaatagttgtttactatacgtataaaaaaaagttacatgtgcatcaaaatatttaaatcttattttcggcactgcaaattatttaaaatttataagtggtcctaaaataaaactataacatacatgatcataaaaaaatcagactattttgaatttcgaaataaatatgggccatgccaaaataaatattttaggagtctttaatataattaccctttatttatataggtgtaacatattttgattatgtgtaattagattggtttagatgttgcctaattctaatgtgctttaagtaaaataataatattcattcatgtaagtttgatttcgcaagaacatattatattgtatatatttttatatatatatactaggtatattacacttatacttagttatatttttaacttttattttggttatatatatttttagttgtataattattttttattgtgtgtggatgtttttttttatcaagaaaatattttctattaatcaaacatgtacaaatttacaactaaggggaaactcctcaaaacaatattttacaaccttttttatcttattgagaacaactctatctatggtagattaactcctttctttaacaagattaagtctacacattagactttattttattctatcatctacacatcttggactcaagtatttgttctcatatatacaagtattctgattcaaccatataccatatattgtacttgttacgacaacaaagaaaataccccaaatgagtcttctcgatctctttgtcttgagccaaatccgaagatcctcgaaattggtaggccaaagttgactaccaagccattccttaatcgattgcatgattctccaagagtaaggacagccaaaaaataaatggttatgtgactcaaattcccactcacaaatagagcaaaaccttgtatctattggcacatgtttcctaacaagattatctctagttaagagattgttgtgagagcttgccacataatgaatctatgcttcggggccgaaagattgcaccatgttgctgccataaactcatattggtctccattcacaagcttagtatagattatcccaatcttaaatttttcattgacctctgcttgaacaatgtcctccttggtgaagacattcctaagtctcaagagctttctccaataccgactcacatcattttttagctctagagaccaaatatctttgccctttaggtaaatgctattcacccatttgacccaaagcacaacctgtttagaattaattgcccaaaggtacttagctaacaatgccttgtaccatttaggaccctctctaaatcccaatcctccaagtttttggattacaaacaagttcctaagatgccatgcgcatcttacttatattgcctttttctccccataaaaaaattcttgcatatccgatctatctatttggacaccttttgagggggctgaaaaatactcatccaatagcaacgaattccaatcaagacagtgttaatgaggagagctctacccgcaaatgagagatgacgactagcctaagtgtgtagtttcattttgagcttcttgatgatggtctcacgatcctcctgtctccatttggttgctctaaggaacactccaaggtatttcaatgggaatttccttgtgctaaagggtatcagatgctgtatctcctatctagttgcttcattaactcctacaaaataaatgttagccttatggtggttttctttgagccccgagcagctgctgaaatgagagaaagcatcagctatgctcttaattgagttagcatttcctttgcagaatacaataagatcatcaacaaagcataggttgattagtttcaaactcttgcataagggatgaaaaagcaaaactcttttctctagtcttccatttagagtcggagttaaatattccatcaccggaacaaagatcaaaggtgaaaccaggttcccttgtcgtaagccttttgcaccttgaaattttccattcagcatatactgaattcctaacacagcccatcatccatgtaataaactgtctcagaaagcagtaggcttttggcaaagatttcaagaattcccaatcaattgtatcataagctttgcttagaattaactttcataaattgtctgggagagatgttctctctttggtatcccttcaacaaatcctatcaaatgagtacattatgagcaagagaacgattctgaatgaacgcattctcatatacaaggatcagtagaactttagacaatctcgagcaaatcatctttgatatgtataagtgttgcaacatgctattggcctgtagtctacatcttgagaaggagtttcagtctttggaatgagcatgagaagagtctcattaagccgaatcggtagtttcccatgctgaaaaaattggatgacagcagatgagatttctttgcgtctacatacttttgaagaattttgacccgaagccatccggtccagggcatttttagatctggtatggagaatatagtgttttcttcacatcttgctgagtaaaaggcttgatgagattgatctgttgctctaaggaaaaaacatggcccttctttcactatttgtggaagaatagtattctgtagttacagttgtagtccccatcgaaacccttaaataagaaagaaaatgagtgataacttttgtatagtcatcctcaatcttgtctttcttatcaattaaggttgtaatccta

SEQ ID NO: 204947 - DNA, 550 bp, Cannabis indica
aatgtttattgattgtttggtgttatccttggcaatataatagaggtgattatgttttggctgggtgggatttatcttgtccttgtaatggcttgctttttttttttgagagaaattgtaatggctttcttaatttgtcaagtacattaattttgaaaagaaagaagaaaaaatattatataaccttggttattagtataggtttttctttgagcatttttcaagtgagtgttttgacactattaaattaggctaatactattagtttggattggttgtctaatatatacttaaatgagttagaaggtatattttacaacattaaagttttttaatctaaatttttgaaaatatctctttctgatattagtggtaatgtaataataaaatttttaatataatattatataaatttggaaaaaaaaaatatatgtaaaaggccttattatattaataatccatttcaaaaaaaatatagaggtattttatttttatattttaaaatatatatatattttttgtatttttacaaaaatttatatagaaattc

SEQ ID NO: 204948 - DNA, 591 bp, Cannabis indica
tcatatgtctagaacaaccattgcaaagataccatatttgagaagcgacaattttatcagaaaacccagccatacattttcctttttcaatctacttttatttaggagcattatgtttcttttgcaaatttttcaaaataccaaaatactttgatttgaacatattttgcatggttaaacatttaggttgaatatgcccctcaaggccacaaaagtaacaaattggaataaaccttcttacttgagaatttaccctttttgattttactggagtctttgcttctgcaagtgatgcttttacagcaacgaaccttgtatttgcagtagcaggaaaattcgatggaacactggatttcacaaattatgttttcccagaatattcagtaccatttgatcttaatttagcaaagcctcttaaaattttcaagttctttcttctacaaattaatttacttatcttttgataccaattgaaaaactgtatttttgcatatgtcaataaatttacaattgacttaagcaagtttagactccctctaaaattttaccgcaatagcgaactcccttcgacttttgatgtgtgtgtgtgct

SEQ ID NO: 204949 - DNA, 910 bp, Cannabis indica
attagatcatctaagctacaataaccgataactttataatatgtggaggaggttacatttattgtccatgcgcttggatctcatgtgtatatattgcttatgttgtgatatagtatccggatagagggtagatttgaaaataaccttgagtggtaagacttgaaaaattgttaataaaaaaaaaaaaaaaaaaactaagtacaatatgaaatattgagaggtttaaacttaactcatagaactataaattttataatttatttatagaatatgttttcttttactgagttagtgatggtgtctacttgatgaagaatgtatcaatgatgagaagtgagaatgagtgggaaatgagaataagtgataaggatgtttccctaaatttaattgtgggggctaaacattaatattgtaaatatttgaattgttcatatatggaaaaaaaatcatgtttcaaaaattgatatttttataatagtgcgatgccgcttgaaccgcaattattaaattcaaactgtatgtttagcaaaaatgtaaaccacaaccgcaccacaaaagatttcaaaccgtattttttgtggtttggtgtcgtgcagcagcttgtgcagtctggccaggtggtttgatgaacgccgcttattaagttggtaatttgcttaccgagtcctaacactataggggttgcacagtagagcggaaattgatgctgtatgccagttttagtccacttattagcagatcaactaaaataaagcattcagaaaatcagctgattagcaaaagctcctgtatcatacatttctagttaaattaggctgtgtttattgtacgtcttacacatatgtgggttttctttattgatgatataagcccaaatccttttttctttttcatgttgattgttgcatcc

SEQ ID NO: 204950 - DNA, 1204 bp, Cannabis indica
aatttgtttgttaattgcgttttatttcacaatctaaacatttgtctctcgatttagcttaagatactttgagttgcatggatttccaatgtcattttctgtgagatatacaagtagttaaaaatctaccatgtctttcacgagcagttttcactctgccatgttctacgggagcagtagataatctgctacaatttttagagcaaacttaaaatattttgaataattcactttaggaactattttgaatatcttttgattgctcatttgaaaagttaatcctctattcatatttttagcttaggtattatttttcaaggcacatttgtgtctcatttataatacatgtcaaaacaatgcgagctgttaagtattcagctcacatatagctttcccgtttttttatgggaaaatctcatttacaactgctattttaatttttcttttaaagtaaaggtttttcaattttttgaatttatattgtcaaaagacaattttaatcaattatctttttctttgtggaaacaatttcaatttttaggtttgcattacagtatatatttctaggtggactctagttattatacacatatataagcccccaagtaattttaaaggaaataaactttgtaattactgaacaaattttgattttattcataacaatcactaatcattacatagataaatacaacatttatacattaacttcactggtaataaggtcgtaaatgtttactattccagtggttctgtattaatgagccattaagccaagctaatttgtaaacccacttcctacaatagcttcaatatcatacagaccctcccagtttgggttaaacactactgcagctagatctcgcgtatttgcaaatacacgtcttaacaccaaatctccaattttacaaagtcttttctggactattttgttaaaatatctttatattcggtgttgatagggtgcattggttatctgcgactcattgcgtctttcttcaagcagatccaaggacattcaaaatttcttagttttcctcttgattataaaattcgcgcctgtgggtcacaatgttaacttctactagtaacattgcttctgggccaaatgctagtgaacatggagtgtgtcctgttgttgtttactctgtagttctatgggcctaaagcacctgttgtctctcgtctacccatcttcctttag

SEQ ID NO: 204951 - DNA, 1546 bp, Cannabis indica
tagcaatataattgcttgatgctcgtcgtctaccttcacccctatattgtttagatgaagaacaattttattgaattcatccaggtgtttcataagctcttttgaatcctccatgctcatcgtatagagcttcttctttaggaaaagtttactgatcaccagagatttcttcatgtaaatggctgcaagctttgtccagagaccctatgcagtaccttcatctgatacttcctaaaggacttcatcaccaagactcaacatgattgcactgagcctttgattccacttctagaattttcttcttatcatctccaagctctttgagagaagtagcatcaagtgctaaaataccttgatgaactaggagagccttcatcttaatcctccatagaccgagatcattttatcccgtgaacttgttagcttcaaatatgcttgatgtcactaatgtcgagttcttgaaacttcaaacatggttcttgaatctttgatctaactatgaatctctaataccacttgttgtgaataatcacgtgatcaagaatttaatgttccgataaagaatcagaatcaattgaataatgacaatcaataaaccagaaatataactaacaataacagattatactagaatttttataatagtataaaatagaagacaaaggatttaacgaggttcaatcacaagccgttatactttggacctaatcccttagagaaactaccctgagaccaatttttattcaaagagaatttaactcaaattacagggatgatcactaatgatcaaagtcaaaaatagtgttttgcacttacaaaaaactctcttgagagtgttgtgatcaaacacacacaaaccttgtatccctcctatctcattattttcttttcaaaattttctttctagatcgtcacctaaatagagaacacatgatcttatttatagtttcttacttaggctccaaaaagatgggaaaactgagctaactaactaacttactaattattaaaacacttaagttagttaacaactaactaaaagactaaaatctctaaatatttttttataaaataggggaccaaaaattatacaacaatatactatataattggtaaaaataattaaattaaatatatatcttttaattattataaataattgatgcgagattttattgtattacatataatttatcattccgctaattttattgagataagaaatattttttaaaattatataatttattatattattcataagaaaaatttgaaagtataaaacttcaaatttcattcataattaaacaaaaatattaaaaaattataatatatattttaaaaattaattaaatcgcgcaaaagctcaccttattccttagtataatataagtattaataattagtatttttttttttttgtaagaaatttattaactttattaattgcaaccatttaagattacacgaaacaactcagaagaaatctcattgcttttaaaaatacaatcagtaattagtattgattagtacatagaagcatata

SEQ ID NO: 204952 - DNA, 1338 bp, Cannabis indica
tcttttttttcttctttttattgagaaaagtgtatttttgttattttaaaactttacaaatatatttttgtaattaaaaaatttgggctgtaaaattaaaaataagacataaaaaagagtatttttaaaaatttctcaattgataatatatttataaaggcaacaaacttttatgtggtttgtagttaaaatctacatactccaccagttactcttattcatgagttttctgattacacgatacaacttggcatattttgtcttaaatctgaaaaagaaaattcctccgtttacaatgatttctgccactatttataaggaacaatcatgtcagttattcttttttgattttatctaaatggtgtttcatgaaacgtgaacatctccacgtttcatattattttaacatgtggaaataataataataataataactatctttatttggataatgcacccaataattgccactctttttcttatctttgaacgattgttgatcgagccgtctttttgttcgatatttgtcctcctcgcaaataacatggatgaattagtatacatcatatatggatgcttcttgcaaataaaatagctcactgaacattcttcttgtaaggattttatctcaaatgatattttgaattatttttgtataatccttatagcaaactctttcaaattgtatctcttgtggttctcatgataaaagtattcaatcttagccagcttaactttatccatctcgttgaactcatctttattaatacaattctttggaagatatattctgtatgtacaatgttttccaaggaggttatagtgtaggtctttgatctcgtctttctattactctatggtcagtaaatttgacttacccttttggtctaaggcaagacttaaattttgagtcatgtgagtactattcgagatgcattaaaatagcacattaattttcttaatatgcaagcctacttatttttgtattccttttacacgtatagtgatcatatttattgctcaaaatatgaaaaataataattgctccctaaaagatactttttgaattcgaaatgaactttttaataataaacttaggggtaaaatcatatttgtctttgagcatattgagcacactgttataccctaaaagtgagtgttttaatatttatacttgcaagtgcactaatcgttttagaatgtaatgttcatgtaagtacaagatcgaactcatggaagttgactaacatcaaaagaaactatttcaaacaaagtaagaatattctaacctagttccaatatttgatgagtttttgttgtagaaagtaaagacaagta

SEQ ID NO: 204953 - DNA, 1158 bp, Cannabis indica
aaataaataaaaattatagaacacacttttattttctgtttttaaaattaaaaaaaattaaaatagttataaaacacattttaattttttaaaatacaaattttaattttatttttatgattaaaaaattaaaaaacaaaaatattaataaatgtctccttatataaaagccctcaaataggaggaaaaacctaaaatgtaatagaatttttttgggtgtaaatgctctcaattattatttcacttgcacttaaccatccaatctcaaattttaatggtaaaaactaccaaattactaaacttagcaattttaaggtgtcatctatttacttaagtgccaactttaattgcttatgtgtacacatgtcacttatattggtacacttaatataatcatttaaaaaaatatataaaaaaaaaatcattttaaattaaaattataaaataaataaatattttttttcttttttttctttgtctctttccttcccaaaattaagagcttccacctatttctctctctcctaaaaacacaacagaacaaaaaaatttaaaactcctctctttgcctcactctcgttcattgccctttgtgtgttgccttctttaatgctcgagtgttcggtgaagaaagtcgaagagcactggcttcaacgggatgggtttggggtgccggcggcaatatctcaatcatcagtcatagtcgtgttggacggacaaaggaggtcctctcggcctagaaagctattcatgctacgaaccaaagagaaagagagagagcgtggaggagagaaaatgtaagagttgcataaaaaaaagaaaaaaaaaaaaagaaaattatttggcatttgattggcttcatttttatttggtgctaaaaaattcttttctaggaattttagatttggcaatggggagtttgtatgttttgtatttttatttcaaatctcaagtagtgttctttttttttttaattattattattactgatttaaaatataggtcatgtggtggttcaaagagtctgataaatgaaaaggagagacaaagagaggaagattcaggggaagagagaggaagaaaaaaaattatgttttaaaatttttatttatatttttattttattcattgcagtgctagttgcaaattttttttttt

SEQ ID NO: 204954 - DNA, 1539 bp, Cannabis indica
tggaactacttcattgcctaagacattcataatatttgacttcaccacttccagcgagtggcgacatacaagtactccatccctactatgtagatgagggatagggcgaatcacatcttgtccctccccatggcgaaaagaaacttaattaggtaggccagtgtaaccaactttcaaaagtaaggtatgtatcctcctgcttttggagttgtgggggtcgagggtccatcagttggtgtggatggagcctcagctactgagggcttttttcctggtggtggacatgttcctaacatggatgacgatgtgcctctatcccagatagccctgggtctggagaagatagagagggccctctgctaggacttggctcgcaggggcacagttggggacactactcttcatattaggcctgaaggccaaagctctatagggcctacttgccccttgcttgcttctagaggcaaggacaaggcaaccattctagattctaatgattccacttctgaggatgatggtatttgatagttgattgcaccatcttttatatttttgttttacgttgaacatttgtaaattgtattctgactttgttactttctccttgcagatatgtcttccaagttgagaggtctagttgatggacctttacaggagccttcaggtcgtctgaggtccaaggtggctcagaccacccgtgcaggagattccacggggtcatctcttcctcttcctccagagccagcactgactgggtaacccacgatggatgaccctctagtgaggagggaacgacctttgggtagggacatgccaaggcctagtcggggagcaggctcagccatggggcaaagagccatggaagggactcgtaggcgtatggatagggcttaccctattgtggatagcaagctgtaggagcttggtgatagtgagctggaaaggctctgttctgtcggtcttcaagagttggccttggtaagttacacatttagcgttgctcacttttttctgtgttattgcaagttggcaagccattggtgctgctgtagaaagttggccgactggagtaatgtcttaaataggctggtcggccttgggtgcaccgtacaggggctggctagtgttgtttctagcactaatcttgactttgttttatttttaagcctttatgaagctgagccttttgcattgcaactccagagggtctttgagtgctcttcaggattgtgaagggcaaagctttagctgatatggaggctcttggcctatagaatcaaaacatgatttcaagtttggaggctatgctcggcactagaaatcacgagaaaaccttgtaagatgctgacatctccaggttagagactgacctcacaaggtgtgaggagaagctgaaggcagccattgatggcaaacaaacaattagggaagagtacatcaacttatcttcggaactcatctatgagttcaagctgtgcaaccccaatgctgatctttcatacatgggggatgcttctttcctagatagcacattggccc

SEQ ID NO: 204955 - DNA, 1017 bp, Cannabis indica
attctattttttattatctctaaccaaacgcaataatcattttcttacattcattgttgcctattctaatattaaaaaaaaaagtattttagcatattttttattaataattattgtattgtattatgtagttatttaagatatttataaaattttttaaaaaattacaaataatttatagtatttaaaacaaaatttaaatattttattacaaaaattcgaacctgaatataaaaataaatcgacacatgatatgaaaaaatcgaacctactttttaaaaatagtagcgatatgactcataattttctaaaacacggtacagtactactcatattttaaaaatcacgaaaaaaataatgaatcaaaccaacacgacaaatacgaatttatagcacaattcctttcgagtaagaaaccacaagactgtgagaagaggagaagagttgtaagacagagagtggtgtgtagtggtaataaccaaaattccattgccactaccaaaaataaataaataaataaacaaaaattatttaattaattaattaattataataataataaccggtaaccgatggaacaagtgaagaggagagagaaagagaaaaatgtttatatatattccatccttttaaaccgggtcggaaattgttcctcctcctcctttctctttctctttctctctcttgttttcctttctctagtcggcgatgaattcccgccggctactcaactcctcgccggtttaataaccaatgccacttcacttacttacgccttaaacgctgtcgttttacatttctcggtcgatccatcgccgatttttttgttttttgttttagtctctccctcggtttttggtgaacggagagatattatcacagttactgtaactaattcttcttcttcttcatcttcttcaggtttttgattcttatctctttggctttaatctgagtttgtttgagtttgtgtttttttttttttttttgaattatctagatattttattctctctc

SEQ ID NO: 204956 - DNA, 825 bp, Cannabis indica
ctaatgttaaataggaaatattaacgaatcaaatatatgacagagaccaatcatttgttttttttcatgcaaatggaatggtagagccctcaattatttttctttttttgtgttttttgttctcattcatgatcatgatattcacagaaaaattaaacttagtactgaaattttcataagatagcatatgcatgcattatggactagattataactactaattaattcaaattaaaaagaataatcataaactatacttgttacgttttgaatgtaattaagaaactcacgtaagtcattagtaattaaataaatgttacgcgtgtgtatttaatttttttaaaaaaaaatcttacgtaaagtatatattaatctaatattttattcttttctttttcttctttttctaacatatggattattattgcttaaaaaaattggaaaatatcttctaagactcagtttgattaaagaaaagtagtagctgtatacatatgtgacgaaaaattgtgttcaatatttgattgttatttatgtatttatattaatttgatatatttatgccttcattatttaattaatgaatgaacaaaatataaagggagagtgatgttttatattaatccaacaagaatttttatggaaaaaaaaaagttacaagggacaaaactttaggaggctcataattagagagagacaaatcataattctactattgaaaaataaagaaataattaagatgataattaagctaaattaatttaaggggaaaaaagaaaaagaaaaagaaaaaataggagaaccagtaaaaacccagccattatt

SEQ ID NO: 204957 - DNA, 1275 bp, Cannabis indica
gcattcccacgatagtcatggtttcccaaaactgccaacaatagcaataaaaataataagaacattgttattgggcataaatagtgtttagcacctttaaacatgtcatcttgattgactagcgatattttgtaaaagttgttatattaaattatatgagatctgatacttaattgaactaataacgatattaacacataaaatggtaccagaccatttaacatttctctaattataataataataataatttaattatccaaaataaatgcaaaattgtgatgatgggacattaattaatctgcccaaccaaattcttattactgtaaattatgtatactaataagatttggtaactgaattacaaaaatcgttacaaataaatattttcttttttttgttagataatttgtttttatagcactaatgcaattttaatttgggcggtgtaaattaaaaatatatacataaatagtagtctaataacaaatttgaagagtatgtatttacatttttaaagttaatatttatatatttattaatgtcaacaaactagataagttaatacaataaattttctcatattatacatgtcactgtggcgttcttaaaacttagtaagctataggaattttttttttaaaacttttatttaaaaaaaatgtggtactttaaaaggagaaaagaaattttttggatttctaagttagatggacccaaagtacatgcttgctcacttatactcagaacccagtccaatcatataaacgaaaacgaaaaaaaaattgaaaggagaacttttttcaaccaaaaagagtttgaaaaacaataatctacaatggaaaaaaaaatctaattgaatttgaaagaagatagttgtgattattaccaatgtaccattgcttttgcaaagttggagctgtgtagatattggaaaaagagtcataaaatgcattgtcatttacaccagtcaaaccatcctcataaaaattgtcacccgtggatatcacaaactcaatctctagtttctctccaattatgcccatctatacaattacaattacaaccaacatattaatataattatttcataataagacatagcatcatatacgaaatttgtatacctattttattttatttgttttaatttttatatttttttttaaagtatatatttacttttatagtatgatgtaagttaatataaattatgtgttagacattagagaatgaactcactcacaaaaataaatatattttaataaaaataat

SEQ ID NO: 204958 - DNA, 1721 bp, Cannabis indica
gtttgcttgtgcaaccaaacatggttattattactggtgatttgaagtactaacttgtatctctagtgtttttgtaagctggagttcaagatgattaagttttcggattagtttttctgccttttcaatttccaattttgattcaggaatttgatgaggccaaactttgacaaagtagaactggactttgatgggagcatgaattgcttcagtaagagccctattagtaatcttgtttggctcataattatcaatttgttcttctgaccccacatttaatttttcacgctcgttattctcactaaaatgaatgttgtcttcttcactaacagaggtttctcccaatttaaatcccattttgccccaacaatcttttgcttttcatgtcctgaggttgatgctttacaaaatattgtgaaccaaactaaaaagataaaagaagcaaggaaataaaaccagatggtaaagtataaaatgtaggttaaagaaatgatatatatatatatatatatataaatatatatatatgtctgttagaatcaaggagatcaaaccataacaagaaaaaactctacctgagatagaaagtgattctggactgggctgagctgagcagcttgagaatcaccaatttatagatattaatcaaatgattctatgcattttaagcgatctatcatttgatacttatgtagccaacttgtgtattatgtgtagttgcacttgcacttgctccccacgcaaaaaagtctaaatttttttaaatgtaaaaggccaacttaatataaatgaataacccttatcttattatactaatagtccaagattcctttattaatataaattaaaatcagtattaatatttttcttttgaaagaaagattaaacttaattaaaaaaaaaaaaatctttagccaacaaaggcaacacaacagatgaaatattgtccgctctaataacacaaccaggaatagaacacgatactactgcaaaccaataagtaatagtgttagtaaaccgtttaacaaaacaaatggaagaagataacaatcctctagtgcattgatctctgcgtgatcctttagccaacttagtgctcctaaagcctcaaccatttcagaacgaacatgatctatattactgttaactcgagcctctgccaacgaacctgcagaatctttgaccaccaaagaaaacacaaactttccttaactgttaaatatagcagcatctacagtaatcttataagaaattgacattggtttgaaccagtgctccacattggctacatcaccattcagtctatgagtagacaaaaaaattcatagtgagcactatttaattgatctaagaaaataacagtagatgcaacaatatttttagcaataggagagtgattttccataccaattcatttcttgccttccagagactctaacagagaacaccaattacattgaaagaaacacaaagggtctacccccattttcttagttaacattacatttgttggtaaacaagacaccgaagcacaccatagagggaatttttaaattccaaagcttcctccaaaagtgagagttcgaatcaatttgtcccaaactagacaaatccatctataatttataagtagattttaccgaatacctccctgatatctcatgaaaacaactccatctattagcaacatctctcacactcaaatggatactcaaaatcct

SEQ ID NO: 204959 - DNA, 1049 bp, Cannabis indica
atatatatatatgcatgtatattgaccaaaagtaaagcattcccaacttggtgtagtgacaattatagttgagctatatttatggtctctttttgactcaaaaaaaaagaaaaaaatacttaggctactcattattactaaccaccttccttttgtatacatctacaattaaaaaaaaaggacaaagttagaaagtggaatgtacacttgattactgcaagtaaatatatatatatatgaatatgatgatcaataagtggtttatagtgattaaacaaccagttgatgtgatcatattgacgcccttgttttcgtaatgatcatcatatcatatataattatcaacaaaactaataaaccacagtaataattttgtaatctcatttggaaaaatcttgtactattcatcatcaataatattggatcatcagttgaaagagtagtactagtaatgcatgcatgcaaaagtactataataattaattaactagcaagtgaaaaaatattcaccttaaagtaaagttaaaaaatcaaataacattatcatcaattatacatgtatggcataataataattcttcaaaatcatatcaagaaaagattttgtaacaactgaaaaggcaacgtacaaaagaaaaacaaaatcaattaataagaaagagaagagagtatagagaatatggcctcaaaagagtgaagagctttctcgatatgtgcccttagttatacttggaataagagcccctatattataatgcaaattatatatgtagttgtatagaggaaatttctcaggaaatttatatatatagtttggtttggggtagtaaatcttgtctttttcagaaataataataataaaataaataatcaatattgtcttttataaagattccaggtgaaatgaagacgaatttagtctgttaattgagcaggtataaaataataatattgggttgtttgcttcagtcacaatcatggcattttatgggggaaaattctccgtatttatatagatccaataaaaatcacttaattctataagggta

SEQ ID NO: 204960 - DNA, 950 bp, Cannabis indica
taaattgtaatcacagtagttgactaatttcaacaaaattattagtaggtaatgtattgccaccaaagcacacacatgcctatagtggaaacttatctatgtttatttggactttcatggcttttagaaaactttggaatatgacaacaaatgacaagccataaaattcataatagaagagactgagtaagcaagatttggggagctaaccccaccaaataagatcaaactatggtacatttttcttcattcattttctggtacataccagtggcctaacataatttttgtacccaaactaaaaaataaatcctcacccctcataaccaattcaatataatcagccgtaaatagttttatttatatataattaatttcaaacaactatcattatagatgtaacagacacaaccacccatctgttttaacaatatagtattctttttcctttgacaaaaaagaaaatatttttctaagtttaataggttgatatcatattaccatctacttactataaaaatatataagtctctacataactttttaagaatacaagaatctaattctgatttttctgtgtgacaaaactcattttacacaatccatttgtttctgatcattaacataatagcaacaggctataatcgtcttgtattataaatcatcgttttcttttaagggtgtggagctttgagaggcaggtggtactaccatggagattaacaatggcaatgtgtttgagctaagagtgaatagagaggagccaactctggttgtccctgctgaggaaacagaaaagggtctttacttcttgtccaatcttgatcagaacatcgcggtcattgttcgaactgtctattgttttgagccaaatgctgacaagggaaatgataaggtggcaggggaagttataaggagtgcattggagagagttttggttcattattacc

SEQ ID NO: 204961 - DNA, 1551 bp, Cannabis indica
tttttttctagtctgattgatgggtctgagcatgaagagcttttttgcaagttctagttgagattggcaagtaagtatatccaagttttatcttggaaactatacagtctcaagttgagaaatattatcggcccttcaggatgagatggatttcctggaacaaaagctctcaggatcatattaatcgaatctcgaagtatgttagaacacttcaatatgtttgctttgctaactttgttgtcaaatggccttcataagtgacttggtttactttaaccaagttattatgcagtttcttatctttagaagtagtatcactatcatctgaggatgaacttaaaactttgctatttgagatcttcagcatgattacagattctacaatatattgaagtggaaatccagaaaggtttcggtgtccggcaaccctttcttggcccggtaagcttattattttcctaatgaggaaaattgtggatggtcttgtatttttttgacctgtactatttttcattcattttcaacattttgatccctcgtatgttttctttgtataatttattgtttttgggaaatttgactaaatctactaatatttccaggggaactctatgaaggaacacttgctttgactatggaggagagtaacattcatcatagcagccatttattcttggttcaaatccattataatattaatttgggatgtggattgtttggaaccatttttcattttataatatttgctgtttttgaccattctctctgcttattgatattttagctctattattctagcatgttaaataagattgggttaatacctaatacaagttattaattggactttctattttgttaaatgaaaaaataaattctgtattttttaaaatagtacaaatataactgactttaattttcgataattttttttcaacatgaacaaacgttaaaaaaaaacataattaattttatcataatatttttttattgggttattattaaattttatttcacacaaatcattatatgtcctatcctattagtaatttttttgcaaacttaagatcaaaatagtacttatccaataagatttggttcaagttattcttctttgacttgtctaataacccttcttgtttaataagctagttcatatgcctcttgtaatgttaattaactctcttatcataaaacttgaccaaattaactttgctgctttttctttagattgtgacttggtctaactaagtctaaaataaaaccagttgtcttgatgtacaaggtagccaaataaagccttgtttggttgtactctaaagtcgaccccagattttggttttgggttacgaaaactatcaagaaaagaacactgaataaatatataattttgtaaaaaaaaaaaaaaaggtttttaattcagaatcataggaagcttcattgtatattttgcttttattagaaagaacaaatgctattgacgttgttgttgttatatatatcattactactcttttttaacttattctaaaatataataaaaataatata

SEQ ID NO: 204962 - DNA, 858 bp, Cannabis indica
aaaaaaaaaaaaaaaaaaaatagcattaaaaagatccttttaggactgtttcgataaaaaaatgaaaagataagtatttttggaaggagttaagatttgtaactttctcaaaatgatttctagaaaatattttaaaaattaaaataatttgcatattttttatataaaagaattttttttttaatgatatccaaatacttagaaaaacacttatacttttagctataaggtggaatttttcccaaacgatataataactttctacattattattattattactattattattattattattattattattattattattattattattttgaaataagcgtgcataaatatcattaaacattgcaatcgttacaaaaaatattgttcggaaagaaagaaacaggcacacaataatatcgattgtgggtaaaggcccacttaaccacattatgggcgataaaattacagtttctactaacaaaagaaaaattacactagtaaaatactgagagagtctaatacaaaatgcaaagtagttactaatctcccaacgaacctcctgtccgctgagcgagttgataaccacccttaatcactctccactataataaaactccagcctttatctttagctactttcatagccaagcagcaggctgcaacttctccacacagagcatcagtaaactccatccttgtcgtatgcaccccacacaccacaccaaggtggtttctcgccacaaccgcgatacacgtgctttctagacctactttaacatcacaatttagcttaaaccacctgagaggaggaggctgccattcctctactaggattggagatggagaagggaaaagaga

SEQ ID NO: 204963 - DNA, 2120 bp, Cannabis indica
atatttataaatatattattttagaatattaatgaaaaagttattagtatattagatgatgagattggagccatatttattaagttatattctcttgtcgaagaaaaagagagatcatatggaatataaagaccaaaaattgctttgaaaaaaaggaccttttattagtgtccatgcatgaatttttatatataaaaagacccctttaatttaaactatttatatatgtattattgaaattaattatcaataattaagaaagtgagaggttcctaatctttggttttatgcatgcaaagtgattggtccaccaataaaaatcaaagaggcattagatctttcaatcttggatttatatataatataatacaaccatggttctaccttactttttttattttatttatttattttataaattagctatttatcttggtaaaagctgactaaaaaaagaatatgaaaaagaaataatgggatggatatgatgatgggtgagataataatgtttttttctttctttttcatatgtgtagattggttcttggagtcctaactcaattagtagattaccaaattaagaaattaattaaccaacttacttatatttagatgaatatctattttgcaattagattataattatcattagttcttaattaatggtttactaatttgttggtaattggtaaccaaattcatttaagaaagaaaaaaaaagattattttttttactaagttttttaaaatatatgtcacttaatttctcaaaatatatatatatatattgtcaataaattaagtacaaatatattatattaaggggaattattttatatatcattttgtaatttttttttaaatttacgattttagttgctccaataattcttatgtagatttgaatctgtaaaattgtaaaaaaaaaataatgttttagaatgtaaaaaaaaatccttatgaatgaatcttaatattttaatattcataaactattttgagtaaaagaaaaagaaaaaataccaagtagtaataatttgaagaaattaatgtgaaagaaataatcctaagaataaatgtatatatatagttttggtggtaagaaatctaagtgaggaaattatgtaacataaataagtttccaaacaaaaaaggaacataataaatataaggtgatctcacattcatatctgaacattttaatttaattttgtatatattatccatgcaaacaagaccaaaattaaaagctaatttataatatgccttcaataaatgctgaaattaattttgacattattagaaacacaaaggaaatatgatctgtaaattaactatatatatttactattatatatagtactacaaaaattatatatatcatcaatctcaccgacctaataaaaacatagtacacttctgtaattaagtgtttattattaattattattattattactattattattattattattattattacactcttcagcatcccaagaataataatccatatactcaaataatagtagaaaaaaaaacagtgaagcactaaatatagacctaaattgtcacaattccaataatttatatattattaattatcaactttgatatgatttttatttttatttttttatttttttattttttgggaccctttatggggtatttggacccctcactgcaataatgatgccaagacattttaaatgttcattctagatagtacatttaaatatggggtttttttaaattacaattatttatatatatatatgtaataaaataaaaaataaaaaataaaaaagacatatatatgttttgacagagatgaatacaactaattattggtatataatttaaataataccgtactgtgacagtcatatgttaacacatgaaaatgtagataaaataaactgaattaacagagagaccaattagattaaataattaaataagagcattattattataaataaatatatatataattatatattaattaataatgttatatgtatgtatgtaaagtcaattaaaaataaaaagagtttctttgatttcgaacttcttctatatgtcttgtagctatgattagatgctactcatgg

SEQ ID NO: 204964 - DNA, 992 bp, Cannabis indica
aaaaaaaatagactaaaatattcccttgaatgtcgaaacagtaaaggatggaccgtagaaacttcctacgatataaagtacttttaaattttcaaccaataatcaatttaaaaaaatttaaaaaaaaaaaataacttagagaaaatctgtaatacaccttcctaaagagatgttcttgtccatgagacttttttagtctattttttcatgatcgtatatgttgcaattatttaagataatttgtaaatttttaaattttttttttaattatttgcataaggtttaaagagctgcttaccacacgtatacgaaaaaacatcacgtgtgtaaaaaaaatatttaaattttatttttgaaattataaaatattcagaattttctcaaatttacaactagtcatagataactacaaaaaaaattaaaaaaataaactcttcattatgtcaaaatctgaaacatacttatttttccctctacaatcacattcttaagcttaatattagcggaagaaatataaattaaacattcatgttctaatatttcatataggctttggtcacaaaaaacttaaggtaaaatcgtaatcttaagcggtattaaaaaaaaaaatatttttttaaaataatttttttcaaagtaatttaaactaaaattattattttgcaaaaaattatcaataaagtgaaattaatttttcactcattactcttttgatggatatggatttttttacaacatccaattttgtaagaggtctaatgctttaaaatgtattttttttttttttgaaaaaaagttagtttaatcgtgaggaacaaaataaatgtgtaatgagagtataactttgtatagttgtaactttaattctagaatcgatctaattataagtgtcagtggatatagaaccaattcaatccaatattaaatagatgttggatcgattgaatgattgaaattaattggattatatcggataataaaacctatcattt

SEQ ID NO: 204965 - DNA, 1505 bp, Cannabis indica
taattattaattaataatagagactaattattattcacaatttttattgttgtttcatatttgatctttttgtctctaaatatataaagaagctttttgttttcgtcttgtaactcgatttgttttcttgagatagaacttaactgaatttttttgtaattttgttggtgattaataaagaaataatgatgatcatgattgttctttcgtcgaggaataaagcattgtactagacttgaacctcattaaatcatcggtgttttctctattcttgaaaaactatatgtagttttctatgtttgttcttcttgaactcatatataaaaagattgttatatatttttcaaagtgtccaaaacacaaaatatttttaccagtaaagtaaaaatgatgtcctaactaggtaagaaaatgtttctttctataaatattttttttataatgttatattgaaagcttaattaattacttgttttgcttatattaatttaattattaataatattgactgatttgtaatgtagacaaagaaagcctccaaaaggaaagagaatctatgcggcttaaacttcaaaaggtttgtatttgtttaactaattattgatttatattttaattaattatttacttaattatattagtatcttcttaataattgtttgttttattttattttatttcattatatttataatctttttagttttattatttcgaactaaaccaataaataatactaaatattgtttacttattatatagatcgaggaagaagctacacctcccgaacaaaacctaatggctttgatggaactcgaaaagctatgcgggtacaaaccttctttatatcatattagactaaattatcattgttggcgccttgaatcttcttcgaaggaaatgttctttagtaatcgagtgaagaagctcggtttgttttttaaagggtgatagatcagagagaataaacaagtatacgaaacatagccctaattttttcacacattataagtttgctttcttcacactttttattattattgtacgttcattcttattttctccttttattagtattaacgaaattgattattcaaacattttattgttaggttttcattgattatatctatgtgtttttttttaattttttatatcaaatatataattgatatttttcaattaaatttgcagatttatgaattaagttgtacaaaatacaaaattgaagagtttgattggactggacttggtaccataaataataatatcacaatatatatatattattattatctaccacaatcaaaaaatagatcaaaagattaagagaaattaattaaatgataaacaagaagaaaaaggtatttggtagttatatattacaacttttgttatgatagtaatttttaatattgcgagtttttattagtattaactcaattgaggataagcaaccattcaagtttaaaagtgtaaaaatgtatttaagttttttttttttt

SEQ ID NO: 204966 - DNA, 1004 bp, Cannabis indica
atccaatccaattcaatttctacgattgcatcaaatccacaaagtgtaaatatccgcacttgtggagattggattggattggaaaattcaaaatccgcacaagatgttaattgacatgtaaaagtaattgatctaattcaatacaattaattaatgtaaaagaataataatttcaaaatcgaatgtatacgatataaatatattttaaaacttttgtagatcaaatgtacattttattcttatatataaagaaaatataatttaaaacaaaattaaatatttatgaaattttcacttagtgcattatcgaatgcactatgaacaaaatactacaggttgaatttaatgaacactcctaatttctataaatgaccaccacaaagtttatcaaaagatctatcatcaccactcattattctcattgtttagtagtttttcatcaatctttctctccttccaatttttttttcttttttattattttgttaagatctaccatgtatcagtactctatttgtcatataggagaaaaaataacaaaagtcccacagttcagataaaatttttaagaaatccaaaaaaaatcaaaaaaaagcacaatcttggagaggcaaaaatcatatttattttcattttggtattctgcttgcccatgtttacgtgtgtttgtaatatatagtattcttaggagtacaagttgaacgttctaactaaactattcatattttgatcaaaattctcttctggcattgtatagactacgtacatgaatctataggtgaagcttcattcgtacgtctctccatacaaaattcaacaacttataaaccagagttaatatgtgactatatttgggtacagagaaattgatggtcaattttggatggaagctcaaagccagatgtggcaaaatcgtcaccatgctatggaataggggcagatcgaaaaggaagggctcaattttgaatcaagttggtttgggcctcaggccccaaatccactta

SEQ ID NO: 204967 - DNA, 1494 bp, Cannabis indica
gagatagaacctcattcatcttatctccaaataattctaacaataccacaacggtacaacaaatgataaaccacgaccgaggtttaaggtggtttggaaactcaacaaataaataataatcataagtttacatttaaaacagtactctttttttttacagagtaattcaaaccgtaaattgaaagaaaaagttaaaaaatagtatatggggtaatttccctaataataataataattggagaattccccatatactactttttaacttttctttttttcaaatttatagtttgggtgtacgttgctatatgaatttttgttgcgatttaagttgcttcgttggttgttatgtgagttgttacgtggattttcgtaaaaatacaagaaaaaaaaaaaaactaatttgaagtgtaaaatgaaaaaacccaagaaattatctcatatacaatttttaactttttttttaaaaaaaaaatttacagattgagttttttatgtaggttattatgtgaattttagttttttaaattgttctgttagtttctgtgtagggaatttatatagattttcataaatatatatatatatatatatataaaactaatttgagtgtaaaaatataaaaacccttaatatttattacacaattaacaatttaaccccgagtattagctaaaaaataaatataatatatacgaaattccaccatatttataccccataaatctaaacaaaaagaattaacttataatataaccaaggtttaaacctttcaaaaaaaaatataaccaaggtctaatataaatataatatatactcaatacaaccaaaatttctttaaatttgaaaaataaatccacataatatttaatttttttaaggtacataagatttaattaatctaaaaacttggaaacatttgacttaaatttacttaaaatttttaaataaactacaagatttggaaatcataatactattattataagattcatcggataaaaaaaataagaataatgatatattcaaaattctaaaaacttctcctattaaccaatataattttccggacttacctataccttaactaatttcattcataaattcacgtaaaaaaaaacctaaattcaattcctaaattcacacgtcaaaaaataatcattcataaatttcctcaaacctgaattaagataccttatttaattatataaaaatatgtaatgcgcattaaggaattattaatatagttttcaaaattatatattcaatttaataataattttttaattaatcttaactaatcaaaacctaaacatagtattatattttattaattagctgactaacaatatatgtgaaaggatatctcaaaaaaacaatatatgtgaaaggtataacaaaacaaaacatgtgaagaaaaaaaaacctaagccgttattttatatttttcaattaattaagattagtttaaatattttttattctgatcgaatt

SEQ ID NO: 204968 - DNA, 1240 bp, Cannabis indica
ttatgtgatgcatcatacattgtctacctattattactcatgaaccttcattggctcaaggtattcagtttcttatgtaacctattattacaaatagtagtttttgtttaattttttttcatttctttgacattattaatcattcaacaaagttatggatgttttcataaaggctgctgaatatatgggagttccaatttgcagaaatgacaatgagccccttcagaagctttttatgctagttcgaagtgagttaaatttggacttgaagaacatcaagcaagagcaggcaaatttttggaagcaacacccagctcttgttaaggcagtttatctcccaaattttgggtaaagcattgcaaatgtttttttcccttagtgacaattatcatgtgcttttgtatttcagatggagctgttgattcaagctcacctgaatcgtaaatcagcttctttatctccatctttgcatgttgatttcacgcatgtgcttgaacttgcacaaaggttgtatttcttctttcttctgactactaatcaatgtccaaaggttgtacttgaatattgtcaataatatctttgggaggaaaataagtaatggagtcatcagctctggtttgattggagtcatatatgtaattttaaatatgttatatttttttaggaagaattgaagtaataattgaagtacaagaaactaaagaagaagaatagaagagaacacatgcacttgtcttgtcttgaattcttttggccacatttttcatccaaagtaaatttctaatttttttatcttagataaatttcttatgggtttctctattttctttaatctatttcttctccttcttacttctcttaacattttggctcttttttttatctgtataatatagtggaggatctatgttgcttcttctacgcccatcgtggtagctctattagtaatttctattaagaatgtatgggagaatcaatagtggatcttccaattgattcagataggtacaaactgcacactctttgtgattagatttgtgaaataatgaccgatttgtttaatgtgactgcaattattgcttctctattttcaacatatttgcttttgtttccttctgggtttgcttttttccatattaaaacttcagtttcaggtggtgtgggatgtaattcttttctaattttgtttttattttttgttttgttgtgtagacagatgggggagacaaatggctctcac

SEQ ID NO: 204969 - DNA, 1337 bp, Cannabis indica
taacagtactaaaggatataaaaagtaattgtaagggtaaaacattaatttgaccaaaactaattacgaactgacacaaggagggatactcactagaattgattatatcaatggacactgtagtaaaactttgtagatataattctataattattaagagatcatctatatttattgtggaataatcatggaattaataaataagataatttggttgatgagattcaataaataatctagtttattgaagcttaaaattataggtccatgacccctgaatcgccaccttaaaacactatcaagggtagggatagaagttgtacattgatgttcaaaaaaatctattttgatttgttaaagaaatggaattcattttggagacaacaccagtactattgccttcacgacctcgtggttaggaaacaactacaaggcccaagtcaaccttagtccatgatcagattgggagacaaagagacctgcgtgataccttaaccaaaaagatgattggtggaagcaagggcttcaagaggagagcccctgattttgtaacagaagatccaacaaggacgcaaaccaccatccatggtgtcaacagggcagtgttcgaaaacctagttgccctagtaaagggaatcatggccctaaagctatcaaagttcgaactcaacagagagcaatgctcaccgctctctgataggatcaaagctctaccaatccatccaaagttcaagaacctttccttgcaccaatacaccagtaaggaagatacattgttccacatccatgactaatctaccaggagtaagagacgacgttaggtgtagaatctttcctgccacactgacagacctgtcttggcagtggtacctcaagctttcccctagatcgattgactcatggaaaggtctagtggatgcttttggcaaccaatttgctccttcctgacagtgccaaatcaagcccaatgacttggtagacgtcaagcaacaggaaaatgagcccctcaaggactacatctaatggttcttcaaggcagatgctaagactaagaggcttagcgatgatgcaagggtaatggcactcgtagccagactcaaatgagtcctatgtggtctgaccttcgtgtcaaggcagtttacaccatgaacgatttccttgatagaacagatggctttgtcaagctagaagaagttttcactcgagccaagggcttaaaaggcagaaaaaagaaggcatcagactccccatcccctgacattgaagcgtagggtaatgggaagaaaggagattcaaatagaggaaaaagagccaataaaaatggcgaacaagggaac

SEQ ID NO: 204970 - DNA, 1033 bp, Cannabis indica
cttgaatgcttgctttgcaaatcatgcaaaaaagttatgctgatcctaagcgcagagacatagaatttcaggtaggagaacatgttttcttacaagtctcaccaatgaagggtgtaaagcactataggatgaggggaaagttaagcccttcctattcaaaatactcgagaaggtcggacaagtagcgtatcggctagcctcaccctcaacattatcaactttccataacatatttcatattttgatgctggggaaatatgtattagacccgattcatgtcctgagttatgaaaccctaggattacagtcagatatgtcctatgaggaacaaccagttcaaatcctcgataggaaggaaaaggttcttcaaaacaagaccataacattggtcaagatactctggaggaatagtaagatggaggaagccacctgggagttagagtttggcatgagggctccatattcggagttgttcatgttagattttgaggatgaaatccttttaacgggggataattgtaattaccgcatacttagaatatagattaataaggaaattaacattaattatttatattttatgattatatgtgattgtcatgtattgtgggccctattttttttaagaataggcattaggattataatttcttaattctggagattttattaaactctcagtgcattgtttaatctatatgtaaaaatttatatttttatgatttttgttcgataacgatggagatgcgacggtttggccattacagtcatacaggtcggtttaaaacttttattttagcggggtatataagtgtgatatttgtaatatctggtttagacagggttgtggtgtttgaccattttacccttaagtcttgagataacttaagtgggaagtaaggggcattattggaattttacccaagaggttaatcttgtcttgtagtggaatgttaaagaatgccttaactcattttgataattaaaaattaaataggattatgggataatatctagataactttagaaatta

SEQ ID NO: 204971 - DNA, 658 bp, Cannabis indica
tctctacttcaacttgactccattctttaccttttaaccagctgagagcctttttgacaccaagagcttcaacagcttctgcagggtatgttcctccatgatatttggctgttaaatcaatgagatgaccggaggaatcacgagctactactccaaatccatatgtgttttctttctcaaacaaagctccatcaacatttatcttgaccgtatttgaagcaggtttagtccattgctcaatgttattatcctttgtcaagagagacaatgacaataaacattttttatcttgagcttttcgccagtggtcaagggtgatccatgctgagtgaagaacctgtgttggagatgagtgttttttatcccacacaatagagtttcgtgatttccatatcgcccaacataccataatagcacggcatgaggtatcatcatcatatttatcaaacatagactcaagccaattacctattgttgaagctgtattcgagagagtaatcagaccgcacttgttccaacagctgatggcaaacagacagcttaggaaagcatgtgaggctgtttctgcacccgtttggcagatggggcacaaagacgatatgtcaatgtgttttgacacgagttccaggcaggtggggagggtattagtgacagccct

SEQ ID NO: 204972 - DNA, 842 bp, Cannabis indica
tccactatttctttctttatttttcttaatttacgatttaccccctcgttttcaataatattgtcctttggcactcttttttcttttaatttgtaaaaactaatgagccttgcaaaatacaccactcataatacatattagaaatttatgttattatggggagattatttgttgtgtgggatttatgcatgcaaactcaaattttccatgtaaaatagctagaaatgtaaaaatatagcactctcattagcttcaccgctctatccttcaaattacctcacctaaactctatttttctattttacctcaaacttttacattataccatatgtcagttattatagtgcgagttttttgtctaaaaatactagtacagtctcgtatatatttgacatgtgaatctagttcctagttgaaaaaggatggcgtgtcaataactgctccaatagagctatccttgtatgataagaactcgcgagaaggtgtgatggtaagatcctattaggctctaaaattattgatttctctatatttaaaggatgttgttacttagtaattttagtatttttcatcatttttagaataattcgggtcctgaaagaaaattgatatttatgggtaaaatgtaatggatttggtgtttttatgctaggtgatgttagaggatggattgacgtgcaaaacgaatatttcctagagtttcgaaagtccaagaagagaaaaaaaactcgtggattgtcgttgcagcgtaagttgaagcaagcaaaaaaagaaaaaaaaacttaaaagatatagcatatctcatcggctcttatttcctatttcaacatatcgatgtaggc

SEQ ID NO: 204973 - DNA, 694 bp, Cannabis indica
ataacagagagcatcctgctgtcaatggattcaaatgtctattcactattgatgggttctcaaaagttcgttttcaaccaggattcccacctatttcaatggtagaaatctcacctttttatcattctcaaagtaaaatgtaacactttccattgaatcttagctgttttatacaaaatgcagattagagagcccaaagtttatgctcatggaaatgaaagtaacaaagatgatataaatagaaattggcctggatgtttttcatagttatttggtaagattgattacttatggttcgaaactcaactactatagtatttgctttggctacacttcccaactcattactatgacatctgaagtgtgtatactactcttacctatgtaattggcctctcaaaaaaagggaataacttcgatggaaaaggcttttcacattagaagcctggatatttctgcttgagtgatcatcaactttcatcttaaaaatatactttctcagaattgagtgaattcagtatcaaatctgtgtaataggtgattaaagtgaactccatatttaagtttaagcatatacaatttttgagtgagttttgttgttttgtttcaatgtttcctgacattatatatgtgcaattttggatagttcttcttttagtgcaatgaattcagacttaatttttagaaagaaaaa

SEQ ID NO: 204974 - DNA, 1088 bp, Cannabis indica
taatacgttttggttgatagtttggtttcttatctattctttaattatttgagtgtttaactctcttagaatggaagacttttgtattattttttaaatatagtttggaatttatgttgtcttatgcattacccggttcttgttaatttcctacattattttatatctggacaaatgaaattttttctccttgaactattgcacttatctagtttttgttttaacaaattactagtgtctattattatctcatacacaatcatctttgatgcttaaaacccttggtgaatattggtcgttattagcttttgttattctgcagacatataatgaagttcaacattgttttctaacggttggcttggtatactcggaggatttgtttatgtttcttctgaatgtgagtactttataataatttatgtttatttctagagcaaacattacctatctattataatggctgtaatcttattattgatgtggtttttattaacctaattctgattttatcatggtattttctttttgtatttctgcaaccagaagtgcaggttaaaagaagaacctttgacttttggtgcactatgcgttttaaagcatctcttgcccaggttccttctgcttctcttatttttgaattatttttatgattcttgtacagggtctgactttatcgtgtttttatttggaggttgtctgaagcttggcacaataagagacctttacttgttgaaactgtaaagttcttgttggatgagcaaaacctaggggtccgaaaagcactttcagaggtatttttctttatcagctgatagtgataagagttttctagcaatatcagtaaggaggaactctgacttgtgttgctctggtgtagttgattgtggttatggcttcacattgctacttagttggtgtatctggtgagttgtttgtagaataccttgtgcggcattgtgctctaacagatcaagatgacaatgatcatcagagatctaaggaagtctcagtatcaggcaaagcctatgttccttcacagcgcaagagattggaggttttcatctgagctatatatgtacatatat

SEQ ID NO: 204975 - DNA, 1183 bp, Cannabis indica
actatgaccaatactgagtcatatattcccgtggttatacgcaaaccaaccacgaagtccattgtaatatcttcccacttctactcaagaagtgctgaaggttgcagtaaccctgtcggcctctgatcttcaactttaatttgttgacataccaaacatttaatcatataatccactacatcttttatcatcccacaccatcaataatagggtttcaaatcctaacacctcttggttgttcccgggtgtaacgaatcaggtgtagtgtgagctccatcaaggattccctttccaagctcaccattatcaggaacacaaacccaagctttataaagtgtcatttcattatttgaaatcggaaagtccttagactgactgaccaatacctcatctcaaattgtaaatagtttaggatcttccaattgcatctttctgatccttttcaacaaatctgatttgaagtgtcaagttgtgtgatttcccaatcacaaattcaatttcagccttaatcatttttgtgcctaactgaggagctatgtattgaaaacctacccgggactttttctgctctaagcatctgtaatcataatctttaacttattcttgtcaccgtctttgcctcatattcctacagttgatgagaggcataagctataaccctattggcatgcatcagaacgcatcccggaccctatttggatgcatcacagtaacaacaactcttcttggtctgatggcaaggttaacaccaatgttgtaatttatcgttgcttgaactcctaaaaatttatttcacagatgttaagccatgcaaaccattggttcttttagttaactcagttagtggcattgagatttttagataatacttcgaaaaaatgcaaataatgtcctactaacccgagaaaactttgcacctccatcactcttcttggcctcagccaacttttaactgactcgctttttccctgatcaaccatgattctatctttccgactatgtgccgtaaaaaggatacttccgacaccatttgaagatgttgctaatgttcattttctgtcaaagaatacacaaggatgtcgtcgataagcactataacacagttatcaaggaaatccttaattactctgttcatgaggcccataaaggtcgttggtgtatttgtcaatccgaatgacattac

SEQ ID NO: 204976 - DNA, 1024 bp, Cannabis indica
caaggacaaagggcataagtttactctggtagaaagtgattctaaagttgtaatcaactctctcaacgacttagacttcatataggaaattgaaaatactctttatttttgtaaaagaatcgctcattcttttatttcttgtttattttgtattactgctagaacttgtaactttatggctcataatgtcgttagataagtttttactcataaccactttgggtatcttgatgttgctactatttctattaaacattttctgtaatctaatttatcattaatgaacgtatctttacaataataataataataataatagtacttttctttatatgaagtaatattagataacattttacccctaaaaaaaatactagataatatttgccctctactattatacttgtagaattttgttctcttgtatttttttttttttgtaaaaaataatattctccaaattatgaaaaaatttgagaatagttatgggaatttctccctcaagttatattttgagatattttattgatatagtacaagcaagatgtataattagagtatgagagttctatttaattaacttaataagttaattgtaactaactataataactttaaatactcatacactagttcttttttttttttgaaacggactcatacactagttctaaaattaggagtatattatgttaaattttattattagataactatttaagtaatttttttttcgtcttacaatagaatattaactctcaatcagtcttacgtggagaaacattaaaattaatatacaaaacttgttgaaaaaagtgaaaatatatatatttgtatatcatcatgacaagtttatctttttattttttattacaataattatgccataatttaggaacttcttatgagttaatatcgagttattcttaacaaatgcaattaaaataattaagaaactaaaaagttaacatataagttaattaaatacataagattcacttaaaaaacatgataatatctcatc

SEQ ID NO: 204977 - DNA, 902 bp, Cannabis indica
agcagtatactgccgtataaaattcaaaaatatgtacaataaaaaagaaaaaaagttaatatatcatgtaaattttccaaagaatatctcaccttaacttggctcatcaatcttgattgtttctccttccattcaaaataaagataaggtttttaattgttagaaatatatgagataaatcaatggaagaatgaatgatgaacaagaaaattatatgtaaaatagagtgttacaactcaaagttcaaatacaaataaagaaaataatagaaagggtagaagactataattataactcaaagcatcaacatataaatgtaaaaaaaaaaatgaaaatatatatgatatatggtatggtgtatatacaggccccgctctgggcataggcgggctaggcctgtgcctagggcccacccagtccagggcccaaattttttttttcctcttttaaatttatacattcttttaccaattttgaaaaatactacattttttttaacataaggacccaattttttttttccctatggcccactttgtttcagggccgaccctatgtatatataaatgtatataatatatatgagagatatagatagaagtgtagcatagatgaaaaaaaaggaaatctaaagtagtgaaagaggatcactaaaagcttgaataaggtttcaacatgtttgtccaaaaagctttattttcctctttatagaatattcagggttttgcagaaatacttctgagaattatcaagcatctaagaactctctagctttagtatttgaagatagaagagtggtatgtctaaaaagatgaaccaaaatttctatttatagtatttaggattacacactttgaacttcaataccctacacctcatgttgttaccatctcttaattggg

SEQ ID NO: 204978 - DNA, 513 bp, Cannabis indica
ttcatgggctgggcctattctattagaccatcttatgtgcttcgatattaatctttacttttggggaaattataccgtggactcttttttaacaaatatgacttttcgctttaagaatttgatttgctgtgttacataagtaaaaacataatgattgtggtacaagaaattagtggtatttcccatatttatatgagaaatttttacaaatgcacacaaaagtaggaaaaatttaacaaaaataggtggacatggaaaaggaacataaatacggtaaatatatattaatttacataaaatagggtgtcaccttcttcacaccttcaacactctcatcaaggaaaaaaaaaaaaaaagaaaatcactccaggagtatggagttttatactttttttattcaatttttacgttttttttattttattttcacttatgtgttctcatttttttatttctacatttaacataattttttttattttatttttttacattatctcactgctttccttt

SEQ ID NO: 204979 - DNA, 608 bp, Cannabis indica
aaaaaaaaaagaagtattgtgttttagatgaaaataaaagaactaataagtgttgaaaaaaaaaactgtaaacgataagagtattgagtattgagttaaagatgtttttatactgatcatgcatgtatgtaattatatacatggtatataaagaaaaatacaggctggtgtgtgtggtgtgtatagttgtattatatattgtgttagattttcgatgtgtcgcctttgacggtggagtttacttgaatacttgtaattattaattagttttagctgtatgtaatatgtatcatgatttggaagtatatatggtactatcatgcagataatgtgtgtacgtcactacgtctcttgtaatttttgtttctctcttacgtattatattaggaacatatctatttttgactttaaaaatcttattttttttttattgaatcagagtaaatatatatatatatatatattccactttcaacaaattacatttcacagcatcaaagaaaaagaaataggcatgaatatttacaaattttcaaaccaatcaatttttgagacttttctaagcaatactctccaattctatactttacattttttttaaatctttt

SEQ ID NO: 204980 - DNA, 633 bp, Cannabis indica
agctaactatctgctgaatttccgatctgctcaatggaaataccagtctgttcgtgctccgtggtgtgtcaaatgttattattgggggataaaactcaacctcctcccccattatgtgaaccggttaaatggaaaccaccaccagtagggactttcaagctaaacatagacgcgacagtggatcaatcgaaaaatcttactggtttaggggctgtaatatgtgactcatctggtatggttttagctgccttctccaagcaattaattggcagctttgatcctcatgaaatggaggctttagctatgtttcatggtgtacattatgctctacaacttcagcttcctcaacttcaaatagagactgatgctctacgggtcaagattgctttgtgcaaaccatctacagctttttctaaatttcaaaatattattatgaatatttttttcttttatccttttttcctaatgtaaatgtatctcatgtcaaacgtacagctaatatagttgcccacaatttggccaagtttgcactaggagtggatgaagattgtttttgattggattgtattcctccgtctataaactctattgttgtaaatggctctttggcttaatttataataacaagttttt

SEQ ID NO: 204981 - DNA, 1596 bp, Cannabis indica
aaatcaataatgataggaaaattcatttattcaattatttgtcaataaacatattttgatgtgaaataacatataagatcagaagattcaaaattattaattttgtggtacacatcgagcaataataaaaccaaatttcgaatattaaaattattttatatacatttcctactattaatattaaggtgcttttttatttgtagacgtatacgtatatggaataattctcctatgaaaccataatataattcaaaaatctaaataagtagatgtatacgtacgtagatggttgagaagaattatccaacccaaaatataagttatattattggtcattttatgtgtcaatcaaatagctggaaatttttttcatgtgaaaagaatcatcaaagtttcctcttgttattaaaaatattaaataactcatcatgttatgctataaatagaatactagctatcagttaaggcaaacccacaaatttcaaatattatcttatagtgtgtgatgtgtgagaatgaatatgagtatattagtattgtattgggatttttgctcttgctttccatagctacaaatgtgagtagtaatagaccccaatgcatacccaaagagagagaggctctcctaaagtttaagaccactttaaatagtcctaaaggttatctctcctcttggtctaatagtagcaccactcaaaactgttgcaaatggttgttcatcacttgtgatgaccaaaccaaccatgttgtttccattgttattggtgaaattgtcactacactcgatggcgacattgattcttcgttggccgaattgcatcatttgaaggaattgtacctgatcaacatgaacattagtcatattccaatttttatcggctctttcaaggagcttacagatctttatatttgtgggaatcccatcattggaatcattcctccacagcttggaaatctcaccaaattggaaaatctttttcttcaaagcacttctcaaatgattattgacaaccctagatggctctctcaactcacttctttgaaggaactcctcttaagtaattgccaacttctcaaggtacctaatcttatttcatcatcatctctttcccattcaaactattcattcacttctcttcaaaaaattgacattgatgacagttttatacaccctacaacaattacttggttactaaattctagtgctaaactatatcatttggatttatcttataacaaccttagtggaacattacatgatcttcttggaaatatatcaagttccactaagaattccttagagaatttatacttgagttctaatcaacttggtggattgattcttgatgactttaaaaacacctttccgtctttgactaatcttcgtcttgataataatcagttggaaggtcattttcctaaccgtttgaaaagatttcccaatcttaaaagtctagatataagtcataaccaattcgttggattgttacctgacctttcatcaatgccaaatttggaaagtttcgaagcatccaacaataagtttagtggtgcttcaagtgagagtattggaaaagcttgattatttatatttgt

SEQ ID NO: 204982 - DNA, 587 bp, Cannabis indica
atagtaattttgtagtaaatttaatgtaactctaccaatgatacactaaggtattcaattacctgtgatttaacaaaggcagtaagatcggaaggagtgactgaagcagcagagcattgaagggtagctttgttagcattaagatagttagagtaaagggcagtgacaaatgtagcagtggctacatactgaacattattccaaggcaaaaaccaaagcaaaccgccttgagttttcttgaagttgttgcttcctttgccgacgcaagagcatatgaactcctccccttgttgcttgaaccgcgctagtcgggtggcggccgagcccgctttgccgtccattataaggtttgcaaccaagacttgtgcgccaacgtatttgtcgtcccatgagaaagcagttctgagtccaccactgtctgatgagcttgaaatgtagtcaaggtattgttgcttcgatgtagccttgtatagccatgctgctgcccataacatctcatcctaataatcaaaattaattaaacaatttgccttgaaaattactcaaacaatttcaattaatcagctagggaaacttacaaaaatact

SEQ ID NO: 204983 - DNA, 895 bp, Cannabis indica
tgattttgactcattaccctatagtaggacgttacaccttactaggttctataatctatgaaattaaaacactaaaatatgctcttcaaaaacaaaaattgaagtaaagaagcataatcataagtttgataattaaatagataaatatataaaaagaacaaaagaaaaatggtgacagtggtaaatgattttcatgagtgtaactcggtcaaagactaaaacttgaaaatcagcttaactttccaaagtgaagaatagagaaagaagccaagcgtaagaaaggtggtccatcatatcataaaaatcatcaatgtcttctcttctgttctatcttaaagcttgaaaaaagaaaatggaaaacagaagagaatgtataacaagtggtccacatataaagatgatgtaataactcttctttaatgttagctatattttataaaaaaaaagtttaagccagctgtaatctgtgcacatatatgatttaacaagtaacaatcccaattttcactgcagatttagatccaacatttaatctcatgtaaacttaaaaaaacaaatagaccacaccaaataatatactatatagttttgagcactattctaggaattttatacatatatattattcctttgctttgctgctcatgtcatgtgtctcatgtgccaataaaatttgttacaaaaatttacatgcaacacacccatcttaaaaaatacattttttttaattacatttttttttctattaattaagtttaatccgtagtattatgtttcactattattattaattcaattttggtttaatatgtacttttttttttttgtttgttagtagagactacgtacttgtgttcaacagtacttcatcgtacatctgattcaaactcaacca

SEQ ID NO: 204984 - DNA, 512 bp, Cannabis indica
ttcttcttctatgttcattcataccgattcccttcttcttcctccttccccaattacccaaaccccacccagacccaatcacccatgtcttcctcttcttcttcctctgaacatggtctctcattttcgtcaatggtggaaccatggctgatccactctttcctaaatcgtcgtcttctcttctccctctccccgcttcctcttccaatcgtgactagggtccaaacagagcttcaagcttctcgattcagagttaaaaaaaaaaaggaaacgtatgtttgagcatgagatcagagtggtatgtttgcgaccaagaggtttcaagagtgtgatggttttgccggcgggatggtggctttgaccgccgagattcatacttaagccccagctctgattgacctacagtcctcactgtggagttagatatgtggttttttaaattctccttcccaaatagaattaaatttgacatttttgcattgtatatggtgtttatttcttttttttttaat

SEQ ID NO: 204985 - DNA, 986 bp, Cannabis indica
taaacatcactcataagtgatctcttcgtgaaacaacattgaaaaagttgggggaaagagatcatatatgaaaataagttaaaccacattttagtacatggttcacttggtcttcaacaataataaacaagtaccaaaatatttaagcaccaagcacattacatagccagaatatttaaattagtgctgcaattattataactaaatcagttccaaatagatgaaaatacagtaaccttaatgtgaccatcttgaccaatcaacaaattatctggcttcaaatctctgtgaacgacatttaaagagtgaagatattccaaagcaagaacctagaaaaaacaaattagaagaaagaaaaaaaaatctggttatttccaagcaaaacacatgctatgaactaaagaaaaaaaaatagtttgaacataaacaaggaaggtaacaaaaatgtcaaatatattagataattcttacaacttctgcaatatacacacgagccatatcttcatctaagcagcttagatttcttagcaaagagtaaagatctcccccatttaagtactccataaccaaatagagattttccctgcatgtgaaggagtagaaaaagcgaacctgttcatcataagattgcgtacatattagattcataagcattacattttgaatgatactcattatacttcgtaagacttgcttaccacaaaaggatttcgaagtgatataagaatgttacgctctgctaaaatactttcaactgcatttttacgaatcatatcagccttctttagcacctgtacaaatattccaattaatgatcagtaatagatgccaattttgaatcttcatataccagaaagtttaaagataaccaaatagaaatcaaggtaaaaaataattataatttcgaatagatttgaatattcatagatgatgtgtgcgataacgagagcagtattgtattgtacattaatattcgtgacaattat

SEQ ID NO: 204986 - DNA, 564 bp, Cannabis indica
agtggagaagggtggtttttagggtcaattggtcgccggtaatttctagcttccatttttggttgctggtgcttctctcatttcggtatggatgatttctcaagcctatatgattccctcatgagaaaggatgattatgtggatgaattttgtgacgatattgaccctaaattgcttgaggacggtgtggaaaaaattacactttctcatgttagaaaaattataagtacgaaaaaggtttcttgtaatgctattatatgaatgttaagttttattggcagcttcaagggactcttgaggtggaagcccatgagcggaacatcttcctgttctgttttcaattgcttaccgaccaaaaattctttcttgaaagtggtctgtgggttttcgatgataacattttggttcttaaggaggtagaggcttttttagatccaggtgataggaatttcgactttgcttgtttttggattcaaatacacaagatcccaatggtttctatgagtcaagcatgggggtatgatcttggtcgttcgggtgggggggggggggggggattggatg

SEQ ID NO: 204987 - DNA, 4365 bp, Cannabis indica
gtttgacaattgtcttgggtgatatctcatagtgtgtgtcttagtaaatatcacccaacctcttacctgaatgattcaacatcgtttgaaggcaggtatgaatcctttggtttttcctctgaaacatgaaaaattacttgccttgtgttacttctgtggaattttaggtcacccattctataaatgtttgtaaaaaccaccaaatattcaacgagatgcagttcttcgatatggagattagattcacgtttcttttcctactaaggcagtaggtctgagatccaaataaggtagacgtggtgatgttagttctagctctatttccttgggtggaattaggacccacaattttcctttgtaatgactacgaggtctaactgtttcatttgattaatgtatgttcacgcttattttcaagacgacaaagttatgtcagttgtgaggtgtaaaacattcttctttgagatggcctgggcagatgaggaagattgtgctaacatcgttttctcaaagtggcatactcatggtggctcagacttggatagcttgaagcaacgtgttgcttgtgtttcttcaagcttatataagtggaataaagagatttttacaaggaccaagaaagagatgtgatataagaaataagagcttagtaacattaatatcgaagaggcctggttgagaagccaaaaaattgagaaggagctggatgtgttagcgttaaaagatgagaagtattgggcctcccgctctaagtcgtcttggctgaaagtggggatcgtaatacgtcttactttcataagtcagctaacgctcgaaagaaaataaaaaagctatcaaaggggtgtttgatggtggtagagcttggtgaattcgaacaaagggatggcgtgtgtctttacttcttattttgaagaacttgtttgctattgattcccccaagttgatgatttcaatcagatgtttgatttggtgccgctcttatgttttcccctaaaatgcatgatcttctacttatgtcatttaccaacgaggatgttaaggcggctctattccagatgaatccgtctaaaaagacttgagaattgatggtacggaggttggcgttctatcaaaattttttttgaggaacaaagtacttttattcctggaccacttatcatcgataatgctatgattggatttgagtgtttgaatcttataaaacgtcacaagaaaggaaagaagggttttttggccctacaaagttgatatggcaaaagcctattagtagtgtttccttggtttccttggtaagaaggttgggctttcctaagactttgggtttccttggtttttcaattgtaatactcctcgataaaaaaaactctattaatgtgaatggtaatattgtgggtaacatctctctgactcgtgggattcgtcaaggtgacccgctaccccttttttgtttttgatcttgtgttgagggcctttctgtggtcattaacaataaatgtcgtgttgggaatatttgtggcctttcttataggagaaggggatctgttatctcccaccttttgtttgatgatgacaatttctttttcttagaagcctctcaagatagttgcatgagattcagggagatcttgggttggtatgagaaagcttattctggtcatttggtgaacctttctaaaatcttcagtgtgtttctctcctagtattaatgatgggtttgcgtgtaatgccctaaagctttggcacactacagtgatttttcaaattactgtgcccgtctttgctaatcaaagattttcttgaaaatcgtaccaatttaaaattttgattaaactttaaactttataaacacatatatatatatattacataaaaactgggatctcgtgtttaaacttaacaatcaaaacaagttttacagacatgtcgcgcatcgactacaaaatacagcccaagtcgtcccgagactgaacgctccagatctcaccgtctcaacatgtacaatcatctcccaagctcagaactcactgttgttcagctttggcatttcccttacccacacatgaaagtaatatctgtgagtcaacagacccagtaagaaaagtatataacatataatataatatcgacttgtatctacgcgctcatacacctattcacaaggcttatcagatgaggaagaatgttttttcactaaagtatgaccacagtaccacatccactacgtaccactactgtactagtgttggtagggtttgccccgtaccttgagtaccactaagtgttgtactacatacactacgtacctattcgtactagtgttggtaacaccgtattgtactcattgaacactatacattgtaccaatgcactcagtactgctaccgtactagtattggtagtatacacatattacacatacacatattcatatataaatatgttctatgttagtcttacctcggtccaagttcaagtgtgctagtcgacctgaataaaaaattacgtgctgaatggatgccttatgtcacaatcacgaaaatgggtaaacaacttgctaaaaccctttctgggacctaaaatcaaaacttaaagtttccctatcaataactagcaaaacaatgccctaattatcgaggaaacaccaaagctaaggctctaaaaatagcccaaactagtaaacaagattttctggggtcctgcctatgaaacgattaaccggttctacctgtagaaccggttaaccggttcatactagaaatcctaaatcagttcgaaacttaatgaattcttccccaaattctctcaaacttttcagaacacctacactaacatccaataatagtttccaagcagtagcagcaagaaaaatgcactgaaaccaaaagtgccattgttgagctaagtttgagttttcaaacccaaacttgctcaaccaccccttaaactaacaaaaccagtagcaacctatgaaattctacctaaaacaacctcagaaatcaaactagaataaaacctaaacctaatagtaccaagaacctcatattgcaagtctaaactaactaaaaccttaaagaacttcaaggaaaagaagtttttagggcttaccttagcttgagcttccttaaatccttcctaaccttcaaaaaaattgagcttccttaaatccttgctaaccttcaaaaaaaagagaagaagaacaccaattcccctagttctagcttcagtcgagagagagaaagagtaaaaggataggattttttttttttctaatttttgttattttcccaatttcattcatctaattaattaatgataaactcaggatgaaaatagagtttagtggccagttgtcagcctaaaaaccagccacctaaacccctaactaaaatacccaaaatccctttatctccaacttaagaaaattaataagcctaggagtaaaatggtcgaaaaccataaccccacctaaacccgacattcaaaatatctcttatgtttgtccactaagaattaggttctaaacttatccatatgactctaatggctatccatctaacctgaataattttagatattgagctctcatactgtatttagctctcaggtggcttcctccaccttactacttttctagagtacattgaccaaagttatggtcttgttccgaagaaatttttccttcctatccatgatttgaactagttgttcctcataggataaatctgactgtagttctagggcttcataactcaagacatgagttgggtctaaaacatatttcatcaacattgaaatatgaaatacattatgaacaaccgataacattggtagtaaggctagccaatacgctacctacccgaccttctcgaatatctcaaatcgccctataaacctagggcttaacttgcccctctttccaaggcgcctaataccttttattgatgaaacccgtagaaaaacatgttctcctgcctgaaatgcaatgtctttacgcttcgtatcagcataatttttctgtctgctttgcaaagcaagcatccaagccttgatcttgtctattgcctgattggttctttgaactaactcaagacccagatacttcctttcccctattttgtcccaatgaattggagaacgacacttcctaccgtacaacatttcatagggagccatccctattgtactttgataactgttattataggaaaattctatcaaaggcaagtatttgctccatgaaccctcaaagtccatgacacaggctcgcaataagtcttctagtatctgtattatcctctctaactgcccgtcagtctgaggatgaaaagatgtactaaacttctatttcagtgttttaagaactga

SEQ ID NO: 204988 - DNA, 1412 bp, Cannabis indica
taatcacgcaaataggctggtgttttggagattctgctggtgcgtctaggaacagatggcatctgttcttgttgaattgtgggagcttcattgcccgtaggctgttctggtgtatgctcatcagtatagtcttcatcatcaacatctgtgtgctgatctgtattcatatcctgaggcaaaacgttagtgaaaggagggctattaacaatattgggaaaatcatgaacatgagtctcagaaatatgatgagaagggaaaatcattttagaaaaagggtctatatgatttgtagtgttattaaggcgatgaaatggatatatcttttcatgaaaaataacatttctagaaataaaaatatctttggtatttatatcatataatttgtaaccttttatgcctttgggatacccaataaaaacacaagttctagctctaggagtaagcttgtttctgtgggcagtaagagtgctggcaaaagctagacaaccgaaatttcttagttgatcatacttaggtaactcatcatagaaaatttcatatggactcttattatcaaggttgggtgtgggtgtgcggtttatgagatatgctgcagtaagaatgcaatctgtccagaaatgaataggcatttttgcttggaaatagagagcacgagcaacgtttaagagatgctgatgttttctttctactattgcattttgttcgggagtttccacacaagtaaactcatgtaaaataccatatttagcaaaaagatctttaaagacaagttcaggcgcattatcagacctgaaacatttgaaaacacacttaaactgagtttgaatataagccaagaattcaggaacaatagtcacaacatctgatttctgtttcattaaaaaaatccaagtaaatctagttttatcatcaactagtgtgaggaaatatttgtgattagtgtgagaaggaatatggtaaggtccccaagtatcacaatgtattaaatcgaatttggatttagcaaaccaatatgtttgaaaaaggaattttcttttgttttgctaaaggacaaacataacaaagagatcgtttatgaacattgtcaatatcacaatgtattttattacaaagcaaagataatcgtttgtgagagggatgccccaaccggcaatgccaaacatcagcagtgacagtggcattgcacatctggttgtttgcatcatccaatatgtataggccgttccattccttaccctttccaatcacattcttggttgctttttcctgaatgttaaaactattagtatcaaacttaactttaatagaatcacctttagttagacaactaacagatactatattgaatttaaatttagaaacaaacaagacattatcaagaataaggtgtttagagagggcaacagtgccac

SEQ ID NO: 204989 - DNA, 856 bp, Cannabis indica
cgcaaccatcgagcaccaatgtttttatgactacgaagtggttgagctttcataaactcaccatacggtttgaccacttgatgatgaggctgatgaaaaagcttgctacaaaatttttctgtatgtccaatcactccacaaatgaagcagaatgtgggcgccctttcgtacttaaacgtaacccagaaccaaactccatcaaatcttgtaacttttaatcttcttctcagcggtttccttatgtcgagagtgattctcatcctaagataatccctcaaaactccaataaaattcttaggatcacattcaacgaacttgcctatttattgccaactccacgaactgttgattccgtcatacacccgggttgaacatcatggatttgaacccaaatatcaagagtattcaactccaatgccttaggatcccctccaactagtaacctttcaatgattaattgcatccgatcataagtccttggactcccctcaatgactcttttgatgtccacttcatggtaaaattgaaagagaaatctgttggtatcaagttccttaacgaacattcccattcctggctgccaaagggacgctggtatattctgcattttatcaaaatcgatgattcgattagataaaaaccttccaactaagcaccacctatcatctataccttcactgcctccttccccattcacggcaaaggcttctaactcttcctctttaatctgaaaatcaaaaacatctcctactgcctcccccatatttccactgctagatgccatgacgctcaaaagaaaaaactgatccgaaacaaacttaagaaaatcaaaaactcataacactcaaaccatgtc

SEQ ID NO: 204990 - DNA, 613 bp, Cannabis indica
taaaaatattaaatataatatttaattttaagtatttggataaaaattctaatagataataaatataattagaaatttatgtagttgattcaatgatttttctactagaactccatttgttttcatatataagagagtttttaatctatttgttttttcttataattgtataaattgtagctatttatttaaaattatttgtaaatttttttaaaaaaattgaataatttatcgtgaaaaaataaaatttaaataattacttattatgcatataagaaaaataatcacgcgtgcaacaaaacatgtaaattatattttaaatattataaactacttaaatttttttaaaaaattacaagtaattcttaataaacacaacatatataataataaaaaaaaagtagaattttttttttaattttacaatttaaaatattttttatatatatttttagagaaatctatataaaaactcacataacaattaacagagtaacataaatcgcaaccaaagtccacttaacaaccctcatgaaaattactgcaataattaccgaaataattcaaaccgtaaatttaaaaacacaaagttaaaaaataggtaaataactat

SEQ ID NO: 204991 - DNA, 921 bp, Cannabis indica
gggcaataccattttcccacaacaactgttttggacaagattttgaggtcgggaagctgagatctgagggaggaattgaggccaggggcttcgtgtagctggtaatggcggggcgtctccatgtagaggttccatttccttctcaagaatgtaggaggaaagccattttcggccacagattctgctgtgaatcttccacgaggattcttttggatgatctcaacttgttgaaggacgtctgaagggtctaagggtctggacttgacgtctttaatgtaagtgcagcaacagcatgtccccatgtcatcttctgttgaactagcgctcgcctcactgcatccaaacaaaagatgtcaattgattttgagaatcttatattgataatgtgttgaaactaaatatcatatatatatatatatataagatacatgggctaatcctctagttttcaattaattttgagatagaacctcatacaccttagcatagactactccgttctaacaatcaggccggagcaaaggtaggacaagtagatcatagagcacaagatattattttacgaaaattaatatatttttcacttaatttttttagtcattaattgagtttagtttaataaaatttttaaaaatacatatttaattttttttatatatactacacgagatgtagctatagtataacatccatattatcgttctttttggcatgtgtagacaaaacaatcaatttaaagaccatttataacaagttaagaaaaattaaaagacacgataatacttatatgttatagttcatagccaaaaattctaaatagtttaaactaaaaatctgttcaatagatgtattttggtggcctgggttaataattaaatgagaatttttcttgaaaaaaaattatgttttcatctatttttt

SEQ ID NO: 204992 - DNA, 647 bp, Cannabis indica
taactttcaacactaacatccccaccagccaactcagccgacgtgcaccttagctagaatattgatattaactaatttaagtttaattagacttgcttacacttatacatggcaaaagaagcaacatcattcaatgcctaaacaacactttaatacttgtgtaagagtggaagaattaatatagaagggagagtagaacacagagtagaaaatctgttttctttctaaatgtattgatcgaattggaaaaatgagcgaaaggaaaaattcactaatatatattttctaaattagtttagttcaaacaatgaaattaaaaattcactaatatatattttctagtaaggatcgtgagtacatagtacaaaatcatataacaattacttctcacataatctacctatctagctatttatcaacaattaatcatatatatatatatttataattatatatatatatatatatatatattctccaactccagtctccagtctccaccacatttcagagtttatctgtagttgtagtttcaacactacttatatatggcggtttaacataaatatcatcatcactttgttcaaaaaaaaaaaaaaaaaaaatcatataccatcatcactaccaaaacttaaattaatattcct

SEQ ID NO: 204993 - DNA, 1107 bp, Cannabis indica
tcctgctggactgcttatgccctcatcaagttcgatatctatgtcctggtatgtaatcattaataattatctcgacaatgaattatattaattttgtactataataaatatggacatatatatataatatgcaggtaagcaatgggctgggtgcaatttctggtgctgctcaactcatcttgtacggatgctactatggtacaactcctaagaaggggaaacagggcattgatgctccaaccaagcctgctgcagaagtacagctctctgccgcagaccgagtttgatttcattaactcaaccccttttgggcgcgttttagatatttaggcacataatagttttttttttctttttactttttgaatatttttcggtatttgattgtagatagagagctcatagcaatctctatgtacaaatatgctttttttaggtccttatttcgactcaatattgttactcctttttcttttgataatatgattttagtttagttgagtttattctatttcttttcttcgtttcataatcaaatgtcatatatacgtacaattatatttgatgtaccgtgtttaattctataaagtggactaatatattaataccaatttgtttaactcgatgaataaatgcaccactaagtagataatcggttgaaaatgttcaattagcaatacaagaatcaactcaaatatagagaaagagagagaatgaatgacaagaaatggatattttatctaggggtgcaatgtgggtcagacacacaaggcacaattcgaaaattccacaaaataaatgggtttggatcatttttgttttcacatggaaattatatttttttagttaaataaaacataaacatatcaaattattcattaattaatatgtcataacattttaatgaattgaagtacgatttttaatataaacgagttaaacaatcagattaactcgtctataaactgtataagttttaatttttgacacaattaataaatgggttagatttcaatttgacatttacttataatacttaagtaatttacaattgatgaacactaattaccacccctaatttcatcatttataatttaagcagtcaat

SEQ ID NO: 204994 - DNA, 838 bp, Cannabis indica
gtgatctgtattggagtttctggcatagaaaggaggtgggcgataaggaccaggccgagaaccaaaggttaaattggctgacatttttgtggtgatatcaagcatggaatggtgccgttcaagtcttgtttcatgagcaagaagcaatgcttgaacatcttcgagagacaaagcatcactgcgagaagtgattccagatacaactggatcaaactcagggccaaggccattaagaaggtgaagaatcatatcaagatcagtaatggtgtgtcctgcagtggccaaagaatcacagatgcattttattttatcaaagtaatcagagatactgagtgaacctttgtgaagattggtgagttgagatttaagttgcaggagccttgctttggactgactggagaatctttgctcaagagctttccagagagagttggaggtattatatccagagacagagccaagaatactctcagacatggatgagcgcagccaagataggagaagctggtctttgcggcgccattgaagaaactgagggttgtgatcgccattgacgagtttctcaggtggtgaaatatcagtaaaaaggatctcatcaagatcgtgtcctataacagtaggcacaacctgtgatttccatgggagaaaattagctcgatcgagcttgatggtaagggagatgtgagagaatgagaaaacgaatttgattgaggagctggagttggggcttgaggcctaggatcagagacaccgacaggagacgagttgtcgccggaggatgccatggacgcgagtcagagttgctcttgataccatgaaaagattaacagcaggagag

SEQ ID NO: 204995 - DNA, 755 bp, Cannabis indica
ttcatagcaagataagtagtggtttcgtacaacttagggaaatagcttgattagagtagtttggattaataggttgtattgctcatgacttacattttggttaaggaggtgaaacctacttgtttcctatccaaaacttagaggttgtgagttggttttgtccaaaaaaaataaaaaaaaaaaaaaaaatcaaaacaaaaaagatcaacaatattattctcatcaaaccctaaaattttcaaaacaaaatacccaatcctaattataattattattattaacaaaaaaaaaaaatgaaaatattctaatcaacccaaaatttcaaaacaaaatacccagatctaattataattattattattcaaaaaaaaaaaaaactccctaaaaaatcatcacatatattttgtggcttctcatcttcttcttgatcatcatcatcaaatttgttgtggttgataggaacaatactcataacgagtcgtccctcaaccctatcaactctcaagtaatagttattatcgtcgtttttcccaacctcttcaacgacaagtcgttttccgtcgtttgtgcatctccgaacgaagtggcatcttttggtcaacaagatttgcagataaccggtctgcctgatcagtgaggttgttaatggtggtggaaaatccttggtcgccatcgtcatcatcatttttttcctctcaccactcggaattggataagcaagggttttaaggtttgttattagatttttttttttt

SEQ ID NO: 204996 - DNA, 1241 bp, Cannabis indica
aaataatgacttaacatttaataatcaggtaggtacagagttataaaaaaaataacttaagtattattaccgctaaaaattaaacttaagtatttatttacaattaaaaattaaacttaattatttatgcggtaaattactcttttaaatattagttgtatctaatcgttatcacgaaatatgatattgtattggtgtaagtaaatattaagtttggcatattctcatttaataatatataaatatcattttgtattttttaaaagttaataactaaaccttataaaaatttatattttttaaagtagtacaaataaatgttgaatttaattttttttaaattaaaagttaataataacttcaccttatgactaaacttgttatattctttttgtttccgtacatgctagaaattgattttagcttagttatattaaaaaatgataaaaattaagattaggatctattttttattattttgaaaaacataaaatttaaattattatttaacaaaataaaaagtctaataaattacttttttaaaatataatattaaaaatagtatttactctataataattattataataattattatgaaaaattaataaatattcataaagagatacatcattacatcatttttctcaaacatttgatacaaaatacgcaaatacaaatttactttaattagtgcaattataatttacaaatctacaattacttattttaattgagacttataagtagggatgcacattttctcaatgggaataggtacgtgaaaatccacttctaatgggataggaattcccagtctaaatgggaaatggagcgaggatataaataattagtatattagtatatttttaaagttgtattttgaataataattagtatactaaaaaataaataatgtgtaatatttaatttttatttagtttaatatttttatacatttaaatattaataaatttttatttttatttaggagattcccggttttactaagagattttccacccatcataggaattaaaatccttaatagggatggagatacaggagcactctctactaatttttcaccctgtgtacatccctacctatgagattatgtatttggtggtctccataaatattaacatttgaaaataaaaatacaataaacggagcctaaaatacattcaataatgcataaaacaaaacttatacagcagaacctctattcaagaatacac

SEQ ID NO: 204997 - DNA, 1156 bp, Cannabis indica
ctaaattcccttatatcttttgtatttaattatcccaaataatgtgtcaaaaaaaatggtaaatacattaatattgtattgtattatattgtattgtcttgaattgtgttgtattgtaatgtattagtattatttaatacaatattatgcttggtattatattgtattgtattgtattaatagattgtgtaaagttataatatattttcaatacactcgaccccaacaccaactacgggtccgggtccgagttcagggtccaggtctcgggtccgggtctaagtccgggttccggtccaggtctgggtctgagttttgagtccgggtccgggtctcgggtctcgggtcctgggtcccagtccgggttcgggtcctaggtccgggtccgagtttgggtccgggtccgggtctgggtctaagtatgggtcccgagtccaagtccaggtccaagtctgggtctcaggtctcgaatctggatctaggtctgggtgtcgggtccgagtctcgattccaggttcgggttcgggtttgggtcccgggtcttgggttcgagttcgggttcgagtcttgagtccaggtccgggtctgcgtccaggtccgagttcaggatccaggtcttaggtccaggacatgggtccagtctgggtcctaggtttgggttcgggttcgggtcggaaattgatgttgatctcgaatcctttgtaaatattataatacaaggaccatttgttatgtattaaataatacaacatacattatattaaaaaaattagtcgtaatacattgttttatctaaacatagtgttatttattagttaatacaatacggcgaaagcattttttttttttttctgaaacacatgtaaaaagcatttgtataagagtaagagaatgtaaaagaaagtgaaaaaataaaatatgttgtatacatttttactttttaggttgtatttagttcatcatcataaagaattagaattgtaaggagaacactaataaaatacagtaatataactaaaattcttttatttagtttaatagaataaagtttattgtttatatcttttgaaagaatggtatgatattatctgttttattttattttactgtacttttttagtaatgaaaatataaggttgtatcttttaaaagaatg

SEQ ID NO: 204998 - DNA, 1173 bp, Cannabis indica
aagctgacgagccaattgaagagtcagcagaattgccaaaagttctccttcaaggatcccagaaacttttgtgaaatcagtagcaacccaagcctgcaccccatcagccgcagccctctgaacagctgccaaaccagcttcctcgcctgaaattgaagcatcagtatgaaaaggtatcaagtcggaatcgcaagagatatccgataagtcctgagcattcaaaattggaacatccccagggtctgcaagatcagacacagtcatctctctcacggatgcctgcacatcagatattaaatctgcaatcgagaaaggccggttctgaaaaatcacaatatttctccatttccaaatcgacgcacaagtgcaggcaacaaacaactgcagactctcatcattcacagaagtccaccataacccgaaatccataatggaattccaatgcagatcatcaattcgaatgccccaattgctatgaaacaaaaccgccttaatagcactacaagcaccaaacaaatgcaaagcagattcatcagcattgttgcagagcacacaaccctcctccaacctcccaattcgcgactttgtaggtaaaacatcagaccagattttccaaagtaacaatttcagcctaggatgaataggggaacgccaaagcttttcccacaccttattcggatccttgaacctatcttgttgactcacccagtaactgctcttaactgagaatttgcccgattttgatgctttccaaaacaaactatcattagatgatatcaaaggccgaatgctcagaatagcctgagccacattctcctcaaaacattcattgataagatctgaattccactctcgattcccttccataaaaagatcagaaactttgacgaaagcatgtcttctagaataagtgaaactactacggacttcctccatagataccccagggacccaaggtctctcccacaaatccgaaccaccgtccccaattagaaccccagccccaatcttgcaaatttttctagcctccagaattccttgccaaacccaggagtcacccgctctcttctccaccctccaagcatctaaaccttggcagtatcttgattccagcagcttaatccaaggcttatcagccctagtaagcaatccccagctcagttttgacaaaag

SEQ ID NO: 204999 - DNA, 1018 bp, Cannabis indica
aactaaaataaaaatatattaataggtttttacttgtggatcaattagaagcaaattctgatatttgatagagtttttcaattggcgtggaggagttttttcaactacgattggctgtccaattagtttgaccccttttaatatgaggtattagtttgtatttcaggtcattgctttgtggcctaaattttcaaaagagttaaaatattatataattaaagtaattattatgagatgagaagaaaaaaaaacatgcaaagcaaatatagttatataatccattcttaaaactattatgagatggcaagaaaatgtatgcaaaataaatgtgggtgtaaaatttacctgtctgaagttattagtgagagtgtcaaccatgttgtaaaggtgttttatacactacaaatagagaaaagatcagacacatacaaagtaagaaattaaaatataatactgaaagagatatataagatatgaatcaaataataataaaaataattacttagcaacctgtgagaatttttaaaaagtgtatataattttctaatttttatatcttgttaaaaatgatacaagatactgctatgcctagattaattaggtggataagaagagcaaaaatgagcaagttccggaagcaaacctatgctgcctgcattactggtttagtgtacatactatggagagcccgaaatgctaaaatttggagccaagaacaggtacattcagagcttttgattcaacaagtcaagaatacagtgaagcaacgtatttcactttgttggccaaaacgtgtgaaagaaaaagacaaagaatggtctcaaaagttgtaaaaaagattgtaaataagagtaagattgatagatattgatagatgataattgtatagttattcttggcctttgaggggtgcaattagtttgtaaaaatcttgtttgtgagcaatacaacttcactaattcatcaaaaaaaatgatacactaaataagaaaaacgaaaatacccccaaataatcaag

SEQ ID NO: 205000 - DNA, 1045 bp, Cannabis indica
aaattgcagatgagtgttatcattactacatcaattcagtaccataaacctcgtataaagctcaacttggacagacaattccacataaagttgatacataaagcttaaagttttaaataaattaaaaaaagaatagaaataatatccaatcacagttatataaatacaactaatttgatcataacatagaatttcttagaaaagacaccttcataaaaccagtaatttgatcaaagaaaaataaacaaaaaaagcacaaagtaattgattttgatctgatcccaacaaaatatactaaaaaaaaaaaaaaaaaacaaaaatcttgcacagtaactaaaaaagaacaaacatttaacttcaaaaacttacaagaaatgatttttacagaaaacccagaaatgaaatgcttccattcaattaaatagaaattaaaaacctagttcagacatgaacgagttcaaaaaagatcatttagtgaaaaaatcagccaaaattaaaaaggagaagatttacctaccaagtcattggatggttactcactctccgattatggtgttgtgatccttcttctgaacaatgagactcagttaacgaagcttgaagaagaagaagaaaaaggcggaagaagaagaaaagcaagaaagaacagtagaaagagaagagaagagaagagaaaagagtaaggttttttttttttttggattttgggttttttgaattgaataaaaacgtgggaatgatataattgaattaaatgaataaataagaaagatttaaggaataattagtaattacataatattaactttaattatttttttttttaatttttgaaaaaactaagattagtttgaatatcacaattaattatcttttttttaacacacaataaattatctttaatgcaaatatatttaagggaggaaacgttttttttattattattatttatgtataatgtatacttttgctttaatttttatttttcatttatataatcattggaaaagaagaatgttttttttttttttttctatttcacatt

SEQ ID NO: 205001 - DNA, 1442 bp, Cannabis indica
tttctccaaagctttgtctttcttctgacaagtcagttatgctccatttatcttcaatcatgaagaatttggcacagaattgagagaccatatcgtcccaactccttacacttcctgaaggcaagcttgcataccaagagtaagtgcgatcagtgagagattttaaaaactctcgaatacttagtttgaaatcatgggcgtagactcccaaatcatcaatgaattagatgacatgttctttagcattgccaaatttcccattatactttcgaaatacggaactcatataacctcgtgggtaaggtttcactgcaacttcaaacgggtaaggtagatgaaaatcgatagaagttaccgatgatgatgatttccctcttccgactttaagaagaccgatcaattcatcttttgtgacaaattcggaggaagatcgggcttcttcgccaaccctttcagctatcttagaagttctgatccctcgaatacattatcaggtgttgcctaagttctttgttcaatagtaagtacttgccttatttgagattcattcttcacacgctcttcaggtaagccgcttttgttaacagatgcttcttggtgtgcttgtggcagaagtgagctcaacagttgcatcataccgtcttggacttttaaagcttttccaatctagttaacccaacattatttgtgtttgtcaaattgcttagtcttcaaaccagcagatacactcacacttgaagcctattctgatgtggattgggcctgcaatcttgatgataggaaatcaacaataggcttttgtgtcatgcttggaggaaatttggtcacttgggcatcgaggaaacagactgctggagcttgttcctgaatctgagtataggtctctttcaacaactgccacaaaagttgtttggttagttctcaaggaacttggcatttccattcctcacacccgttatatcacgtgataatgtgaagctcaagaaatggctgccaatcttatattttacttgagaacaaagaacattgagattgaagtcgatgttcactatgttcgagaactaattactacaaacacattggccatttcttacatctcaactgaagaaaaacctacataacttacttaaaaaaaacactaactttacctaaattcaattttcttttgtcacaagctttcttcggaggttcctcccttcagcttgaggggggattttgaatatattgtggaataacaaaaattcggtagttagtggtagtttttttgttaagtctttgttagttatgcaagttgttattttctattttagctcctttgttctctgtcttagctgctacaataaatagtagcttcaattgtaaagttgaagcattcagaaaattcaacaaagaaaaatcatattcagatttacactctctcaaacccttttttttgaaaaagg

SEQ ID NO: 205002 - DNA, 1328 bp, Cannabis indica
ttgtatttttaaaaaatttttagaaacacgacacaataatcagttatgagttactatgtatataacggaaatagatgtcatagtaaccaatttatacctgttctctcagttactagttattgattaattgtcaggtattcgataacttgttcgcagccatttttattattaacttttttctttaacaaaaaattacacattgttttagtaatatatttaactttatgttaatttgtataaatattaatttttatatttatatatttaactttatgtgtttattctttattttttaaaaaatatattgaacgtaatcaatagttaaaattataaacatatattttgtaagtattcataaaattgtatataattatgtacttatattttttcatatttttggtaatattaaacagtatttatatataaataaaaattaccctattttttaaataatttttaaaaataccacattttcttctagaataatccaacaattttgttactacctagaacttaattagccttgggacctaattaccatagttcataggagtcattagttttttccctctccttaatctatggattgaaatataaaaatttatcttaatcccccttcttttacctttaaatatgtagtaagcattttcaatattcctatagtggtcagggctgtctcaaggtgttgatagacctacaacgaaatttaaaataagttctttttgttttacaaaaatttaaaataaatattatttaagttttggcataatatcaattttaatttttttatctctatatataacaaataatttttctcgccacataagttaacttaaggtgctatctatttaagcacttttgtaaaaaaaatatgtcaaaaattttgtcatatgttaaccgtttataaatttgagaagacacataataattaataaatatattttttatttaagttatgattcattaactttttaagttataatattctcattagttatttgtttttgaaatatttaatttatttatattattttgataattttttttatcattttgcactaaaaaatattactattaccctatatattagagtaatttttaaaaatattgtattaagtataatatttgttacttataaaaaatatatataataatatttattatttttttaaataatgcatttttatttttgagaagaaaatccctttactaaaaaaaaaagatatatatatataatatttatatatattagcaatatattaaagatattttaaaatgttatatttttatcttaaataaagaatgaatcctaagagcatctccaatgg

SEQ ID NO: 205003 - DNA, 1017 bp, Cannabis indica
ataattaatccatattatatataaacctatatcacttctcatttcttctctctctctctaaattatataataatgaaatgtttctctctttctctaattgtacttctacctataatgagtacactacaactacgactactactactactttcgttattgccatgcttattacaatgttattcttgttactactcaaatatttgtttatcaagaacaagttaactactactactaatcttcctcctggcccaactccatggccaatacttggaagctttgttagcatgatactaaacaaaccgacgtttaagtggctccaccgtgtgatggaggagttgaatacagacattgcatgtatccgtctaggagcaaacattcatttgatcactgttacctctccagagatagctagagagttcttgaagaaacacgacggtgtgtttgcttcaagacctagtactgtggtgactagtatgatttctcgtggttacaaaaccactgtaatgtctccctccaacaaccactggaagaagatgaagagagttcttctgtgtcatgttttgaagcgttctactcttgatttgtttctcgaaatgagaaatgaagaagctgataatctcattcgctttgtttataaccagataatcactaatggaacgatgaagagtagtgaaggaggagtggtgaatgtgagaattgcggcactgcattttgtggcgggagtgttgaagagaatgttgttaggtaaaaggtgttttgggaagggaagagaggatggtggacctgggaaagaagatgaagaacatgtggaggctatgtttacgctgcttactcacatttttgcctactctatttcagatatttttccgtggttaaggtggtttgatttagatggacatcaaaggatagttggtaaagcaatgaaagtgatcaatgagtaccaagactcattagtgaggaagaggatgcaagagtacaagaaaaacaggaacataaacctcctacagatattcttga

SEQ ID NO: 205004 - DNA, 709 bp, Cannabis indica
ggcacaaaacccaacatatcattactttacctatgtgtccattgtgccatctctcttttgaaactgtgaagcacgctcttttaaaatgctatcgggctaagaaggcttgaaaacattcaggattctatgattactattgtatgcacaagtattatgatatcatgaattttctttttaatgcttttgattttttttttggctaaggaaactatatttttatttttatgttttctttggtcaccatgaaatcaaaggaataatattttataaaaagaatgctttctcaccttatagtctatatgattggactgctagtttttttgcatagttatatgaatgcttaataggtttgtatgcattaaatgatagaggttgctaccacttagctttgtagtgcatcggttcataatgggtgcatgaaaatcaatacggatgttgctttggactgcaagaggaaaaaatacagttcgaatataataattcaggatgcttcaaatatagttaaagttggtatcatcaagcctttgctaggtgctatgtcttggttttggtgaagccaaaaccattcttcttgctgcaaagtatgccttaaatggctttcctattgtagtaattgaaaatgattgtaaatctctagtaaacaaattttttagtaactgttggaatgtaatgtcttaagtgtatattttgagatgtataaaactcattg

SEQ ID NO: 205005 - DNA, 1052 bp, Cannabis indica
agacctggacccaaacccggacccgaggcccagacctggacccagaacccggaacccgaaacccataacctggacttggacctgcacccgaaaccggacccagactgaaacccggacccaaacccgaacccggacccgaacacggacttggacccggacccagacctggaccgagactgggacccgtacccggaccgagacctgaacccagacccggaccgggattcggacctggacctggaccaggacccgtcccagacccgaactcgaactcaaactcaaactcggatctttacacaatctattaatacatgtcaataccaaacatattattgtatttaataatagtacaaaattaaaatggatatcaaattataagttaatattaaaattcttaaaataaaaatagtcgggtcggattagatccgatcggaataagtcgggtcgcatctaatctgatccgagtatctaatctagcggggcggggcgaggcaggtccttacatgatctggatcaggtcagatcatagccggatcagatccgacccgacccattaacactcctatttatcaaatacaagcggcatggattgggtctgagcttttaaaaaatttcataagttaattgtaagctatttgcgacactacaaattattcataaattttcaaaaaattatataaatatataatatttcaataataataatatatcataaaaaactcagattataattattaaagatctaaaaacacaaaaatataccaatattaaatgtcaaattacatattttataaattagaaatatattttttttcttaaaaaaataataacatttttacctatagatttatgacactactaaataatgtctcttatgatatacgacatgttaaaaatgttcctcaatattatacagttgtagaaatgtgccccttctgttactttttattaggagattttacaaaaatactagattttaagggcagttttacaattttactactacacagaaaattttacaaaaaaaactgtccacaccttaatttttttct

SEQ ID NO: 205006 - DNA, 1041 bp, Cannabis indica
ccatcactatctgcttcatccgtgaagttgattggttcaatacccagaattgactccatggacttcttcttcttaacatctgctgttgatgaagggcctttcttccgaactttctttggttttatagcagtttgttgtctcccttgcaccttggatcgtctttgccatagcaccagctcaagagctgcaagagcaagaagctagagagaaaaattggtttttaggagagtaattcctcatttaaccttacaagtagcatatgcagcacataagatgtttcatgttgcaaaaaaaaaaaaattaattattcgtgatttacaacttttttaaaaaacaaaaactcatttctatcactgataaacataaataatataataacatataagtttataaaatatttatataataatagtaaaaagagaatgtgatatatatatatatgtcttttacttaagcatataaccaaacatgtcgttcaattagagctttttctttttaatattatttatgttatttgcagtcagattgatctttatcaataggtcgattgcaccaatctattttatttaatttattttaagaaaaactttaacgatcactaatcaaaaaaattaattcatacgttgttgtaatacaagcaaaattttataattttttcatgatgtaatgggttttaagacatgcatgtccttatattaatcttatagggtatatattaatcttatagtgtgcgtgtatggtgcatccccataaaaaggtgcactaattaatttttaggtaaaattatcttatatactgttttcttaattttatttttaaatttacggtttgagtttctaaagtggttgtagcgctagttgcaataacagtttttatacgatttttcgttgcaatttagattgcagcgctagttgcaaaagaggtttctatgtaaaaattctagtaaaaaataacaaaataaaataaaaaaaaaaaaaactaattttgaagtgtaaaaatgaaacaacccttaattttatcattgttttttttttttttttt

SEQ ID NO: 205007 - DNA, 830 bp, Cannabis indica
agaagttgtttgtttgtttgtttgttttttttttttttggattaataaggtttccagacagttaatggggatgataagtgtgagaaaaaaaaaagaaaaaaagatagtgatgcgaactaccggtcgtattataaattttttagtttgcttttgctccaacccaattttctccctattttttaacgactttttctttctattttgcttcttcaagcggtaaacggatttgccgttgaaagtcccgtaccgtgcactccatcattagccaatcaaatgatgccaagtactcatgtgaaaagttttcacatttaattttctcaaaattagttacttattatttttttataaatgaatgaatatgaatgattgaactactcaaagttttcttaaaaaataaataataaataatttactcaccattagcccaaaaaatactttaaaagtctcccttaattaacagtgggtaagtttactcataattacccattattaatctaatcttttaataatagtttatatacatttcaattatttaggatgtgaattttattacatttacacaaaacaaaaaaaaaaaaaaccaaaacagattaaaattatctatgtatactataaatttttccattaataataaatatggcactatgatacacttttttttagagaaacactatgatacacttaatgatttttatttatgagcattgtcttttataaataataatattaataataaaaataaataatagtaatagttatagcactaaaacaaggtaaaatgaacccacataataatatgcaacaggagttaaactatacatttaaataag

SEQ ID NO: 205008 - DNA, 920 bp, Cannabis indica
attgagactctgatcacgactccggaaccgaaacctaccccccccccccaaaacaacccctggcgctgaactcggccttcgacccgaacccgaattcgaccccggacctagacccgattaaataaaataaaaaaataaaaataaacattacagaacacacttttgttttttgttttaaaaattgaaaaacaaaagtggttacaggcatttttgtttttcaaaaataaaaattttatcttcattttgtgattaaaaaattagaaaacaatagtgttactaaacagtaccatagttttgccataaattattaattataggcattaacacaaaattttgacaatattgtcactaataattgtttttgaatattcaattctttttaataatgtattttattttttataatttgcttcttaagatactattatgcatataaatactggagtaaatataatactttgtattttttgtgccaaatttaaaatgacatatattaacatcttgtattagagatagttaaagtgtcaagtatcacaaaacaaatagtgtcatattattatgtctcacacattccatcatgaggtgattatggggcgccagattacattttgtgttgaatactacaaaatagcaatgcaaatatgatagttttctttttctttttcttttttaatacttcacaaatttttttttataaaataataataataataaaacatagtttcgagaaacatagacaaacatgcagagactaaattcccgatcctccaattgatcgatagaccatcaagcatgaccatagctcatcatacattctttcttgatctcaaatatgttggttggtttcggaaaattattggtccatgtcactatctgtgataaaaaagtattaagtataataaatatacttgaaagcttct

SEQ ID NO: 205009 - DNA, 709 bp, Cannabis indica
ctgcaaaaccgcaccgtaccgcaccgattttttgcggtgcgatttttgcggttttttagtttgcggtgcgggtgcggtttggaaaattggaaaaactgcatgtgcgggttggtttgaaaaaatggtcaaaaaacgcaccacccgcaccgcgaacacccctacttttaattactagtactttatactttttagagcctaattattgtgaatattcactttaatttacctttctgttcgtaagaatgggaaatcaatacaaatttataaaaaaatacatttatacaaatttgtttaagtgaagttgaaagtatacttacttagcttatatatactacgtacgtacagtctaaactttaataatatataatgagatctgatgaccgtccagaagatatcgaaccacctactatatttcattgataattaattagttgtgtaaaaaatatacttaattcaatatcatatcggtgggcaaatgagtctgacccacagatatataagatctccaaccatgaaaacaaaatatcaacaacttaattatatatatacatatacatataaaaatatatgtgttatatatatataatattaataattgcagtaaaagtgaggtattaattagtctgaaaatgtgattattaagtcataaaatagattcttttgtggtaatttttttaaaaataataataaaaaatgttgctctttcact

SEQ ID NO: 205010 - DNA, 1147 bp, Cannabis indica
ccgttaaatagacacttttaataagatatataaaatatatagacactttatcggaaggctcctttttacatatttatatgggttgtgttctgccctaaaataaataaataaataaaagattagcataatgtgtggctctgtatggccaattaagatatgttgattagtaggcctcctccatatttggcttagcttgaaaagtataaggagtaatttgtggcttaaatatttgaattattaagtgtcaaattattattcatgtttttgtgagaaaattaggactattagtgcatgattaaatcaatgaaactttaacattcaagtaattagtaaagacacgaataataattggataaaaaaaacagagtatggaaaatcataattaaacaataaatgtagaaaataaaaaaaattaataccaagatatatactggtttaagttgaatagatcaatgtgatttatgactctatttcaggaacaccaccaaatcttttttattgtttgagtaagaacaccaccaaacaaagagatataactaatatagctgagagttccaattattaataaggtgaccaaatatttattttttttctatttttgattttgcttaaaaaagaaaaagtggtgattcaaaattaatggcgtaattaattttcaagtttgatgttgaactctttttatatattaatttgatgttttcaaatttgactgattgactaattaggaaactaaagaaatattcaaactttgacgatatgaccaaataatctcacgttgaatggttatattatcaattaagaaaacatatataggacttatattatatgtttacaatttcaattattctgttaattagtttactacatggattgcaatatatatgaattgtaatttgaattggattaaaatttagattgttccgtatatttataaaaaggcaaaataaaaaaataactttaaaatgtataataaaaaatcccacactaatttatgcacccccaataatatcattttcacacaatcgcatgcatatcatatgtcttttttttttttttctgtcttttgtttttttttttttgggatttcattatattatgaaaattaataaaacctggaatagcattcattcaattatagtcttttaaa

SEQ ID NO: 205011 - DNA, 931 bp, Cannabis indica
tttagtgtcattattagtcatcatctgataaatcaaacaatacttttattgaacaaaataagtatttttagattatttactcatttttacatgtatgtaaaaaattagtgtgtatgttatatcttttttttttcatgaattttaactctatttttttttttggtaaaaaataatgaattgtagaaaacacaaggaggagaaattggaattacacttgttggtaaatattttgagccttactcagaaacaagggatgacattgctgcaactaaaagactcatggatttccaagtaggatggttagtaatttcacaccaatataaatatgtgttttatttagttatatacacaaaatgtagacattattagtatctactatctatacttctcatattctattttgtccttcttatactaactttttttaacaatattaacacaaacttttcacaaattgataaaataaagagtaattgatgacatgatttttttatattttaatttttattacatctttaaatttattttttaaaaaaatttgaggtgccagttaaatattaccgttaaataataattagatgaccactgtgtacacctgtatatatgtataattaaaattttatagtcaatacagtaataattcagttgttatttaacagtgaaatccagctgacacctcaaatttgtaaagaatagtaaacataaagggttttgctataaaaaagaaagagataagagggttaagtgtaaaaaaatcaaaaaatataaaggagtttcaacacaaataaccctaaaataaattagcttttttaacaatttattgggagcaaaattgagaaatgtaagagtttatgctaaaatttgaactaaaaaaagtagtcaggtctcgctttttcatttctgttattcctcaacaaataacataagtgca

SEQ ID NO: 205012 - DNA, 676 bp, Cannabis indica
ttaattatgggcccacaattgaaagagaactccatactcttgggctttgggcctaggcctgtgagccagatatatatttttcctgttttattattatattaatattctttagtttattattatttatttcagatctaaaatctcaaaaacccaatgattttgatggaaaagaaattacaaagaaacataggtgggttctgagtttgtattggaacttagaaaattgattggtattttaataaatgtgtgtatttttgaattgatttttttcttcaattgggccctaagcatatatatatttaagattatttcagaaataccaaaaacaactaaaaatttacgttttttttgacatttttatagatttttttcgtacaaaactttgttttcacacgttgttctaagaaaaaccccttattttcacattgcgacaatgtaaaaacaacattgaaacaatacaaaactgtaaaaatataaataaaaaaaagtttgtaaaaatgtaaaaaaataatttaaaatgtatggtgtaaatttcctaatatatttctaagctggtgttgaaaaaataggttggtgaagaaaggaaggctctcacgtgatatattaacaaaaaaaacgtttaatttgcgctctgtttaatttagtcaatatgtgtacttggtcaacaaaaggacta

SEQ ID NO: 205013 - DNA, 644 bp, Cannabis indica
tttttttttcatccctccctcaccaccatgctagccttagtggcttaataacgtgtttaaactagtacagcgttacatcgtaatatctagtgaaattgttgatgacaagtttgatatatttgtcatcttcaatgtatgccttgttttttctctttctaaacaaggtcatgggcgtagcattcaataaaactattgagttatttgtagtcaaattattgattgcatttttatagccacatcatcaatgtcttcaaacctacaagttaattaaaagaaaatgacaacttctagagtactcttaaacatctcaagtaaatttatctgatgaatctattggagaaatattaagttatcaggattgtaaaccatgtggatagcttatacaagtaggaatatatttcaatatgagaaaataattttagcatcagatacattatacttaatgacaattttaaaataaatataattttcattaagaaaactataaagatgttaatttctttatttatataaaattgaacaacaataaataaagattatagggtgctatttttatagaaaaaatatagataaaaaaagcctaataaaattaaaagtaagaaaaattgtttcagaaaacatttattttacatcatccaaacata

SEQ ID NO: 205014 - DNA, 871 bp, Cannabis indica
acgatatcaatatgcaatcatatcaactatcgttctataagatatgtcatacatctagaaaccataaatatgtacatatgtatgtgtattacaatagtcttacctcaattttaatttcaagtgtgtcgatcaacctgagtgaaaataggtgttggtaattgaaggccctaagtcacatttatagaaaaaccaataagtgttgccttaacatttataattaaaaactaaaaaattttctatcgataaatagcatataattaccttaaatatcgagaaaacactcaattgggtcccgagatatgactcaaaatagacaatccattttaaaatggaccctcacatttctgcctaaattggacagtccaaaactccaatgtctgattttaaagtgtgcataactcattcaattttaatccaaaccttaccaaattttgcagggtacctaaaatatcataatgaacatttttcatggaaaaaccttaacctaattcgcaacaaaattcaagttatcacaactaaacctagtttgagttctttgaactcaaacttgcagaatttttgctaaaatcacccaaagcactttaaaccacttgtaaacagtcctaaatatcctaaagaagcttttcctaacctctctaaacttcctcaataggtcctactataagtaacaattagaaaccaaactaagaccttaaaaaaactataaaataagctagggtttaccttgattaccctaggagaatgaaggagttgattcctttgggttattcttcagtgaaatgagcttcaaaaaggtgggttagctcttggttgttgagtgttcgtgagtgagaagaagagaaggatgaaatgatggtgataaagctttttt

SEQ ID NO: 205015 - DNA, 2083 bp, Cannabis indica
tatttaattttttttattattatcttttacgtacctaaaataaaattctattaatatttttttaaactcgctgtacattatctttttttgagatgaaaatgcattttatattaaatgaacagtcataatacaaaagcatttaacgggggaggcatttcctccaaccaagaacaaatagagtccaccgagagagcatatttggcaagtagatgagccgccgaattggcagatctgtatacatgaccgatttgtactccagggaagtaggacactagatgcataatgtctgataaaagacaatgaaatctgacactgaagtaataggggattgtagtcctttggccacaacaagagagtcagtctctatgtaatgaacattcagaccattatcaattaaccattgcaatccatacattaaagcaagagcttccataacttcaggccgaaaagagcctacaacaggctttgaaaaggctgcaacaatgtctccatctgagttgcgaaggatagctccacagcctataacacgagtctctttattgatggcagcatcagtatttaatttaagccgacctgtgggaggattgagccaagaagcttcagttttttgttgcattctgtcaagagaagcagcaggagagggaacagagctacaacattgcttctgagctgcttgataatcttccaaataagatagagcaaagtaggtaagcatgtcatacagctttgttttattaccatgcttttctttatttctctcattccaaagttgccaaaggattgtgatgaattgttccatatgaagatctgaccacgaatccgaagcataaagcagtatttctttaagggacatatgttcagtaatcacatgggaaagagaaaaggaagaagtaagctatatcttttttggtctcttgcagaaaaacaacgcatgtatagttgtctcagcagcagttttacagattggacacataggagaatcagcaatgtgtctgtgatgaagtattgcagctgtgggaagacaatcatttagagcacgccataagaaaattggcactttagatggaagagagaaagaccagaatttattccaccagctttgaacttgaagacccgatacagcaggttgctgttcttctagattagtggccaatgtataacccgatttcactgtgtatgaaccatttgtttcaaagtgccagattagagtatcctcagctgggaaaattggcaaaggaatttgaagaattttatccatctcaagcaagaaaagatgcatttaagacatccaaatcccactgccttgctggtgtgatgagtgaagacacacgctgattaggtgcaatcccagttgatctcaaaggcaaaaaatttgtaataccaggaatccaaggatcagaattacacaagatgctttgaccagaaccaactttccaccttagtcccttcacaagaagttctttaccccaaacaatcccttgccaagtaagagaagggttggagcctttgttagaaaccaaaaaagaagaactggaaaagtatctagccttgagaatacgactaagcagagaagtggggttagagaaaacccgccaagcctgttttgctagcatagcttggctgaagtgaatgaaactcttgaaacccataccaccttctcattttggttgacaaagagcagaccaagtcttccaattgatacccgatttagaagagtttgaaccccaccaaaatttattcatcatgacctcaatttggtgtataagagacttggagagtctgaagcaactcatagcatacgttgggatggattgggcgacggcttttagtaaaacttcatttccaccaatagagaacaattgttcttgccaagcagataagtgtttccaaagtttctctttaatgtctccaaacaactccttcttatcccttcctgagtatgatgggagcctcagataccgttcgtggcatggtgtaattggcttttggagaatctgatgcaaatgagcttgaaccgaaggttaagtatttggtgaaaatgaaagcactgatttgtccaaattaagcttctggcctgaagccc

SEQ ID NO: 205016 - DNA, 1132 bp, Cannabis indica
aaatttttctaggtcaaaactaatcctaaaattacaggattgaaagcttacaatttaaattttaaagttagatattaatttctttaataatttaattattattttattattattattattattcataaaactaagcgtaatagaaatcagtatatattttagtcaaacaacccgtccaccaaactatgcgttcaaaattctcaagtcgtctttaacctcactattacactctttgtcaaatctatgacactctttactctcacaatcagtcaccatcatccaatgtatcttaattcaagaagcatgaagtgtttgaggtaaagaattttaagtttactcacttaatattcacaataggagaagattcgtaggtctatgaaaagattcgttggtctagttttcatatttttgttttcaaaaatatatctcagtaaatctatcatatctctctgttcatctgattctagctattttggtacatgcaaagctaattcaattttctaaatattttatgaagaaactattcactaattcggtgttattttatgtcaaaatttatcatctttctattgttgtaattcgcttttcttcatattttcagaaaaaatatttttacttaaaatgcaataactctctcaattctcatctaattaagtgtgacgtaaacttttcatttaattaagtgtaagttcatccaacaacacattgagattaaatttttattcaattaacggtatcattctaacttccaaattaccaatgtgggacaaaacaatatcaaaatttttttttaaaaaaaaaaaaaaaaaaaacctagcatactaattaagttcatgctttataatcacaacacataggaagaatattagtagttcttaaactaattggttctatgtagataattatttgatagacctttcacacacaaaaaaaattaataatgtatattgaataccaaaaaatccatcgaaaatttgtgagtaaactaatcgtttgaatgtagattatttatagataaaattaagattctaacttaaaacttattgacattatcatttcctctacgatagtatcacattatctaagagtagattaattatgaatagaactgaaatttcaacttaaaatcaat

SEQ ID NO: 205017 - DNA, 1007 bp, Cannabis indica
  modified_base (970)..(970): a, c, t, g, unknown or other
aaaaaaaaataataaagacaaaattaaaaataatcaaaattttgtatgtaaaatataatttatataaaattgagtgggtcagccccacatgactaacttaaaatttaaatacttaaattgctatttattaaaatgagaaatacttaaagacattagtaatgtctagcaccttttaatgtgtaatattgttattagtataattaagtattaaatttcatataatttaatgttataatttttacggagtatcactgaccaaaaataaaacattacctctagatattactaaacaacactcgtacttaatagcaatattcttcctaaattatatttttagtccctaacatttatgatttaatagctatgctcttacaagattctatttttggtccctaacatttatgatttatacactttaagcctcaaacatttatttagatattaatttattactattatctttaaacaaagccaccaatatttaatctttgccacttttctttgttttaaattttatttttgttggtgcttaataaagaacaaatactttggttggtagttaccatttggcatttgacccaatattttttttttttaataattgtttttttttttttgacaatttttaaataattgtttttaactaaagaaaaaccaaaaaaaaaaacgtgcaagtttaatgagtggtagttaacctcgttttgtcgaatacaaactttttaatgtctctatcttagcatgaaatctatcaaaatatattattttaataatcatgtcacatgtgtcacatgtatgttttaaactacatttaaaaataagcacattatatgacaattactacaagcatttatgaggtaatagtctttactttaggcaatttatactttaatgaaatttcgatttatatatataaaaattagagtgattcatgattaataacgtagggtttagggtttaaggtttagagtgnttacatgattagtaatttatgagtgattctaatctac

SEQ ID NO: 205018 - DNA, 976 bp, Cannabis indica
ataccccagcaaaatgttgcttactcacatgattcttttggctgctaccacttaccttcctcatgagacatattgccacattttctcttaacttgactatcttgaaacacttgaagaaattttccacaccattctaatatgtcccctgcatttggtttacaagctccatgattcaaactatttctcacataccataaattctaagacaccacttcttttctgaattcaatactaccttggtaacccccactataataattttagtttttaggggcgaccattttagaagcgatatattgtcgcctataaagagggcttcatgtctccactaaagaaaatgattacttttttttagtctttgtaaatttttaggagcaacatttatcgctcttaaaaatattgaaatctgctagttacgaaaaaggcagattttttctgcccataatattaggggcgattattaagggagatttttgtcgccccttaaagtcttattagattttaagtcccgaatccccttcttcttcatttatcctctctattctttttcttttctctgaaaaaaaaaaaaaactacacccaccaattgcccccgattgaacctatcccaaccggaccccatctcaaccagacccctgtcacgaccgtctcccccaccaaccgcctatatctctttttttatgggtctgctaaatttactccgaccgaccatctatatttatttgacttttttgttggtaaaattttgtttttcttcttagattttttagaaaaatttgtgtatttacgtgtttttttactatatgtgtatgagtgtgtacttatatatatgtatgtatagttgtgagtttttttaataatgatatacatgtatatgtgtatatgtgtgtatgattagatatgtaaaatgtatgggaatactttttaaatggggtattattcattaataggtaataaacaaatttaattataaata

SEQ ID NO: 205019 - DNA, 1081 bp, Cannabis indica
atatatacaatatttttcaccggcggttttccctatatatatataagaataatctaaatcgatatatttttttgcttgtttcgctatgattaatttagatatggaaagttttcaataataaactagattgcaatattgctacatgctgtataatattatataataatctcatgatcattaccttttattatttataaagattttatccaattaatattatttttctataattcaattaaggactacattagaattggagccattatttggaattcacaagaaatggcatgtatttttaaatcttgatttggtatttggttttatttttaaaaaagtttaaataatttaggtagatttttcatatgatggttttatgagttatattaattagatgatccacgttattatttatttagttatattattttttagggtaaatactattttagaccttgtattttgcaaaaaattactaattgaatactctgttttgttatttgacaaaataaatcttgtattttctaaactggtaaaaatagaactttgaacttaatttttgacaactttttttaatatgaccaacttgaaaacaattattaacatgaacagatacagaaaatgtaaatagttttgtcatgacacttttagataagattattattaaattttattacaaaaaattagttaagagttttatttgtaccattttaaaaaatacagggtccactttatcatttaataaaatagaaggtccaattaataacttttacaaaacacagaatttaaaattatatttaccctattttctaagattgttaggttaatagtttttttatattattattattattattattattattattattattattattgttattattctattttggattttgatttattagttttgtgttggttgtgaagggaatttcatagttatttaagcagaagtggttgctcttgttttatggtgactttggattggttgcttagaatttgacttcctttcacttctattagatttgattgcttaactgtgatctctgcctttgcttagaagttttttttttttttt

SEQ ID NO: 205020 - DNA, 660 bp, Cannabis indica
aattataatactaatattttgtattttgttgatgtttggagaattgatggtaatgggtgggtatggaggtaaaatttgtattttaagcatataaatatctaagtgatggattgtagttttaacaagctactccaaccacaatattatatttagtgttgcactaacattaaatatgtcattataatcttttttattcaaaccacacaaaaaaaagtattctttattattattatatgatttttcaatgaaatagaatatattttaatattaaataatatctatatgtatatatatatatttatatatataaaattcagtttcaaccctaaatttgagcttttagtacacaatctaaaacatttgaaggagtatcgatctatcccttaaacttacacatgtggctagaattatttattctaaactattctttcacttaaaggaattctatgatccatacaaatctatacatttctagaatacaattaattgagagtctctaaactaatgtaatactaaaatttattataaaattaatacagtaattaatgtctagaaaattataaaattatgctgcaatactagagatcttatttagcaattttaagctatttaaatttagtttattaaaacatttgatctaaaaatgcatatatattatat

SEQ ID NO: 205021 - DNA, 619 bp, Cannabis indica
tttcctttttcttttttgataattaatttttcttcttctttcctttaatttatctttcacgaccattctatctctttattcttttctcattttccactttctctctcctttctctaagtttaaaattaattgctgaccatgtcgttatcggttcagcttaaaaaaaaatatcattgtaatcaactatttaatgtgaacgtttcaagatatgagaagcatatatttttttgctatttcaaaaaaaagaaactatttagttacttagtgattagttaccattctatattttttaaaaatcttgattaatatttattttaaaatttagttaattgaattatattatactatatgatagctaattaatttctacaataaactaaaattacgaaaaatatatcttaaatgatatcaaataccacaatataattttaaaataattaattgataactaatttagatatctaaaaatttagataactgtgtatttttttttttttttgaacaatagataactgtgatttattaaaagtattttaaacaacataacacaatctaaaaatgaatatatacttttaaaagtaactcatcaaaaaattaaatgttacatatatgggatatt

SEQ ID NO: 205022 - DNA, 855 bp, Cannabis indica
acataaaatacataaatatatattattaaggtttaaatttttaccttattactgtaatccgacaaccaatgccgataaaaatccagtcaccatgcacaaccacaacaacataatcttaataatatagaaaaatcttcaaaaaaaagttcaaaatcaaaaataaagtaatgtacattactaaaattaatagtaaattatatttatacattaatggatgttgagatttaattttttttccactaaaactggtggccagagttataaccaccacaattacttcttggcttcggtttacacttaaaatagggtaaaaatttaaactgttcgggtgtataagtttaggtatggacaataaaagattaaaaaaataggctcaaatagtgtaaaaatagcgaagatatggggtggtggtcgtgtggtggttggcaaggattttgtggcgctgttctctccgcttgttttggtttcgtgaagaagaagacgaagttgaaagggttattatataaccctatcccgtcggttattttcaaataatcgaaggtataagctacacgtgtcaaaagtaaatgacacctatgtcgtcggttattttcatataactgacaccatggggcgtgtttttatagtttattatttttgattaaaaatcgaaggcaaaggattttaataaatttttatagctacagattttataaaataactctctaaatataaattttttaaaagcgagtattatttacactctttagcttcactttttataaaaattgtgaaaaaaaacatctaaaaagttgttttgttgtagtgatttcttagcccctccctaataaccccccccccctcctctctctgttt

SEQ ID NO: 205023 - DNA, 1148 bp, Cannabis indica
ttgggctctagatgagagtgaagggagacaagcacactgtgataatagaagcggttttcgctcaataagacgacgaaagaaaaaacaagaagcaataataagcatgttagttcatcaatagttaaacccaatttttttcagacttatactagttgttctacttctactatttatactttgaaccattctagtggcatatctgttggatgttgtacatctcacatcaatatgattatttactaattatatacaatttttttggatcagtgtatcagattataattgaacattacagaatatgatatataagattctcaagagctgtttttatctaccaaaagttgtgagagaaagtagaaaagaagtgagattggtaaattctgtttcttaaagtaaaatttgaacaccaaggtgaggattgctttataagagaatcttaagtttatttcaacttaattggtgtagtatatgctcttgtgaaaatatgtatattgataatgtcatatgattgtgaaatgatttagttttatcacataaaatcttcttaaaagtcaaagatccttgttgcatttgatctattaatggacaacacttgtaaacatgaattgaaaagacaaatgtccacccttctagagttttgctccttaaactttttttgttataaaaatttcttccgaattacacaaattacaatgatctatttaacaacttcgagtacttaaaatctagtatattaacattgaacatataaatattaattttaaaaaagcatatacatattcctataaatcattattagactattattcatacattttttttatccggactcttcaattagactaaattagcgtcatgttagtgtttttttggaaaaaaaataagcagaaagggttatttgtaacaaactttgtaatttggaaaaaaattgtcataattaaagggggacaaaccatattaattcttcttaaaatttggtatgtcaagtaaaagcaagatgaggattgctttataagaatcttaatattattccagctaatattgtggtatatatgtattatgattatggaatgatttagctttatcatataaaatcttcttaagagtcaaaggtgttgttgtatctgatctgttctgttcagggcaac

SEQ ID NO: 205024 - DNA, 1599 bp, Cannabis indica
aagacatgatgtgtcatacctattttattggtttacaatgttctatagatataattcgatgacttgctaaatttgcgactagccccatttttttcttaagaagttggtgttgcaaaactagtagaacatcatgaactcttgtacctatttttctttctttcttgggggaaggagaacactaaaccgaaatgaggcaaaccctgttgtaaacaagtatagaaattgttgctcgttatggcaatggacaggattaatataattactacaatacgttgaataactcggtctaatcttgagttttcgtttttgtggcacatggcagttggatctatttacgacgctgaaagtgcttggtttcttgggagctttcttgcttttcgtgggacacagaattctttcccatctagcctcgtcatcgaccaagttgaaatctgcttgagagaagaaatcaactttcttaattttctagagttttatccaattttgtaggactcttctgtttatgttattataccttaccagaacagtattaacaagaaaaaaaatggaaatctttgcatatctttggggtgtaattttaatgtgagcaacttataaaagaagaaagaagagaagagttcactcatctcatgttcatgtttttaagttgtttaatttaaattaggttgccagtaactgtttaattacacatcataataattacactacattttcaaatataaggtatatttagatatgagatgataaagttttatgggggacatggaaatttgagagtataattgaaacttttcaattactttttattacttaaaattacgtgtttaaacacataccaattcataaaacaacatttggtttgtgcaaaagcatatcccctccaaaggcactcttaatgttagattaaagtaatgatgtgctgtttagatttttattcttacagcttttattccttgtttaatatatagaagttaattccaataattaaaaaattaaacaaaaacgaattataaagagaaatgtaggtggttttaaaataaagaaaaaattgtataattgatgaatatttttttaaaaaattacaaaaatacatcatccaattttttatttttttttttatgctttgaaatttagtaaaagcaataaactattttttttagatattttttagttgttttatagttgtttatttttcttattgtctttgttttataattgtcatatcgttgatttttggttgatttttttgtgttttacttacctttagttgagaaaattttatttttataattttaaaattttacaagtcgtatttttctaaataaaaagtttagttcgtaaaattataactgggagttttatttgcactccacaaaataataaatacatctcaaaatttgaaaaaattaagcttaaaaattactcttaattgtttttaattttttttctcatattattttgtgttaattttaatacttattttaattttattttttatatattttttaaatcatgtataatttttttattttttttcttaataaaatttcacaatattttttcttcttaattttttgttatttatgtatttgttatttt

SEQ ID NO: 205025 - DNA, 1176 bp, Cannabis indica
aactatattcttcgtgataatagttcctttaattatattattttgaacctctcatactaaatgttgttcataataaattgaactaaaaaaaaagaaaggactaagttattgaactcactaaagagtagcaataattaagtaggggtggcaaaataggcctatttttatatttcgtgttaggcatgtccattcgttttttgactcgtgtctaattttctcaactctaatttgatccataaaaaagcgtgtcatatttttgttggcccactttgacttattttgctattattgaatgtggagttgtagagaaaaatgatagatttaagttttattaaaaaacttatatactatatattgttatatataaatatatatataataaaaactataaaaaaatatattttcaaattaatttaaagaaaattaaaggtaaatttttttaacctaaattactaaatatatatttttacataattatatcattattaataatttttatttaaaaaaattgtgccgaattcgttttaagcgggtcgtgttgtgtttgacccgtttttatgcagattcagctctggcgggctctcagtataggtgggtggtctcatatctatgagtatttttttttttttttttttataaatctgtagttcttttgtggtgatttttagtgtattatttgagaattatttgaatctgctatttttatagaatgtgggacattatattgttgaatatttcaatctgaaatggtagttatttttgtggcttagatctgaaatggttgaatatatctgattttttaacctttcaacgtttttaaagagtctcctactaataggcgataatccaaaaccgtcggtaattcttcctactactatcagtaaatctcgttactaactattttctacctacgcctattctacctagtttttatgacagtcgaataggcgtcaatcatagataccgatgacaatacaatactcgattattttaaattgtcgggaaatctccttttcttaatagtgtataattatacaatcacttaaattaataacccacatcactagatatacaattaatcatatgtgtttacatgtttagcgtacattttatttatgcctgttagattacattgatagcaatatcagtttacatagagttatattggatgctgat

SEQ ID NO: 205026 - DNA, 731 bp, Cannabis indica
atgttttcaaatagggtcttgccacgacgaccataagcctagtcgcggcgactgggcttgaaaacccataaaactatatttttttacaacttcgaaaattttaccaattcaactccaatatcacataaatcatgcaataagttttcatgctaaaataaagtgtttacaagcacactacaccacaacaacatgcttagaacacttccataactaagtttaacatcctaaaattcacataatttaaagcttagaaaaccaagcacaaatcttagttcaattttaacatttgacaaccaaaaaaaaaatcagcaaataacttaaaattcaaatttcatgctcaactaaagaaacgaaatatctagcctagcatctataacaatatcaatataaaaccaaaccataattatcataattataccattccacaacctcatgcaattcattttaatcatataaattttcagagattaattcagcagaaaagagattcaaactacctcaaatgatgatcatttccaaagcttgattacaattccacaaccaaaaccctttcaaatagcaaaatccttcacaaatcaagaacaaggtttgaagagataaggagaaggggaagaaggtcgagtggagctctcaaagccaaaaaaaacttctaacataaaaactgaaattaacttatacatcttttgctaatatttggtcaaatgaccatttcgctcctaaggccaaaaaat

SEQ ID NO: 205027 - DNA, 887 bp, Cannabis indica
tcttctgaaattttctttcccattaatatactagtaggaacacatgctgtgtaccctaatctaataaaaaaatattaaaaaataattttaatggttgatgagtgactcaattcgtatcatatatattttttcttatttatactcaataataatacaatagatgatcgtgcaatgcagagtttcttccatttataattaaaatcatttttttttgaaagcaataattaaaatgattttttttttttatttttacactttaaaatatttgttttttttgtacgtttacaaaattcatataaaaatgtctattgcaattaacggagcaaattacattgcaaccaaaaatcatatagcaacctacataaaaaccatcagagaaataactttaaaaactcaaacagtaaattttaaaaaaaattataaaaatattatattaaatagtttccttaattataatcaatttaaatgatattttttttattaacaaattggatttaataacatccattattagaaatactaaaaataatagcactgatatttgatataggggttttttctaggggaaatttttttgaattaatcaagagatttattaaataaaaaactcgctctaaataatagaacgcacttcagaggaacaatcctccaattgaagtacacaacctgtagagaaacaagagtctcttgctaagcaatgagccaatttatttgcagatcgtttaacaaaacataactcaacaaaagataaagccaaaagtaaattcctaacatcttgaataataagaccaaactgggaggccataaaaactttactttggactgcttggacacacaccagactatccgtttctaacaccacactgtcccaaggatgagtcgcaatc

SEQ ID NO: 205028 - DNA, 996 bp, Cannabis indica
cttcataatcagtttctacacatattttggtgggactctaatccaaaaattcagacccatgaactgcctatttatctatcttggaatgtaaattagaaaaaggaaaaagggtccccaagaaaaagagacagaggaggcgtaatctttcttttctttttggtcataaaaaagcaaaacagtggtttctcacaggtagttttcttgatcaggaactaaaacagttttactgaacaaatgttactaaagttcatagcacattaaataaattaaaaaacaatcttggaagaactttcttgagacgaaacaaactgaaatttgaatttgtttttttctaaaggtaacggtcacaccattctttagaatattaattacctttttaatggcagtatttgaatttgaagatttgaactaagacagtttgaaacagttccctcctaagcatgtctttggctaattagctggtccaataccttgtctttaacaacaaaaaagagaaacttttcttctcgaaagaaaaggagtaatatcaaccgtctgatcttctagtctgagccacagatgttggtgaagaagaaaaacccagaaagaaaaatggctggagagttgaagattgaaatgtgtttggttcctgagaaagtaaacccacgacatgcagaagagtgcatcttagtaggaccttgatatatacagagtcctattgggttgtttaatgtatttctttattattttttatgattctgactacgtgggggaaataaaaaacaagaagttaatagtgaatcatcatcatcatcatcattttttttttctttctgataattaatgttatcatcatatttaaaaataaatgaaaaaattattaattccatgtatccttttgcatttaaactaggggtgatcccttttttttatataaaaaaaatgaacaaattaaatttgaccatattcaattaaataaaacactcattagtatttatttgcatttatattgagttt

SEQ ID NO: 205029 - DNA, 1398 bp, Cannabis indica
aaaaaaaaaaattaccaacatcataagtattaacactatgtttggtaggaaagaggaatgattaaatggagaaaaatgaagggagagagttgagaggagaggtaaaatcctttattggtaggatggtgaaaggaagggagaggaaatgggaggggtggggggaattataaaatttcaatcattttaaatttgaaaaagatttagagtaaatacaaaataaatacactaaatgccaaattattctttaaaagtaacaaatttttatactaataaaaatactctgataattttaataactaacttcatctttattctttcatctatactcctaattatcaaacaagacaaaggagagatactatcctctgcttcattattcatccttttatactctctgtccatcctacacttcatctttggaaattttagtgcaatatcaattaccatgtgcaataatgtatccaaatcatgggaattgtgtcagtcgtagttccacgtggatgttatcgaggttgtggggtccattattataaatagactacttgaatcggatgacattgaggtgtcaatactcaatagtcatcttctatttgaaaaatgcgaaaacaaactataatatttgtaaggctaattaatatttgtatttttaaggttcttaaaaatatttcatcaatcaactgttgtgattgttggatttaagaattttttttttaaattttagtaaaaaagtctaacataaatgaaagttcaagggctataatttagtacatgtcaaagttcgagtggatgatttggtagatatcaaagtctgggaaacataatttagtacatgaaatagtaatttgaatgatattaaacaaaagtccttaaatccaacaatctcaataattcagagggtatttttaacaactttaaaagttcaagagacataatttaatacatgtctaaattcaagaaaaaaattttaattaacttatttttaaaaagcattaatatgtgaatatgcactcaaaatattattatacctactcacagtgatattttcaactaattatatttatttaaaatcattctatttttttcttaaaaaaatgtagtacatattactgtacctaatatttaagtacttatttgcatagaaatattctaaatagcagccagtaagattgggtgtcataaaccattttcttatttattgtactgagatcatttttaatggagaaacttaaatttagggttaaatcaacattaaaaaattattattttaacactaatttttttttttccaattctaaccacaatactaaaaattaaggtaaattgagacataaatacttaatgtttctgattttatacacttaaatatataatgttaatttttggtggcaaaaataccta

SEQ ID NO: 205030 - DNA, 572 bp, Cannabis indica
catttattaaaaactactgttataataatatagaaacttttattgtgtttattgtactaatcttacaccttatattatacttatatcacctactgatgtcaaataaatggctgagaaagtttctctctgggtaggaaatttatgctagctccaacatacttttgctctgtatttatatactatatagtataatagtactccacaagttgtaggtaagttggccttaaaatttggacaattgcatgatagggacaccacgtatgtttctagtcataggctcaatcatatggacattgattcatagctagctagtgcgattggggtagaaacgacgccgtactgcatcatcctcattcctcatcttataatagggattgatcttctcttttgactcaaatccaatgtaaactatatacatatatatataaatatatatatcacgattactgtaggacttacctgacctttgatgccccatctaaatgggtaaagtgaccaaggcatgacaatacaataatcttattgtatcatagaatttactagctatttttatattattttaatataaaaaa

SEQ ID NO: 205031 - DNA, 1772 bp, Cannabis indica
gttaaaaaatattatatgtggtttaatgaacaatgtatgatatctttcttctctgcattttttctgatgtctcttgtctctgtctaattgtcttggctgtcttcgtatatgcttgcgataaaccctaatattgaagacattcagttactttttgtttttttgttttagttttgttttattttttgaaatggggtactttttgttattatcccataattttccaaatttgattccgtcaattttggttgacttgagatcaccagaagtcgtttttcgttactagtaccaatatttgcatatccattatcatgaagatgaaagtaactatcacatgttggtggcattttctattgattgaacaccaccatcactaaattaatgcgctctatgagctgggatgggatgacccaacactacgtaatctaataaaaaaaattctccattttgttaaaagttgtatacaaatacacttccccttcaattgtgatcctgaacaaaatttggaaaaatagcacttcaatttaacttgagcctttatagtttgtctctatttttttttctaaggtaaaaaatttattaataagtaaatgaaacaaagtacattacataaaaatgttgctaaaagatacaagtcaataataagctaacaaagtgtttttattagagttttatattggctgatgatacctatttcatccacttataaaaaagtaaagtgaggacaacccaaacccaacaagcgattttgttaagtcgagttaagtagaagtgtacatcagtcagttttagattgtaacatatttttaaattgcaacctgtctaattaatgattttgtcagtttgatgatgggtttacccattcaaattaattgtcattttttataattattattgttaatttttaatatttaaataattaaatttaaaatatatatatattatttatattttaagttttaaaattctacactttaaatcaatttaaaaaactttagcgtaagataaatattcatcaaaaaatagaaaataataataataatatgatagtagattttaaatttcaactttaatattcgaatacaataaaaattattaactataaattttaaattaaacactataaaatctaaattttaaaacaaaataatttaactaataaacataatttatgtaatatattatatacacttttataaatatgtatatataaatccatttatttgggttaactgaacgatttaaaataatttttaatccacctaatatattaattcggcgatttagattataattaggatgttttattttctgattctatttttgtcagtttattcaatttggttcaggttatttgttcgggtatttacattttttcatacaatctactgtataatttataattactctcatttattttctttttaaaattatttaatttataataatttttgttgattttaaaattttattgcatatttccttttatgtcttttaatgcaaattatatcaactttgattctttgtatctttttggaattccatcagttactttgatttttttattttttgcatcagcttttgttgacgtttgaacccttgaactcggacacactcactgtcagttttgacagttaaccaactcccttattaactaacttaacagacttgacaattttgttagttaaatgttctacccgagtgcttatatatttacctcatacttgtgtatgttcaagacagaaatagagagagtttagagaggaatttcagag

SEQ ID NO: 205032 - DNA, 931 bp, Cannabis indica
aactagaaagattctgagaaggagaattaatagctgtggaaactcttaaggcatcagtttcaatttgtgtaatctgaagctgtaagtgcaatgcccaattcagactgtgaaacaaagctttcgcctccatctcatccgatcgaaagtttccttggactggtttcgaaagtgcagcaaccacagtccctgagtgatctcttataacagctcctattcccaaaatgttgaggtcttggttgacggcagcatcaacattcaatttcaagcctgcaatagtcggtggagtccaaggaattgagttcttcctttgctgtactgttgctgggataggagcagtattaatgctttggttgcagacagcaaactgttgctgagttctttgcttggatttcagaaacttctccaaatattgagctgcaaagtcagcagtaatatgactttgcttcgacacaccaccatgtatgactttattcctctcatgccatatagcccacatagtacatacaattaattcaaaatcttgttcagaatgtatggtggataaatggatcaagtaatcaccattatacatatgggaagcatgtgtatggtcaatggtgaacttggtaaatttccaaacttcctttgcgttgatgcaattaaataaagcatgaccaatagactcccacgcattattgcacagagaacatgtagccgaatctagtacctttcttctacataaaccagtagcaacaggtaaggcattttgcattactctccaagcaaaaattttgaccttagaaggtaagttcaaaccccaaaagttttccaccaattcctatgtgagtccgagccactagaatccctcgaatctgccaaattctctgctaaatggaagcccgaattcactgtgtaacaaccagttgtagtgtgatgccaaatgaggcgatca

SEQ ID NO: 205033 - DNA, 1288 bp, Cannabis indica
gttttttgtgctcaaaagtttattaagaaagaaagtttatatagttgttgtaatttcttttttagtttttacaccaaattaaagttaccttaaagttaatagtaatacagcctatattaccacaatctgatatttgttactttagtttctacaccaagttaccaaaaatatatcttaaataatattaagatagcataatgtaactttaaaataattaattgataacttaaatgtttacaaatttagctaaaaaaattatgtgagttcttttactttattgtaacttattaatttcttaaacaattttcaaatatcataaagaaaaagtaaacacaaagcttttaaagaaacaaaaatgtatataaaataattgatatataaaaatagtagcttgttatattaaatgacaattcattagtttcaaaaataaattttacggttacttaaatgtattttaaataataagctactatataatataatataaaaataactaattaattactaagaagtacacaaatcagttttgaaagtgactaaaatgtatctcaaatttttatataaaaatgatatttttaatgtaaaggtaagtaattaattttttattaacataataagtaaccaaaatattacttttaaaaatacagaaaaattaaaaaaaacaaaaacagaaacaaaaaacaaaaatttgagattttaattaaaacttaggtagtgaaatttgagattacggtatatatttagctaacgcgatatgttaatgatattagcaacattattaagatacaaattaatatgtatattaattagaacaggtcttgggcataggtgggttaagtttgtgcttagggtccaaaaaaaaattctttcctttttaaaattatataatatttttattgattttaaaaaagggattatttcacaaatatccaaattaacaaaaaaattacgaaaaatacggtttcacggaattttaaatatttttacgattttctaattttatttacagaaaatacgatttttttatgttgtactcttgttaatttgttgttgactctttgttatctgtatgtttttttattgttgttaacataatttttttctatgactcactaaattttaaagccggccttaaaattataaaaaattccaattattttttcatggtattttatttatatatatacatcattttgaaaaaacatcactagctagaaaaatgtaactcttaggtcaatctattgaagtcaaagattcgtgcaacaaaaaaaaataagaaattgaagtc

SEQ ID NO: 205034 - DNA, 1531 bp, Cannabis indica
accgcctctaaaggcttgttttgaagtagtgattgatggtcatttaatattttattgaaaatatacaatgatgattattttttattatttaaataatggtaatatggtaaataaaaaaggtaaaattttatttggcaataaaagagttggacatattgttgcatcagcaaaaaacattcttaatcagtataaatgtgctcaaggaagaaagggtctttctttgtctcatttgaatgaaggggggcgacattatgagcattggactgcacctatgttacataagatcaaagttaatgttgatggggctttgtttgatcaagagggttggtttggtgtaggttgtgtagctcgggatcatcatggtaatatgttataagctttcactaagggaaagattggccgtgtccaacctgaagtcgctaaaataataggcatcaaagaagctttaagttggattgcatatcacctgtgggaccacgttactttagaaacagatagtttggtctgtgtccaagctatccaaagtaatttttctatggcatcccaatttggtctacttgttcaagatgttcgtaatttacttttagcttttccttatattgagttatgttttgttaaacgatctgaaaacaagttggctcaatgcttggcaagagactcttatttctctacaggttgtgtgcttcagttggaggattgttccgctgaagtacgttctattgttttgaacgagattattaattaataaatattatgattttattcaaaaaaaaaaaaagaaggtaaaattttgtaaaaagtcaattaattataataattagtagcactatcataataattagtagcactatagactataatatataaacaatgatatttattgttagctaaattcgatatacaaggttatatattgtggtaaatttagtataattttagaatgtcttaaattggacacactttctaaaacacctttagagtagtattttttctgattcgctaaactatagcaatacaccacttttttagtactctattgaacatactcttagcatttttttttttatattatttattatgttaaaatgtgtgatatgtgatatactaataaattacacaaataataattgcttggcaccttaagtgcacttagtagttttcttagtctgcagtagattatttaataatattaacaaataaataacagctaatacggtggtgtagcactataagtacatgcatacaatgaccaatctaaatgctagtactttacaccgagattggctatttcaagtgccaagaatggtacataataattgtcgtgtgtgttcttatccgtaatccatctcagcggccgaagagcattaggatataaatagagtgaatgttttattaaccattacaaatacgacaaacgcataccatatttgttttacaataaaaaacaggaagcagcagttaagaacatgaatgcattcatgactacttaagccttatgcttcttatatatttatttatatgaagggtttgc

SEQ ID NO: 205035 - DNA, 964 bp, Cannabis indica
tttttccaggaagcgtgtgagtgcagacaaaacatggtggaaagactcgtgttggttttcagggtcaattctaggaagtagccaaatgtgacgtacctgtgtataagagccataagtttgtgagtggatgcccaatggaggcttgaaacaggggcgttacaatttggtatcagagccttcacccaactagaaatgttgccgacgaggacgttggatcccaaaagtgggtgattgtgatagtcaaaatctcgtgatctgcaagggaaagattgggttagctgtgcaatcctacatcacgtggggaaggtcaagtgtgatgattataacattgtaggtatgggactacatagttgaagatgacttagatgaattcatgagtactacctatgctaacaagatgcattttttttgggtagtccgtcacttaagaactccaaagttaagcgtacttgacttggagtagtctcatgatgggtgacttcctgtgaagttttcctagtaagcgtacgagtgaggacaaaacacgttggaaagacttgtgttgtttgcagggccaatcgtcattccaggaagcaatatagtgacatacccgtgtagaagagcgataagtttgtaggtggatgtccaaaggaggcgtgaagcagggggcgttacagtgtttgtccacggtaaccaaattagagcccaagttattgaagtgtgtatgactgtatcccttgggtattctcgtcttcacaaagtgtgtgggtgttattgtcccagtcttaacaaacatcttgtctttatttatgttactttcatggaacacaaaccttatttctcgtctctatcaattcctactcgtcagggggatgatgatgatttgttggtatattttgtcacatcttttgaccttgacacacttccagacgagatgttattgttcactcttaacaaatatcttgtctccattgatgttactttc

SEQ ID NO: 205036 - DNA, 779 bp, Cannabis indica
gattccatgttgggcacagaagttagtgaagtgctcgcagttgaaatgtttctcattatcagacacgatcttatatggaagccctttcaacatacgatattcttaatggcaaagtccaaagcttttttagaagtgacagtgttcattggttcagcctcgacccacttggtaaaataatcaactgcgactattacgtatttaacttctcccttacccgtggggaaggatcctactaggtctatcccccaaactggaaaaggctatggactgctcatgactgtgatctcggtgggaggcgcacgcagaaccttggcgtatctgtggcattgctcatttcctgacatattcgatgcattctttcttcattgtgtgccaaaagtacccttgacgaaggatcttcttagaaagacttggtcaagaagtatggtctccacaaaagccaccatggatttcctgaattataacatcgatttctattttggcaatccaccttaagtatggcattggcagtcctcagtgatataacttcccatccatgattatgtagcatggagcctgatactaaaccttcctagaagtggcgttgtccgcaagaagctctcccaaactcaaaaagttgtaaatgggcgccatccaggagtgagagttttcagctatggaaattacaccacagacatcaatgcttggtttttccaaatggcaaatcgagaccaccccgtgcttaatgatctcaagatctgttgctagtttggccaacatgtccatgtacgaattttgtt

SEQ ID NO: 205037 - DNA, 684 bp, Cannabis indica
gaaaaaaaaaattaattttttttttgtttaaatactaagtggatggctgtcataatcaattttatgccacttttaatatcgcaagcaatattttgtgaaataataatgataattataagattaaacaccaacaagcaaacaaaagctcaacaacaaaaaagaagtctataaaaatagattctttttattaactaaaaggggatcacgtggtgcagattctttctctattcattctgtctttttgatgatctcaaaaatcacgtgttagttataggagtcttatactttagccaacttttattagatcatcgtatcaaatataaagtactataaaaatagatttaaactttgaaatggataatctctattagttgtttgtaaagttgtacactcttaaatttctttggtgtgtgtattggaatatactagagagttggattatcatataagtaacacttgtaaagttattatgaggagaattttgttccaaattgggtaacctttaacatatctttgtgtaaagtgaatctaaagcttttcattattattattattaaataaatagatgacaacaaatttatatttttttggataaattaaacaactaatttatgtttttaataattataacaaaactctccctaagtcaatatagtgtcaaattatcaacaacaaaaatactaa

SEQ ID NO: 205038 - DNA, 910 bp, Cannabis indica
ttttctagatgcttgggcttttattttaaagcttaaaacacaccattcgtagacttgggccttgaaactgccatacttctcatttttctgagagctggtgtatttttattttatttttttaaggaaaaatatcaaccactaaatacctactacgtttgaaaatttatttaaaaatagcatttaccatcaataaattttcaatacaattaggatttgtaagccaccaattatcactactacgtcaaatcaagtttagccaggaatgaacaatatataccattacaatttacaaaatctattacaaaagagaaaactaacgagcctattataaagagttaagatgaaaaaaagttatgatagaaacattgaatcaagggctaatttaaaaaaaaaaaatatgggaaaaaattattaagattatgataaataatagcataaaaaataaatgtcattaaatatagtattatctaactaatcaaactaaaaatatgattttttttttctaaaaaaaactatataaacattaaaagaaattaaatttaaattcataaaaataaaactaattaaatactataaaaaaatataaattactcttatattatttttaaaaaataaataattaaaactatagtgatcaccgaagttgtcactcgtgccggaaaagtcaccggagtttactgacagcaccgaaaaagtcgtcggagtagccgccggtgccggaaaagtcatcgaagttggtgtccggcgccgtaaaactcgtcaaaattagcattgtcgctggaaaaattaccaggaaattggtttacttgatgaagaaaccggtttctagtgattttcaggtaattttaccggtgacatgccaagtccgacgactattctggagtatgatgtcggtgccggaagagtcgcc

SEQ ID NO: 205039 - DNA, 627 bp, Cannabis indica
ttacaacctcttagtcaacctcctattaaatcatatataactatataaattactacctattacctattaatttttaatgaaatcttataattcttaacatgttatcaactaaacaataaaatatacttttcatttgtacaaaaaattactttatcaaaataaccaataatctcatgatgagtaagattattgaaagtttattatctttattatatattttgcattatgattatattattataaaatgaactttttgtttgatttatttattaataatatattttgtaaataaataaataaaattaaataagcttaaaagaaagagtaaaagaaatcacaaaatgcatgtatgcatataaatctaatactagctagttaggaaagaaaaatggttaagatcgaccgaatcaaattatttaaacatatatactccaataattaaattctcttataactattatattgtaattattattacaaatcaacttttatcgtatatgcaaggttttttttataaaaaaaaaaacaaaattgtagatgcaagttaagtattagaacaaaaagattggttataagatcgaccagaatctagtctccaatatttatatgagtactcaaaacatcact

SEQ ID NO: 205040 - DNA, 689 bp, Cannabis indica
aaaaaaaatgaagaaagagaaaaattctttgatttgtttatatataagatttttttttaaataatatttgaatggtactttattatctcaataattggtgaagctgttgagcactttctatatgtggttgaaaatttacgaataagataagaggaataatttataacaactatattatatatatattctggtgagaagaataattaacaaccgcataagaagataatatttaaagaagaagaaaacaacaaaagtttagctgatactttgttttcgataacgaacaatgaaaaaatatggctggagtagctatatactgttgagagtagcaaacaggcccttaataattctcttggaaatatcaatcatatagtacaagactatctcaaatgtaaaaataagttataagtgtgcttcaataaagtaaataaattttaaaattaatgatggtcatttaatattttattgagaattaagagcaagcttagattaaggcgaattaaacttgcgcttagaatcaataattttattttcggaaggtatatgtaagccagctttgttgagaatataaccaaaaaaaaaaaaagaaaaatatagtttattatttttatattaagtaatgataatataataaataaagaatgtaaagttttgtaaaattgaattaattataataattagtggtatta

SEQ ID NO: 205041 - DNA, 733 bp, Cannabis indica
aaaatagtatatgaaataattctttcaaaaatgagtaaaatattctttcaaaaaattagtagaatataaaattataaatgagtaatgtgtataatttctaattctatgcaacaaaaaacaaatataatttaataaattccttaatagtatataattaaaaataataataataaattcaaatattgaaaaaataaaccctctaaatattttaatataatattttattattcaaatatatatctaaattcagatatatatagatcttagaaaaacaaatacatccaaaacctttaagtttgcataacgaaattaataaattaattaagaaaatttcctaacaatccttttattatttacttttttaaaaatatatatatatatatatatctttatatattaaaagtgcctatctaacggtatttcttggtttaacatggtttaacagaatatacttaaaaataaaagaatattctgttaaatttaacgattagtttcatctcccgttaaaaaataaacccaataattaaacccaaaaattaaacaatctttaaataaacaatcttttaaatattaataatctctttttaaattaaaaaaactacatcttagccacatatctctctaacaaacctatcttgggagaatattaataattttttaattttattttttaaaaagttaaaaataataagataaataatctagaaaaataaataataaaagtaaagaattg

SEQ ID NO: 205042 - DNA, 1442 bp, Cannabis indica
cccccaggtgtgacagtgctggagcaagggcaagattcaagtacatcccggaatggcagagaattgattccgctggctgtaggcgacagggaccgcaactccaagaagttgtgttcctatcccataccctaacaatcccgttggataataccctccataagctactatctacgctttttcgagattaatgtacttctagaccctcttttgaaagtcttggaggctagtagctccttcctgttgtagctcattccaaaaaggagtcctagttcggattccagtttggagtaaagctaactgttgttcgtcatcaacctttttggtttttgaagcctacttcttaaacatctttatgaaattcttcagggtctccattggtagttgtttcatattggtcaaggcacttactttgaggttaatcttcctcgtcaccacaaactatcaccaaaagtaaacatgtagcttaatccaacagtctacaaatccgagttctaacttcttgaaccattcctcaggggatccactcaattttagtgggaaacataaacactttgcgtcattattgactctcatgacagccattaatctattgaatggagatagatggtcattgggatccgtatctcttgagtatattgccatttagggcattttgaaatttttagggagttccgcctacagaatattcctggcatagggctctcggtcctcacggtcggacttcgagtccctagagatgtctttgcggaggattgccaattcggctaagattccttcatttatgatacccttcgacactggtattgcctgcttcgttttctccaagtgctttctcaggtcaccatccttatcattaagcttttttcttaagttggcagggggatgcttgcgactttttctccctctttccccgggctcctgatgcattgatacactctttcggtcctctcgatcctgagggccagtgctctttcgagggagtctgcccctttgcggacctttcccttttgggaaatcagagtagacttttcgcagatcttgggcttttttgttctttttggggaacggtgtaggatttctcttagggcttccttcagagtaatatcgtatggggcttggttccatatttttggccttttgggtacttgggaaggtctcttcctgtgtctcttctagtcccagaggcatggccttgggctgcacgtgaattccagctgtttctatggacttttttcatggcgacatctcttgcatcctcctattttgttcctttttgcacggcaagttttggcctcatgatcaactgccttttgccatagggccagtcactcagtagctaccattgtcataaacatcatacccttcttagttttcttcatactcctcgtcattttttagtctcgctctttagaatacatgtttactcatgaggctgcttcttc

SEQ ID NO: 205043 - DNA, 882 bp, Cannabis indica
ttcgagtgagtatcataactactgaatgtaatttgagatggtatcactacttctttcaactctcaatgaaagtactaaaatatttaccgagattttcagaaaatgaattatttaatataagaattgagaaaagataatagaaagaattaaaaagagaactcagagtttttacgtggttggggcttcaaagagtcttagtcacgagtcagttttattatcttttatgctcgaaaaactaaagggattacaatgagtatatagttgctctattctctttttaagcttgtgagttaagaattttcaaccctttgcataaataattcagtgtgtatttatagagtaatataagttatacttagttaccttttttcctctaataaggtgtttacaaataaaatagtacttcgggcttatcgtataaagtctagcccatgaggcagtgactatatgctgacttggcaggttgatcacgcggtgtgatagttgttcatgttgtgtcctttgattgtggataattaattgtgcattaattatttgatattcaattatgtagtttcctattttatcttgatattattttctgtctgagatccgtggaaagtaatttcctgattttgtacgaattggtaaaagaaaaactatatcgttggcttccaagaacatgctagtagactcttttggctacgcagagccataagtccttcgggtacgggctacgcttggctaagacttgcctgtgggagtattgcgactaatgccttcccggaaggccactatctaatcaacttaaattttaatactatcaataaaaattaatataagctcaaataaaatctaacatcaataacttaacttattgtcaagccaaaaaaaaaaaaatta

SEQ ID NO: 205044 - DNA, 852 bp, Cannabis indica
ttaattttatagactgtaaattaatataaataattgtgactagtaaaattaatgtatacaactaaatttgatccttttaattttactacgtacgtacaaaatattatatataatttggtttgtttctatagcctacaaaaatacactaacaattaagatatatatatatattatttgtttatatgtgttgatgatctggtactgaccaggccaatgtaaatatatattttaaattaattccaagaagcactaattaagaaaataattagttgaggctaactttaattttgttaatttgtctttgttttgtacatttggtatgctttggggttttagtttaagtattaatattaattaattaaattaatatacatgatgatctgcatgcgcatatatataatataacattataatttgggaaaagcagagtcttgataattgattcgaccatctcatcaccaaaaccttggagagacatatatattttatatattttaatgttaattaatttggttacaatttataattattaataactctctgatttacttatatgattaaacaaaaagagagctagaagaagtaaattaattatagttatacatatataataataataatatacaggtataatattaattgtagatggtgacgtgggagtatccatagagatctcaaaaggctaggacaaaatatatttatataaagaaaactatcttttcttctacaaatgccacttgtaaccttttcaatttattaattatatattgtgtagtactttaattgtgcgtgtactgtgtcataataatgcagatttgcatcatattattaattagatatgatcaaatatgt

SEQ ID NO: 205045 - DNA, 673 bp, Cannabis indica
tcatgtttggcgactacaaaagtagttttcctttaggatcacatatttaggatagtattaaaatttgtcaatattatttaaattgctatatatgtagctaaaaacacgttaatggaacttgatttattattcctcttttacttactctatggactacaaatataatctctatattatatactttattcgatgcattaaattcaattattctttttttttttttaacaattaacaagattaatatacatagctagtgtagtggcatggccggacccatacggaaaaataaaattaagaaaaatatatattttaattagtttccatatatattaataattaataagttagaaaatatatatattaatctacttatattctataagtatgctaaataacaaagagtttaaatcccaacaagatcataaagcacttttaaaaaaaaaaagatggttttagtatttgaacctccacactaataaaacttattattgttatatttttactattatatttaatattataaaagtattatattatgttattaaataaagtatgccattaaataaagtacgcttttcttgtgctctcaacttaaatcctaaatttgttactagcacaatgctgattgaaggggagcaataggagccctaatccaaaaaactctcaatttttt

SEQ ID NO: 205046 - DNA, 945 bp, Cannabis indica
ctaaaatcaaatcaaatcaattcaaatcaaatatttaaagttttcaaaatattgtgcaatatataattagaagaactataatttgacgctgactttgtttcttgtataaatttttcattcataatcgtaaatataatttatactcttgtgtataatagtaataataaatgaaattaaccatttctatatgctaaatgatataattatagacccagtctctattttttttttatttatttttttaaggttttttttttttttttgtaaaactattattattttaagtttaaaacaccaaaattatgtagtttgtcttaatacataatagccatcattcttgtacctgttccatttttttaaaatatttatttttgtcatgagattatacttatttatgaaaaagcacaaaaagaaaattctttttaaacttcaaccaaggtggctttctagttaaacaaaaacaaattattcaagcctatgatttttaagtggggttagcaagttagcttaacgtgacacaaagatatagagaaaaaaacactccctttattcatacaaatacaataattacaagaatacaaattaggtaagcgttatattcaataattcaaatagtttttaagaacaaaaagtcaaaaaaaaattagcaattattaagataaggctttgaagatacaagatgcagttaataagttaagcccaagaaaaaaaatatcatgatacgtacttatcatacagagttacgtagtgaaattagttatccctttatatatgatgtggagtgtggagtgtgacacaccacttgaagaaaaatataggaataaagagataattacaatttttttttgaaattttttatactaatggtgtgcgtacaaactatcaattttttgtgtatgatttgcatttcacgtatcattactcttactattatattatgattac

SEQ ID NO: 205047 - DNA, 590 bp, Cannabis indica
tattaattatcaatagcgtccaacacaaactttataaaataacgattttgttattagcgatatatattactttataaaaattacaatattaaatcatatatataagacccgatactttaacactaataataataatattaaatattagagggtgcctatatataaatataatatatagtgttattatagttagttgggtgtgtttggtatatgtgaatgtgagttatatatggtggaggagcagcaacaagttgagagaggtcatctcatcaaaatatgaaacaaattaattatagtgctctatatatcttccactatacctacgtaccactttattatattattattattattattatatatacatgtgttataactatatagtgatgatcgatatatcatctcatccatccaccacacattacatatctatatatacaatgatgatcataattagctagtgatggagacaaacaaaaacatttactcaccccaatatatatttatatcatcaccacttttacataataaaaagcacgcgtggaagatatgatatgcagttgcgtatataatatatacacttcatatat

SEQ ID NO: 205048 - DNA, 1278 bp, Cannabis indica
taattgtaagattatttaaccggggagaattgaaatacttattacaagacaaatgtttcttttttaaaccccatatagaaaatgaaaaggatttggaatcacgtggccatgcccaaatatatatgtttcatatatagatataaatatatatatacacatttatttttcccatcaactaatattttttttctttcaatttttaatttcttggcaataatattcctagctagctaagctgacattaattaatgcatgcatgcatatcatcatgacacatatataccatatatgtatactaaaggaatatatatacatatacttatagatatatatatatatatatacatcctatctctatatataccatcaagtaataatgaaataaaatatcattttgcctatcccagagagagagaggtctttctatatatcttgtctcttaagatctagggtttttccatttcttctctcaatagtacttacatctatattatgcctttttcgagggaaatatagtttcttattattgtgattcattacacagtttctcttaatctgtccaagcatgaaaaagatagagaaacaggtagaagaaactcacacaagacaagattatttcattacagttctaatattattcactactattatttcattacggttattataaggcttgttattattaggtggtaattaaagatctaatctttacatgatgattaagagtagcagtattaatagtagatcaataagtagtagtagtagtagtggtaatgattctgagtattcaaagacaagattagaatatgagaagatgaagatgaagatcatgtttatcaaagtggagaagagaataaggctaatattaatggaggattgagctcaagcaatagcacagtggaggaggaagacaataatgataataataaggtcaataaatcatcttcatcagttaggccttatgttagatccaagatgccaagaccttcgatggactccagatcttcatcttcgttttgttcatgctgttgaaagactcggtggacaagaaagtaagtactatatatatatacatatatatatatgtttgatttgttaattaatttgattttaatatgtatatatatatatatatatgtataggagctacacccaagttggttcttcaattgatgaacattaaaggattaagtattgctcatgtcaagagccatttacaggtaattaattattcatcaattaagtttttttttttttactttaattaatttagtgtat

SEQ ID NO: 205049 - DNA, 1036 bp, Cannabis indica
tttttttaaaaaaataatgatattcattaaaaaccagcctcagccaatagaatgtttttcaaatcaatagaagcattcagcttattgaacatacaacctgacataaaacaagaccttctaacaacacagtggatagacttagcagattgataaacaaaaaaatctaaaacattctttaaagtagataaaactaagcgacaatcctcctccaacaaaccaaactaagacggcatatgaacgaagctattaattgcctgaatcataactaaatcatctggttcaatgatcacatcttcccaaccttttatttttatccaactcaacgcctccttcattgtaattgcttcagctatttcagggagaacaacaccacttcaaggtgctgaaatagcttcaataagacctccattctcatctaaggacacacacccaaaaccaaacttttgttgagcttcaaaaattgtaccgtcaacattaattttgaccttaaaattaaccagtttactcaaatggttgctgctaaaggacacaccaataacaaatagggatcctgacgagtgaaacttagcaaccctgcattggccaaggactgactttgctcacttaaccacttctaaagcagaacaagtttttttgctgccaaaatacctcattttgagtcttccaaatgctttaactaaccatagcagcatcaatacattttattatttgttgatatgcacttataacaaaaatatgatatatatttatatataaaaaaatatataaataaatatatattatcaccataattaattattcttttgtagttattttgtaacttttatttaaataaaattattagattaatttgttcaaataaaaaaattatctgattaatgaaaatataaaagaaggagaacatatgactgtgtgattggacaagaatattggttgcaatggaatattcttgttttatgctttgttttgaaaaattaaattaatatatatatatatatatttataggcagtgtcacagacctagaatttttagttt

SEQ ID NO: 205050 - DNA, 748 bp, Cannabis indica
agatggttggccccaaccttgtttggcatacaacacaaatcgtgcgggcaagtacttgattcccttcagagtaaattagggtcaacaaatcttataataattcgtgatcttcataaaatatgaatgtagaggcaagattgcaccttgctcgacatggggattggaccacgcatagagcccctccccgggttagtggcaaactatccgggggtaggcagaaaagcttcacctaaactaagaaaacctttatcacaaagattcttcatccttttgtaagtgagagtggatggaggtgaaacccattggggagttgttttctccttagtccccatgggacatgcctcttcatattccacatccatatagtcttggcccagaaccaagatctcttcaaacttcgagatgggttcgccaacctcgttacatcccccaaatggaagaattagaggaacctcttcctcttcaactgcttcttctctttcaccatcaagagaagtggttgcacgaacttcaccctggtcctcgacttcttagacttctccgtctccaacagctacttctacatcctccttaggaggtccagcttattctacaccagccattgtaaaaaaattggggaaaatgtgggtcttgtttggtttttgccatcaccttacgcttggatgggggcttttttttaaatgtatgtttcgcaatggagatagtgatttttgctagagcagagcttttctttgaagggtttatatga

SEQ ID NO: 205051 - DNA, 1155 bp, Cannabis indica
atataaaatatatattattttttgtcacgatatagatttatagttatttagaatatttgatggatttttgtaaaaataaataaataatttacagtgctgaaaattattttaatttatatgtgcttatattataagagcgtaaaacatattgtttaagcttactataaattaataattttttattataattctatgtatgtatagttaaaaaattcacccaaaaagaaagttgtattagtacactcaaattttttaaaatgtcatgtaaaattgctttcctaactaattcattttttatatagaatcatactaaacataacttttatcccgaactaattcacttttatgtgatctattttaaaaaaaataataataataataataatatgtattatttagaaaaaaaaaaaacataaaaacaaattgtacttgctgcagatgtagaatgagggtgactattgagaaagatattgaatgattttgattttggttgtttttgtgtttataataattgtggataggatggcaaggagttgtggaggagaataatcaaccaaaaacaaagggtcccgttgctccaactgtggagggaggcatgactcgttaaatatgaaagagatttcaatgattgcatcaaatatgttattatcatagctatatttatttttagttgttaaatcattattaaatagttgtgataaattatgaaattaattaaaaataataaaagaagaagtaattataataagagtgtcacttgtatttgtgtttctattaataagagtgtatttatgtttttgtttaaatattccacttcaattgtatgcaagaaattttagttgctttactaaaattataaatgagtaatgaaagtaaattttataatgtcactttttaaaataaataaataaataaaataagatgattatgttttgttattattactattttttaatggctttccaaacaaagtattaagaacttagataaattaaggtctaaaattttattctaggggtgttgaaaactttcaaaagtgtgattggtacaatatccttgttgttcctctttctctcttctaaggttggagaggatccaatctgattcaattgaaacgaattaatttgaattaatccaattcaatctaattataaa

SEQ ID NO: 205052 - DNA, 799 bp, Cannabis indica
aaaaaaaaaaaaaaagactcaaagtggtgtcaccacaaataatgtaatctaatgcgtattattttgttggaatataaaataaaatgttgtccctagtcatgaaaataatttatacatttaacaaataaaaagttgtcggaattggcaagaaaccaacaagaaggaggtcaatttattttgacaaagagttatatatattatagaccgaagtagtgacattgtacattgaacttgcgaaggctttaccacgttattcatgtgttatacccaatgacaataataaatttaattaaagcattgtggtgtttcaaaagatttggttgtacgtatcccaatattaatacacaagatttaagaaaacaacatctcacaacaatataataataggtcacaatttagctgaagaaaaacaatagtttatcatctaaaacaatatccacacgtgtccgaccatcattatctaattaatataaatatgtcatttacatgaagaataataattctgattacacgagactagtttatatttgtaataatatttcaaaagatgttttgtaaatattatttcttttgttttggtttggattaagatatagtttggtgtttgttcaggactatatatggggctattctttctatattttggctttagcgtgtacatctttcaatttttttttaataattacattgtacaagcaaaatcttctcttctcacggtttataatttccatgtatacataaacattgtttatgaaaacataaatatttttcaatgccacgtatatacttattattatta

SEQ ID NO: 205053 - DNA, 508 bp, Cannabis indica
aatggttaagctaaattgtatattagatagaggttatgggtttaaatctcactaaaaacattttttttaaaatttatttttgcaccctgatttataaaagaataaaagattatgccccctcactttaaagtttcgattcatcactactcgtaataaataactattcgaattttattttttacgcgataaattatttgaattttttaaaaatttacatgtggtattaaattaatataacgtacatgatattaacaaataaagaatcatacaatcaaaaagtctcttgtctatgaaagtaaatcattactatagctctaaggccaattgttgggaatattccttttggacttaatcatatagactctgttatgtcttgtcttatgacatgttgtgagaaagttattctttggtggtgatagccttattcgtttgttctttggggagagtcttattcgtttattcttttcttagattgagtggctggtatggcgtcgagtagtaagcaaaa

SEQ ID NO: 205054 - DNA, 752 bp, Cannabis indica
atatttaatttatctatgtattttctacataaacttttgaatcacaacatattaataccatataatattctagattgtttagaaaaaaaatgaactgagtacacctgatcatccatggtatgtatgcaataattactctaatttatgggaatttttaacaagaacgaaaaagttcgaagaaaattttggttacataagaaagttgagaatggtaaagtcaataattccctggaaaatataatttataaatatatatctatgcaaagcttaccaataattaaattatgttattattataatattatttataatatgtcatgttgatgtaatcataatcatgacttatgtttaagtattttattttatgcatgcatggtttcactcgttatccactcaaaataataataaaacaaatgcttttcatatatggcagggggatataaagtgtgaacgattagtatggcactagtgaatgtgattagttacaagacttttcaactttgctttttatgagaatctggtcccccatgtaattatatattccactatattgtttgcccctacaacaaaagtctaatttgcatttttacctctaaatttttgttcataataaattttcttcaaattatttagatagttagataaatgatttttatctaattctatttaattttattaatacgacgattatatatatactaaatcgtaacattaaactttgatgtttacaaaactgtgatgctaaattttta

SEQ ID NO: 205055 - DNA, 1118 bp, Cannabis indica
cattcatgtgtgtttttctaaaaagctgcttgtatccgttgaaattagggtatagtcagttccaactggtacgagagttcatataagaaaggttgcataggttgtgttgcttttcttttttctaagaaaaaaataaataaataaatctttgtcacgttaattaaaaccttccgcagtaaagaaagagtaccaaggggaaatcaataataaactgtacctgaataagagagtccatattataaaagagtccaatgtccaagccacgataagtccatatcattaacatgtggagttgctaaaatagtgtagagttatattttaacaattttcttaaaattagctttccaagaccatcatttatgaaagatttaaaatttggcacaaaaaaggattgtgctatatttggttcattatttacaagtgggatgtacaagatgtaaagaaaaaaaataatacagaaccaatcgagaacctgcagaaaagtaattaataatcgttgaaaataataatcagtcaaccattgagaaatagtcgagaacacgtaggaagcttaaaagcacaactatacacaccatcaaaaaactattgataaacaattaagaacacagataacatgtcaagaatagttagaaatacaaaatcattcgccatttttgacaaataattgagaacctatcaaaaagccatcgagaaaggtctcccctaaccttgggatattcgcatcaagaaactttcgagaacgtatcgataactcatcgagaaacgtctatcctgaccttgggacatccttgttaagaacctatcgagaacgtatcgagaatccatcgagaaaaatatgaacacactaaatactccaaacaattagatcttgcgatttcaacaaaatttatatcaaaacaaaaaaaaaaaacaaaaattaacaactacatagatctaacgaaaatatactatatatggggcaagaaagtttacaaaatcttttacaaaacacttatccattaatccacaatgagagggaggttgggcagacgtccttcacggcgagaggcggcggttgggttgactagaaaaggttgggcggacgtccttcacgacggttggccgagtatcccaacgac

SEQ ID NO: 205056 - DNA, 1066 bp, Cannabis indica
aattatgattaatttaattctaaaaaagaaatttttacatattgataatttgttattacaggttaaaagaaaatgtaactatcattgttataataaaaatgtaactattaagtaatcaccattatagtcatatttaaagtattattgtaatttagttaaaaagttatatgataattagatagttaagcaaattagaattattccattttaaattaatattgtgtcatatattagttcttattaggaaatgcataataaatttttattcctacacttaatactctatttattctttcccaccattcttatgctcgtatgtatataagaattattaactgatttctttttcaaaatcttatagatctattattttgcacaaataattattttatttattttttttttttcaataaataaaacatatgatgaatcattgttcaaattaattatgcataaatcatcaatctaaaatttagagcaaacatataaatcatccatagtgattcacataattatgtgaatatatataatttcttctacccatcacgatgaataatattgtagattgcaatgtgtggtttaaaataattagaaagatcatttaacaatatatttctttatatgacctgtttatcaaaaataataaataaaattttgaaaagtgtggtattgattgattgagtaatacaatgatacttatttatcaaaaatatcatcaaagccacctcttgatttgaaacatttaattcctatgtgtgagaattcttagaactacatccacacatacatatatatatatatatttaattaattagaccaactattaacaaaaagaacaaataataatcaatatatatagtatcatatgttgatgctaatgagtaaaattaaagaaaaattaaatctatatcttgatgatgatgagtaaaattaaagaaaaaaaaattaaataatgcaccttgatgatgatgagtaaattaagaacaaaaaattaataaataccttgatgataatgagtataattaagaagtaaataatatacatagtatagtatgtatacctttga

SEQ ID NO: 205057 - DNA, 1381 bp, Cannabis indica
ctaatattaaattgcttcaaggatatgtcatctcttacaatacatgttaaagtgctttagcattttctctaacttaaatgaatcatcatgatcatgtattaatactaagcaatgtgcattctaattaggatgttacccgctttcaaaaaaaaaaaaaattaggatgttacccaccaatgtatcatgataaatacgaattttatttaaatcaatgtaattagtaggttggttttacaatttgttaatgtattctttagtttgttagcagggtgatgatcacttgtgcataggttgtaagttttgattgaaccaatatactctaactgatgacttatataaaaaaagaagttagtatactagctatcaaataatattcatcatctaaaaatttcgcaatgcaattttcctcaacatttattaaatgcaaagcattaaaaatcaatcacacatgcttacttggataaatgattacacaaaagaaaatcgttttataaatatatattgagatacacaaatatatatttgttattcactcaacttcaaacttcaacttccaccaacataaaataatggttgatttatgttatatatagtaacacattattagagcattaataataataataatattggcaaaaatttggtctggagtttagctcagcttatcaccccgaatacagaggtagtaaatttggaccgccgacaactttgcgaaaagtacataaactatagataaattgcatgcataccccccaaacaatataaatcatgaaacagaaaaagcaaggctaaagaaccacacgcgcgcgtgagcttattttgacgcacacgattagtgtgtgaattaatattttgggacacaagaactaaccttcgtggccgcgtctggcttgttagtacggacttttcaacacggcgagtggacgagggatcaacaaataccaatactattggaattaatcttataattcattcaatttttttatttataaatcaataaacttaaattaagtttaaaaaattactttcgtattttttaacttttattttcagattaatttttcttaatatcaataattattttaattttatttttatatttttataaataagtataattttttaataaaattccatataattttaatttttttgtgtcaccatttaaaaatattttatttttattttataggtatatttttttaagaatcactacaaaaatcttacttttagctacagtattgtgactaaatatatttttagtcacgttaattattgtgacaaaaactaaataaatgacaacttgtatttaaatattatgttttagtcacaagtaactttttgttgtgactaaaaattacttttagtaaaaaaacttatg

SEQ ID NO: 205058 - DNA, 1371 bp, Cannabis indica
aatgttcgtcaagaccctctgaggcggatcgcccccacctacaatgaggtacgtcacatgagccacaatcgagaactaggtgcatgagtgctcttgagatggatgccaagaaaggctagaaggacaaactttttttttttgtaagaacccaaattcattagctaaaacaaatagatggagatcacatgggaatttccctccccttgaaaagtagcagaaacattgctagaagtcctagcgctttttgctaaaccatccacaaaaaacaaggaactacgattagcatagaaaaagctacaactactaaaactttcaattaaatctaacactacacaagaaacatttcaaaaattccaattaagaatacgcctacggttttccaaagtttgaatcaccactttggaatcaaagagaacatggacctcattctatttgttctaaattgcccaatacaaagccaacaacacagccttagattctgcttccaaagccgaggttgttgaagtctgctgcaacttatacatccacgagcaatcaaaaagattaatcatgaccacagccaccccccgcaacccctttagatcaggatgcatcaatcatcaacaccactttagcttcctcccttatgggatcacgcacagtgtttcgattccacagacaaaccaaaaccagcatttaccaaacaagataattcatgaaaagaaacattgaccttttgcgacaacttaaccaaatcagcagctccctttctaaacaccaaattgttgtaaatgttccaaatagttaaccagatggacgcgctcacctagtggaaaggagagacaagttttttgcaaactctaacactgaagtctcaggaattctttcactaaagataagaaactcctcgcccaaccacaaagccttagccacactacaatctctgaacaaatgtaaacaagtctcaacatctgcaccacacaaaagacactccttgtccaaactgaaaggcaacttacttttgatgggaatagcttccttgggtgaactttgccattccagagccacttccaaatgtttcttataggccgaatctcaaattttgatcaacacaatatgcgctctttacagaaaattttccattcaaattacccttccaaataggagggcaaactttgttatcacatttaagactctcaaaggagccataagattcgaattaactgagaaaattactttgaagtaagcactttgtcactagaccgctcactcaataataaattattttaaataactgactgttgtgaaatagtaagataatagtaatgtctctaaaacattatttttttttacttaaataccatacttaacatgatttttttcatgtgtttt

SEQ ID NO: 205059 - DNA, 1725 bp, Cannabis indica
gttttaagttattattttattttgatagtaaatttttaattaaatcacatttttttattaaattataattaattattataaattaatttacaaaattatatatgtggcgtctctatgggttaaagtgttacacttactttacctcctaaggtaacaagttttgcttggagattatcctctagttggatccctcctataatcaatctttaaagatatggcctccttaatgataatatttgcccaatgtgctccactcatttgaaaataactcatcaagctctttgagattgtagccaacttgtgacagttcgaaaattttgctctttcagtcttggtgatccagttgccattgtgagttatgtcattcataatttcatttgcatttttattgaacatcttcctcgcatgtgaaattgaattgatccttaccacttgatcgagaatatggtaccaaagaaacaagaaagttcatgaacaaaagttgttacaccgtcaaagcttgttggcccttgggcggctgactatctcctcgcctaccaagcatgagaatgcctatgttgttccatgcaacttcgaagtgcagcatacagatgttgctgtcgtgcttccttgctggcttcctccccttcataggctgttcaatgttaattcgtatcctgccatcaatttgttggtgaagttggtggcattgaaacgattttttgaaatctaatagtgttgttcttacttctgtcgcttgaaagttgcttggaattatttttccaaaaattaccgaggcacttgcaatttataatgctatgtctcaagaccttatactcggtttcaacaatgtttaactcgacactgattgccaaagtttagttcataaacgtaataattctttagttttagaatcatttttgagtttaattctagaagatattagaatttcatgttatcatttcaatattgtaagttttatatattgtcctttaatgtaataattaattatttagctaaatttgctttaataactattgcaagcacaatttggctattttctctcaaaataagaaaaagagaaagaataaagaaaagaaaaagaaattcctattttattgcatgtgagtgagtttttcaatgtgactacacttgacaactttttgtgttacattacatatatgcattcatgaatcttaaactgtaatttatatgctttaaacttttgttcaacgtatgaaaattatttcttttaaaaaggaggtacataattttattcttgttaacacaattaatttttattaaaaatactttatgtatacaaacctataatattcgtgctttcatattcgatatattattcaacttcacttttatatttacatgtgttctaaataagaacgcataaaattcaattaggaaagaaaaagaaacaaaacaaaaacaaaatggaacaaaaaggtaatttgttgaattatgtacagagttattttcttctaacaaacgaaagagaatatattaaccaagagaaaaataatggaaaaataattatcttaaagaaaaatatcggttcaattaaatattgagtctcatataatttaatataataatttttagaaaatattactagccgatcacaacgcgacatattttaaaggtgctaaacactaggggttttcatcaaaatgttcaaactgcttaaaccgtctgcaccacaccgcatcgcaaaaaaaatacggtttgaaa

SEQ ID NO: 205060 - DNA, 2076 bp, Cannabis indica
atacatacacatatatatattatttatcttttatctttgttttttagaataatttgtggtataaatatttaagtttaattcttaattacaataagtttaatttttgaaggtaataatatttaatttaaatttttgaaacttctgtaagtacctaactcaagtcaatgaccacataacagtttttgattggttcaagtcgttaaatttttattttttatttaaaaaattatttaaatatattaataaaaaaataacacgtgaatatatattcacttagcacttaacagtcaaatttttacaaaaattctaaaaataacttaagaaaattaaacttaaatatttatatatttatggcacaatttttttaatgtatctagctatatatctactatttttttatatttcattatacattatatattaaagtctcattagttagtgcttattcatgttttagctattgagtttttgatatataatagctctttaattatttatacatatcgtggtatgatgaaattcataggatactatattatgctcaccattttgaattctatttctgcattgtaaattatttataatttattaaaaatagacacaattcttactaatatttaacaagtttatttttagttataataaatttgtgattaaaagtaaaaaggtatgactaattagaaatcattatgcctatgttattactagtctgtgactataactgtattagttacaaaaattacaatttgttgtaattaatatatttttaatcacaatatttattgtaaccaaaactaaattagtaataacttgtatttaaatattatgttttagtcacaagtaattttttgttgtgattaaaagtcttatttagtcacgaaaaaattatattataactcaaaatttgtcaatctaaagatctttttattttttttttattttttatagtaaaattataacatatactgtcataaaaaatagtttataatttttttatataccgaaaacaaataatgtaaaagtgtgtatatatattataaaatatattatctctttctttgatccatttctatttaacaggaagattgtcctcaaatgttaaaatgactggcaatattcatgttaaaggaaaagagaataatgaaagtcatgggggcattgtaagttctacataaattaattatatgcatatattgataattttatataaagaatactataaataatttgttacaataacctaattaattatataatttaatatattaatgtttcagtcatatctcactcaagaggatattttcttgggaactctcacagtaagagaaactattacatactcagctcatttgagagtttcaaataaaatgaggaaagaagaaatagaaaatttggttgaaaaaacaatagaagaaatgggattacaacattgtgctgataataagattggaaattggtattttagagggataagtggtggtgagaagaagagattaagcattggtttggagattttaacacaaccccaaattatgcttcttgatgagccaaccacagggcttgatagtgcttctgccttctttgtggtctgtacacttagaaacattgctcataatggtaggattgttgtttgttccattcaccaaccaagtggctatctctttgatctttttgatgatttgtatctcctctctggtggagaagctgtttattttggagatgcaaaattggctgtcaaggtaaataaaactactatataaacaattataatcaacatttttttgtcacaccatactttatgctagtaataatagtgtatgtttattagtagggtgtgatccggactatttcatcaatggttaacaaacgtggcgtttaataatatttttatttaacaaaaaaaatgtgttatattaaatttttttttttaatttaacttttttagaagaaaaaaaatggagtcggatctagggttgagcccaaactccagggtcaggggtcaagactggggtctgagattgaggtcagggtctgcaccaaggctgaggtccgggtttggatccaagtcaaggatca

SEQ ID NO: 205061 - DNA, 682 bp, Cannabis indica
tttttttttgtcttttgtctgtatacactccctgtttgcttatttttctttttttagactattttactgttttactattagatatctataagaaacagaaagacagctcttttttatttctttttgcaacaagttttgttttgccccactttttatttcctgtattgtatcattcttttaattattatttgtgtattttaaaatggttgagttgatggaggaaagtgtgtgaagggatgcaataaaattaaggtgttggctgtgtggaccctgcctgacccaaaagtcccaagccctggtccactttgtgttttttaatagaagtcttagtacagtgggttgtataaatggttctgggtcctgaacctgttatgtctcatgtgatttgtgggtctaatcttaattctaaaactctatgccgatccaaagtgtaccgtgtacagcccgtgttatactaccccactctattttatgtttactcctctatacatgaaaaaattccataaaagactttctagtagtatttgttaaattttgaaaacaatgaggtacaacaattttatacagtaatactcttctttaactttaatcacgttgggactatttattcaaaaaataataactaaaattaaattggaatattgagtatatgtatcttaataatatatatggatgactattt

SEQ ID NO: 205062 - DNA, 734 bp, Cannabis indica
aaaagaaaggagagaaatacaatatgtgataattaaaccagacagttaaattatttgaagagaactaaaatttgtatcaaccacaaccttgcaattagactacactaccctattgtgaaggttttgttgtttgatcaaactaagaacttctttcacccccactgcctctgccatgttaggctgaacacacccaggaaccaatgtagagcaaatgtgcaaaatattgctgccattatcacggactagcaaactaataccaaaagtgtcaatcctactaataacagtcgtacctacattaatcttaatcatatcaaaattaggtacctctaaattttctacaataaaacaagaagaagcattctaacttgaaatataactattttttaataataatgtatgcatttaattataatatatactatattagataagattacgccattaacaacaagacttttactttgccaaaccaaattgagaaatatttttttgacatgaaaaaaatatttatttaaagctctataaaaatataataatatatttttaaaaagcacaatgtaaatagaagtttttttagcaataaattgaaacaaaattgtattaaaaggaataataataattgttatctgtatttttctagcagggttacacgtctacttccaagattcgtctaatctcatggaggcccattctcatacccaaatgagtggtttagtgttggattttatgcccta

SEQ ID NO: 205063 - DNA, 850 bp, Cannabis indica
aggaaagataacaacaaagccagcaattaaggataataacgttatcttgctagtagccatatatgcatgatcttcggaacaataagaacaaataaagaacttaaacaaaaagaattgaaaaaaaaaacaaaaattggaacataaaacctctcataagtagtaacatattcatttatttgtaaggaaagtaagtagtcactagtcacatattattattgagttggacccaaatttaataaaagaactttttaattaatttttgtctttaaaagaagcttgttataaaaattcaagaagaaaaataagcttattaaaattaaccaaagccttttcatagatggcttttgaaaaaaagaaaaaaccatttcatagaaggttgagattttctttttatttattaattttttttttcagcaatagatggtttaaagagttaagactttctttatgctaattaagaagttaaatcattatatcattgcttatatttttattttcaatactatttgatcgtgaaattagtattattttaaatgaaagaaatggctgtcgagtgaaattcaatttaaattaagtttcaaatgttaatcctagaatcctattattcacactattaacgaaaatctctgatctaacaaacatgataattaggcaactttcacgctgaacaagtattcaatcagccattttcaaagataaatcagaccagtaattctgataaaataaaaataccttttgtgctcgatgtgaaacctggaggtggtggcggctgtggagaggcagccggtggcggagttgatgcattttgattgtaaaagggataaacttcgtacctaacattacagctagg

SEQ ID NO: 205064 - DNA, 1852 bp, Cannabis indica
ccaaaaaagagctgcttatgatccattgtgagctaaaagtattgccggtccagaaaggcgaactaaaaaaagagccgcttgcgattcattgtgagccaaaagtgtctttggtccaaaaagttgatacaaaaaaagtcgattgtgattcgttgtcagccaaaaagtaccacttgtgatcgagctgtccaatattagtaagcaaaaattagtaacgctggcaatatggttcacgcacgacaaaataattcaaaaacgatcaaaataaatgggtttgggtgacacgtttaagaattgtgcatgtttgtgtttgagtttctacctcacgtttaataattttgccgtgtttgtgtttgaatttctaacacggttaataatcgtgtcgtattcgtgtttgtgtttctgacatgtttaataatcgtcttgtgttcgtgcttaccttaatcgtgtcatgtcatagtcatgttgacatatttaataatcatgtcgtgccataatcgtgttgacacgataacacgaattagtttctataaattttataaaaaaattcaaaatttttgtatttataatgataatcgtgttatcgggttgtgtcgcgtgacctactaattaatcgtatcgtgtttgtgtttgaggttgcgacacgtttaaaaaatgtgtcatgtttgtgtttgagattttgacaatttgaataaacatgtcgtgtttgtgtttaccttaatcgtgtcatgttataaaaattagacacgataagaattgtcaaccctaaaaattagccaccatcttgagggaaatgttagagtcccacattactaaggtgtataaatataacactatagacaacatatatgaactagtccactcatagtcaatttttttttagatgaacattatgtaccgtacaaaattctaatataatccaacccacccttttctctaaaatataatcagggtcgacccaagcaatataggggcgttgggcaaaaaattaaaattaggctttttataaaaaaaaaaaatctttttcaatcaatacttcataaattcaattttcaataataataatagaaattatagatactaaaataggcaagaattttagaatcatgtgtactggaactacaagattttatcatggttattttaagtgtgtatttactcttataaatatttattatgtatacaatacattatcaaaaaaaatatgtttattatatcatatataaatggatgataaaaaaaggaggccttttaatatatgagatcttacaattgcccaagatgccatatgcttggtgtaacaccttactagtttaggcgtgttattgtaatttcatactctctgtgcaatccattgccaatcaacagatttgttagaaaaatgtgattaattaaaatttcacacaattaaattttaaattaaaataaataaaccttacataaaccgagatcttgttgtttaaaatttacaaccaatacaacaattgcagctattaccggcgggccaaatccgcccctattaactgggattatttaccggcgaatttttggggcccgtccggtacttattctgtattaattattctgtattaaagataaagaaaaaaaaattaaaagataaattgcaatagcagcgggcttacgttaataccggcggacagctcgccgctattattggggtgaaattaagtgcgggaaaattctcgcgtactgcgtttaaaacatattagcagcgaactaataccggcgggtgtcccccgctaataatattaatatcggcgggggtttttattaccggcggatcccgctggtaatagaattctatatatatatatccccacgaaccggtttcccc

SEQ ID NO: 205065 - DNA, 937 bp, Cannabis indica
ctttccttccatttcaaaatggactagttattccaccaaaatgataaaaagatcattctatcataatggtattctaatagttttaaatgtaaccaaacaaaagaatgaaatgaaaactattttatttccattctatttcattacctccaaccaaacgccacctaaattaaagtttggtatttcattaccaccacaaggaaatcctaccacttttgttatgaaaagcagcccacgtagccaatgaatgggtcgttcattacaagatttggggatccaagacaacaagaaagaaaccagttttgattaaacaaagaaataatacagaaaaataaaccagaaggaaagtcaatattcttatatctcttcatttgacaaatggcaaaaaataggggcccacataggagacttaaaatctacacaggaagaagaataaacctttattcaataacaatgtttaagattggatttttatttcttttcacatgttacagtatattctacagcagattaaaaagattgaccatgaaacttcatcgttgcttgttgtcagtcttgccttggaacaataagagggattggtgaaattagaacacaagaatgcccaccaaaatggatgttgcgggaactgtgaggttatcatcaaggtcggtgcttattgggagtgattccaccagtgctgatgcaagagcaacaatccaaaaccccaagaccatttcccaacttctttccatatatccaaataaggagaaatagtacataaacctgcccaaaagttacatgtaaataacaaatggatttttgattgggaagatgcttaattggcttctcatatttcaaaacaacaaatgagaaggtgaaaacaaaaaggagcaagtagccaaagttaccccacagacgctaagaaactagcagataccattgcaatgcttccagcaat

SEQ ID NO: 205066 - DNA, 1281 bp, Cannabis indica
cttttttaaattcttttccgtttttacgctttattttcataaatatttttattttgtctttttaaattcatttttacgtcttcttccgtaatttatctatttcaaacaaactatcaaattccaactctggtttttaatcttcttcttcctctgcaacgtcggtgcctatggtgttcatttagctctgcgatttcgtccaacggcggcttcgacgggctctttcttttaagggtatcggcacacctcgacgacttcgacgacttcgggatgattgcaacggagctctgtttcgttttcttctttttttgttcaggatacgcgatgatttggggacgggtcgatcgattggcgcagctccaaaaacggcgttaatggaggttttcttcgagctctgtttcattttctttttttggttcagtatacgatatacatttaaaggtagagaagaaagcctaaccacatatttttgcaaaatatattctaattgtggttagttttcaatattaacgtatttttgaaaataagattgattaaaaatataaaattgaaaaacaccttatttatttttttttattttttttttatatttatacaaattttcggtttgaaattatactgtttttattttgagcttatattgttttaattttataaaattttttccaatattatttttattttgaggtaatgttatttttatttttataagtgaataaaaaattaattataaaaatataaataaaaaaaattcaaaattaaaactatacaagaagaaaaacccctcaaaagtatataaaataaaatttatctaaaatgaattaaaaccattgcactcgtattagtgatgttgatggatataataataataagaagaagaagaagaagaagtcaaattgagatcaaaattaaaagattctctttacccttttaattgcctagtctacatgactagtgaagttaataaaaaaaaaattaaattaaattaaaaatagagtcgataaataggaggagttgaaaacagataaaaaatcaatactttgaaaaaaaaaaattcaaaaaattgagagaaaaaagaaacagagagaaaaaattacgatatatttttagtaaggatcaacaaattttaaggataagtatttatggaatgttttcctttcttttgatgtgtatgttcctctttttttctccctattaacttatggaatgcgctcattccataaatgaaaatgtatgttcttatccaagaaatgtctctttattctgcaaaaaaaaaaaaaaaac

SEQ ID NO: 205067 - DNA, 1386 bp, Cannabis indica
attacccattcatgggtagtactataaaaaatttgagtttttatgcttagtttttctatctaattaaaaaaaaagcttttacttttacattatatgagttgagactgtttcatcagctgaaaaaaaatttgagaaaaaaaagtttttcggcaaaaaaaaagttgaatttgacttaaatattttatatataaacatatttttgatatagtgtaaaaagtaatatttttagatattttttttagttaagtagttaaattaagcatagaaattcaaattatttttttttaattaagtgtccatatatatatataactaactagatggatgttatatttaaggtttgatgtttgtttttttttttttaaattttggttaactattatttgaacgattatatcaatttacaaacacgcgcacaatgtagtacctattttttttgtgaaagaaacttactacgtgatagaagcacaatgtggaccttaatattaaggatgtatagaatatacacaagatggagaatgtgtgaagagactttatcttgacattcatagttaaagatagaaaaatgaagaggtactgttctcacttttcttatcttatctccaaacaaaatctcccacatcccaatcgaatagctgccttttgttagaagggatatagctttagctagataagtggcacatatcaaggccctacaataaaggagagcgacagcaccattattgtaatgcacatgtgtaaaatatgttatatgtacgcatatactattgctactactataaatatatatatatatatatatatgtatgcatgtagaaatactatacattgagaaaagatatagagaaggaaaaactgtaaaaaaaataatggtgttgacaagggcgggcaaggggagaggtggcaatgatgatgacgatgaggactacttaaactcgacgtttgcgtctcggtacgtacgtgagccaatcccgaaatggaggatgcctgaggagaccatacctaaagaagctgcctaccagttcatacatgatgagctcatgttggatggtactccaaggctcaatttggcctcctttgtcaccacttggatggagcctgagtgtgataaactcatcatggcttccgttaacaagaactacgttgacatggacgagtaccctgtcaccaccgaaatccaggtccttaatttcttcttatataatattaaatgtattactctacttgtttaaaaattaattaatactactttaattgtccgattacttaagctttttgtttttctttattttaccaagtgtacttgagtggctattcattgagtagaggctgtgtagtccacccaaaaaaaaaaaaaaaaaaaaaaacgaaataaaataaacaact

SEQ ID NO: 205068 - DNA, 807 bp, Cannabis indica
gtcttataatgccaataaaaaccatatatatttttttttcttggaaaaaaattacttggttttaacaaattcacgtattaactttcggccccaacaaaacaaaaacttacatgataattttgtcaccgattgaaagggcaacaaggatgatattatgaagtgttattattaaccctaattgttgacattgtaactaatgacaaaatcatatacttgaaaggtcaagaaataatcatgttagctggtgtgaaaccaaagttattattaatgtgttataaagaaccaaaaaaagcaataacgaagaaaaatggtgaaggaaaaagtacatatgtgagatgaatagtaggctcccaaaaatagttgaaaatgaagaaataatacgtttaagaaagaaaaggaaataataaaaaaaaataataataataaatagacaagtcagtgccagtggagcatcacatgcttctctggtcatctaccgacaaaaagagggtctacttcaaatcttttggttttctttctctttttcttttatttataaaataaaataaaaacaatttatgattgaagagtggaattgcttagtgaaaccctaaaattggtcaaattttgcactgggttttgtctaaaactcaacttatttaatgatgaaaagctcatatatatatatatatatatatataacccttgctacgtattatatagtccttttgtatttcctatagaaataaagatacataaatgttactacttagtgtagaccaaattatttaatagaaaagtcttcttctcctcctatgtaacttggta

SEQ ID NO: 205069 - DNA, 1837 bp, Cannabis indica
gaaaaccgaaaactaaattttagattttgtgtaaaaaactgactagactgacccggttgcctcaccccctagggtcaatacagcctggcagatgattagaaaaaaaaaaaggcgatcgaaatggtcgagtaccccctttaacaataacattaatgaagaggttctattgaacagatgggaattaaatcgttacctgccaaaaatgaggtagaaagattataagtaataaatagcccacgcgcgtgcagaatattgattacgtcactccccgaggccaaaggcaagtctcaagtctcattttacaaagttacaaagcaagacttggggataaatattgtcctgcttttgtcccaatatacgtgacagcctcatcatcggctgagtggcaaatgagtcttaagatcaagaagtatttaagatatgtcttagtaaatttattcggattaaatttatccaggtggcaaacaaatagtggtttattttctagttttatacataaaaagaaacaaaaaaaatataaatgaaccacaaaattttattcttaagaaaaattgtacaattaaaatctattataaggttctctttaaaaaaaaaaataataaatctattataagatacattataaggagtgagatgtaattactttgacgtgtaaataaattcaactcagtaatcattgtcaaattcaccttcaacagaatgtttgctttaattggagcctcaaattctgatatttcaatcatctcaccaagaaacctgggcacacttctccctcccataaaaaagaacgagattttgattggttgacacgtctcaattagggccaaaagtattacacaataaacatacctacttgatgctcgagtctcaaaagttactaataaaaaaaagttgtacaaaatagtagcagaagttagaagaaataaattaatgcaatggctattgatatgtacaatgctcaatccagggtgaatacaacaccatgtcccgtaacaatctacagaaggtgcccctagaaaaaaggtattgccagaaactcacaagtaacaccataccactcttgtggtattaacacaaaattgaagagcacttatctaaatcagattaactaattttcaatctataaatagtcaactcaaacaatgacaaattagtggataagttttatttttatcgtgtacggagacaaaaaaaatttgtttgttaaacagattccctaccgtaattcccatcatttacgccactgttctctttactgagtttggacttgggtaacaaggaggtttgtctagatgatgctttagttgactgtactttcaaattgaggtaagtgtatacagtcataccagcaatagccgtaaatgcaccaccgatacttgttagaccgggattggaaccaaggaggtagaagtttccaagaagaacgacgcatgttttgaactggccaagaacaacgtgggaaacagcagacgtagccctataagtttgaagaggaaagatcgggaaccgaatcagagccatacactcaaatcaagattcaactcgttaatatttccatgaaaatggtacactcaagatataaaacaaaacattcagtcatatctgtttcataacatcaagacaaacaactgcactttggacaaaactctaggcgtgaagatcgcgtaatactatagaacaaaggtaacaacaagacttattaagccaagaatcaagcttgtcactgtccgtactgaaaacacacacaaccatcatatgcttaccatgtcatttttttttttttgaaaaccttaccatgtcattcttaatacactatctgaacatccatgttcacatt

SEQ ID NO: 205070 - DNA, 1372 bp, Cannabis indica
tagtagattagtctgaatcctgattatacataaactcctgtttatgttcatagagttctttgattcactcattaaagatcctcatagaaaataattctgacaacttctattttttgagcttaataacatgagtggttgggaatatataaaggaatacaagctttctgagaggatctaatattagttgcttatagtattaattgtgggagtgctaacatgttggatttaaaactataattagattatagattaactgttcacattaaattaatagtacataaagaatcaagagataattaaaagggtaaaacgataattttgaccaactctaattatgaactaataattggagggcaaactacttatattgattatatcaatggactacaagtaagaattatgtaaacataattatattatcaaaggctacaattccctaattacagtggagtaatatataattaataaactagagtattctattctattgaagagtttaataataatcaaatatttattggagcttcgaaatataagtcaatggtccttagatcacctctatacaacactgtataggggaagatttgatttgataaataaattgagaaagaattaatttctataagaaaatatttttatgggaaaaatagtaattttatataaatttttattttgaataattatataagttatgaattgaatatttaaagtgatatttagctatttagttttatttgatgaaactatattaattagtgaaatataatattattcttaaataatataaaacagagataaaaaaatattttagtgtaaaataatatttattttaatgctagtgaaatacgagattaataagaattcatcaattattatttgttgcaaaataaataataaattttatttgtggaaaaattgaaaaattaatttgaaacttaaaaaaatggcccacacgtgtgggctaagccccacaggtgtagggtggcatataaaagcccaattaatttattttttgattattttatttaataagataaatcaaattaaatgataattatcttttaattatttacattaaatatattgtaggataatatatttaatttaaaagataaaaaagtaaaataaaaaaaaggtataactaaattctgtttttcaattttatgatatttattttgaatttaaaattaatatagtataatctttttatttgatagaattaaaaaaatattttaaatattataatatataagatatatattataatatttaaaataatatatatatggtgtgagaatagataaagcgacataataggaaaagagaacgaaattgaaattaaaaattcactatctctctctatctcgcacga

SEQ ID NO: 205071 - DNA, 976 bp, Cannabis indica
gttgccattctggcttttgtgtcatcaccaaatgccagtacaggttcttcaacagatgatgggttcagcagtgttgtgaacttacagagagacacaacaagatcatcaagtacatcttcaagatgatggcatgctgatatctttgcaacagctaggaatccattaatacatgtttgataaacctcctcatgttctgcatgatcaaaaaccacagaaattgcagcaatcgttggccctgacattatagcgaacatatcatggtctaggtaggctctggaatctgacactataaatggagcagttttctttgatttgtgcattaggtcaatccatcgacttggagtcatttcaggaaaaccagcaccttgttctggggttgtgcgaatctcattcttgattattgagtggtagagttctattaggaagtctcgagggaggtcatttcctccatttatatgccgattatttcgaataaaatcctcttctgtcatttttttcttcacttgtacattgtgctgatctgtattaagcattatcagtgaatatgataacaagagagcagcatccttgttagctagaatcagtggcgattgctcataatatctctctgagaatgcctccaggactctctgtatcttttgtgactctccaggcagtctgaatgtttctaaaaatagtcgcaatgcagtatccaaattcatgtcttggaaatcaaaagtccaagcaaattcatggagaacctgaacacaaaaatcatcatgattccccacgaaaatcccaaactagattcttatccaatccagcagtatatctgaaaaagcaatgccacactttgaggatcaagtttgtctggcaagagatgtgttccttggaggaattctaaccctttctttggatcccgattaaagtgatcagctccaatcatcaaccttcttttgatatatttcctccgacgaacaaatggaacccagtgact

SEQ ID NO: 205072 - DNA, 748 bp, Cannabis indica
tgttattagtatactatatcgtacttttaaatacaatataacaaaaaaaatttatagtaattcataatgttacttgatatgataaagttcattaatttaagattttattattttttgttacaaaatataaaaaagaaacaaacaaattacttttaatcgtcttttttcagagacaataaaatattaatttttaacttcaaaattacaattttatttttttagatttttaagttaaattatgttagctaaatataataattttgttgtttaagataccttagtgttacttttaattttggtaatttttttttgtagcggtaaaaatacatatgctttccacatgttaaaatgatcaccacaaaaaataaattacaacagtataatttttgagtataaataataaatgacgtgattaattctttttttaaatttaaaaaaaataaaaaaaaagactataatatgtcacatttattaaaaaaagagcttttaatattatatataaaaagacaaaaaaaaaaaatgttgtgagagaatttaatccctatgttgctatttaatgaaaggaaaaaaaaacaaaaaataaaatgaaagaaaagtgtcataaaaacggtatgcaaaataagagtattatatcattcaaactaatggtatttagaataataaaatagcaaagtacaattttataaataaaataaaatttgcattactccatgcaaatttctcaagaaaaaaaaattgtagaaaaatc

SEQ ID NO: 205073 - DNA, 588 bp, Cannabis indica
aggtatgttatggtcaatcttttgttttaatatctttctcaatttttgtgttaaataatatgtgttaaattcaatcggcattataaattaattaaaaaatttatagagataatattttaactattacaaataataacacgataaagaaattaaaaaaaataatattttaatatattattttgaaacaaaaaattaataaaaaaagttaaaataaaaaaatttaaattatcaccctttaaaaaaattagcaagagtctatgcaaattagccaaatgggtcataatacttaatagttaagactagtgccccatttattttggattgccctatttatttttcctatgctattttcccttttaaattgaaaacctcccaactttctcatgataagtgttgatgaccccttcattcacccatcccactgtgatctcccataattattcacaaggtcacctttttagtcaaaattgatttagtagtgttcaaaacttgtttctttttagtttaggaaaatcaatttagagtgtttctatagtacttatttattatctaaagtttaatttaattatgtactcatggcatgtttat

SEQ ID NO: 205074 - DNA, 503 bp, Cannabis indica
ttaaaaacaaaaaaataacttttgaaaactaataaggatatttggcaaaaaaatttctaaaaaatgagttaacaaaaacaaaaatcagaaaactatcacaaattgattttctattttataaaagaattttctgacatgtattttttttaacattttttctcgcatacacgtgggtcccaaacccaagtccagggtatgggttggagtttggattttgagttcgagttcaggttttcaaattcgagattcgagatttgggatccgacatttgggttcagggcgggattcgggtcttggtctagttttgggttcggtacgagtttgggtttaggttcggggtgtggggttcgggttcgagtttgggtcgcactgccagtctaagtttggggccaaggtctgggtctgagtccgaggttcaaggttcgaggtctagggttcatggtcttattaagtctagggctgggtctgggtcgcgcagtcgagtcgggttcggggtccgggtc

SEQ ID NO: 205075 - DNA, 1454 bp, Cannabis indica
atcctacttgaggatggacaagtattacctaacagaccatacgaccagaatgaccaattcataacaccaaggaatgacggtaggagggaggacaatcccaaatagaggactgtgataactgaccatggcatgcccgagaagtacaacgataccctccccctgaatgtccaagaataggtggaactgaggcctagggatactgttttcaataggataattcttaggctgaatgaaaacacacaaggcaaaatttcaggaagggagaactggaatgacatttttccccaaaccaatgacctcagatcagtggatctacccaattcgagtggttggtatgttcttcccttaacctatccaccaactagcctgaccgaccgtagaggtctggtcagcctggccggtaaagaaggcctagccggtcaaggtatgctggccgaccaaggattgctggttggccaaggagtgctgcctggctaaggagagttgtctggacaagaggtcaccaaaatagatccatctgtgcaaacaaaattggatcaactcaaagacatgatcaaaggcctgtctagcccaaagttaacagacctagagctggaaagatcaaggggatcatccttctcggcatatatcaatgcattgcccctaccaaagttcaaaatgttagcttagaagatgtagaccgggaaagaagatcctctgacacacataaaatactttaagatcaaaacaaatctctaaaaattaactagagatgcacaatgccagatctttctgacaaccctatttaaaatagcccaatagtggtatttcaacctagctcgagaaaggttcaactcttgggaggaattctctcaagaattctatacttagttcttgtcctcgagacaaataccttcatagtttgaagaccttgtcaaaataaaaaaagagaaggcaaacccttgaaagactacattcaaaggttcatggccgaggccactatggctaaagggataacagaagaaggttgttatatgaccatagttcgaggtatcttaccattgagtgacttctggaaagacatcagaaggatctcaatgaacaacatgaaggagttccttgaacgagttgatggtttcataaacttggaagaagctatccaacaagcccagacaggaaggcaggttagtattggacaaaatcaaaatggcgtacaaccccccagttttgccctacatgccaaccaacatagggaataccgacaaaccctccaataataagaataatggaggcaaacacaacaacaatggctctagccaaaataatggcaaaaaagggaaattcaacaattcccctacgccataaaacccaagggagaaggagaagaagtacacatgcttcactctcctgatagaaactcctgaaacaatatacatggtcacccaagatgctatcctatataagaagcctcctcc

SEQ ID NO: 205076 - DNA, 545 bp, Cannabis indica
aattcaatgtttcaatactcaactagcttggagaactataagaatttaagggatatgtttatgtattaaacaagttccacaaacaagacagcttactgaaattacaagatatatacatcgatttatacataaactagaaatgttatattttatacatgagacagtctaagagagtagtcttagacctgtatctgacctcaaattaataaaaactccacaaacttctatcactattattattatataacattggaaaacagaatcaaacattttatggaccacaatcacctatgatataagcaatgactaatggattccagatgctgaatagatggatggagcaactgggatttgacagtttcaatatttatctttgaataaaccctaacatcgacttaaatctttagtgaaggggaagaataagacgatgattgtagtggaaacaatagcctcttcatatatatataatgaagtaaataaagaaaccctaacattatgggcttgtgctgtgggctttttctatttttctttaagattttcttttc

SEQ ID NO: 205077 - DNA, 827 bp, Cannabis indica
aaaaaaaaaaaaagaaataacaataaaaagatggaaggtgaagaaaaaaaataatgttacttacactgaaacccaagagaatggattatgttaataagattatttataattacaagtttatatatttgtatatagatttaagtagtattatagcattttcttttagaaataatttgttttggaaattattacttactcttaagttgtgcattgttaataaggggtgtaaattagggaggataatgcattaattgattgattagggtaaatcaaacttgatttgtcattttttcatgataagaaaaagacaaaacatcagctataaacctacctagtgtcaaaatgtcaaagccattatttttcataaataatcagaagaagagactgaaagtgaaaacctaaacgtggctttgttcaggtcacgagtgggttgtctccctccagccctgccttataatttaatgagaaaacgatgttgatcttaacgtaaaacattaaattaatgaggatggataacattctaactttgctatattcagattttgagatatatttatatacaaaacttttttctaatcaatttatacacttgccaattgctataaatattcacaaatttcgttcaaatatgatatgtcgacttttcaaataaaattatataatttatttacactattatttgcactttatataagattatatatcgtcattattattaggttaaattacttcatatactgttttttttaatttttttttttcaaattacggtttgaatttctaaaggagttgcagccttagttacaatatggatttctatacgattt

SEQ ID NO: 205078 - DNA, 1053 bp, Cannabis indica
aaatttgtatttaaatactataatcacaagtaattttttgttgtgattaaaaataatatttagttaaaaaaaatgtattataactaaaaaaaattgtgactaaaaataaatttttcttaatgagtaacttatctctctatatattgtacaatatgaacaagtcttggtctttctctgaaagtaaataaatattagtgtttcatttttcatttaatgtatgatgactattaattggattatagaaatgatatgtatagtcataaagaacaactataaaaattttgtggtttgaaaaagggcttcacttttgagaatatagtattaaaagtgtaactttggccagctgggattttagtgactcggatggagaaagactagtgaagtttaagataaggtgatcaatatcatcttctagaaatattaattaaagaattaaaattaaatataaatattggaaagggatggctgttaattcattaattagtgtggccaaatttgattggttagacagaatttagtacagataaattggacagaggatccgagtcccataaactaatagaaagaacattaaaaaaaaaacacaattaagactaatttgtcactacaaataatattttttaaaagttatttttctaaagttgttaatacaattattggtataattaattatcaaatcatatttaatttaataattattattataaaatatcattaattatttacaaaacgcaacctttaaatagtgttagataccacattaataccttatagctaggagtgggcatccgtctaatcttttttccttatttgatccaatctaatagtaattgaaactttttactttgttgaatattatttaataagaaaactgaccaaagttttttcattttaagaagagttattgtgatatatatgtcatgtcctctgacatgtgatttgtctctattcctatagagttttgttattttgtgtcaaagtgtttttgtttgattctcaccatggcgtctattagccgatctaccaccgatttggaacaacaatggaaggata

SEQ ID NO: 205079 - DNA, 1199 bp, Cannabis indica
catttctgacctcaatgacctgtatttcttatccattagaaaacctagataggtagtcagctaagcatggtagtaataataaaaagtattcaatcttccccattaggcagctacaacaatatatactatactattattatatatctattggctttgttatgacaagatagattagaggtgtgtataaaacggtcgatttaatttaatttgtatgatttaatttaatataatttacaaaatataaatatctacatttgtgtaaattagattgaaaaatttagatgtacttgtgcagagtaaatgttgattgacatgtaaaagtaattcaattcaatccacacatatttataaaaaaaaaattaaaaattatatatacatttaacattttaaagtaaagaaaatagtcgtttaaaaatttaattcatataatacaattatatttcaaaactgaatagatcaaatgtatattttattcttatatataatatttttctgcatacaatttaaaataaaattaaatatttttatatacatacaatttttttctcctttgaatttgttatttattattttatttattatttattgttaaagacatacaataaaaataatttatttattttattgctaattatgtaaaaaaatatttttttcataaatatttaaataatttaattttttttttttgaaaatatttaaataatttaatattaataagtaatcaatctaaaataattgatcaattcgcgcttttataaattggattagattgaatttgagatattgtatgaaaacaacacaatacgtaaaaaaaaatgtaaataatttaattattgaaatagtagtgacaccaagacttgaatctttttactagataatacaccaagcacttaatcttttaatttatcattaaataatacacacttgtataacttacacctttggaatattttatatccagacactatcaagaatttacacacttatgtataaataacttagcgcacacatataaagagtctaccaaaactatcctttagaagatgtactgtagactctagtataatgttttgtatgaaatacatagttaataaaattaatttaaatattattacttagtaataaataaagaaaatttatgtagtagactcctttaaagagtctaaccggtagattttttatgggtaaatggtggcaaa

SEQ ID NO: 205080 - DNA, 823 bp, Cannabis indica
ggaaacttgaagaacttaaaagtttggatttttctgcaaaccatctcacaggtccaattccaacctcagtatggaacctcaaaagccttacctctttttatgtaaataccaaccaattatcaggaacgttgccagttaatatttcaaggttgagtaacttggaggacttatttgcctttaccaataatttcataggttcaattccttcagagattggaaacctgaagaaacttatgagaatagatatttctgagaaccaactcacaggttccattccaacctctttatggaacctcaaaaacctcactgtattacattgttttgacaacaatctagttggaaccatcccgccagagattggaaatctagaattcctcacaagttttgatgtcgacaccaatcaactatcaggagagttaccagttaatatttccaaacttattaacttgaaggtgttcaatgttcttggcaataatttcactggggaaatagatagagactttgggaaaaacaatcctcatttgaacttcgtcgggtttgctgacaacaatttcgttggaaaactaccacaaaatttgtgtagcgggttcaatctagagtatttgggtgtatataacaacaactttacaggaccattgcccaagtgcctgaaaaactacaccaaattaaatagagtaaggcttgatgggaatcgattcacaggcaacatcaccaatgcttttggtgttcacccacatcttgattccattttcttaaacgacaaccaattcatcggccacatcttaagtacgtggggacaatgccaaaatctcaccacattaca

SEQ ID NO: 205081 - DNA, 791 bp, Cannabis indica
atcagattgtaatgggttttagttagggcaaaaaaacccaacatgttgtccttatatttatagtgctagagttcttcttcatttttactttgcccattgatggggcaaaccacaaataacatattgacttaggcccatctagtgcagtcgaaccatgaggcgttgatagtaggctgatgtggctgctacatcatgttgatagttgtccaatatgtgtcttgatcacggacaataaaggcacattaaatgcttgatagtcaattactatctttccatattgggaatatatgatctatgagcgagatcttgggagttacattctgatatcatgggatctggtaattaatgagtatgatacgaaactagatgcctagacattatattattactcccctggacgctttgggtaagtttttccagatgtaggctatgttggaggattatctcatctagataagttattctttcatcatccgaaaaggctaattaaagttatagatttggttcagcactctattttagctgctgttgagcctaaaataccttagatgtaatttcttttggaatcacacgtgttcccatctggaaacacgaatagtagtacttttctatactttttatggaatttgtttttaacattttttatagttgtatttttttagaaaataactttattttcatgttattttcatgtagcagcgacgtgaaaaataataaaaaatatatgtttgtatctttgtaaaagaaaagaaaaacaattaggggttcttacaaaaatactggatttgggg

SEQ ID NO: 205082 - DNA, 1490 bp, Cannabis indica
tgctgagtgcggctatccgaccatttaatctttgaacttccttcatttttgttggagacttcatattaggaaggttagtattttttctagacttgtttctattcctcgagcatcaacaaaggaagttacccgagatgaccccaagagaacactttaagggactgagtttcatggtgtactttctaagaattttgaagcattcatctagatcctctatatgcccctagccttcctggatttgacgagcatgtcatccacatatacttccatattctgttcgatctggtttttaaacattttttttactagcctttgataggtagctccagctcactttagaccaaacaacgttactttataacagtttagacccatatctgttcggaaacttgtatcttctaggccgggtggatgcattataattttgttataccccgaataggcatccatagagctcgagatttcatgtccagttgttgcatccacgagctgatcaattcttggaagtggaaaatagtcccagggacacgccttgttgaggtaggtaaactcaatacatactcgccaatttttgttcggcttggggacttgtacagggttagccacccaagctgggtagaaaactacaatgattaactagtttatgtgtagtctttctacctcttctttcattgcttgtgccttttctttataaatagtcttctcttctactggacgagacaaaagtctagatcaatgtttatggcatgagacatgacaatggggtaaataccgactatatcctcatgtgacaaggcaaaaacgtcaaggttttctctcaaaatttttattaaaactaactttattttgagcagcaaacctttacttattttgagtttcctggtcaggttacctggatcaatttccacctcttccaattcttctattggcccaacatttgtatttattttcccaagtcagggatccatgtcttcgtccccaccttaggcgacttcctattgagcgatgacttttcccttgtttgaactctagtccgaggtattttccttcttgaccttagttagagcaaggttatagcattcccgtgcaattctttgatttcctttaagacatcccactccacttttagttgggaacttaatgcataggtgaaaaactgatgttacaactcttaactcttatagagtcggtcggcctaacatgaaattgaaagatgatgggacatcaattatgaagaattgtgcctttacagttatgctcattagagcttatccaatagtaagcggtaggcgaatttgttcaaggggtgaaacactctggcagaagaaaccttatacgagctgagtgcaagcgattaagtctttaagttggagtgccatcttctcataagttgttttaagcagaatatttgaggaagctccattatctatcatagttcgtcccaccatcttgttttcaattttcacctctacgctagggggtcgttgttt

SEQ ID NO: 205083 - DNA, 1331 bp, Cannabis indica
ttttcttcttttgtgattgttgaggattattcgtcatcctttagtgtcaatctttatcttttatctccggtgctcttctccgtttgtggtttggtttgggttctcctatattagttgtgagattttgattgccagcttgttgtctcatttcgtttgctcctttatcgggtctgttggtttgttggtttgctgttttagttagtttggtgggacaaacataatatttgtaatgacttctggaagaccaatttttgtttctgcagttgaatatgtcaaattcttacagtatcaagagtctcttaagtattcactttcttctatcactactattgttgatttaggtaaatcaaattcgtgtcttcttttctcgtcttccaaatgggttattgactctggtgctatagaccatatgaccggtaattctagattcttttctaatcttcaacctcacgctcccacttctactgttaccttagtcaatgggtcaccatcttgtgttattgggtctagtacaattactcctactccaatgtttcctttggcgtctgtcctacatttacttaatttttcttttaatttgatctgtcagtcaacttacttgtgatcttaactgttgtatctctgtttttttttttactgatcattgctgatttcaagatcttatgacgaagcaaatattggtaaagggcatgaatctgaagacctctacattcttgatacactaatacttaaatcagttgcttgttttggtgtacaatctcccttcaaggcacattgtaggtttggtcacccattttttcctctgcttaaaaaattttgtccacaatattataagttttcttcgttagattgtgaatcatgtcagtttgctaaacatcatcaccttagtttaagtcctagagtcaataaacgtgctagtgttccttttaaattagcccatcctgatgtttggggtcctcttatcttgtctaaacttggttttcgttattttgttacttttataaatgattattctcatgtcacttggttgtttttgatgaagaatcgttctgtattgttctctatttttcgtgtcttttgtgctgaaatttgaaatcaatttaatgtgtctattcgtactttgagaagtgataatgccaaatagtacaaatctagtttatttcaatcttatatggttcaaaacgacatgctttatgaaacttgtgttgatactccatttcaaaatagtgtagccgaacaaaaaaatagatatatgcttaaacagttagaactcttatttcaaatgcatgttcctaaactgtttttgggcgatgctgtttctactgcatgtt

SEQ ID NO: 205084 - DNA, 641 bp, Cannabis indica
tgaagaacacgaagaacaccaaccccaatcgtacaccagatcacacccagaaaaaacattacacagcccagttcaaatcaacctcaaaccgagccttgcaaaaccaattatatacccagaaatcagacaataaaccccaagaaattaacccttatcagcccgatataatacccaaaaaaaaataaacataaatcatataaaatacagaaaagaaaaatggagagaacacaccaaatttttatagaagtttctcaaaattgtgctgggtacatcctcttcgagctcgcctcgttccactatggatcttcaaagatcagagattacaatcaatgggtgggattccaaaacacacaggtattattttggtaatccctaatattttacagtgtttggtcctctcttttctctctgtttctctcagatttttgtactgacagttgtgtttttcttctttgttgcatgaacactcctctggcatttggatatctgaaccacaaccttgggttccaaagcttactccattgtaagcctcctccaaaatccccaaaatcaatctatttctcctctgtgaaaactgatatgattttgttgtataatgttctgcctctgaattttttcttgttgctgtagtactgatctct

SEQ ID NO: 205085 - DNA, 1039 bp, Cannabis indica
gaattgattccaaactataatctcagtcttctcctctatcaatctatttatctatctatatctgtcactgttcttctttcttcttatatattattaatgttttcgtttaactcacgactcttctctctctctctctctctctttcctatgtgacatggtttttcactgtcttttcacaccaaaacgttgtttttctcacctgggttttgctcctttatgtctccctttttgatatatatacaatttttctacaatcacacggttatttgaaaccttcaacagtttcactctctctatctcattttcttcttcttcttctttcgcttcaatttccatctgggtttctgtttttctcttccatttatacctctttcattcaatttccatcttgggtttttgtttggtcttctaagttttctgggtatattttgtttgtctccaaattcagccttatcttataaaagttaaagaaaagatagcatttttacaagtagtgattgagaattaaaagtgggttttttattagagctcaaaatatgaagtgcttttatctctttaaagataaatccaagtgcagaagaaaggcagaatcagctcctgagttaagggaccaaaacaagtcaagcaataataataataataatccagctttagatcgtttaaccaaatcttctggctcattaccatcaccaaaaagcataccagaactttacaaagaaaaagagcaagaattgagagcttttactttccaagagctaagggaagcaactaatggtttcaataggatgttaaagattggagaaggaggttttgggtctgtgtataaagggactattaagcctcttaatggtcagggtaatcctactgtcgttgccataaagaagttaaatcaacatagtttacaggttagttagccttttgtttatattttaatgtattttgttttgtcttcaaatgtttaaagaaaggtattaattttatgcttgtttaaacttggaatgaccccaaagatgattctttttcatttttctattatttt

SEQ ID NO: 205086 - DNA, 794 bp, Cannabis indica
tatatatttatttagaataattttgacagtgtggtttctaatttttatgtgtatggtaattggttaagacttgtctgtcatataatataaggtaggtgacgttagaaaacaatttaaaacagtgtatttatatatgtatatatatatttcttcaaaatcttaaaaattcaagagagatatagtttattcatagttgttggattaggtcttttgattgtgttattaaaacacttataataacaataataagaagaagaaatattacatcataactctcatatatatataatataaaattaaaattgccatttaattcataccctgatgtgactccaacacataatatatatatatatatatattgcatgtaactgaaccaaaaccaaactaagctaatagtcccagcaaaggaagaaggccctgctctcttcttctctctctatatctatatatatattgtttgtgtcatcacactatatactgacccaaaagagagaactaaactcttagctaaaaggctaagctaatatacaaaaaaaaaccaaccatttttacagctacaatatatattcaggtgtttcttttttctttttaacacccaagagtcaaaatcttcttcttcttcttctccttattattattattattataataaatataaatatagttttttttttctaatttaattatttactgtgagagttggggcccacttgggaacggtgatgcagcaaggtttgtcctcaagtgatgagaagatacgaataagaaagagagagaaagagaggagagag

SEQ ID NO: 205087 - DNA, 764 bp, Cannabis indica
atatctcctagtcaatttaaattctcgttcaacactctccaatgataaaaaggaatgttttgaggttagaatatttttcgtaattatttttatatgatattcattcattcataaatcataattgtgtaagaaaaaaattctattaaattttttataatcttattattggtattgagatatgggctaattctagtagtagtggtgccaccaaattgtacgaaatggggtcacaaatgtataatcataaaatctaattggtaaaaactcataagtaaaatggggtcacaaatgcataatcataaaaaagaaagatttagtcattaataaaagaaaaaccaaccattaagttccaacagaccaggattaggtggtgtcgttgggacacatttggatttttaatgcaaattgttattgactttatccattatctttttccctacttttttccttgattgcctccttccttacaattatttacttatttatatttaaacgaagattcaagtttcaaaaaaaaattacatcaaatgtttaaaaaaaaaagaaaaaaaattactcaattattattagttatatccttttgttttttgtcattgtttttcaaacgcagcactagtatttgctcttctaattataaagtcactactacaagtctacaatagtatgaaggggttattttagtcaattagcaaggttatgtggtttaaaatattccctccattaataagtggccacgttcatcaaccttttgactttaaattttt

SEQ ID NO: 205088 - DNA, 956 bp, Cannabis indica
tatattttcaataaactcgacctaaacaccaactacgggttgtgtccgagtctcgggtctaggtttgagtctaagtctcgggtctgggtctcagaaagtgatcctaggtttgagttctgggtccgggtcccgaatctaggtcttggtccgagtcctgggtttgggtcccgagtttggtcatgggtctgggtttgagtgcaggttcgggtcccaaatcctaagtctgggttgtgggttcgggtcaggatgcccggtctggttcaagttcaggttttgggtctaggttatcttgggtttggttcaggtccgggtctagttcgggtaaaggtcccgggtcctattcaggtggaggtcctaggtcttgggtcctggatccagttctaagttcgagtctggggtttgggtttcgggtctgagtcccaggtccggtcccgactctgggtttgagttttgattttgggtctaggtccgggtcccggtccagatcctgggtctaagttcgagtcaggatcaaagattggagttgatcccgaatcttttgtaaatattataatacaagttaatacaaaccatttgttatgtattatataatacaacttacattgtattaaaaattttgataatattaattaatacaatacattactttatctaaacatagtattatttattatttaatacaatacgacccttatacgacctaccaaacgagctcttggtgtatttattttttcataaattgtataactgtttataatttatttaattttgtcagtatttatactcatatttaatatttttttaattttaatttaattaaatatgaatgtttattctatttaattttattagctaattaaatagtaataatttctatttcatgtcttgttataaagtttatgcagtgtgaagatttaatgtgccaaaattttttggctttgtataccttttaaagt

SEQ ID NO: 205089 - DNA, 1802 bp, Cannabis indica
gtatatatatatataaataataactacttaccattcacctctccactttctaaatacatatcataaaaatgagtttataaaaagggagaagcaaatcaaacgagggaaaaataatagagaagaaaactttgacaaaatttatagaaaaaatagtacgatatgttctcatcttcaaaaaatttctacaaagtacacttactcaattatccaaatgtgcctaagtattttgattttgagtatatatacatatacattatattgtcccatctgaatgaatgttatgaaggttagcttgagtggtttagtgtgtatcttagattagatgaattacttagtcttattgtttcacttatgtcattaatcattaattatttaactaaatagtaaaatcccaggcttgaagatgaaaagaacaatcctcttcccctacaacccgaacaattgcatttgtcaagagatatcttaagtacttttcctactctcggaactgtcttgagggtggtgtttgaccaaggtaccaagaagcatggcctccacttgctacacattgggaagtggatgaagtttgtcaatgtatattgtgatgtaaatggaggattctggcgtggttcatttacgcctttaacaaagtttagatatactcatgacaaggaccgtattgtattagagcgcgaaaggttacatgcttttactaagactgttgcttatgacatgtctcgtttgattgttccacacatttctgttaattaagctttggataacaattatttcaggttatacagtgagcgggaaggtttgaaattcgggcgaaatccatactggagctttccattgacttttcctataacaggttttaattgcgagtttgttaatttgtatgtatcgtttataccgttcatcatttgaaaattattctcaagtgaactaatggtgtgtttatgtgttttatcgtcgtgcaggggtgaactacaaagatttaccggttgttactttaatggatgttcttacatatccagaggtatcaaattttgttattttattcgattactcgtatgtgtacttcttctcgtaacgtaccgtctttctattttgaatttattctcattaaccatccaaataaatctaactctaggacattctaaagttatcaacataattctaggacatttaaggataatatggtttcatacgtcgaacataggtaactgatcgaaggttttatcttcgactaaactaaaaatttgttaaggttatcaaattttcttatcaatcttagtcattttctcttgttcaagtgaaactccattggctctgtcaaatgcatttttgttgtatcaaattatcaatcttagctaatttatgcttgtttaatttcataaccgacaggttacagctaggttcttatgtgttgtacgggttgtagcaatgtatccatggcaggctaaagatttctcctttaatggagtttacagagttcgcctgaccttagaagatgcaactgcccgaattcatgcttatttgtatggaaaagatggtgtaagttcttgtttctgtttatttgattcaatatattatggttttgttgtgcttgtgtctaaaatcccaatagtcatacctattgttttgtcgggccaggccggggcaaagacccagatagcaacccggaaattttgggtcacggtcctgaattgcaaaaaacctattttgccactcctaactgaaccattaccgttgttgcatttcttatttcttctgctcttatttttgttggaaaaatagaacttagcaaaatgattttgatt

SEQ ID NO: 205090 - DNA, 622 bp, Cannabis indica
tcacacctgttctactactttatcttcaacttcattatctcacatcatattgattatttataaattattcttgtattttttatttatgaagttaactgtggcattgggtgtgatattctgttttacccaaagaatagttttaatttttattatttcaaaatttttaattaatttctataattattaaaattacgtgttccaattaaaatctactttagcacttataaaaatggaaaggtaattggtacaacaacaatgatgttcggagggttttatccccaaaatttcaatttatgaggttaaaatattagagaatgtacatacttcaagtaattttgcttgttgctcgtaatatttgtttttagtgcaaaaggccaagtaaaaacgaaaattcaacaacgaaaatccttatacaatgatattaataagtaatattggcagtaaaactttttcgaactttacattttttaatacttaaccacaaaaactaattttttggggcaaaactagataaatctcacttctattatgttatttacccctctgtcaaaaaatcttagttaagtatcatagtggacaactaatgtgaggtttaggtaaatagcataacagaagtgaggtt

SEQ ID NO: 205091 - DNA, 830 bp, Cannabis indica
aaaaaaaaaaaaaaaaaggttggaaccccccctaagcccacaatgcaatttcgttccatcattgagcttccaattcactatcctaactctcgtattttaatatatataacttagctaatttaagtacgtccaaccaaatatgcacatactataagtaagaaattagcttagaaaaaagaacaaaactaatactactaaatgtaatgtatgtcacaataataaagataatatatagttcattgctacctatagttaggttcttttttgctagtaaagattcttataataggtttaattggtatggaagtttgagtttggtgggaactaaagtagaaggtagtaaagtgaaatgaaggtaggataatgatagccttgaaatatgagtcaataaaaaaaattattacttttatttacaaaaaatactggttaattttttttaaataaaaagtaaaaaaaaaaaaaaaaaaaaaaaacaaagtataatttaaattaaaaggaaaaaaaaagaatgcctgacctttatgtacaagcttagtccgtctatatctaagattggacatgataacacaagtcaaggtacaacatattggtgtctatatatattgttcgagcaaggaaaaagtgtacataaaaataatattttttaatgataattaattatatagcattacaaattaatataacaaatccataattttttaatatatgttttttttcttaacttttttcttcatctattataatgattctctttataaaaagagtaagaatcgaaagtcattgatttttaccttcactacaaaaaatcttacttttagtcacaacaaaaa

SEQ ID NO: 205092 - DNA, 944 bp, Cannabis indica
aacatgtatttggtacatgtactaaaattcgaaggggcaaaaaatcctaattaataatttttttataaagaaatatactatacaatacttgttatctcaatttttttttaacataaataaggttattgatatttaatgatttgtaattaatattataaagatttattaatatatatatatataaaaagataacaaacatttatgtgattttgtagttaaaatctacatattcgatgagtcactcttatttatgattacaaaatacaacttggcgtattttctctcaatcacgaaagaattcaccacccccttcacaatgatttctaccactatttataaagattaactatgatagttatttattttgatctttatctaaatgacaattcatgaaacgggatattctccacgtttcatgttattttaacagctggaaataatattaataattgtctaaatttaaataatatatacaataactatcactaattttaatcttatgtttgaatagttgttgactgagccatccttctatttagtatgtgtgctcctcgcaaataacaaggatgagttagcatacttcgtgcaaatgcttttcgcaaaaagattgatttgttgaacactcttttagtagagtttactttaaactattattttggataattttgtacaatttttgcacacaagatcctttaattgtatctattgtgcttcgtggttaaagcattcaatcttgcaacttgcttaatttttttcttcccgctatattcatattataatgaacaagtttttggagttcatactttattttcaatgtttctcgagaaggtataagcctttggtcttacttgcttattactctttcaatcagtatttttgacttatccttatttaaaaaggtaaaacttaaattctaaattatattagtacttcctaagacgcat

SEQ ID NO: 205093 - DNA, 1097 bp, Cannabis indica
atgtcttgacttccattaaagtcacgcaatggtacttgttgcataccacactgattaatgcttctgaatatagatttttagagaaaaattaaaataaattgcttaaatgagaaatttaataacatctatagacaaattaagagtattgagctacacaagaattataagatagcaatatcaataatgttttatgttttctacccaaatttaattaataatgtgtaagtgatgtttctaggacttgtccaatgacatgagttataaagtggtgtttggtgacatgatttatgatttattaacatgacatgatttatttcaatactccttaactttaaagatggaatacgtgatttttcatatatgacaattgcagtttatgattatagttattttcaaacataatcctaattgtattttgcatatatatgggttctttaaactaaattaaaatagttaactttcaataatgcaaaactctataaatgcttggaatcctacatgaaattgcacggtatcttctccctctcatgcatctgtgatttatccataatgtaaattaaaaaaaaaaaaaaaatcctgacaagtatgtttaagagaaacatgaatcaagcaattttatcttaattctatcgatattttcgcagcattatagctataattgaacgttttgaaaaaattaaaactactaataacaacaaaaaataatccaagaaaagatcaaacaatcacaaaagtatttaacaatacaaaaattttgcacctatctaatcacaatacatgtattcgcagaacctatttcattacgaatgaatatttaggatattcaaactccactagcattcatattaattctatgtttatcgtaggacaacatatcgcagaacatacttcactataaatgaatatttaagatattcaaactcttctaagtattcattgaaataattattaatgaataacaaaatttagttaatgtgtacctctaacaagctagaaactgatcaacaataaatatgtttgatccttacgtacaatataattatataactataaaaaatgtcaaaatataaaaatgaaatactacaaaattagaaatt

SEQ ID NO: 205094 - DNA, 997 bp, Cannabis indica
aaaaaaaaaaaggaaaaatagtcaagaggaccttttgcgaattacaaaattttaatgattaatcaattggcataaaattatataacaagttaccttaaatttaatacattatacattgatactttttaagttccatttaaataatatatattgatttattgttgcttcttcttaaaataaaaaagcacaaattcttttaccattttaattaaaaaaaattaactgataccttgctttaggcttcaacaataagagactagtataatggcaagtggcaacacttttcactaaattcttttttttttctttaaatttttattttatgtatagcactaactttattttactttgatgaaaaattttatttttgttttatcattttttattggcaaattatacaatacctcatcatgtatcatgtttttgaggtgtttgatccatcatcagcattataaccattagattaaattaggagtcatatttttggtatcttaggactgatatttgtccaccaaaaagtaggggtaactaaagtttggaaacttgcaacctaccacattttacattttcatgtactattttaattcctttaaaaaaatgtactatttcaattaaaataatattatattttataatactctttattttctttagacataattaaaaaaatcaaaatatgttatatttattataatagtagcatagcaaatagcatgtctaaaatttaaatgttttctatttttaagttgaacttcacttacaaaaatataattgtcactgttatgttttagctacaacatattaatcactagtttaattataagaactattatattattagctaacctagtaaccaaattaaagtaaaattaaatatttatattattttgaattctatgttttcactaatttcgaatttacttttatttttttattttgtaaaaattattttagattatatattcttgtaaaagattactattaagactttagtatc

SEQ ID NO: 205095 - DNA, 1650 bp, Cannabis indica
tagcataattgttggatcactttctagagttatttttctttttagttgttactttttggacagttttacgcttgtttttctttgtttcaagtttccaggattttaaagtgcaaaattagttaactatcgaagggataagatgagttggaaatcggtgaaaaatcatgttgaatttttgaagcctcaccgtgacgagctcattgttggtcgtaactaattatcgccgcaacgagggtaaggcatggtcgcggcaaggagctttggcaaaatcaatgttttcaactcactacagtcatcgcgatgagactatatgtggttgcgacgacgcctccatacaggacaaggatattttggtcttttctcaattttaagttgtaaaattgaattttaataggaggtttcaaattttgagaggactcattcaaaaaagaaacctagaaacaaaataagaagactcttggagcaagcgtggcgaattgatcaagttctccacctatttttttctcttccttttaatttccttatgttttattttgtctttagcttaaacatagatttcaatgttgagattatgagctaatttcccaatttaaggatatgatgaatattggatgattttattttaaaatttaatgtgatttgttatttcttctttctcgattcttgtgattttttcatattcattttatatacatattttagattgatcacctttaacataatttatgatcctaatatgaaatttaaaaagtgaatattaagaatgctcaaattgaacaaacataggttttgatgtgaaataagagtatttacatagcttgtgtgacccttagattatttcttaatgaaaattatatgttattctattttagagatgcaatagatggtatatagtttagaaactttatgatctaaaaagtgtttaggttattttcataacatgtcatcacttaaagaaagaagaatagttaatagtaacagttgggtatttgaaacaactagattcatatccttaatctctcatccataattaaacaaattttatcattatctttgattttctatcaattgttaccactctctctcaaagattattttttaaccaaaatagaaacataagtctagtttagtagtagtcaattttaattcatgtgggttcgacctcacctgtgtgagtactacttgatacgtgcacttcagtggtttaataatttttgtaacacaaagtcgcagggttgaatttttttatttctcaaaatcgggtgtaacagattggatgaatatccctagactgtggtgttataaatcatatccattagcaaatcggaagaggaatgagaaatgccaaggggtaccttacactatgtttggtagggaggaaggaaggctggatgaagagggatggagggaaagagatgaagggagtggaaaaatcctttgtttggtaagaaggggagggtaagggagaggataagtggagggagactttctccctctaaattcaagtttttcaatccctccaaatgtgaaggaataaaaaaaaaaaaaaaaatacaatatataaaatgtcataattgtcttcaaaaaaattataaacagttatgctttaaaaaataatattataattttaacaattaatttcttctacat

SEQ ID NO: 205096 - DNA, 793 bp, Cannabis indica
cacaggacaagatcaccaatatcaaaggtacgtcttttcacttttgagttgaagtgctgggtgatctttctttggtacattttaagttggagttgcgactgttcccagagttcttctactaagtctagtgactcctagagcagagagtggttacaggtagggtcgtaagtgtctcgataataggatgggatcgcagtctctactgggatcactacttcgcattcgtaggccattgcataaaatgtatgccccgttgaagctctttctatcatcttgtaggcccagagacctcaagggagttcctctggctagttggctttgcaggcttgcaacttcttcttcagcatggtcctaaggattttgttgacggcttccacctatccattagcttgtggccaggctacaacagagaagcttttcacgattctgtattgggcacagaaatttgtgaaatgttcactgtcaacacaatcttataggggagtttgtatcggcacgcaatgtttctaatagaaaaatctagtgccttcttagaggtaaccgtgttcataggttcagcctcaacccatttggtgaagtagtcgatgacaacaatggcatacttgactccacctttacctgtggggagggatcctactaaatcaattccccaaactgcaaaaggccaaggactgctcattagtgtgattatagtgggtggcgcacgtgggactttagcgaatctctaacattgatcgcacttccttacatatatgtaatcatttttcatggtgggctagaaatacccttgtcc

SEQ ID NO: 205097 - DNA, 1560 bp, Cannabis indica
ttactttatgtatatctagcagaatttgtcttggacatatatattaagatgtgtcgtttatttgcaatggcatgtcgttttagatggcttgataaggtgagtgagagtgagtgatgtcaatctaaacgacatgtcgttttgagtgagtagttgtccaattggtcaagatttggacacaaactgaataccaccacatatgtcacatgattttgttttggaagttaacttgacttgttattaatcattataatcctatttaacacgacaaagcaaaccaaacccaaaataaactcccccaccccacctacaatttattttattttattttttaattgagtccaacaaaaatgataagaagtcctctttggatataaatgactagttaaaatgtgatagtcaaattctactttaaatcagttttgtcagtacaagcagtaacttcaagcataatcaaattatacgtgaattgaagttctttaagatattattaaaattctgaaataggataaaagaataaaaaaagtttgatatatgatcccaaattaaaaatgaaaacaaaatcattgttagaagaatcagacataaatttaaattaataaactaattgcatgcatgctgtccaggaaagttggtatagctaagctattgcaatgaagttgttgataatgggtttctctaagtaatgtgaaagagaccaaaatattacattgaaaaatgtcttgtgttcaattttttaggttagctcccacaaaatttgaggttccaatcataatataaattactttaattttatttttgatattagagatgagagattcaaaattaattttttttattagtaatgagagagttattgacgcgaacaatggaagtaagaaaattgaaggggcatattgtaaaaaattaaaataaaaaataattgtacaaataaaaatataaaccagagagcataatgtaaaaatatgcagagactaaaacataatgtacaaattaatttagtctaaaacactatgtcaaagttaaaacatgttgtaaattaatttacaaaaaaaaaaaaaagtaagttgaaaaatacaaacaaagagcatacataaacataaaagtttttacaaaattaaagtataaatgtagaatatttaaaaaagaagactaaattgtgattacttctatagttatatgttgggtctatcagtaattacttctatagtttatagtttcttaatcctcttcaataaaatatataattcaaaaacctcaatgtcactgaaaatagtaaaccaagtttgattcttaacaaaaatgttaaacatgaattaccaaaccatctaattcttaagttctacttccacaaaacacacacatttagacttgttaaggtaatgttgcaaccactggttgttcagcttattacatcttcaccctctctacttacttccatacattctaaccaccaacaaacaactttgttgtttcttcttcgatcagttaatcttaattaaggtccaaatttgtctctcttgaacaatttctcatcagataaaaaaaataaaaacaaaattc

SEQ ID NO: 205098 - DNA, 2330 bp, Cannabis indica
tgactaaatatatttttagtcaacttaatatatatttgattaaaaaaaatggcatctcatgtctagtcttctgacttgttatcgtatgttttgtcattggtagccgttttggtgtattgtttgtctttgttagtctgtgtttggttggagttttatcattgcttctagtagtaatgcataatttgatttgaatgaagaatatgcctagataaacttggaggaggaggaggaagggattttgattggtggtgataatgagggagaggaggtggcctttgatgattgatggtgtctagtggggaagtttttgacgggtagaacgttagattttgatgctatgcggcatatgatgacgtctctttggcaaccgaggaagggtttttatattaaggaatttgatacaaataagtatctttttcaattttaccatgaacttgacgttcaagccgtcattgatggtaatccatggacttttaatagaagtccagtgatttttcatcgtctgaagaggggggaggatccaaagtcggtttgtttgcatcatctcgacctttgggttcagattcatgatctgaaaacagggtacatgcttgaaagagtggttcgtagggcaggggattatgttggaaaacttgtcaaggctgatacaaaaaatttcaatggaatttggagagaatatcttcgggtttgggccactattgacattgaaaaacctttgaagcatcagatgaagttgtgcgaagacaatggtgattggatctgggaaaattttaaatatgaacatgttccaactttctattttgtatgtgagttcattggccactccgaacgcttttgtcctcgaaggtttgatgaatcttatgattaacttatcaagtcttatatgatcggtatgcgagctcaaatgaaaaagaataactatttgataggggctcaatggctacggtcaggtactgaacaacccgagccagtcgacggtggcagacggggtagtcgtcctggtgtgaaatcttctgcaacggctgggcctagaatcatggagattgattatgataatcagggagaagagattgcgtccatgaattcaggaaaaaataaaggtgtgatattggggaatgatgacaataatggagatgattctgaaggagaaaatagtggcaaaaaagaaggggaggtagctgttagtgatgatgagttgttaatggttttggatagcaagagaagacgtactgaaatggaacatgcctcatgtgcaacagacgtggctgagaaagagttgggccaggttagtgttgtcaagctttgatcaaaaaacgatttgaaggtgggccttggttctcaggcccaccagacatcatgagtattatctcttggaatttccctgggcttgggaacccatggacccaacaattcataaaagatcttgtgatccaatagaaacccaattatttgtttttatgtgaaactttgtcaagaaaggatgttgttgatcagttgtgtgtggccattggctttgatggagctatttctgttaatgctagaggtaaacgtggtggggttgctttgctttggagagttgatgaggaggttcaagttatggaactcggtagtgattatattgatgtgtgtatttctgataatgatattggttgctggagattgaccggtttgtatggagagccaaaccgaagtttgcagagaatgacatgggatttgttgagattaatttgagataaattaaggcttccttggtgtattattggagaccttaataatgttacttctcgagatgacaaaagagggggtaacccttacccaaattggttggttgatggctttaatgatgctttgggtgagtttggtcttttgtgatatggagctttatggctatccgtatacttgggaaaggcatcgtggtacggatgattgggtggaggtgcgtatcgatagagctttggtaaatcagtcttggcttgacttgtttcccacaaaacttttaatttggaagcttcgaattctgatcatcgtcctcttcatcttgtttcctcacaatgcgactatggtagcttccaaccgtgtgttcaggtttgagaatccctggcttaaagaacctctctgttttaaggttattgaagagagttggtctctctttcctagtcttgatgtcctgagaaaaatccaaaattgtggggagatgcttttagtttgggggaaggattacacaagaaatttttctcaacgtattaaatagtgtaagcagaatattcaaaggtggaaaaagggtcgggatatggcttctgtggagaattacaaacaggccgtcactaaac

SEQ ID NO: 205099 - DNA, 1280 bp, Cannabis indica
taattaattaaaattattttagaatttttaaaaatcttaatagtttctaatgttaaaattaatttaaacgcatataaaaaaatataacaagtataacaaatatataaattttattttattattgtaaattacttaatttttttttaaaattaatcataaatattataatgtaaatgaacataaaataaaattttcactaaaaaaactcatttatatgtcaaaaaattaccttatactttatttatttattttttttctcttaagcccctaaacaaaaaaaccaaaaccaaaaccaaaaccaaaatgcactcgtcaccgttcacttccttcgtctcttttatttttattttgccggtgagataatttaaatcacctgcctggtcaccctagctttgtctccatttcatatcgctcttctcttctcttcttcttctatagaccaattttttggtttgtttttgttctggtttgggattcgattctttttcgggtttttggattcaattttttcgttgctgcttctgttcaggtatgaaaatttggccttgcccatgtaaaaagtttctccattttcggagttttctggtttgaatttaagcttatattgctaccgagtttttgggaatgcttacttcgactcataatcatattcatcacaattttttttctttttgaattgggtcgtagttgagtttgagtttcgtgcttttcgttggaatttctgggttttttttttttgattaatttgtttttctcattcccgctctgtaattttcatgcacatgggtatgattatatgggtgtattgaacgatgggtatgtggaaatttctatgtgggcttcttcttttttttttttttttttggtttggatcaattgaggtggcggtattatgcttatttgggtgtaagcttttgtgtttttaggggttgaagtagggatttggaggtagaatatggtagaaagtctgtaactttgtttaataacatagctgaaaatatagataattggtgaaagttttatgaacttcaattggatcatgtagattggttggaactttacttctagatcacttgggttgttcatgttagtgaaaatggatttcaaaggttgttacttgatgccattcaggtaggttgtctttatgggattttgagacaagtattgttcattctaattatagtgattataaaaaaaaaaaaacccagtttactgtttcataagttttctaatgggtgatttcttgcattcatcatctaagcttgagtctggaccagtct

SEQ ID NO: 205100 - DNA, 2664 bp, Cannabis indica
taaatatattaaaaaatatttattaatattatatattgaacttatttttaatattaaaataataataaaaaataataatattataaataatatattaatattaatatatatttaaattaatataaatttaattatcttaataaataatatttatatttatctatataataaaataacaaataaaaataataatattataaataatatattaatatttatatatttaaattaatttaaaattagtataaattgaactatcttaaacccaaataatattaatatttatatatatttaaattaatctaaaataaataatattaatatttatatatatttatagaactaatcctactaatatcgttaaatttaacggaatatttatgtattcttaaaactgttaaataaaaaaaaaaaaactgatagaaatctagaaatctattaataaagtaaaaacttagggcggtgatgtggcactctttgtgagtttctttttgttttatcttattttttagcagaaaattgctaaaaggtactacgggtgcttagcaccctccttcgtatcatattgatattggtgtaactaagtaacgagtcccttgaaacttaagaaaataacttttagggaatatcgctaaccaatcgtatgacaccgattatggaaggtgttgagcaccactaatgcccaataacaatattttttttgagcatttgtaattttacatcgtttttctatttcttatattaattagaaaaatctcatttaattataaaataagccatatgacagctcaaatgagcttctctcaaatttttaattttatttagttttttattctattttttttttcattttctatttctctaattaaattagtttatttttttgaaaaaatagttagtaatcaacaataataattaattgattagctacacagacttttttcttctcttttaaatttgatatgtaacctttgctatgatcttattctttttttaatatttaactgactaactatggagagttttcctttttcttctaatttaattatgtgacctttgttatggggtcttattcaattttttataatttaggtgctctatataaatagattttttcatttttcattatcatcattgatcatacctcttttttgttttgttttttgtactaatatcttatttctaatttttttttcttcctttaggcttgattatcacaattttattttttttttgtcacggcaatactcaagatttaacacttatcattgattaatgtaatgttgaggtaagtatttttatgttgatgtagggttcatgctcacattgaaatactgaccaagtgttttagatggtatattgataaaattcactttatagttttttattttatacatttgattcattccatttttgttttttttttattatatacttcattaaattgttattcacaatgttatatattggtgtaggttggagtaaaaaatctaaaaatattggatcaccaaaagttaaatgagatgcatgaggtttatgaaaattgatagaagcatatatgaaaaaaaaaaacaattctccttaaaccattcatattggaagaaaaacaatctattttaaaacttaattattatattatcatactatgaataaatgttagtataaatttatatacattaataaaataaataaagttagaaagttataaatctattatttttttttttggaaaggcaaagatgtaaatcttaagattggtaatttttctttcacaataatttactttaattatttgatttaacctaaataatattatataatattattatttccattatataatactgattgcaattcttaatattattattaagagtaaattacgataaattctcaatagtattaccttgctagcaattaatcttcaaaatctattttttgatggtaaaacctcataaattcaagttctgttagcacttagtcattttatctatttttggcaattaacgtcaacttggttgtccatgtgtacatagggtattgtctacatggacataatatacatatggcactatattattagcccacctacataaatatttaaaataaaaataaaaataaattaatttaaaataaaaatcattaaaattaaattttttaaactgatcagaaattaaaattaaaaaaaaacacaaaaacataagaaaaagaaaaaaaaaaaaccctaacctaaacctaaatctcatcttcttcactacctccctctaccttgctctctttgaagctcatgactgccacaccaaacagcccacagtcggtgcccaaacccccttctctaaccttctcgcactttctctcccctattctctctctcatgagatctccgcctaactcggctgagctttttccagccacacaatagagagacagaggccatctttgaaatctggacctctcgaaacctccaatcccagatcttcgtccctatttcattgtcttttcatcactgcagctcctcattggagttcccatccatgtcattcaagccatgtttaggcgagcttggcttcaccaacgagatctcgtcggagctgctcgtgttttaggcctgatccaaccaccttcgaacctcgaggaggtgaacaattacagtcttgtgctacc

SEQ ID NO: 205101 - DNA, 938 bp, Cannabis indica
taattattttttaacaaacatatctataacttttgcaaaagataagttttaaaataatattcatcacagattttttttttttccgcttaacatagtattaagagaataatagtactataattctcttaactattccagatatttctaattatttcccttttattgttttttagtggtacttttgtttccttgttctgtaattgcactaagtagcaatttgttcatatatatgagttaaagaaaaatattactcaatgtcaaataatactaaaaataaaatagtacattaattttgaaaattattgcatagattgaactttatttatttttacctatatctttttattgtttttattttatatattgatatattttggttgtattatgttaagttatttcacaaagtatacaaatatattattatttttattcttattattatcttacattatttttttcataaattataataaaaaaaaaggctatggtataatttaaaagataaatatatatattttttttaatttagttgtattagttatacattatgtgctattatttaggagtttttttttcatttttatacttcaaaatattttttttctttatttttaaaaaaatccaaaaaaaaaccccatagcaacttaaatcgcaaccaaaatgcgtacagtaacctacatagaaactaccagagaaaccaccggaacaacccaaatcgtaaatttttttaaaaaaaagttaaaaaatagtatatgaagtaattttctattatttattgcatcatattatcaactatcaatttctctaattatttaatttactttcaattgtatttttttaatatattttttaaaaaaatagaaatataaattaagaaacaaaaacaaaaaattgcagcagatgcactctcacagagtgtttgacttcataacttaaaa

SEQ ID NO: 205102 - DNA, 1181 bp, Cannabis indica
  modified_base (64)..(64): a, c, t, g, unknown or other
cactggatcaatcctagggaaagagttagagaggccagcttcaatatcagatcttgagggcacngtgaagtaaacaggcagagtagtaagatttaatgagagataggatggagtctgagtcaataaaaaataattccatcctcagaggtgagagaatcaatcctgttacttcgcttcctgtttgaagcagacttctggaaaaaacgagtattcttgtctcccaagttaagccattgtatacgagaacgctgcttccagtaggtttcttccttgaacaaaagagagtcaaggttagcttggagagtcttctgacgagaataagattcaggggaattatcctcagaactcctagcctgctcaaggtctttttggacttttttaattcagctctggaacccaaagaaagccttattcttccagtttgaaaggaatttggcacaaccagattgtttggacagaaggttactggaaggatcatcattggaaacgttggaggaccaggcatctaataggacatcattccaggtgggctcagttcgccagacattttcgaaaaggaatctcttgttcttgtttttttggttatggggatgatgggtatgatcaagaacaatttggatagccctatggtcagaaccaaagaagtcaagatggttgaggccactgctaggatggtgagaatgccagatgctattccccacagcccagtcaaggcgctcaagggtgtttctaataccctggctattattaatccaagtcatacgaggatcattagggtgtaaagcctgaagatgaaaattgtccataagagtacgaaaaagagtggagggaccatttctagaattaccacttgacttatcattccaagttaaaaagtcattaaaatcacccatcacaaaccagggaagggaaatacacgacaacccaatcctggataggattctccaagtgtgaatcctatttccaggatgaggggcaccataaaaagcagtgaaattaaaactagaaaaaaaaaaaagcaaacgagataaaatagtgaatatgattagcagaataattagtaatatttacatcaatgttcgagttccaaaagagaaaaagtcccccactaagacctatacgaggaacttcaaaaccaaaatcaaacccgagcttaaacttaaaacgatcaatagagttct

SEQ ID NO: 205103 - DNA, 950 bp, Cannabis indica
ctttaaaggggttgtcaatggataaggtgttagttagttgttttgttgtaaatgattattagtttttaagagttatttggctccttagccattttgttatttttaccccaacatgtttaagcttgtatataaacttttatatagctttacaacaattaatgagaatagagttcttttcacaattttgttttatgttattcaacacttgtctctggtgcttggaaacttattggacattataatccagaaattacaaaagctttggctcttcgttgtggttcagtgtggcccacttagtttgtctcatatattatttgaaacagattgtccaagcactgttcgcaagcttcaagattgggtgcaattagattcacctttgggtcttatttcgattgatatattacatttttgtaatagatttcaaactgtttcttttttgtactatcttagatctgttaacgtggttgttcattcactagctaactatctcattattgctaatgtttctattggttggtggcctgactacgctatttgtatcaagaactttagtcaatgatatttctagacgtcaatccgtttagaacagttggctcttaggtgttctttaaggttattcttcctgaaaaaaagaaaaaaaaaataaagaaataataataataaaaaagaatgatcaaggcaaaaactcagaagctaccattaaaatttttaacttataagaaaattcgcaaattaatatgcttaaaattttgagaaaaaattattaaaaatattgatttttttaaaaactagttaggaagcacgtgcttcgcacgtgagtggctcttaaaactatttaggtatggctattttaaaaaataattagaattttatctcttgaacttacaacaatataaaattgtatcatttaaaacgtacaccatgttaaaaaaaatttcgtaaactcttct

SEQ ID NO: 205104 - DNA, 998 bp, Cannabis indica
aaccgtagtggacttgtgtaacatttggcaaaatcaaaaacactctctttaatttcttttttcaactaacttacagaaattgaaattgatggaaccttttgcatctaattagttcatggttttccaaacatggcagacaatcgtcgcaagaaccatagaaaagacatgcttacgaataaaggatagacacgatctagagatctatctcaataatctatcaatgttcctaacctataacgaaatcatgatagacccaaacacacaactatatagtgagaatcaaataataagtgttccacattttcaacatctaaaccacaaatagggtaggagtatcttgacagatgttaaatcccagaagtctctatttagtttgtaatttatcaagcattattgctaaccaaaaaataactttgtgtttagaaatattaaattaatcccatacctgaccataccatttcaccttctctccttcaggatgaaaagtcttaattatatccaaacccaatggaatagctgccatttgcgaatttgtgctcggttagaacacattgaattttctctttaactttgacgatttaccgccaataccaactacttttcatggtggatttataactccacccatttccattcctcaaataaatattgttaattaacctttttcacccaaagaatgtcttgtttcattgctacagcccacacatacactactacaaaagatccaatttgcgtcggacaacacatctagccaaaatgattgatcgacgcaaaaaataggtggatattttatgcttcagtagataaccgaagctaatgaaactaattagcatcagctaatacaccaatgctaaaagagaaatcgaggaaaaaagtgaaaaatttacgaattatcttttacatttttcttcagtaaaaaaagatgtcaatttccttggcttcggttgtaaacgaaggttgaaaaatttgcgactcatatccaccgaagcaaaacaatt

SEQ ID NO: 205105 - DNA, 1040 bp, Cannabis indica
gttataagttataaaaagttaccttttctttagtgccagcacaaccaacaacataacaaccaaattgtttagcatattgaccaaccaagtggcctactgacccagaagctgttgacacaaatactttctcaccctttttaggtttgctcacttcaaatagcccacaataagctgtcaatccactaaaccctaaaccaaaacaaatcaaatccaatgaattttttgaagtgaaaattacacattttatggatttttatacttaaatgtgcaaaaaatataatgttgatctttatttatttatttatttaaaaagttattttattggaaaaataaaagaaaaattcaaaaatatgaagaaaaaaaaaacattataagtaattggttaccctaaattttttttcccatatttttttcgcataatataatttattctgaaaaagacatatttttgtaaactcttgaaaaaaaaaccataaaaacaaaaacaattcttcttcttcttcttcaagttttttaaatgaatttacattaggaaaataagctattatatatctttcaaagccttcttcatcataacactattttcttatggaaaaattaacatgaaaaatgggtttagagtttaccaaaaagtccaacttgatgggacaatggaaactccaaagccattgggttgagtttcctgaacttggtctcctttgaagacactatactctccccaacaaatcattcccaccaccaaatcatccttctcaaactcatcatttccactagccacaactttggctaccccataagcactaataatctgtccaattacattttactacatgcaaattaattttaaatttatatagtatagtattgacttgagacaaatatttatattaatattttaaaagctaatgattaatgagtaaaataaatttgaggaaatgaattattgataattttcaattgattattataataaattaaggatatgccacccctaaaaaatgaacgtatgtactttccgtataacttatatctattctata

SEQ ID NO: 205106 - DNA, 862 bp, Cannabis indica
gatcctcgggacatcagggcttacgttattcagtcgctgggcgacaaatcttttgtaaatgaataacaaacttttctaattgtattttgtaaacggtatcccgaaattttataggtataatatgttatgttttaatttaaaagtaaaattttaactattcacgtttttccaataacctcgttgattagcaacgagctgcacagtacgttaacaatcactctagcatgcttatactagttagggtgttacacattgtgcaaggcaaacccagatgagtactattttcagaagcatgagccataccaagtaatccacacaaatgagtctgaacatcttgctgaacattattactgaaaaagaattgaggactttgtaaagttaatcttctgccccgaagcccgctcataagtatcaaggagtcgaagaacactagccacttctatctcatttgctttacagaaaatataactatcatctacaaacagcatatgagaaataataggagcatttctggccacacgacaacccgttagccactgcttacacacaaacaagttgacaagtgattagaacccttcggcacaaatttagaacaagtagggagataaaggatccccctgacgaattcctttgcttggggatataggccccataaccttgccaccatgagtaatcttgtatgtaaccgaggaaacacagtacataataaacgaaacccacctactagaaaagcccatctgaaccatcatcttctcaagaaaattccactccaccctatcataggctttgctcatgtccaattttaaagccacggtaccaactttacccattctcttcctttttaggtagtgcattatctcaa

SEQ ID NO: 205107 - DNA, 1213 bp, Cannabis indica
aaatatatgtttcaaacatattaaaatgtttattttattatttatatatgtgtaaaattttgaaataaattttttagtgaaaaagtaactcattgatatcttattcacatcaaaagcaactaaatggttactatttttcaaaactcccaaaaagcaaaaattcctggaaacgagatttttccagtttttttctattttcggtaattattttgatttttggtatgtatgctgatgtggcacaacggtatttgtgcaaataattttcttaaaggtatttttataaataaaatcaattttaagtataatattgaaaacacccctttttttttttctttaactctattatgaatttgtgttcattattctttttctatatttatattttgttttcaaaaataatttattagctttggtccatattttaattaatcttaccatatatatttttttttttcaaagtaaataaatacttatactatatacattaaatttaattgtatatatttaatgttacactaataccaaccgcaacactaaaagttataccaaaaatattattatttattattataatatttttttaaataaaatagaatatttatttttttaatataaaaataatattcaaacaatttatttaacacgtgtataaaatagacgagagatacatggaatcgactatttaaatcttatttttggcttattaaattttttttaaattcaatcaaaactttacaggatgtctcaaataattacaaacatatataaccataaaaaatagactaaaatattctcttaaatgccaaaacaaatataagtgtatcactacaccccttttaaagtataccatataattttcttaatatatatttaaaaattactaaatataatataataataatataaaaaaatgactatacacggttggattgaaaaagtttataattggcactatattatatttgccttggagatggccctatacatcatcttttacaccatcttatattaatcatcccaaaaattaatgttcactacatttcatttttatacatggaacatttttaattggtagtacgttataaaagaatttaattataaatattaattttagaattattaaattattacaaattattaaattttgatgaaataataatataaaataaaattttgaatttattatatgctttttgaaaaaattcattatttt

SEQ ID NO: 205108 - DNA, 1197 bp, Cannabis indica
aaaaatattcctctaacttatcccaataaagagtaggagaacttataccactttcgtacattgtagataataatatataaatttatctccaaaaagtggtactggttctccaagatgttagttgtgttcttctagcttacatttcccttatcgtggagagttttccgttttttttacaaaaatatttattatattatgttagaacatcttcaatggagagttataaatgtggtgtattgatattttttaaaaaaatattttgctaaaagttaaatttaatagtgatgtaaaatatgtgttaaatttgactcaagctaaaaattgtgccacaataaatgctacatttttaattacctattaatactattcattaataaaaaaaacaattttatataagttattaaaataatataaataaagttaattatttgtatattttcaatgagtaaatattgacttttataattaatttgtactttgtgtattggagcacaaatataaaaattaggccaaattaattttatgatatattttagatcaaatttaattcaaaatatataaggttttacaatataataatcatcaattataatagaatattattattagacataataactatgagtctgcgagtctatgagataactatttttttttttttgaaagaaagtatgttattcataacattttatgaatgttatagtaatttttttttttttaagctaatgttaaattaaaatatatataaaaaaaaaaaaaaaaaaaacaattaggaaaattgttaggtatactgtatatattttttatttttacgtgtttttagatttttaattttataaaaattatttttattttgaacttatgctgtttttattttaaaattatgttgtttttattttataaaaattattaatattttaaagaatactatttttattttaaagttatgttaatgaataaagaatgaattataaaagtatatagcttaaaattattcacaaaatatctcaacctaaaattaaaaacacaaaaagccaaaagatttattttaaaattgaaaaaagaacaggtggcaggttttttttgttggatttatgccacaaactcatgaatcacgaaactttagatgttgatggcagtcacgaaattaagcacaaagttctcttactttacattcataaaaatgttatgaataac

SEQ ID NO: 205109 - DNA, 527 bp, Cannabis indica
agttaccatttagttgatcatatttgtggtttgatcttgctgcaggtgatagctggtcacattcctgcacaaatcggatcatcttgtactggaacgaggatgagcgaaatgcatacatagacaagtcaccctctctccgatcagcctcagctccattttcggtcacaggcaaagggatccggaacactgctaccaccagtaagagagccaaattgatgtgagatttaaattggatgtaatacgctccagtctccagagacattcctttttgtgatggcggaagaagttgcttgcttttttaggagtacaaatatatatttctttagaaaatattatttttaatatcatactttttttttttttaggtttaattatcaatttaaatcttttgttttgcaaaagctattgaataaattttctgttttgttaaatgataattcagactctatacaaattagagtttaagttaaattttatcaaattaaaatttataataattaacttgaagtattatgacaaggttagtt

SEQ ID NO: 205110 - DNA, 972 bp, Cannabis indica
taatttttctttttaaaaacttttggtgctaattttttttatgagagtttgattctagattagataatttgatttctataaatgaaaaaggaaaaaaaatcacttggatctttttttttattattatttttaaataataataaaaagtaaatatgaaatggattctcttataaactttaggacaattatggaagaataaagacaatagtgtgtaacttttatggaagactaaagacaggtctattcttttgaatatttttattgataagttttaaataaataaacaagatgatgccaaaataataataaaaatatttgttctctaaaaaaaaatacatgtatatcttctcaagttttttttttcaactaatcatacaaaaaaaattaaatattttttttaaaaaaaaggtaaatagcattttggaccttgtgttttgcaaaaattacagattggaccttctgttttgttaaataacaaaatgaaccctatattttctaaatggtaaaaatagagcttaatttttgacaactttttttttaatacaatcaacttgaaaacaattcctaatacgaacaaatacaaaaaatataaacatttttgtcataacacttttagatcagattataattaaactttattttgataaaaattaattcagggtcctatttgtactattttagaaaatgcagggtccattttatcatttaacaaaacacagggtctaattgataacttttgcaaaatacatggtccaaaatagtatttatcctttaaaaaatgattcaagatatatttaatcaaattttgtaaaaatacttcactataatagaaatttgaccttcaaaataactactaatgattcaaattttttagaaaataaacataaaaaaaggggatatttatggccttttttagaggatatataataagaatgaactatttctaaaatcatcattgttcttttcattagc

SEQ ID NO: 205111 - DNA, 672 bp, Cannabis indica
tggttcaaaagcatctggggtctgaggctagactccttccattggagaaatgtgatggactttggtgcctagtggactgaattgggagatatggacctcaaaatcttcgctgtctgcatctatgaagtcctttggttctggcgcaatactatcagaaacaacaacaaacagtggagtatagaggagattttcaaagattgtactaaacgtgcagtcgagttctctactactccttctgacgtggaggaaaatgacaaggaacctatgattatgaacccctccacaggcacaattgattatcatgtgttccaggtagatgcttcggttgcagacggctttgctggaatagcagcagtctacaaaggagatttaaatgacacagaagactttcttgccgttgatcacttgagagtggaaaatgtcttacagggggagcttgctacaatctctctgactctatcaactgcaaaacaacttggtctggaccgtgtggctatccaatcagattgcaagactgcggttacaagtctaaactcaaactcaatgtcgatccaatggcattcctatcctatgtttttcgaatgtttgttgaaaaagaaacaatttacagatgttatgtttatttctatcagtaggtctttcaatatttttgcggactctcttgctaactgg

SEQ ID NO: 205112 - DNA, 712 bp, Cannabis indica
aataaccacaatatagataattataaagaaactaaaaaaaaactatctcaaataccgaaaaaataaaattataccaaaacaaattttttaagggttatgcaatacatttttctattctttttaattgttattgtaattaagtaaagaatgtttatatgagagaaaatttaaaaaagggatcaacaaaaatattaatttaacaaataataataaaaatgtggaatataagtctcatgcaaatggacaagggagaaaataacaattcaactctcagaaagtgttcttggtaatataaataaaatatatattttaataaaaataaaaaggattatatttacaaatacaatttttattttattttctcccaataagaatcttattttccattactattaaaaatatctatatcattaatttgtttttgcttttttagtaatataagaacaattttgtcaatactatacttattccattcacattatataaatgtaaccaaaaccaaatagtaccattatttataactatattattccattcaacaatagtcaatagagcttaattaagtatattataatatattatatatataattatattctataatctatatactaattaaaaccaaatgcatgtcacctaagtttgtcaaaaatccaagaagaagaagagaagagccttccacatgtaccataaatagccattcattcatata

SEQ ID NO: 205113 - DNA, 733 bp, Cannabis indica
cgggacaacgctgaattccaatcttgatcgaataaaaggttgctagaatggttatcattttagatgagctgacaactctattcaatggatgatgctttgactctcgcctaaacgggacactgtatcagtttgttgaaataccttggaaaataaactatgttagatttagtatttctataacatatgtcattacttgttattttctaaattgtgtatgaatttatgagccaaaaccttacttctgttttattgatgtgttgtagtgtcattatgaataaccctcaccccgaccgtactcctcttacgtttacgttaattactttacgttacgaaacgaaaaacgtaaccttacttaagttaggttggtaaaagtaaaagtcgactaccttccggttagggtttaggttcgacttaaactttaaccgtccgaccctaccgtttggttagtagtagtagtaagtaacttcgtaaggttaaccgttaaaaccggaaaacggaaactaaacttaccttaacggtaaaggttaagttagtttaattttactaacgaaaggaaacgaaaactaagggttccgggtaacccttaaactttacctttaacctttaaagttacgtttccctttccccggtaccgggtaagttaaattaagtaagtttaagtttttagtttacttcctttaccttaactagtagtactaaccaaaacttaactttaaccttaacccttccccgt

SEQ ID NO: 205114 - DNA, 559 bp, Cannabis indica
tctagttttgtaatgattatatttaactatatttataattttttttttttttgaaacagactatatttataattttaatgtacattttgattatttttcattttttttacaatatttttcttaatatagtctttattgatcgaatatgccattaactccttaactattgtcctttgatgggctctcaatatcttgggccgatgaacctggccttgtgggtagcatctatgggttgggcttttgggctttcacaaagttatgactatgagtttagtgacttatgtagctttgtttcgttgtgttgattttgtgtagcaagttggtgtgtttttcttgaataatatttggatggatcttatttacatatgaatctcagcattgttcatataataattaagagatccaatcatcaaaatcaatagaaaggttatgatggactaagatccaaacagagcaaccttgtttagagattctgcgtgaaaaataaatatcatctatataagagaagattatataatttgtcaggcacaatcaccattcatccagtataacactatat

SEQ ID NO: 205115 - DNA, 1376 bp, Cannabis indica
atttagcttttagttctcgacaggttaaagtctgttttatcaaaatattctcgatagttgaagcattgtgagagaattgtaattttgtttttcaattactatcacttgaatatcgattgattatcaatgagtttgacagaatctcgatatgttctcgaccgattatagcacagtaaaaatagtctaatttcaattgtaggatgaaatattataagatgaaaaaatggaagtagtttgaataagaacaataaatctaatatataatatgttaatatatcgtaacattattatttttattaatatattaaataaaataaataagtgaattaaaatttattattataattaattgtataaatgttcttggttaataacaaccataacaaatagtttttattatttaaaagtttgaaaataaacaacacatatatgtatattaaaagaagaagataatgaaactttaacatttattctattgctaaaattaatataattatcaacttcaataaaattgtagaaaacataaagcaaacattaataaaagtacaaaatcaagtgctcatttggtgaccttcaaattaactgattaacgataattaaaaattaagtagcattacttacccatttaaaagattaatttaattcaatttgaagcaaaaatatactaataaattggaaaaaaaagcttaatttataaatcattaaacataaaatgtatcaattaaagaagaataagatagaaagagaaatacaagcaccatcatatgataaaatcacaaacacaagagatcttgtaattcaatataaacaacaaacaattgaattagaataacaaaaataataaaaaattacaatattgggaaatagtttcaacaaatagtcgagaaccaatcaagaacttgtagaaaagcaaccaataatcgttgaaaataataattagtcatcgagaacagtcgtaaacacgtagtaagttcgaaaacataactatacacaccatcaaagaaccaccgacaaacaatcgagaacacaaaaataacatgtcaaaaatagttaaaaaggcaaaatcatttgctattttgacaaataatcgagaacttatcgaaacctttgagaaaggtcttccttaacctcaagatattcacgtcgagaaccttttgagaacgtatcgataacacatcgagaagggtcttctctaaccttgggacatccatgtcaagaagaaccagtcgagaaagatcatccctaaccttgagacaatggagtcgagagcgtatcgagaacctatcgagaaaattacgaacacacaggatactctaaacaacgagatctcacgattttagtgaaatttatatcaaaactaacaaaaaaaaaaaaaa

SEQ ID NO: 205116 - DNA, 664 bp, Cannabis indica
ttttatgcaatcagattatgtccaatgtatggggctcaaaccagactgaaagtataatgaaaaaaattgagctctgtggtattcaattggctaattggggtcgacagttgactgggaattttaagtcttggttgtcaaaaagtaagaagcttcttgctaaattcaaaaactctgttaatgagtttgatgcagaaaactttatggtggaaaaaaataattattttgagatcctagcacagcaagaactttattggaagcgacgttcaaagcagtattggctgcattcgggggacaaaaataacaaatattttcatgctacggctagtgctcgtaaaagatcgaatcaaattcagcaattacaagacaacaatggcacctggcagagttggaatacaggtcttgaatcccttataaatcagtattttgaggagctttatcattccacgaactctttttctcctttaattattgataatgttaaaacttctgtcaatgccacccactgatgctctcttgcaactgatccatgatgaagaagtaaaatcagctgtgttttctatgcatcctgataatgcacccgggcctgacggtatggggcctggtttctttcaacaccatgggatattgttggtgttgatgttattgtaagttcctgtggtatgtg

SEQ ID NO: 205117 - DNA, 1795 bp, Cannabis indica
aaatcataaatagaagagcactgatagactactaatggtgctgcagcagtggagatataattagtaactaaccatggcatgcatgaattaatttgatgcattgggatgctcacttctctggtctttatctgttaagatcgaattaatttaaggtctcttaataataactgacagaagtggctccaccaaggccttattatgtgtactcttttatgatattaatacagcaagtttatcaaattgtcttcaccattttgttacagatgaaggaagagtaacagactcttaaggagtaactgtgagtttttacaagcttatttgctgtcatgactcataatcacttttaacataggtcaccacctcatattatgcattgcctaacactcaagatatagcaaataacagctaatttatgacatagtaaagacaaacattttgccttgaattcatgaattaattaatgagtacactgtcttgcagttaatgtgtggatgtaccaaatgaaccaatggaagaagaagaagcagaggaagatcaagcttcattattacccaaataatgaagttatgagcaaagccattaaaaggagtgactctgcagctcgtggagagtgaaattgcaatcagtgattatgatgtttgtttaattggggcatcaagaaattagaaaccccttttgctataatgtacttaatttgttgccgtgactaagtatttcaagaaatagcagatcaatcaattgttttcaacctcgttatcactaattagtaaggttatttatgactaatcctagtatagctcgctgattactaaggttatcttaagacagcaactcaattataaatctgcctctctactaaatatttttatcgtaattaataagcagggtatcttatgatagcattagcatcatatattcaaattaacaaataaaacacataataaagacagtacaaataatttactgataataagaaaatgaaaaaggtcggcatatgggacttcttattgtaatgtgattgtagagatcttgagataacaactacattattgttaaaagggtacagatgagaagaaaagaaacccgtcaatcaatgccgttattatcgatcagggaaatgagtcatgcatgatttcttgagggaaaaatgaacctttatggtcatcaaaatcacatttataaaatgcgtgtgggaaattaaaaataaatgctttcattgagagttgaactcaagacctcccgcttactaaacgggtgctctaaccaactgagctatgaaagctttttgttatatgttttatcttatttatatataatgtgctttatatttttaattttctgcaattaaattacctctctaataaataagttttgaaacgagtgccttctttaattattttcccagtgtagtgagatcagagtttgtcacagtacatatatatttaagtcgtaagactccatatatctatgcattttttgtaaatttctgaccaattaatacaaaagcaccaattccactgcatgcactgtgaactcacgggcactaatctgttgtgtgccccaccccactcaaacacaattccacacatcatttttggtagcttgcaatgacgttggaacttataacacatatataatatatttatattatttagccaaacaagctcctagactatggagtacaaagttaatatgaaatcataacctaattatgatcagcacaaattagaaaaatatgatcacagcaaaaaaaccttaattatgatcaggaaaaattagaaaaatattaataata

SEQ ID NO: 205118 - DNA, 743 bp, Cannabis indica
aaaaaaaatactatttcatatgattattttgtgttcctttaagaacatgaagatgacattagaatgataggagatggtccaatcaagtttcatgaggccacaaaaaaattattagaattttgaccattataagaaaatgctcacattatctagcaactccttaataaatagtcattgtagaatagcattatgattataagttttagatactttatttttataagtataataaaaaaacatatagttacacattacaacaacaaaaattacattaaaaaatttactaaaattaatgttaggttcgagtttggtaagacaagaaaacgaatatgtacttctattagtgattacactaataattaagcaagatccagtgctgcgaaaataaacacataatcatattacaacggtacaaattaaactacatcaaagtggaatactaattacaacaagattcatagatttatttaaataataattaggcgaagcacgtaatatattcctaaaataataaaaaaataattggccggtcaaatgtttctatcactaataattaatatagacaataatgcatatgtatatttatatgtatttcgttatatattatatgttttggtcatgtcacaaagcgtgtattaggtttacattatttctttaattcatcgttcatatttatgtatacatttttttattatttaaagttctatatatagtgaatgtatgtattaacatgcatacatatc

SEQ ID NO: 205119 - DNA, 598 bp, Cannabis indica
tttgtggttagttttgatggcttcgtggtgctcggtggttgggagttgtcggattaggggtggtggggatgtttcaagcaggagtgggctgtggtggcctcttgtgcttggggagggggcagttggttgctctgatggggatggctttggctagcttgatgtgcggtggtggctatggctgatgctccatttgctctgtttttaagttttttcttttgaataatgcatccattattatgggtttagtttatcgattttttttagggctcacatgtaaaatgactaaatttgaaaattaagttagtaaatgtcttttttttaaaaaaaattaagaaaatggtcaaatataataaactaggcaatatagtcccttttcgcgcaattattttaacctgtttaggaattataataaaaaaattattaactaaaacaaaataattgtaatatacaatattatgaaaatgtagtattaataattttaattacatacatatttttttaattaattaatccatttatatattataaagttaataaaaattaaaataacggctaattccaatatataatattattgataggttagtattaataattt

SEQ ID NO: 205120 - DNA, 1133 bp, Cannabis indica
tagattaaaaaaaattgcaaaataattaaccacatttagaacagtccacaaagtatggagtaaattataattcgggaatctcctatatgtgacactataaaaaattttgattttagtcccaacaaaacttgtgactaaaagtaaaaaaattatgattaattataaatcacaatactatgtgtttttaaaaatcacaaaaattacaatttattgtgactaaaagatctatgactaaatgaattagttacaaaaatcataatttattgtgactaaaagtcacatttagtcataaaaaatttgtattgtgattaaaaaattatcactaaaaatatattttttttgtagtgtgagtatgaaggtgggtaaccatgtcactgaccaatgacccacacaaagtactttgagccattcgagagcacctcaacgatctaacaaaaaaataaaataaagttattttctctcactgtaaacaaaagaaatcctgctacaataggcataacaaaatggtattgcaacgtaacaagaaagcaaaagtaaataacaaaagacaatcacaacatatccaaaagaattattgcttgaacctctgcctatggctcggtgaccaaatccaaccaccccatttttaacccccaatgtcaattgtgcactcaaattaatcctccccgtcctatattgcctgtcgaaaatcttagggttttatcgcaaaatcaattggcaatgagtggagtagcctatgttcttatatatggctcaattctctctactatttattctatgtgggataatgtccacaatattcctcctcaagatgatgactattttttgctcatcaatcttgaaccgtatcagaatggacatggttactatctgtataggtgcggatcggataggatcgcttgcctgcaagggatgtggctctgataccatgttgagaatcatggggttccatctcaaaactaattggcaatgtggagtagcccatatttttatatatggctcaattctctaccatttattctatgtgggataatgtccacaacactattgaattgagacattacagaagccaaagcatagagacgagaggggctcctctctggaaatagcatcaagccctccctatcaacact

SEQ ID NO: 205121 - DNA, 595 bp, Cannabis indica
ttttacatgactttaatatttacactttatttatttatttaagaaaaacaaataatctgtggttttcaatttccagcgccacagtggagagtggagattgctactcatttcaattcaaaatccacaatgtccacgaaatccacacacgacgaacacctctcgtcatcggaggaggaggaggaggagcttcttacaccttcaacctcctcctctcgtcttcatgagatccttaactcagtatccaatgtaagaccctttttcttttcttttttctagctttccacttaaagcttgaacttgattatcattttctttttcattgaatagtctgttgaagaaggagaccctgaacaatctcaaaattcggtggcagatttgattgacttccttaattcggtctctgatgatgccctttcagacccagataacgaaaatgccaaaaacaaggcttttcatgttctctcacaactccaccattatgtttgttctccttcgtttgacgaggtttgctctttggaaaagttcccttctttaatttcatcttaatatttgggtgtaagatttaacatgttgttggtgttagtaattctttaac

SEQ ID NO: 205122 - DNA, 866 bp, Cannabis indica
atcctacctcttaacaagagaatataatatataaccaaacataaaattccaaaaataaaagtgtacgtacgtgaggatagttcaaaaaccttaaaagaaagaaaaaaagtaataaataaatacatgaattagtccccataaagtcacacagaatgacacatatatagacattaatagtgtatagtgataaaaatataacaagtgatttgattaattgatccaataagtaggccatagctatctcaataaatctctttgtgttcccttttcatcagtaaatgccaaaagaaaatagagcaaagacaataagatcgacctaaattggctgaaaaaaaagcatctatatacatgattcatacagcacttaattaattatgtgttactacctttttcattagagatagtttccaaattatttgcagcataagttagcaacgaaaattttcatgcctttgagatcacttaactttgtacacttcacgagtttatagccacaagattacactacacttaaagtaaccacgttgtgttttgtggtataatagaaggaactgtttttatagatatccttttcattgggatcaaaagttcgaaactcaccacaatcttttaaaaggaattatgcatgactcatctcaaggctagtttgatcatgtaaatggtgtcattttatttgatggggacctttaaagtagtttattgatgactcaattaaaacaggttgagtataagaatcttatagtttgtatgtagtattcaaaattgtcaaaaaaaattgaatgagtggggaaaagatttacaccatgtaatcttattaaaaaaaattacactcaaactaaaagatttaattatttatatttatatat

SEQ ID NO: 205123 - DNA, 518 bp, Cannabis indica
tttgtgtttttaaaaaacaaaaaagcgttttatatatagttacttttattttttaattttaaaaataaaaaataaaattgtgttctacaacttttatttttattttattttttgattttatttaagtcggatttagatccgggtctagggccgggactgtgggtccgagtccgagactaggatcgaggtggagtccgaatctcaaaatttaggttggagtcggagtccaaagtattaattaaaaaaaactgtttaaaaaaattttgaaaataattttgttttgttttcgaaatttttaaaattttaattcacaattaaaaatttaaaaagtgaaaattttatagaatttatttttagaatatatttttacctttttaattaaaaaaatagaaatttaatcaaaaagaaatatcactaaacataccctatgttattttttgattattagtgaggatgatctttggataatataaaacgtgtttatatattatgtcccctcattttttttttttcaaaca

SEQ ID NO: 205124 - DNA, 1445 bp, Cannabis indica
gatggttgagatgatcgagacgtcaaatgtccatccatgactgcattcatggatgcatgcatggaggaacgtgcgattgacaggatgggcacagtacttgagaccagacagtagtcgtacatggctggggcacaaagtgcccgagctccgttactggggctgtcgtgcatggttgggtttttcttcaaaaaaattgaactcacacgcgatgagcattaaatcgtccaatatttttacataaaaataatttttttaaaaaataaattatataaaatttcttatgcccattaatggcttatatattttctatttaaaaaaaaaaaagaacgaaacctacacccaattcttaccaaaaaagttaatgatccatcatctcacacacattcataatatataaccatccactcacaatatatattatatatataaatgcagaaaatccacacaacattaaatatatatatacattatgaaactggtctagtatcaattattagttttacggtactaaattaggtacacaacagaataattgctattgattatcactgtaccatattcctaagatcaccatatatatatatatatattaaatctgaaagtaaataaatgaaaaagaaatttacctctcaaagcctatcagggtatcttcgagtattttatttgttgtatccttcgaacggtaatgtcaaaaactcacacgttgatcttctagatcttccactacacacaagaaccaatgtgagctagtaagataaaagtgtatataaagttcttatattcttaacacatgacaaagaacaatcttgttgtagtgacggagagaaaaaagttaactaattaatcatttttatgcttttaaaaaagtcacattaaaattgtgtatcagaatttactttatacggtatattaaataaatttaataaaaatttatttaattaattatttaaattcaaatcttttttattaaatcataaataattattttaaaaaaataatataactgaattgtgttatagatatttatattatataaccgcttgagggcctctcttaaccacttaagagaatatctcaactacttttcaaattcaaatctaaataaatatttatctttcgaattaattaattaattaacctaaaaataaatccagtggggtcaccgtatataggtggtgcctacactgtgtaggtggcgcctccctctgtcttaactaagataagggatgtgtctttttccctaacaacgtttctctttttccaatttatttaattaattcatttgaaaaataaattattttttacaaaataaatattactattttgacaattcaaaataaatttttctgaactttcatatacaatttttatccctcctcttgacaatgtttcaaggtgtcgatcaggggaccatagacctataactctaagctctaataaactag

SEQ ID NO: 205125 - DNA, 1024 bp, Cannabis indica
gttatattttatactatatatatcacttaattaatttaaaaaattcaaaatatataaaaatattacaaaaattggacaataccgcgcaaagcgcgacttaattttcctagtttatcatatagttgcacttcatatattctctaatatattatccattcattacttacattagggcataaatctcaataatctcttgagatcttctttcttcatcttctccttgagttcttcacactttgtcgacacaaagcctccattactcaaacactattgacgtatacatagctaccagaaataagaaaccgttctctgttcttgctcccattggtatgttgttcttaagaacgttactaccaccattattatcacgtttattgtattgggtctcccatgagctttttacccataagcttagatattgattttacccatgagttcttcacactttgtctattatccacacactcttgagaatataactctgttgacgcaacgtgacttgaaggtaaacaactataaatacttagtgttcttttcatatttatggcattttatttagcaaaataaattttttgcagtcctcttgtttcttacattttcttagaaaaattgacaaaaaattgcatctacaattttatttatttcatcaaatagatttgaaaaaaaaaaatacaatatagagattaacttgtaaaaaaaactataaataaaatttgatttctatttcacttttagtaccaaacaaaaaaatatatatatattatttgaaattaatatttaaaaaaataaaataaaatcagtgttatcttttcagtctgatgtaagactctaaaaatctatagacacatatatagtaaaggattttaaaagtattattgacccacactaaaaaaaaatcactaaatattacctttacaatcagccactttaataattcacagggaaaggtccctaaaaatctttaatcatgggatcactaaagcttattttcgtagtagtcctgaatattttaacaccaagggag

SEQ ID NO: 205126 - DNA, 811 bp, Cannabis indica
acgatttaaggcctgcttagatgccaaaggattcacccaatccttggcattgattatcaagagacatttgctcttgttgctaagttaaacactaaccaggttctcttgtctattgttgtaaatgaggaatggcctctctccaacttgatgtaaagaacgcatttcttaatggcgaccttgtggaagaagttgacatggacattcctcgaggatttgagaataaatatccaaaaggaaaggtgtgcaaactcaaaaaatctctctacggtctcaagcaatcccctcgagcttggtttgacaggtttactaaggttctcaagggcgatggctacactcaatgccaatctaatcacactttgtttataaagcactcaactagtcaaaagttaacagtgttaatagtttgtgtcgatgaattgtggttacaggaaattttatggaggaaattactcatctcaagcaactcgtttccaatgaatttgatatcaaggatctagggcaattaagatatgtcctagggatgggagtagtaagatccagccaaggaatcttagtgaatcagcaaaaatatgtccttaaactcttaaaggaaagagagatgattggatgcaaacttgttgacaaatcaatggaccccaatactaaacttggagcacaaacagatggaataaaaagttgatagaggaaggtaccaacaccttgtgggaaaactaatttacttgactcacactcaacctgatataaactttactgtaagagttgttagccaattcattaataatcccttagaggaacacatggatgttgtcta

SEQ ID NO: 205127 - DNA, 693 bp, Cannabis indica
ttgcataacaatccaactaaggtagattggagcaactttgtttggagccgtatcaacataccgaagcatagtttcatactatggcttgccctgctttggaagatcaaaaccaggtatagattgaagaaatttggtatgattgacaatgacatttgtttgctttgtgatggtgacagtgaatcggttgaacacttattttttgagtgccctttctcggtgagttgtcttgagcaagtaaagctttagctttaatgggggatcacctcgatttccctttcacaaatcagtaagtgtattaggaaggctaagatgagcaagtttaagaaaaaggttatttcggcttctgtggcagctttggtgtactacattttgaccaaccgaaacaacaaattttggaatggagagtgatgaaaattagtgatagaattgggtataaaattaaagttggaatcaaatatagaatttcttgtattttgccaaaacatgtaactagtagtgaggaaagatggtttcatatattgtaaagattttacagatttttttaggtcctctaaattagaggatgctattaggttgtgtaaattgtttttgaatttataatacacttgctcattcgtaaagaaaaaaaacacaggatttaaatagatagaagaagacgagaaagacttttccctagcacgaaaaacataaagt

SEQ ID NO: 205128 - DNA, 1249 bp, Cannabis indica
gttcagagtccaaaatttatgaactttgttgttatggcaataatctgaaatatacataataacataaatataagcttgtgatgtgaaatgttagaaatgcccttacttgtttagtatgtagaattttagtctcaagggtaaaatggtcattttaccacttttgactaatcaagtaaaacgcattttgactaagtgtagaattgaaaaatcaaaatctggctttgaagaaagcttcaccgatccctctctctctctcattaaccctcattttgtagttctttgcttctcttcagattattggaaagaaaactagtcttcgagattaaaaattatgtggaattattgaagcaagtttgaggagcacttaaggtagctttagttttatttttttaatgttttgctttcaaaatctgattactatgattttatgtgtgtgttattattttacaatttgaaagttgagttaggtgttttcatggatgagatttggaattctttgttggtaaaaagtaattgagcatgaatttgagttttgatcaattttatttgatatattttgttgtggtttaagtgaacttgagcatgaagtgagctaagctgcttaaatcttaatgatatgagttttgtttattttgaatagtatattttgttgagggaattttggtgttagttttgatgggtgaaaattttaggacattagtattattgagatatgttggttataccctatgttgagcttaaaaatgtgatgcgtgaattatatgagatttgaggaattaggtaatttttgaagtgctaaatgaattggtatttttaggtttttaggccgagctgccacgaacagatgtttggttaccacaacgaggcttgaacccaaaaataagggaaagaccctttcccaatctcggtgtggcgagcatatggtcttttcgttgcaaccctgcagcgataattcattttagcctcatgtttcggacataacctttgactctgaactttgttttggatgtttaatattttattggaaagctcattttgagctctattacttggttcaatgttggagtcataaatgtgattttttatgaaatgggattttgagattaaccctattgtgtgaaactcgagaattgtgactatggataccaacactaggttaaaatcacttatggattgcaatttctcctcagacattagaaataaagtaagacagtgaactatgtatatagagttgttgggttttgtgccc

SEQ ID NO: 205129 - DNA, 836 bp, Cannabis indica
gataatctcatctacatatgctttctggtcagcataataacattgagatctatttccttctcacgtttgtctactcgaccgactatgccctcgagactttgattgtcccgtgcttgagcttgattgatcttgcatcggccttcttctttggaagagattagacaaatgttctctatttaagtatgtgtgtacattgtctctatccgctcgggattgacgttgaggatgtcttggaggaaacccacttgtccttggttaatttctaggatttctctcattatcatgacgaaatccatgattccctggtctaggaggccttgcttcttcattcatgcgagatgattctcgcatgtcagttcgtccattcccttagttagcaaaatgggaagttcatggaacatctcgttgttgttcttggttcctcgcgttattaggattcggttgatttgttcggtccataggaacatctcttgtattcccaggtttttcctcctaggtatttgggggattctcttgttttgtttcctgcctcctggttttagagactcgaagtcttcatcgtggtctccttactgcatgatcaggttggttctaagggattgtcccttgtgtagccctagctgctgcggcttctctctccaactcagcgtttcgtcgattagattcacccaatcgttgtcgaagttgtttattctctaactctaccaatggcacatatctggttggatcataaacatcctcactcctaggcacgtatctggcagagttattgacatcctcactcatcttttctaagtttcaatcatcattaccaaacgtggtatttcagatgtgtt

SEQ ID NO: 205130 - DNA, 1846 bp, Cannabis indica
cagatacagtgaacctggacagttttttttagcaaagtttccataaataaataaggcaactttgacaacattaatacacaaaactgtgcatggtttcttggtcaagaaatcagatcaaaaggaataaaatatgaataagaattccttaaaaagcaaagaatacaatcgaatattctataaaaggaaaactcatatttaattcacacaaagtcaaataagaataggatctgattttgaaagcattttcacacaagaaaaggcaacaagattttcgaaaataatgaataaacaaataaaaataattttaaaaataccacaaatattttttttgtctattttatcaagtatgccaacaaaattttttttatattgatgctgctcttgacgcttctaatgatagatgtggtttgtgtatggtggctcgtgactccattgatgaagttatggtttatgctgtttcgcacatttttggtactttttctcatgaaatggagaagctttagctctaaaaaatactaccatccaatgtcgtctattgggtttgtagaatgtgctttttgaatctgattgtttgaaagtgattttgaagtttaataatcaggtttctttggctacttgttgggttttagcattagcagattttaaatagtgttttttctgaattttattatgttagtctttttttctattttagatctgttaatattgttctcatttcttggctaaatatgctttgttagaagttattagcaagatttggtggcttgattatccttcttgtatcccctcaactttctccttaagaagtatttaaagaaagtaaagatgttttaaatagagaagaagtattggacaaagtattggctcacttgttctcaaatttttgaaaaatctctaaaaactactagaagtgatgtaggagagatattttaggattctgttttaaattgtgtattgctattaggtattttaaggtgtcaaataccatactgatttgttgcattataattagttaacgactcctcatattatttattaaatcaaattgaggaccgatttttaaatgtaccaataccttcactttttatggtgcttgacactttaagtgtgttttatcatttttctttaaattacactaatattaatatttaatatttttgtttcaaaaaaagcaaatattcaaacacgtttaccaaatgtcttattttgcattttttctttttagggaaaaaaaatgtcttattttgttctgtttagtttaaatggcaatggcccatgtaagaagaggacgaatccaataatgaaagcatctttattgtgtggtgaaataagtacatcacttttttagtcttcctcttctcttttatttttattctcattttcaattaaaaaaaatgagcataatgtaattgaactcaaatatttacaacaaactctattattcaaaaattgtatttttttaaaaatgtgttggaaacaaaatttaaattttgtaagtaaaaaattgtttctaaatatgtgattgattgtagtgtgatttaatatttttgagctttaaaaaattgaatatgtgattggttgagaatctcgaaataaaaaagtaaaagaataattgggggagtttttggatttcataatttgaaaacataaaaacataaaatagtattttcatttttacctaaaactcaaaataatattcaaattttgtttttgaaaacactcaaccaatcaagaattctaagtggaccttctaatttatttcaaaaacataaatagttttcaaattctaaaccaatcacattcaaaaaaaaaaaaacaaaaaaaaccaaagaacaacatacctcgt

SEQ ID NO: 205131 - DNA, 598 bp, Cannabis indica
ctctctatctctcaactcaatcttatcgttgtgtgtgaatcataagtgttggtgatatttataggcttaggagcaagatcctaaagtcagtggctgtaagaagttaggttgttaagttagttagataataaccaacttaaccaactctcctttgagcgagatctccacatcagcatgagtaagagtgcatccaggagcatgtatgagggcttccaaaatcataggccaaggcacttacgaagggaacttcccagataggaaagagccaactggagccgactatccgggactcccttctagggggaacaactagccatccgaaactcttttccagatgaaaaccatcattccacgatacttctgccaaatgacatgttagctatctggaagcatacttttgggagacaaataactttccaggaataacttttggagacatacttcaaattaaaagtatgatgatgaagaagatagaatgcatccatcatggttggtgttccaaaaatctcagtttactaacttctgagattgatcaagttcaagcaatgcttgaactcttgtttactatcaagatcccttagtcccaacatcagcagga

SEQ ID NO: 205132 - DNA, 1131 bp, Cannabis indica
aaaaaaaaaaaaatagtagttagtattagagacaaattatgtctatgaaagataaattcagttgcttgaatcactttcatcctttaatgataggtacttatcaaatagctcaattgggatacaaaaccttgaagagttattctatttgaaatagaagaaaaaaccattccaacacataaagagaaaaaattaaaatttttttattatttttttatacattttaaattttattccattctattcttattcttattctcatcctcattgttattttaatatttttattcttccaaactaaacgtgacaatatatttttacatatgtaataaattaatgatgtgtttgtttggtaaaaaaaattcataaatatgagtgatgtatttccaccataatatatgattgaatgtgtacggagaatatttatatataacacaaaaaatatgttggtactttgaatttgtattttatttttatgagaataagaagtacttttagataatgagattgattgtacaaagccattaaaacaaacaattgataatgaagcccataatacaagcctttgttggagtatggaattctcctcccacacaaccaaacatgggatttatttatttatttatttttcctaaaataaattaattattaaataaaaaactttgttattgggtacaaaattttatgtcattcttattattattattggttattaaggtatatagcaccatactttcaatttttaagaaagtgcatggatcaaaataatggccattgactttatctcttttttccatgtctatatgtttttgtttgttgtttttttttaatttattatttatatatatatttaataatattatttttattcgtccacaatacattaaaaatatatataaatataaaataatactcaaatttttttattggtgtagaaccaatactataagaatagaattttagcacactacataaatatctatatatattttaccattataaccattacactaaacttataacctaataaataataaatataacattaatatatataaaaaatgttgtaattaaagctggaacactgtaacaccacaccatgtatatattttttatgttttcccagaaaataat

SEQ ID NO: 205133 - DNA, 892 bp, Cannabis indica
tttttatcaatttcagctgaaagatattgtggcgtcgttgtctgaactttggaacttgatggattcatcaagagaagaaaagaataacttttcgaggattgcttttatccttggaaaatcagatacagaaattacagaacaaggttttctttcaatggagatcattgatcaggtgtgaaagtggtttcaatacatttaaattttagttcttacaaggttagatcctcaagtttcggattctcttcgacaggcatcacaagaagttgagaggctcactaaattaaaagcaagcagaatgaaggaacttgttattaaaaagagatcggaattggaagaaatatgccgaatgactcatattgagcctgatactagcacagctatcgaaaaatcaactgcaatgatagattcaggtatatacttcttggattgtttctcatcaagataataagatgcattttatttatggtatttgtttggctagaaatatttgtaaatatgaatatgctgtttctgttcaggtctggtagatccatccgaacttctcgcaaacattgaagcgcagatacttaaagctaaagaagaggctataagccgaaaggaaataatggataggattgaccggtggctcgctgcatgtgaagaagaaaattggcttgaagaatatagcctagtaagccggaatttgttgtacataatctttcaacatacaatgatagggctataccccataactgcacatgggttatttttctatctctttctcttccacacacaaacacagtgctgcatttcatattccatgacaacactttgtgtagtactgaaatttaatcgaggctctgattactgtttcgagaatcttgtttgtccttgttctcaaggtttataatta

SEQ ID NO: 205134 - DNA, 892 bp, Cannabis indica
aatatatttatatatatagatagattttcttgcagcatatctaagaaataatgatgctttaacgtacacattaattttaatgtgtattatgtatccaaattgggatgaacacacaaaaatgcattgcattgcagaagtagaatatcaataaatgaatgttttctaaattagttaatctttaaactttatacaaaaaagataaaggtatatctcaaacgctaattaaaatttttgcttaaaaattccgttcaaattagtgagattgttaaattcaaagacatttgtcttttgtctaattccgttatattttaataaagtgctaattgttcatgtactaaatcgtgttaatttctcaaacattgatatctactaattcatctccgaattttgttatctaccgaattgtgcccctgaactttatttaacatgtatcaattcaactccaaactttgagtctaccaattttaatagtgcagaaaaaaaatttaatgacaaaaaaaattcagaagatataatttaatatatgtcaaaaaatatatcccaaaattaaataaattaatttgaacataccttaaataaaaatcaccacaaatgagagtgtgagagattgttgatcatgttattatgttgggtgcaatgttttgaaaaatcaattaattactgaaaaatacgcgtgcacaatttttttcatggtatatatatcttcacaagcttcatctaatttaagacaagtacatattttacaagaaaaatcaacaatttgtatatatatgtatccccaaaaacatcatgggagatgtgttatatttttacttcatctttgttttattgtattttgaagaaattataatttatgttgatttttattgtatttaaattaattgtataggta

SEQ ID NO: 205135 - DNA, 625 bp, Cannabis indica
gatgatgatcatgatgatcatcataaataataaagcaaagctgctgcttgggagtgatgaagaggttgtaatgatggtgtagtgagagattattattagtcagatcgaagagagagagagaaagatcatgatgaatattatggaggatgaggccatgatgattattattgctgttggctatgcctatactcccttcaaaaactaatagcagctttggacaaaaatccaagtatagagagagaaacagacaagagagagagagagagagaaagagaaagaaagagagaagattcctctctctctttctgattagagagaattatcatgaaacatgggtcctatatccttttcataatattatcatgaaacatgggtcctatccttttcactaatatcatatttattatatttattatatattcacttatttatttaatctctcgttctagaatgaacattttttctcattttattgttcagaatttatctataaatacaataataccttgcttgttcagttgtatataatatatatatatagctaaccctatatagaaatttacacctctgtaaaatattcaacagctccaaaagtcattttccttgtgggacaaaataaaatgtt

SEQ ID NO: 205136 - DNA, 1284 bp, Cannabis indica
gatgggaagaatatatctttttttgtatcgaaaaaaataaatacatttttcacaacaaaagtccatctgtaatatcataaattttagggtgtattcgtcaaatctctacaaaacagcggggttccgatatagtacgactgggctattttatcttggggacgactggcaaattctgactacttgcacattcctaggcagtgtcgcaaacatgttaaagagagcgacctagtctactactccccacgattcagaaaatattcttcttcctattatattatttaaatccattcatctatataatgcaattgaactgatgggaagaatatatctttttcatatcgaaaaaaataaatacagttttcactacaaaagtccttctgcgatattataaattttagggtgtattcgtcagttctctacagtgcagggggttccgatatagtacgactaggctattttaccctagggacaactagcaaattctgactacttgcacattccaaggcaataccgcaaacgccttaaagagagtgacctagtttgcgactcaacccagaaagaagcaaaaatagaattattgcctagggtttttagttaattgatggatgttgtagattaatccattaagttctgaattttattagtgtaataggacaaattaggagtagataactccttctacttagaattatccaaaaataaagaaaaaaaccaaacattatctcttctctctcttttcgaactcaaggggaggcaatgaaaatcacagtttgtctttgattttttgggactttctgcaaggacttttgagttatttcaagacaaggtaagacccttgtactgttctcattggttttgtagaaattaacttgtttttagcctacaacttttgtggtttggttctttctaaaccctaaacccttagaggttgttttctaggttaattttaagttgtttggtgtttgtttgaagttattttgatgttttattgttgagttgagcaagtttgaattcaaaaactcaaacttggctcaacaatggtgaatttttcatgttaaggttatttttggttctattggttgggatatgtttgttatgctattttttggcatcctggagcttagtttgaagtttggattcgatttgggttttttttaggctttctttttttttttttttattttttttctttgcagtgtaaaacacgttggccgtttctctggaaactgtctctaagtgtagtatacctagagaacagtcttacattttttctagtcagttttt

SEQ ID NO: 205137 - DNA, 1610 bp, Cannabis indica
ggtacttttgcaagacatgtagaaggtattggactgaaggtgggtccctcagaagcattccagtgggtggtggttcaaggaagaacaaaagatcatcaccatcctcatcttcatcatcatcaaaaatcatcatcaattctaggcttcctgatctagttcataatcaattgggccaggcccatcaggcccatcaagcccaagcccatgatctaaaccttggttttttacccacccattattaatgaccaaaaaattaaccatattatttctaatccttcttctaatacttctcctactagtaccaccaccactactactactactactaatacaagtgatcatttctcagctttagagcttctcactgggcttacttcaagagggttcaatagcttttttccaattcctgattttaagcccagtctcaatttttcacttgatgggcttgggcccaataccactagtgctactactactactactaatacagcatcagcctatgggagcttgccaagtgtccatgaaaataataatagtggtagtggaaggcttctattcccttttgaagattttgaagcaagtttcttcacataataacaataataataattctggaattattgatcaaaataataatattattaaagagaatggtgactcaactgggtattggactggaatgttaggtggagggtggtaaaaaaaaaatacaattttttttttgtttaattattaattttcttctcattgtgggtatggtttgtttggatttaatttctcttatcataattaattattagctaacaaagattatcatagagggtgatacaattatttatatattatggtgggattttgaagcttattttagattggcttcataaaatggatatgtactatagtacaattatctgagtttcaaggtcatgaaatccaataacaatttttctcttatatttaatttagggtattttaattaatattattatgtatgtaatttttctttctatgataattaaatttgtaatgtgtcattattggttggctttggtataatgtaaaacttttgtatggaaagagtagttaatggatatgcactggtgtactttttttttataaccctaattttataattaatatatattatcttatataataatatttaattaattacaccaacttggcttgtacagcaaatcttcacatgaagcactacatacaaataatgttaaaaaaatagtggaaattctagtttaaatggatgtaattagttgtaaagtttcaaaatatatatggttcattttgattaaaccgagccacgtggcacttttaaattggttgagagaattgcaaagatttggtgcttgataattcgaaatgtaccacgtgattacattacatgcatgtatcatcactaataatgataattaatatgtaaattaattctaataatgtttaaaaatattttctattttaaaaacgtaggtacataaaattaaagtagaggaattattagggcattaattaacctgcctcaaccaaaaatctcacctactaataaggatgatatatatatatatatatgatgatcgagcttagaaaatttttgt

SEQ ID NO: 205138 - DNA, 1036 bp, Cannabis indica
ccctgcgagactactacaaggacctcgtaaaccatctcagaatttccccattccaattggttctaatttcatacagaatcctcgcaatcttgaaggtttcatacaaaattttaaactgggattgccccactcccctggaaatagagtatctttactctgtcaaggccattccttcgaggaagaatgtagcaagaaatttttactatcttgggactcacacagaaaatcgtaagatcattatagggtttccaaataaaactccgtttaaagaataattattctggacaactggtctttccccaatcggcacaaccaccgtccacataatacgcaagtgattgctggctttagacttggttaaattattccaaattctggttttgctgactttaattttgcttttatttttgacagctgtcttaaaaagactagttcctactcctgagatggctgagcgatgcgggttcctgctggatcttccattcagtctttggtcatctgagttccatttgagcgaggttaacttgaggtctgtgggtctccttactgacaaggagtttacttgtgattacaaatatcgcaagtattcttcttggcagcaggttcttgtcccagccgatgaggaagctcaagatggcatggctcgagaaaattatctttggaacgtcgttcctcaagaagccgaagaaggagcatcccgaggtaatcaatgtggttggtcacccacaatgcttaggccgagcatcacactttagtatcattttgagatagttgttataatttttacatctggaattccttcctcatagatcgcattgcacataggtttgatagttggtacctaaagttccatgtccaaattagttgtactaactcgaactatgggatagccgagtagtacaggaccatgctagatagggtaagtcatttagatgcgagctgagatttagaactaatttaatatatttaggatcacgagatgtagggattttagtggatattatagtcattaatcttcgtcttcttatgattatgg

SEQ ID NO: 205139 - DNA, 565 bp, Cannabis indica
ggcttgcattgggtcaggtggatgagttgaaatccttaggttccttctttaccaggtctaataaccatgacaagaagagccgagtctactcgaagttggacagagtgttcactaatgaatgttggttggatagtttcccgaacacaacagcgagctttcgatggggagctatttctgatcatagatattgtttagtcaagcaccttaagataagtaacagtggcattcatcctttccggttttgtaactactggactctcaaagagggctataaagaaaaggtgttaaccgtttggaaggaacacattgtctcagatctgaaaagtttacaccagcaactgcttaggatcaaacacaccctgaaaagttgctatgtgaacaacaaagaatctgttactgtcaagtacaaagagacccgtgagaagttcattgaagctcaagaatttttggctgcgaatcctctctgtccttctgctgtcagtatagaaagattgatgtatgctcagtttcaagaagcccgaagccaatacttcagctacttacgccagaattccaaagtgagttg

SEQ ID NO: 205140 - DNA, 1193 bp, Cannabis indica
ataaaatattactaattatatttgagatgctacctcctaacaatgcttttttatataataaaccaaaatataatttattaaaaaataaaaaatattattttttataatatggacaaatattttgattttttgtttaaaaaaaataaaaagttgaaacaagttgatgatttgctcgaggtgcttatctataaacaattttgtccttaaatacataattaaaacaatttagaacactttcaacaattttgctactctgttttttaaaatacttaattaaaaatcgaatttttttttattttacctcacacaaatttatattataccatacattagttgttttataatttctctaaactatttaaataatatatatagtacacataaacaataaatcattatgtattaaataatatttatttattttttgcacttatcattaaacaaaatacattataaaaattatataaaaaaaattatagttaactcttaactacatttaactaagtattattcataagttaaatttttaagttattttagcttatctattaaatgtgcatttttgactttttttttttaacttttataactattttacattaactattattgtgagtgttcttagataaatttacagcaaaattaattaaaaatataattaagattaaataattattaggctgtgtgaaaaaaacacaaaagtgggggctctcattaatctacccaaccaaaccacactagtacctttggcttctagcatattttccaatttccatcaagtgtcttcacactaatcttttttattttttttaacaacacactaatcttattggccatcaaaaattacaaaagcaagttctttcttaccattactgtccccgaaactacgatatattaaaaagaaaaaaaaaaaagaaaagtcagtaagatgacaaatttccacttactttactaaataaatgtccacaatctaataaataataataaaaaaaagtctataaatatccccaaatatgactctttcactacatctgatcttacccacaaccaacatgaaagacctaacttgggtttcctacgcggccatttggctcgccacggtggcactcatcctcctctccaaacgtctccgccgccgtaaactaaacttaccacccggcccaaaaccctggcccataatcggaaacctcaac

SEQ ID NO: 205141 - DNA, 736 bp, Cannabis indica
gaaattatctatttttactctttgtaattttttttatttacaaaaatacatcttcaataataactaataattcgtttttttttttttattattttatagtttatttatagctatattatacttttcatgatattattttcttgattgttttttgttgtttcatagtttatttatagttatagtgatgttgatttcttattattttttagtctttttctttttactttttgttgagtaaagtgtatttttgtaattttaaaattttacaaatatattttgataatttagaactttagatggtaaaattgtaaataaacaaaaaaaaaggtatttttaaaaatttcctttttttattgctccatgtaattaatgtgatagcacatactgtagctaaatattctctaaacactaccgctaatactaattggtggtctaatttctcacattgcataaaaacctagttgaagctagggtcggccttgagttaaaatgggctataagcaaaaaaaatttttttgagcctttactataaaaataaatattatttttaaaaattattaaaaaatatatgtatattttttaaagggtgttttttttgggccctaggcgcgggcctggcccgcctatgcctagggccgacactggttgaagccattgattagtggcgatattcctagctcttaatccctcaaagctctctgtttttcgaggcttaaaaaaagtggaaattacatgc

SEQ ID NO: 205142 - DNA, 1938 bp, Cannabis indica
ttttattattattttttagggcattgaaagatattaatgatgtttaatactcttctgagtgtcgtattaggtctcatataacttaagaaaatagtttttaaagaaatattgctaactaattatgggacgccacttgtagaaagtgctgacactattagtatccaataacaatatcttttttttttgataacttgtttagacatgtagtattattatattagaaaaatgtgtacaatgatgatgatgagagaagccaattgatttagctttaagcataaatcaagacatgttaggtgcaagccaacatattatataataagttaaaataagattattagtgctcaaagcaaaagttgattaaaataaaaatacagctaagtggtgatgaagcaaaaatctttaaaatacaaagacaaaatgattctcttaaacaatggcaatgacagattaaattacaaacattctccaaagtgaacaaaccaaactaatcatcattaatgttaccaatcttggatctgaggtcttaaattatattataataatgttcatatatacatatagtatcaactataacacatgcatatagattagtttatagagtttatattatattcacttaattatggccatatatagtcttgcttaagtaataaactaatatcaaaataataaaattgttgtcatgattatactatcttatatgtcaatgaaaaccctaaacaccaaaaatgaaaatgttgaagaacacaaacaaattaaccttatttactcagaatgtatagaagtgaagtcatgaccttgaaagtttcgattctcttgcactttactatgatatctcaaccactttccttcttattaattagtccatgaattaatatataaatataaataaaatatttggattataaattatttttgatatgatagataattccatattacatctactctaacttaattaattaacctcttactttttagtttttatatctcactatagcccaaaaggagatttttccctcacctcaatttcttgtcaaaatgagaatgtttttttggtggccttcaaaatattcaagagaaaatataggcattaccaaaaataatctgtttatatataaataaataaataaacataatccatatatattacacatgttagagaagaaagaaagcaccaagaaaatattcctcaaagagattagaattgagatgagaggaggaactaagtaaccaatagtaccattagcatttgcctaacttattcttcccacgtgcttatgtcattgtgtttaattatataatataatattgattattgtgtcagtgtaagaatgtatatgtatatattacaacggttattttagtacatcttttatctgttttgttacttgaaaaaaaataagtctaatattttttttcatgataatcgcttatattgtagttattttagaaccacatataaattttataaaatttatgaataatttatatttacaaaaattttcagaaattaaataagtagttaagtaatagagatagaattttacgtggttcgggtattaatttaccctagtctacgagtcaatgtattggtcgaaaagctttgatgtattacaatgaggtcttacaagttaaagaaccctaccttcttgctatatttcctcacttgggtttttctagcttagagaagaagaaaccctaaatcagttaagtgaattgtcctccacacatgaaggtataatgcgatatttattgattaagatttgaatctggacatacctgtaactcgctagggctattgtacaaactaggcctgccaatattagggtaaatacataaaatacattactttaagacccactgtaagattctagctcgtggtaggaaggctccgtacaaatgggacctgcacggtttgggataagtgtcacacgc

SEQ ID NO: 205143 - DNA, 888 bp, Cannabis indica
atataatatgtttatctaattgtttttattgatttactaaatattttaaaaataaaaaattattcggttaaatttgatagagttaattttataaatatcagtattatttattttaaattaatttatatatataaatattaatatattattaatatatatataaatattaataaattatttgtaacattattattattttaatattggaagaatgtttaatatacaatattaataaatattcaatatactatattaatatatttattttaataaattaataaatatttttttaatttataaattttaaaatacataaaagaaaagtaaaatctaaaaatataactaagtatatttacttacaagtaagaataaattgatatatatttatatatacttagtttgtagtcttgtattctttgtaaaaaaaaaaaaatatagtttgtagtcttgcattctttatttgaaaaagaaaaatatagtttgtagtagtagttaaatgataaactaaactattggaagccgttgtttcagtaaaagctctaaccaatgactcattgtgttgggtggttggatatttgagttggctaacctcctcttcctcattctcatagactcataatactgttcccctttaatgttggtggcgctctgcttctttaacttgctctcccataatatacaaacccacaaattcaagagtgcaagtatgattatttgatataatatgacttgttattatttgtagcatataattagtgcaccattaatatatataaagaaaaaaaaattgctcaagctagtatcattgatgaattatgaaaaagaagaagctcacagttcccacttcacactcagcttccaccaatgtattattctctctctctctct

SEQ ID NO: 205144 - DNA, 1295 bp, Cannabis indica
aagcaagttttcaagagttaaagaagcgattgatcacaactctggtgttagcattactgttagttcaagaaaagttcgtggttaattgcaatgcatccaaacaggatttagggtgcattctgatacaaggtgaaagggttattgcttatgcttctcgttagctaaaggggtattagcagcgatacccaactaaagaattagagcttgccgcagtggtttttatgttcaaaatttagtgacactatctctacaaagaaaagtgtgaaatttatatcgatcagaagagcctcaaatatttctttactcagaaagatttaaatatgagatagagatggtggttggaactagttaaggattatgattataaaattctctatcatatcgagaaggccaatgtattggcagataccgttagcaggaatggtctcaggcaagtattcagcaaagttatgatctcatctcagttggtagaagacatggtcaagtcaactattcagtttgtagtaaggaaacatagtgatttgaaactacaatcagacttgttagaaataattagagctgctctgttagtggatccagaattggtgaagatccaagaagaagtcttagcttgccacactaggaattcacagtgtctgtaacgaaatgttactttataaaccccaagtttatgtaccaaataatgtggaacttagaatggagattctaaatgaagctcataccactccctattcaatacatctcggtaccaccaaaatgtatcaagatttagaaccctattattggtggtgcggaaggaaagtggatgtggtggatgtgactagatgttgacctataagcagattaaggctaaacatgaaacaaatgcagggttgttgcaacctttgacacttcccgagtagaagtgggaggatgttactatggattttgtggttggatttcccaaaaccacgagtatgttcaattccatatgggtagttgtggatcagtttactaagtcagcactctttgtaccggtgaaaacaacatattaaatagatcaatatgaagagctttgcataaaagaatggggacaacttcatggggctctaaagtccattatttagaataaggattcgaagttcacttctaagttttaggaaagtttcaagcgagctatgggtacaaagtttaaattcagtacaattttccatcctaagacagatggccgatttgagaggaaaatgaagatattagaggatatgttgtgagcctgtgtaatagattttgaatgctcctagagtaagtatttacca

SEQ ID NO: 205145 - DNA, 1075 bp, Cannabis indica
agacaacgagtaattaaaagaaattaaacttcacctatatatatttaacataaacatattaccgatcgagcaagactgaaataagaaaattaatgtgatagtttcagatattttaccatggatttatttgagtatatactaagaggtaataaaaatgggcgtagaacaaaaaggccagagaaagcacacgacaaagttaatgaattatgacataagcttttttcattcatagatgcatataagagatggagtgatgaaatattcttataaataaaaataaaagagaaactaaaagcatataagtaaatacttaagatttgcttttgttttctttgtttacaatcagttaaaataatagtccaatatttaattaggatatttttttttgggaaacacacttcaaattaaaagttaaaaaaacgagccaattaattatgatttttttgacaacaaaaattaaaacaaaataaaaaaaaaatttgcagaatcaagaatatctatattccttctgctcaaaaaacacaagcacgagcactcactattgtaaggtatgtcattgtaccactaataattcatagtcgcaaagaatttgttattgtcaaacaataattttataatgagtcataaaaaaacaaagatgatgaatcaataacgtgacacaaaactaaataaaatcatattatcaagagaagaataactgtagtaacctacacaaaaaatattcaaaattatctcacacaagactaattacaatagtaaaaacataattgtagtagcaactgcaacaccacaaacccagaccaagtacctaagtccaaggaggatcaacggaccttgccaagttgccagaggaaaaacacaaccgccttcgcctaagaatttaggaacagaaaaatcctagcataacaagccatattgttggtattccacctaattttttttttgatatgtttttattttttttaattttacgttatactaaataacgtaaaataaaataacttcattaatatattttttttaaaaaaaagaaattatttaatgactagtacttaattaaagtctgaagtaaata

SEQ ID NO: 205146 - DNA, 580 bp, Cannabis indica
taaataatttttttatatataaataagtaagaaatttattgcacaaatattcaaacactacaaacaacaattacatcactaaacaagcttattagcaagctattcttggtctactttacttcttttctcattcttaaaatggaaaaatctcaaacaaatctctactttaattctatttataattaaatgaattgtataaaccttttaaatattccataaggctttttctaaatacaaacaagtatttacaatggcaatgtaaacctttctccggtattttgagtatttgtagctttaaattaaatatatttcaatataaatttatttcctaattaataaaaaattagaaatcattttatattacgtggtttacatgattcctttcataattatatattgtttaatatataaattttgttaaattttgaacatgttgttattcacgattataatgttgtcaacacagtagaaaataaacatgaatatttgtttcaaactatttagtttcacgatttaacagtgcagtatatttatacttacgtgataattagtgatattgtttacttacacttgtataact

SEQ ID NO: 205147 - DNA, 869 bp, Cannabis indica
attattattattattatccacgttttttaatggacgaagagtggcatattgatgtaattgatctgcgtcatcagtagctcgagcctttcggcatgcaaaggtcgagtccaaaacggaggtgggctctagctctcgatacttcttgagtctcacccctagagataagatcctcgtgctcccgaactcctttttttccttccaggagatgaagtgaactacgccctcttgagagttaaggaggcgcatctggacggggaagccttaaaggtgcattcggaagtcttcttacagtgacgtggctatcctctgatgcctgggcccatcccgtcagatgttgtcccctctgccagaacatggtaatgtctgtaccgcaagggcatatacactcctctttgtccaatggtgaccttctcacattcttgtctattgtagcagaacccatgcgtgacacctgttcagatcagatgggttccccactgtacagacgcctctgtccaaaaggtagtgtcttgacgtgggccttaatgtcatgtatttaatgtatttactctaatagtgggtccatctttgcacagaaaccctagcgggtcacgggtatgcccagacccgagtctaagcctatatatacccctttaactcttcatgtaaaggggatagaaaaacacttttgagaatactctttaagctttcttcttcactaagagaacctaaagaggaagatactatagcaagaactcaggttcttcaagctgtaaaaacttcatttgtaatacattcaaagcctcaaaggccaatacattgactcgtggactagggatctttaatgcccgaaccatgttaaaattccatctcagttatttaatcgttca

SEQ ID NO: 205148 - DNA, 1070 bp, Cannabis indica
ctcacaaggaacgaagacacatacaaagaagtcatacaatttcaagcttagatgcgtgcaatgtagcataatcacatgcccttattaccaataaaacttggtctattgtgccacttccacccaacaaaagagcaattggatgttgataggtgtacaagattaaaaacaatagtgatggttccatagaatggtacaaagcctgacttattgtgcaaggatatacccaacaagaaggacttgatttcttcaacacctttttccccgttgaaaaaatggttaccttgaaactattacttgccattttttccattaaatattggcacactctctagcttgatattaataatatcttttcaaatggagacttcaataaggaagtatatatggccttgccactagggctaactttgccatcttcttattctacagaaactaatttggtgtgcaagctgcataagttaatttatggtctcaaacagtcttctcgacaatggtacaagaaactcttgaaggctctcatttctgaaggcttcaagcaatctcagacagattacactatgttcacgaaagcaacatatgatactttcattgctctgcttgtctatgtcgatgacataatcatcaccgaacccatcatcaatattctacatcaattgcaagagtcacttaacaatagattcatgctcaaggcccttggaccccttaaatattttctcagctttgaaattgcaagagcacaagacaacctcttcttgtctcaacgacagtacacagtcaaacttctcaaaaatacaggttacataggcagttcaccaaccaaaactcctatggatccttgtctcaaacttgacgatgaacaaggataattacttgacaatccatcctcttatcgtcaattaattggccgactactttatttgactcttccaaaacctgatattacttatgttgtcaatagcctctgccaatttatgtccacgccttgaaccactcatcttcaggctttacatcatctcattcgctatctcaaaaggcacccggacaaagactgttatattcttcaaagtctt

SEQ ID NO: 205149 - DNA, 1004 bp, Cannabis indica
accggtatttccgttaatagtaataataaggatgacctctctctaatttccttctctacattacaacaaaagcaaagtttttatttttatttttatttttttaattttatatatataattatattaagccagttgtaattcccctgagcggatagttttttggcaatttttttttttttttaaaaaaaataataataataaatcaacttggggcttgtggaaatctttcaagttgtgttttgttttgttctgtttttttttttttaaattatttatatataaaaagtagagattggagtgtgggttttttttttttttttttagaaatgaaaaaagagaggaagagaaagatgaaaggaagaatatcaagaataggaagctatgcaatctcatctgccattagagaccaacaacaccttcaacaaccttgtattacatgtacaacttttaacatacttgctcctatctacaaacgtctcaatcatgaggtttgtcaattaaagtttcaatctttaccattttcttcaaatgggtttatgttgtttattcttaaaaaacacaaaaacatattaaaaatccaatcttttgtttttttgttttttcttaaccaggacccaagttgccgtgaaagtgattacagagcattttggatgactagaaatcaaagcattttagattggttgttatatgaaagatcttcaatcatttgtcttcaggtttaattatatgaaaataaaaatcctttctttatgtctaaatttatcattttttttttatgaaaaagtttctaacttttttgtttggtttattttattaggagttttgggttggaaatgaagaacttgttgatgtttatgagaagagacttggtgctgctggttacatgagtttcaaacttggccgtacaaacaatcgtggtgatggtatatatatatatatatatatatattagtttattgtatatatgtctctcttaattattactttccctttttcgtttttac

SEQ ID NO: 205150 - DNA, 1386 bp, Cannabis indica
gattgcaaaacaatcaatgcttaacacacatgtacaatgtaatcaaaacagaattaaagaaaaagtaaaacagagagaagtagaggtcaaacacaagaattttggtaaggttcaccctaaaacttgggctacatccttgtgagctacttctcgggaagatcagctcttttcactatgatgaaagtcttgaactagttacaataacggaggagtatttcttgtcacaattctttgacaggtaatctcaatgatctttcgtatgcactttgatttggcttctctctttcttgcagaaaccaaaattctaactctctttctttttctttctctctctaacattcttggagctagtctcactagcttgaagataaaggcttgctctaacttgatcaaaatgattaaaggtacttatatccttttgttgaagtcgattgagagagtaagtggcaattggagttagtattgccaacttggacgtttgttaagttggttgagatcaatctaaggtggaatcagttgagtctaggcttagtttcgagtgatcaagtgtggagaggattattgtaagttgttcgtgcttatgatggggctcaaaacaacatttccaccttgaactccatcaatagcaacttggtagagtagtcttcttctccttcttcttcttcttgagggtcttagctcaatatggtaatgaccaacctctattacctaatcctagaaaatccaaacagtgcttgaacttgactaggtttagaattttagtccctacatctgcaaggttctcttttgtgggaactttcttaatctaaacttcctcttgtgtcaccttatctctaatgaagtggtacttgatttccacatgcttggttttgtcgacagaattcttgcactaatggatacaattctgactatcaaagtacatagtgagaacttccttaagtaggtgtagctctttcattagacatttgatccaaatagcttcttttattgcctctttcactgaaacatacttagcttctgttgtagacaatgctacaataggttgtagttggactctccatgtaatgaacgcatgattgcaatatggattagtagggcaattaacattaattattttatagttatacggatatttttattatggtcccaattttagaaaataggcataagagttataatttctcgattctggaaattttattaaactctaagagtgttatttatgctaaatataaaatatgtaatttttatgatttgtgctcggcgatgatggaaaatgtgacaaatggaaattagagtcacatgggtaagtttaaaacctatttcttagtgggacaaacgtatgtgatattttgaatatcgggtgtaaagtcttttttttggcaa

SEQ ID NO: 205151 - DNA, 557 bp, Cannabis indica
tattgcaacattataaacattgttatatgcttacgaaatcattaatatacatgaattaacatcttacaagttcatttacagcatatgtatgttacaaaatttaaacacggtgtaaccaaaggggtgaaaaaaaagagagagaatttaagttattagttgatttaatatcattacgttacactaaaaaaaaaaatccaaaaaattgaacaaaaaataaacagcatggactaatggttgctttgttcattccaaacaagtatgaaagaaagaaaaaaaaaaacattatttttcatgaaaaatccttgagaattaattgaattgatctcatcctatctatattaattgttgagattttaagatatttattctttcttaataggtcacctaatcaggaaagtaagaaatgaatgaagggtttgtctttttctttttttcttctcttagttgtagtcatacataaagcagtcgtattagtatgaactacgaagcccccaccaataataatagcccaaataaggtattaagtcaaagtcaacaactaaatagttcccatttta

SEQ ID NO: 205152 - DNA, 544 bp, Cannabis indica
catgaaccctcatactcatggtgtataccaaggaaacccaggacgcagctattgtggtcaaagaggcggttgaggacaccaaggcaacagaggaggaagaggaaacatgccaatatgtcaattatgtggcagagctggccacactggtttgaagtgctatcacaagtttgatataacctttactggccctccccaaactcaaggatcatcctcctcatctgcctcccccctctgaatcaccacaagcactcttgtctaaaacgactgcaccatcagacacatctggagcatggttcttggacagtggggcaacacatcatatcacaaatgcatcaaaaaatctgaccacctcagcaaactattaaagcaaagctaaagttgtagttggtaatggccctaaccttcctataaataaaattggttgtacttcaattcccactccatttcctcaccagtccttagttttaaaaggcattctacaagttccgagtctaaccaaaaatttgcttagtatttctcagttcactaagcataacaatgtcac

SEQ ID NO: 205153 - DNA, 916 bp, Cannabis indica
ttggctggaatttgatttgagagttgatataaggaggtaatccgagattttgattcttttcattcctacaaaattttgtttttctaaaatgaatacttacattgcattgattaactgttctgttctacttcgtttataagactgtaatttcagtttatatttacactcatagagagtcataatatattttataatatagcagttgtagttgacaacaatgacaagtgaatgcattttcaattctttttttttttttttttttgttagtttagtttttacatcatgttcttatatgtgaagacccgtggattagtttttcttgtaacctatacagaatgaaatgaattatacattcagcattgtatgatttaaacgacaagctcgaaaattatgtaaaaccaaagctttgacaacaaagtttctttggtgcatttttacataatatttattaaataatcaagaattaaactcatagtttgagtgtggttctttaacttttaagatttgcatttatcatttgaatattaatcattaatagtctttaaaatttgtaatatttaaaaaatcaattacataccttttctttttactgtcaattacataccttgttatttggaaattggaatacaatcaacaattacacgcattattgatttgtgattgaaagacataaattttcaacactcacatgtgcggtaaatttactaagggcgcgtttggaaagtcgcttgggaattggaattggatgtaattagaggtaattacacagtttgacgtgtttgtgtggccacgtaattacatagtaactgtgtaattataggtaattgggaggcctcaattactctctccaattctcataccccccatgagaattgggtgtaattacactgtgtaattacataccaaaaactaaatt

SEQ ID NO: 205154 - DNA, 629 bp, Cannabis indica
ccgcaaatactattagcggcagaatagtctgctgctaataagtgggcaggaaaatttctgcactttcagttcgaatattattagtggcggaccccgctgctaataataataaataataaaaaataaaaatattaaatgactattagcgacgggacattggcggtggaccctaccgctaatagttctataaatacccccgaccctcttcccttatttttcccatttttggttctctcatcagttctcttccccattttcccccgaccctctcagccatttttcccccttttcccccacccaccaccaccacgcaccaccgaagtacccaccacacacccacccgaatatcaaccaccaaaaccccatttcaatgtaaatatttttttttatattttatatctctatagtttatgttattttaaaaaaaaaaattgggatgtatattgtttttaaattttaaatctatgtatataatgtgtattgatatatagatatataccttatttttatgtatatatattttttgtgtatatatatattttatttttctttttattttaatttcacatcgtttgttagagttattaaaattttagagatatatatattacttttaggatttacagatt

SEQ ID NO: 205155 - DNA, 1150 bp, Cannabis indica
gacatagtggtgtgcggcttctaggatactctcacagtcacattgatattgaaatatctataccaaatctccttgtttggcggttaactagtttatacagggagcctaatcgtagtctgcgattcaaaacatggcagctcatcaccactctctctactgaatctcagcttccatggtgcatcataggtgacattaataatattggcaatcaaattgagaaaaaaagaggcagaccttacccttcttctctaatcgaaggcttccaggaagtcctctgtaattgcaatctgtctgatatggaactccatggccatccttacacctgggaacgtggtaaaggaacaagcaattgggttgaaatctgtctcgacaaggctctcgtttcttcactctggctcaattgttttccctctgcaactctctcaaatggtgatttctcctcgtctgaccacacacccatcttcctcgagccttctcctgttgctctcactggttcggtgtatcaattccggtttgagaacgcttggacaagagagcctctttgtgctcaaattgttcaatcttgctcggaccagaatgctcatttgtctcttcatgacaaaatttctctctgcagcaagcaacttgatgactgggggagagtttaacttgcaactttaagaaaaggataagacaaagcaaagcaaaacttgcttctcttaaaggtaattctgatccttcttcaaatgttaacttcggttatgagcaaaataactattttgagattctagtccaacaagagttatattggaagcaacgatcaaagcaattttggcttcatagtggggataaaaattcaaaaaaaaaaatcatgcaatggccagcaactggaaacgccgcaacaatattcaatatcttcaaaatggctccagtatttggaatgcttggaacagtggtctcgaagaggtaatcgttgattattttaccaacatttattctgctggaaatgttaattggattcaggttgtgaatggtgttaattgctcggttaccactgaccaaaatactgaattgttgaagccggttactagtgatgaagttcggttggctctcttccaaatgcaccccgacaaggccccgcgacccgatggaatggggcctgatttttttc

SEQ ID NO: 205156 - DNA, 726 bp, Cannabis indica
ataagaactagtgcttgtagaattgaattattaacaacttcactcaccattcaaaaccatgtaccctttacactcaagtttctagtaacacgaatggctaaatatgaaataaaattttgaaggaaagaaataaagattaaaaatattaggaaatttctctcatatatatgttcgttttggtggattttttatctgtttcgacatttagaagaaatttttaatctaatttttattttcacaattgcatacgttgtaggtatttaagagaatttgtaaattttttagaaaatttagaatattttactgtgtcgaaaataacatttaaataattacttactatataaattttattttcagcatgataagctactctaaattttttgaaaatttataagtagtcctaaatagctacaacgcatgcaatcataaaaaaaaaaatcaataaaatgtcttagatgtcgaaacagatagggagtttaataaaacttaactttaggagcacattgtaaaattacccaaaagcttagaacattgctatgaggcactaagatgcttagtatctacgaggtgacatcttataagtagtaataattttttataatttttattaaaataaaataagcagaatctgatatttaattacactcgtaataatattacacttcccaataatcttaattccatgggtgtgtttaacatttcttataaagagcattgctattaggc

SEQ ID NO: 205157 - DNA, 1455 bp, Cannabis indica
tgattcctcatccttctctggactccatcatcctggtcaaagaacacagatattctccctgaattttttgtgtcattttgaacagaagtcacttcttttgtcacagtttaagatagaatgacaacagccctctgagcatcttcatcactttgcacgagtgacatggtccaagactcatcaaagaaccatacatcaacaagtattctctggcatgacataatcaacccaaacttccaaagatttttagtattaaagagagttcagacatctctctcccatgttgggatgtcaattaacatggctttagctctccttttcatgtcaaccagaggagcatgtcttttgaaagtgtcagctttttggaaggtgatgtgtctcgatggaagaacaagagtatagatatactcttaaaagtaaaggccagttactctttgtcatgttttttataaaaggtttgaattggtggaagtgataaaagccttaatccaggctggactcctctttaagtcatagagaaagtttatctcatgaggagtcgggacatgaccagttctaagacggtaaaagatgaagaaggtggacaaaatcctatagccattgggatttattttgtaggggcatacaccaaagaagtcagctatggatatgaaccatggatgcaagggtaagtaagaacctgcattcatatggaatcttgaccaggcactacaacaagtattttgggaacccttgggagcaccatgccaaggctttcaaacaacagtttttgggaggcaatagtcatctcaaatggtttgatcttgaagctctgtaagggtactagacacaagggacctaagcttaaaggctcaatatattggataatcactctcaatggcaactttgagaagcacagttgccatcacttttccaccagtagcattgtccaagttcttagacttatgcacttttagctcagctctaatgaactgagcaacatgggaatcatattcatcaagtaatcttctgcttctcctaaccctagccatctcaaattcaataacttaggctacttataactcaagaaaagttaaacttggttacaagaagtctaattagcctgaaggaattctttaagacaaaagagaggtgttttggatttttgggaagcttcggaaaattatatcaaggtgttttggagttaaggaacccttggagtaagattaaaaaggaagagaagaagaagaagaagaagtaaaaaaaaatcgatgtcaagaagagaagaaaaaaaaaaaaaggagtttttctaccttgtagtgaagaaggcttgaaggcttaatgaagataaaattccgaggtgctcactaactgctattggcgtgtagaatggaatgagaagagtgaaaaaattggtttttaactcacttattgtaattttctaaaaaaggaacgtcacgtactgcgactaaacataca

SEQ ID NO: 205158 - DNA, 608 bp, Cannabis indica
cgacagttacatcttctcttcctaggctttggacaaggccacgttgtaacagtgatgggcagattgtttatctcctctcgacatccttcctcatgccttgttgggaatttaaggtagaggtggtagatggatgttaccgccttcagatcgtatagggctagtcagcctatcatggcattgaaagctgaaagaatgtcaattacaatgaactacgccatcatagttctggtggttgaattttctcctatagaaaggggtaatctgatatacttgatgggtgtgatgccttggcaaaaaaatccatacatcacttgatgcagggtgccaaattaatgagttggagccccatcttttcatatcttgatttgaaaagaacgttgaaggaggctccattgcccaccatgtatctttctaagtcatattcctgatttgtgcagtaataaccagggggtcattgtgtgagaaactaacttggacaggatctccttctgagaaaaagctcatgggctctccaagctttggttccacagccaacccaatctcactagcataagagggccaagggaaatgggtaggttcaggatatttgtggggttgtcttgacttac

SEQ ID NO: 205159 - DNA, 1060 bp, Cannabis indica
gggcgagacatatataattcctcatggagatctccattgtggaaagcattataaatatcgagttgaagtgtgtgctattatttaatggtacagatggtaagtaacatcttgaaggtgaccattttggccagggggagaaggttttaaaaaatgcaagtccttcttgttgtgtatatccttgagctacaaggcatgccttgtatctttcaattgaaccattactattaagtttgattttataaacccaacagcagcaaatggcatgtttatttggaaggagcttaacaatggtccatgtgtgattgttgagaagagcatatagctctgttttcattgcctagtttcacactttattttgtacaacttgattgtaatgttttggttcattatgagtttggactagacaaataaaacttttgtgagatgtggacaagttagtgtaggacatgaatttatgaagaagataaggtgtagatcgaagattgatcttgaatagtagaatgacatccatagtctcgaagataacttggtgatttataaattcttttagttctttttagtgtaactagatattatcatcatctggtagttaatcagtttgctctgtaggtatagcaacaatgtcttataaattaggcggagaagtggattctggtatgtcatctactgcaatatcatcagaaataagggcatgaattgtactgttggtagggctgatcatcggtcgatttggtcggtttttttttatatagaaatccagaattcagttttcggtctggattggtgcaatctgaaaactgaccgaccaatccataacctatctcaaaaccgaccgttttgaacctcagtttggtcggttcaaactgcccaaactgaacttcttctttttttaatatgatccatattccataaaaacactatttagtattttacaactacaaacatataaattaattgttcaaaaactaattatcttattcttttaactttaatattaataaaataataatatattattatgatatatcattagtaattacaatacataaagtaaaaaaaa

SEQ ID NO: 205160 - DNA, 989 bp, Cannabis indica
tcatcatagaatttttgttttatttaattgaatcaactgtatcatgatattcgctttcatttaactttagggtttttttaattttcgtccaggttgaattttatctttaattctatcgaataattttttgatttttattttatctggaaagcgtgtatcgtattttgaattttatttgtgtatatataaataaaattgaacgaactgtatcagtgatcttgggtttctatttaattttaggttttttaatttaccgaataatgtttggataatgatacttctttttcatttgtcaaattggtcgtatctttgaattttcttttgtgtttatatatttgaaggaactgtatcaattaattatatttggtttcatacaattttatggttttttgttacgcaagattgttttttattttcttttaaattctagtaaaagagaacttttcttttctctgaaattattattgtctttttttttttgtaaaaattctgatagattttgttttaattctgtaattttagatgcaaatcttcgtgaaaaccctaaccggtaagaccatcactctcgaggtcgagagttctgataccatagacaatgtcaaggctaagatccaagacaaggaggggattcccccagatcagcagaggctgattttcgctggaaagcagctcgaggacggtcgcaccctcgctgactacaacatccaaaaggagtcgacccttcatctggtgctccgtctacgaggcggtatgcaaatcttcgttaaaaccctcacaggaaagactattactttagaggtcgagagctcggacaccattgacaatgttaaagctaaaattcaagataaggagggcattcccccagaccagcagaggttgattttcgctggtaaagcaacttgaggatggccggactctagctgactactaacatactaaaaggagtccacccttcatttggttctccgtcttcgtggcggtatgcaaat

SEQ ID NO: 205161 - DNA, 882 bp, Cannabis indica
gcctaaggtggagcgcctgccattgggatctgaagctcaatcagcatcacaaaaagcaacaagatcattcgaattgtgaatgtgtaagccatagtctattgtgccaccgaggtatcgaagaatccttttaacagcttgccagtgtggttgtaaaggggttttcatgaactaacaaaccttgttaacactgaaaagcatgctcaggtcgagtgattaattaatatcgcaaggctcccacaatcgacctgtaaagttaaggattgtcaaacggttcatggccatgggcagacagctttaaaccactcaccatgggagttggaagaggtttaacatcctccatttgagctttgatgaggagatctctgatgtactttgactgagatagatgaagcctttgtggagtagactgaacttcaatgccaagaaagtatcttaaatttccaagatccttgagataaaattgagaattcagtgtgttgacaatgttggcattgaacttagtcacttcccgtgatgactatatcatctacatagactaagacaagtgtagtagatgaagatgtgtgtagaataaacagagatctatcagatttagatgaagagaatccaagtacaattgtaacgcccgtaattgaaaacttggtaaaccgaaatcaatcttattatattatatttatatagtttataggtcgtgatcccgaacgtaaaacacagttgaaaatacatttactaatataaagaatcataataataatttatttttttacaaaatagaaggcagctcaaaatgctataagaccgaaaccctccaagttgcactgccgcgatatatacagtccttgccaagctctaactcaccactcctctagcttagctttttcc

SEQ ID NO: 205162 - DNA, 1330 bp, Cannabis indica
ctccaagttgtatgatataaaatgaaaagaaggtgggtaataagattaggaaataatagataaattttaagtactattttataataaaattatcttattacagatttttgaaagtagtgtgattcatttccttttccaattatgttcaacaatgggcagattcgactgttttgccaattagaaggggctttttttttgtttgcctacttctaagtactagctatgtcctaccaaacagttaaactatcaagaaatatcattccctctccaaatctacttaaaatatatatttttggtgaaaaaaatttattaagtattaatttgatttatttttatccaatgtagtttcaatgaaattcactgaactttactagctagttatttccaaaaaaaaaaaaaaaactttaatcactagttatttactatctgctacacttgtgttgtataaaccttttttgtaatgagcaataggtatctataactgcactaaatttacaattataactattactgttcattgaaagttatgtgacaaacttgattggattattatttttttgcttaatactcttttgtattgaatactctctttttttctcctagtatcaactcattattttactctgttttttttttttttttttttttttagaaaagtttactctgtatttgaaacttcttctggtaatcacaaacattcttactcatcgttaagcgtttagactgaatttggaaatattgtaaagtatatatacttcaaattacaaaacaatgataatattattgtatatactgcattctaactttatgttgtatagtgggtacaaataccataactcatggtaaaaaatatagtatgacagaacagaagaggcattttatcggtgctccaatcctatactaggaatatatatttatttacatatgtttgctttatttaataagaaacagatgaactacatctaaagctatagttgatcacttcttgaaacagtgacaccaaataaccctggtgacaccaaacctgtccaacccggcccatgtttaccaaacatgaagcccagaagaaaaaagggcgcaagcaaggccttctggtaacttcaaagtcaaagttacagttgtaaggtaaagattattttaaaggttgtgttttgtaaaaattattggttggattatctattttattgaattataaattggacttattttttaaaatagtactttcagttgatttttattcaaataaaaattaataataattcgatttaaaaaaactagattatattttttactatttgttctatgataggaattaatcttcaagttatta

SEQ ID NO: 205163 - DNA, 821 bp, Cannabis indica
aattttgatgtaaacaaagatggatctagactttaagataaggaaattgtaggtactttttttatatgataagacatgttgaaaattgatacaaaaacccgtaattttttaccattaattataattatttaaagtaaaaaaataacaagaaaagtaaactttaaatattaaaaatattattattgaaatttaaactctaaaataacttaattattataccattaacactatatttataaatcatatttaattaccaatatatatttaaactaattaaaatacatattatatattttttaagaaaacaactgaagtctctcccttggtccacccttatacatgtagagataataggtagtacgtagtgcttcttcagccacataatattgtagcagctaataatatcctaatcttatcacactcaatattcatatatactatgacatttttttcccttttaaggtgtgcatcaattatcaattatatattatatatcacaccaaataccaattataacaataaaaacaattcccattatagaaaactatagagaaataacatggaaaagattattgttccagatttggtaattaaatcatcatcaggagaagaagtgaagattccggtaatagggttcggaacggcggtgtttccaccaatggaattggagacgaaggaagccataattgaagccatgaagcttggatacagacattttgacacagcttctgtgtacctaattgaacatgttttgggccaagccatctctgaggccatctctatgggcctcatccaatccagggcccaactcttcatcacat

SEQ ID NO: 205164 - DNA, 779 bp, Cannabis indica
tgttcaaatttaaaatcactgcaggtttcatttatgattctatttattgttagttttggttgttatatttgtattttattctatttaagtaaattcaaattcttgatctcaggttctttgattattgaaggtttgtttggaatactggccttttcctttttggtttcaagaagcaaatttatgatgatatgcctaatcgaagttatattaaaatggtataatttgtaaaagcaaagagttcctttattatattaaaatgaaacaacaaaacacatgttatctcttttcttagtagtgtcatcgtagtgacatgttttacttttactaaaccttaattcttaattaagcattattttttttaaacaaatccaagacaagaacaaagtacagtttgtaattatattaataattaatgcttcttgtgtccacaaatccaacattaaagtacatctatattaacttttttctaatctattcttagactagctatcaagaaaaaataaaataaaaaacgaagtgaaagaaagtatgtggcaaaattataactaatagtgttgaatcaaattaacgaaactttaaacaaagcaaggatgagaataacaaatcacaaataatattcggagaaaacatatggaaaattagaaataaaaacataacaagaaatgataaaatcaacaacaagatatatactgatttaagtctaatagatcgatgtgatctatgactctactctcgttctagaatgtaaagtaaaacgaatagagtgaaagaattgaatt

SEQ ID NO: 205165 - DNA, 690 bp, Cannabis indica
tcacaaatgatttgataatattattaatgtaattaaaaatattccttgtttttatgtataaaaaatattgttttaattttgtttctacaaagaaaatatgttatttttctcaacccatttaaaaatctattttataaaaacaggactcaaatctgaaactactaaaacttgtttttttcttatatataaaaattattattattatattaaaagacatattcattccacatttaaatatatatttgattataatgtattcatttcaccatgacaccatcttgtactcgaattcataacttttacattgatataacatataaaacagagaacatatacacatttccattattttattattgtaagaacaataagtagaaattgtataaatttgaggagattgttggcttatatattaaccaatttgaggagtcatagttacaattccattttcattaacacgaacacgaacacgattacaacgaaattgggtgtcgcctttagcattctccttcacaacaacggaacggcattaactgtaggattttctctttcaatagtctcctcagcaacctcaccttccactcctaccaactcgggccatgatgtctttcctgtaaacatataaaattgttatatttgttagagctttttttttaatcaaaaataaaaaaaataaaaactttaagatgg

SEQ ID NO: 205166 - DNA, 866 bp, Cannabis indica
aattactattttatcaattacactacttagtaattacatagtaacgaacatgttctatattttaaaatataaagtgtgtgtatattacatatatattcgtaatgtcttttctgcaaaataattaataactacacaacaaaatattattttttaatagttatcatttagaatataaaatttttagtaattacaaacacccacttttcatggttaaacaaaaatgttaaattatataattaccctctaattacatctaaatttaattccaccataactttacaaacgcgtccttaaaaagttattttatttagagtttatacaatccttatccttccattaattgttgtgtcattcattataaggtattattttctcaactgagaaaactagaaagactagtcgaagactctatttttgaaaaggaatggttacttgaattattgagggaacttgtagaaaccacattcattcatatttcaaccaaaagagatatgtgggctatttctgaggagacttcaactcaagaaaattcagttaattacaaacaggtttattttatattgtaatgtagttatgcatttttctttatgcttcttattctgtactcccatattaatgttcattcactcttctcccagtttgttatggactttgcatttttagctgagatttcgaaacttggaggatatttctcgagcgaaccttcggctcttgcagatctcgtgaaatcaacttatgtttccgtaggcttgaatcccgaaaggtaacaccgatctcccttccagacacaactaatcattcgaaaactgatacatcgttgttgtctcctaaactatgctatgactcttacagaatttgagttgtta

SEQ ID NO: 205167 - DNA, 1766 bp, Cannabis indica
atgttcaagaagaaggaaggagtggactttatatgtgataggattgtccaatgttattggagaactatgccaccattggaagatgaattaaaacccaaaactttcgtttattgttattcaaactcataatggattccctttaaaaaaaaacccatattctactgaattgtaaattcttcttctcccaaaaccatattcttcccaaaaggacaagggcttcgagacagccagcgacagcgagtttgggaatagcgatgacgatgacaatctcactgtctgagaaaatggccggccggtacggattctcgtcatcgtctttttctcaggcgaccatgaaggtcaccaccactccatctccggatctcgctctcaccaatctcgcttacgtctatccctctgatctccaaaacttcgctgtccctagctccaagcttttcctcgcattgatcggaaactcattcgttctttctctttgatattctttattaactcaattatcatcaatttaatccttttgtgttcttcattgttctgattcttgcatttcgaactttacatttcctaatttcttgctatgatgataagaaaacatgtgtttattcaaattatattgttattggatttttcttaactaagaagatactcctcatccaagcatacacaatggagaaatcgctctaaatgcaatccaacttcggcatgcgaaagtttctactggcgatgttgtactggtgatcaggttatcttcacattactattgaaattttgatattatgcattggactatatatgtataaatatgtaattatggctgtattaaatcggtgtgttgtgtgtgtagatttattccacctgatgagtctaacctggcattgctcactttagagttagagtttgtgaaaaagggtactaaaagtgaacaggtacgctgtgttgtgctgtgctgtgcttattgagttttacatattcaattggatctaaataagcatcgtgaccatgagtttctggttatgtgtttttaggttgatgctgttctctcggccaatcatcttagaaagaggtttatttaccaggtagatttttttaccactttattttattattgatcaaattgtattttagactctggagtgtcatgatcagatgtttttgaactggaattatgattttgatcaatgccaactgtttagtttagagtatagtgtcttgttgaatgctgaactttgatgattaatcaaaatggaatggctttttgtgctatttttggattgctttaaaatttgttataataatatatccattttctctcaattaattggtcatatttttacccacacatttcataatcatgtttttggtttgtgtttattttatttttttgtagtctttcaattatttttgttgatcatattaaatatgtccttagagtgaagaaaatggcatggagatgacaaatttctcagaatttgaaggagttttttgaaagaccaactagacaaatacctaactaaattggagagagtatagctgatggccaacaagttgtttaactaaaatatggccaacaactttaatggtgtaaggtttgtaattcttcagttgatgtggaaaggcatgctattgactttatggaggctgctaaaaagcttcaattccatttaattggcctgcaacgtgaagatgaaccaagcagggctgaaacactgagaaaggttattgcatgattttttgaaagttaaaacggagcttatcaacaaacatgagaa

SEQ ID NO: 205168 - DNA, 1445 bp, Cannabis indica
gaaagtgattttttttttgtttttaaaattttgattctcaattaaaaaaattaaaaaataaaaacagttttatagaacatgtttttgaaaaatatttttacgtttttcaattttaaaaacaaaaaattagaataaaaaagttgaaagttggattaatcaatgataagttattatcagaattaattaaaaaagaagaagttgcatatattatttaattattacctggtctgcataacattggttagtaatttcgttgatttctggtttattaaagtactcgaattccttagcggcacgtgcttcctcaacctttttatggttagtcccaaccatcgatctggaaccagagtccactcttactctatatcccactactcatccaaacaaaataaacccatgtaataagttctaagtatatataaacaacacatgcttaatcacatacataataaaatatgaaatataaatttgaatatcattccttgtaccttgttttaacaattgaatataactagacaatatctcttaaaaaattaatttctatacatcaacctatgccaccacaatttcaataatatttatattagactggtgctaattcaacttaaagctacaaaagtcaaaaacataatatgtcataaattacatatgatagtagatctgatcaaatcgagacatatgattatgaatgataaaaaaaatagcatatcttaacgtgccctgcatttataatgggttagcgatttttaatattatttatttaatcaataataaattgtaccaataacatagggtaccctatcttggtgctcggcataattgccccttaatatttctcataaaaaaagttgtgtacataattttatttatttgtttatataaaatgttttagattaagaataaaaaaaatattttggtgaactttgtcattaaattaacatgccccttgtacttatatgaatattaaatatacctattaaactttagagagttatcaaaaattagtaccatgttacattcggtcaattttcttaattatcttgctgatggagcataatattatctgatttagtttcctatcctaagcaaattaatataaaaataaacttttctatgttttcactttttatcttttgtaatcaatttagtttacaaaaataatttttacgttaaaataaggttttcattataaatttgtttgaaattaattttattgtatttttcattaagcttttttaaaattaatttttttttttaaatttttcaacgacataagcagttacaaaaatttaacagaagaaatattaacttttactaattgataaagtcagaaatatatttttaacatacactaatactacaaggggcacaattatataaatgataaagttcatagaaaaaattaattgttttattttttaacaacgctaaaattacagaggaca

SEQ ID NO: 205169 - DNA, 839 bp, Cannabis indica
gtgttatgtaccactaatgcttaataaaaaatgcctcagagattttgatctcccaaagttcattcatttatgaactattgttcattattgcccagcctaacttgagttgtgatgaaatatattttcctataaacataaatacaaggatattatatatatatatatatataactataattataactacctttacaaaatgagatgaaaaaagaatttgagagtttagttgtaactcattacttgtgaactcaatcaagctccatatcgatgtagtatagtgagtcaaaagtcacaaaataaggttggatccctcaaacgagagacaaaataataatctaatattattggtgtttgtattgtatatcactttctaactaataatatgagactatatataattatttttgttgttgcatgggactaaatttgcaatatattaagatatgagaaagtgtcctcgataactccaaagtatttgagttgtcacttacatgcatgacatgttacatttacttacaataatatattatgccattatgtccacaagtttgcttgcatgcctctttaagaattcttgttgttttattttaaatggagagcagtaaagcctttcactttggtttgttttatgaagtttattcatataaaaaaaaacaacaaaaattgaataaacttctatataagccactacagttaacttagtggcgagggagggatgagaaaaagggagacgtcatgggttcgaacccaagactttaagctattaagctaatatatgattgtaaaataccattaggctacactcaaaaaaaaaaaaaaaaaaaaaaaaaaactttaaa

SEQ ID NO: 205170 - DNA, 914 bp, Cannabis indica
aagggtaaggagatgctccagttttactaggagcaagtgcttctcaaggtaaactattagctagtggggggaggacaagtccgcggagctgcttatgagaagaatattgaaggagaccactcgagtaagtactttttctttggtattttcctcatgcttttacctctgcaaattttaacttttcttctttgtgcagctcaacttgaagatggcttaaacttactcttgagccacgtcctcagccttgaaagccacaacgaccaccaccaacttgaaaaaggaggtggaggacaccaagaaggagggtgaggagaagagtttgaagctgggcgaggttcataagaatcttttggcttccaataaatgtgttgaggaactgcaacaagagattaaggatatgtcatccaccactcagctcgaagcataaaatgaggatttgatcaaagatcttaatggtctgaaggatgagagggatagccttgaaacctttctttccaacttaactgaggagaagaaggttttcgaggagaatctcagctgtcggtaggcggagcatgacgtacttcagaaggagggggacaacttggagacgaccaccctggatgttttctatgagtttttgaagggaaagccagaagcaaaatttgattacctcaaaaaaacaaagaggcatatcttagtttttgcgaggcccaaagagaaaaataggaatctgaggcagccaaccccgatgctctgaccagctaaagcactaacacccagccattgaggataccgcagtcctgtacaaagagccaagcactctagccgtgtgaagtttttccttttcttttttttttaattttagttcggcccatgagcctttttccataccatatggccaaccaagtgacttttaaacttggtaatacttc

SEQ ID NO: 205171 - DNA, 844 bp, Cannabis indica
caatctcagctcctatccagggttctaactcatcttccacccttagtgggtttctttctttgttttgttgaaacatcaagacagtttgttggacggctacattctaacatttcctagcctctcattgattatcccagacagtccctactcctgtcgcatgggtagggaacttgagacataaatgtcaaattgaagttatcgtttcaaaatctaccaaggccagacgtcccattatagcattgtaagttgatggacaatccaccacaacgaatgtgctttgaggggagtttgggcatagagtcttcgagagtcgtatctttcccatggggatgagggaatttctgttgaatccagttagttgggaacaactcgaagacaaatcttggtccatgaggccaatggcgaggaaggcctctttgaatagaatgttcaccaaacttccattgtctaccaagatttgagctactatcttgttggcaatatgagtctcaatcactaacagataatgatgtgggaagagcattgtctgagcatctttttctgtgaatgttataggctgatccatgagacgaggcctttgtgccggtagctagttcacttcccaaacttcttcatcatgatcaagggccctgacatagcgtttcaacttattgcaagttgagccccgtatatggggtcttccgcagatcgtagtactctcccatttggcctaggtggctgtttgggtggtaccccttgatttggtgggagtgctcccagaggagccaacacatctagagcttgagctctatgaggtgcttgagctctaaatttcccctctctcatatgtggcaaacgaggggca

SEQ ID NO: 205172 - DNA, 656 bp, Cannabis indica
gggactactgactgtcacacttccaccagtgtaatagtggttttggtgtcatatcaccgtggtactttttaacatttcacttattataattattgaattaataatcttacaattaaaattaattaatttgatgacttatgcaaagttgtccggttcttgttcaatttctagggtaattgaactcattgagttacttcatcaaaattaatttcattaatcatgcttatacttagtgatggaagcaagaagaaagtttcatccctctttttctttttattaactttcaaaagtaattctttacataaagttgatgatcatcatcatcatcatagtgggcaactattatttatttatttattttataattataataataataataaaaagctaacataactttaggtaatcttcatgcacaccttaaaaaaaaaaaaaaaaaaaactccttaagcaacaattagataaatataaatttatgagtatatttctaaaatgtattgtaaacattgttcaataattatcaaacacattttatgcaaaaacaaaacatatacatattcatgtgatatcatttgtcatgtacattacaataaacatataaatagaaatttagaatgtctttatataattatataaatatactattataagctata

SEQ ID NO: 205173 - DNA, 1211 bp, Cannabis indica
ggatgccatcaggttgcgagaggaaggctaagagagttctcttgtttcctctgctagcgtgctgttttttatgtctttatcttgcagcttacaaaaaaaaaaaaaaaaaaaaaaaaaaaaaaaaaaaaaaaccaatagtactagtatttaaagaaaatcactacccattatttttggtataaatatacatgaataattagattacaagttaggttacttggtgccactttgttacacgtttgatagatcgctttcatatattatctttatatgtatatatttatataatatgattgtatgaagtcatcaaacgaatgtcaaattgtataaacacaaaagctatccataatatattatagtgtcaatattgtcgacaattaaaatactccaaatccaaaaacttacgtcaatttaacgtgcttcgtattattgctcttgaaatgactaaagatactaaaatcatttaaatattcttatgtatatacggagaaattataatgaatgtagtcaaacaaagaatcgtaatttgctcttaaattttaaaatatatatttcctgaaataacaacaaaaaatctgtaaaatacaaaacccaccagattatgatgatgacccccaaaggcggccagtttccttatttcataatacaaatggttcaatcgttttatacaaaagccaaaagtgagtacgtactttgatcgcgaccagatgaggagacttaattattatataagtattatgacaattaattaagtaattaatattatccggaacctcctgtagtagacataatatctagtggtactgctgaagaagtagtactagagggcatttcgaacactttcccaaaagggttctcgttaatgtagttgcctggtggatcatactcgcagtagacaagaacgccgccattgtgacacttcatccgtgcgcagcccacacggaggctgctacgccacaccacctgcgtgtagtgtccacacatctcaccatagaggcactggttggtcatggggtcgtagaactggttctctctcgcccaagactcaacggcatcggtcgctgtccagtgatcctgcccaaccccagaactatgttctcccccgtagggaccaaaaagagtgcatcatcttgcattcatccagctgcttcgtggcccagcgtcgagcatagcgtgccaggttcctgtcccacgtagcggtggctcgttca

SEQ ID NO: 205174 - DNA, 984 bp, Cannabis indica
tctttagctttccataacaaagtaatacctccacttctaccatccacatccacagccatcattccctcaaagcccaacataacccgcactctctccatctgcgaacgactagaaagagtctcacagagaaacacaatactctgtatcttttggatcacaagatccttaaggaattgtaaagcccatgggttctcaagcccgtggcaattccaagataaaattttcataatgaacggtgggcctggatatcggtactcaccaaatccaaattttttgacccattgttacatcatccctaatgtggagcccatcatcaccttccaaatcagtccttcttcttttcgaataaaccaccaacaaacaagcctcctcattgatattattatttaatagatcttgatttttatatgttagcattttttcctccatagaaataggaatcccattagcttcctttgatctcgctatctctctaccagattgacccgaaattctctccaccattataattttaatttaaaattattacacttaattatttagtttttttatttaaacatttaaaaattaaaaaagtgaaataggttgaatgtattttctaaaaaaatggctaaactcctctatcttttttataaggagtcatttactcaaaaaatcaaaccagagtaaagaaataaagtcaagctcccctagaaaaaagaagcaacctcaaactcaaatagaaaaactcatacttagttcttctagttataaaaaaaataatttaatattatttaaaaataataaattatttaaaaatttattatacaagaagagaattttaatttgtgtaaaaagaagtctaatttttgtaaaaaaataaataaataaagtttcattgtaaatattataattaaatgatttaactgttataataattatagtaaggatttatataaaaaattatttataattattaattgctaaaagaggtcttgcaagtat

SEQ ID NO: 205175 - DNA, 1005 bp, Cannabis indica
ttatattttaacacttttatattttaattaaagtactaaaaattatattaatttttttattgtattataaattgaataaataggatttgtccaatctaactataatccttataaaattttacccctaaatttttctatgttacaagagttcctctaaattataaaaatcatttcaaatatcctccttcaatacattttgctccttcatttaagtaatttattaatgtagcactaatataacgttaatttaacccaattcaagaattcaaacaaaaaataaatatttcaatagcaatctaataataaattataaaaatatgtatgtgcattcttagagctaattttgtatgtttaaattttatatactagattttgagaagtttaaagttgttaaatagacccttgtactggaactatacatataattcattgtcacataagcaaattattttataaaatgagtagcaagtaactaaaatgagatatctgcaatgatttgtatatttctgggagaatttttgaaaaaaaaaaaagaaacatttttacacctaatgtaaatatgttatccattgttaaaactattaccgtcattcaattcttaatatatgatctacaaatgagttaggtcaaaattactgttttaccccttagtgtattttatccttaaaataattagctctttgtaaatgatatttctgtaaactttaattatagaaatgagtgttcaatcatttaactccatgaaccaaactctaaataaattattgtttcacttcttttattaaaagttataaatttttctatctatgattaatacagccactcaattatgctaccaagtccctagtagaaagtatgagctagaccgtaaagaaagctattaacgaacaaattaaatgactcagataacataatcagttagagtactaaccactcataattgatatcgaattaacctatggtcaactatatgagcgactagagtagataataatagtacattta

SEQ ID NO: 205176 - DNA, 764 bp, Cannabis indica
agaaaattgatgcaaggaagaaaagtttaaagagattataaagtgtttcatgagatgtgtttgtggcaatttgttgctcatttgaaggggcaaaaaaattgactgttgaaagagaggggaggagataaaaatgtatgatatgctgctgctgtaagggacgtttcttggggacaattatggatcaaagaatttaccaacttctttctcagtgtgctgaaacatttatttctttttgccccctaataagaaacttggaaagtcttttgtgctgaaatttgcctcttaatgtcttaattatgtggtagtttgagcaaaaaatgtagtcctagtttaggttatattaagtactctgaataaaaaaataagtcggatgagtattctcattaggttgctatttgagagagaaatgaatatgggaacaaaatttgaagtgagtacaaggaaaaaaggaaaatggaaaaaaacaaaaagagaggacaaaaagtggaaaagagcacctttttcaatgttaagtattaacgggcaaaagaaaaggtaagaactgaactttctaccttgaacaaatgataatcaggggcacatttttatcatttcaaatgctacgttgttaaaaagaaaaataataataaatacattttttggactttggtgagttataattacattcgcatttttaaaaacaaaaaaataaatctacattagaatttagaaagaatataatggatataatatttatatattcataatatatttgaaaaaaaaaa

SEQ ID NO: 205177 - DNA, 966 bp, Cannabis indica
aatggcttctagtagcagatctctagaggaagtagaagagagatatgcatgcattgatattgaaggggaagaggagggagtggagattgatgctcttgattcggaggacggggtgatctttgacgatcggttctgtctagtaggcagattcttgaacgctcgatcggtggattttgatgctatgcgacatactctggcggggttgtggaagcctggaaaaggattgtttgtgaaggaattgggaccaaatctctatctttttcagttctatcatgaaatcgatattaaacgtgtcatcaatggcagcccgtggacgttcaatcgtctattatttttgtttggaagagtgccgcaaggaggagatccgaaatctgttcctttgaatagattggatatgtgggtgcaaattcatggcttaacttcagcgttcatgacggagagggtggttaaagaggcggcgaaagtaatcggagagtttgtcgagtccgatccgaagaacagtaacggactatggcgtgattttttgcgtgttcgggtgagagtcaatatcgatcaaccgatcaaaaggcgaatgaaacttaaaaaggttggtggggattggttttgggtgccatttaaatatgaatttcttccaagcttttgctacatctgtggaatcattggccacacagaaaacttctgccataaactattcgatacgccggaggaggctattgtcaagccgtatggggaatggctgagggctcaaactcgtcggaaaagctatttacttcattctcaatatcttcggactggtacggaggtggacgaccaaacatttgggccaagggaaccggcggctactgtcaacgccgatgaagaccctgtgccagctacaggtacgacgagcagaggtaaagaaaagttacctgttttagctgatggagggaatcatggtcatacaaaatctcaaccattttctcctaa

SEQ ID NO: 205178 - DNA, 874 bp, Cannabis indica
actgaaactaataaatcctaatatccccccctcaagatgtactgtatatgtcatatacagacattttgcgaacatgagaagagagaatggtggatggtaggggtttggtgaaagtgtctgcaagttggagagtggtgttgacagggatgagtcgaattgcagaagctttaatcttttctcggatgaaatggaaatccaattcgatgtgttttgttcgttcgtggaaagttggattgttggcgatgtgtatggcggactgattgtcgcaatatatgaaggcaggaacaggttgtggaatgagtaagtcgttgagaaggtactgaatccatgtgacttcactactggcagcaacaagggcacggtattctgcctctgctgagctacgagatatggtggtttgcttctttgttttccaggaaatcaagcaatcaccaaggaatatgcaaaagccggaggtggaacgtcttgtggtggggcaggaagcccaatcggagtcagagaaacctctaagatgcaaggaagatgtagaactgtagagtaatccttggccaggacaacctttgaggtatcgaagaaggtggtgtatagcttgcatatgaggggtgcgaggtgatgacatgaattgactcaagatgttgacagcaaaggtgatgtcgggtcttgataatgtgagatataggaggcgtccaacaagttggcgataggctgaagggtcctctagaggagttccttgagtgtcatcaagtttattcttggatccatgggagttttagatggcttactgccagtaaaacccgtgtctgtgagaagttgtaaagtatacttgcattgagagagaaaaatcccttcagatgaccgagcaatttcaaaatcc

SEQ ID NO: 205179 - DNA, 1361 bp, Cannabis indica
aataaaatgaaaggtgactaactccaacaattgctaactaagctaacactattttttatctcgagttgtcttccctaagcttgaggcgtcatcttgattgcagcaatttgtgaataaccctacataatgtgccttgaaaaataacacaaaatctaaacactaaataaataaaaatatcattttattcaaaataacttaaaaaatatggaaatatcaaaactaacttagattaggaaaaaataattgtataaattattaataattttaatttctccactttatcaaaagaaagaaaaaaaagttcatgttcaacataatttcctctattaccaaactatgttttaatttaaacgcaactttgatcaggtgcatgtaagtgtgtgacacctaaggactctaaagtaagtgtgcttaatttggagtaatattagaatgggtgactttctagaaaggaaatgtgggagtgaggacaaaacacactgaaaacacttctgttagtttgcaagtcatcattccataatgcatctagagtgacatactcatgtataagaatcatgagtccgtgggaggaggcccaatggaggcttgtggtgggagcgtttcaaaatagtatcagaaccttgacccagtcggaagtgtggtcgacgagaatgtcgcaccctgtaagagtgtgattgtgacagtcagtaatttcatgatccataaagaaaaataacaggtaatatgtgcaatcccacattgcttgaggaaggtcaagtaagatgattcttagactgtatgagactacatagttgaagcgggtttaaatagattgataggtactaccgtactatctctatatcaaggtgcatcttgtttttgggagtccatcacttttaagagatcctaagttaaggtgtttgaccttgaataatcttaggatgggtgatctctaggaaagttttctcaaaaagtgtacgagtgaggacaaagcacgctggagaaactcgtgttagtttgtagggctagtcgtcattccaagaagcatacagagtgacgtacctgtgtataagagtcataagtctgcggggaaacccaataaaggctcaaagcaaagacattacacttaatgtgaaggaaattgtggtttagttcagtcaataggtcctcgtcctagaacccgccttcgtcgagatggtgcaaggtgaactcagacgctgctctgatcagctagctagtagagtttgtgggctgggcatggtggcccgagatgcgtgtgggaccgttattgcctctactgcatagaactaagttgggcattatgattccaaaattgtgattgaggctttgactctttgtgcaatgtagaattattgaattat

SEQ ID NO: 205180 - DNA, 660 bp, Cannabis indica
aggagaaatgaaaacttaaactatacattgttccattaccatcgggacatggggattcaactactataaattttgtgtctctcaatttttttacttacattcattattcttctcaccaatctagcgagctggtgttggctacttttgagtgttaataaagtgaataatgagtacttgtatctttaggaagatctcacctatttctaaaactatgaaattattgaaaaattatcttttttttttttaattttttgaaaactcctagatcatagagaatcgcagttggaggctaaaaatgaaggtcagatgctaaaaagtgatgccaaactggtggtcatacatgaacatgcatagtatatgttagaaagtcagtttgacacctttgtcatactgactttgggggggggggcggaatatttacccaaaaatttgacccgactgacatgggcgaacaattttgaaatgttgaaagaaggaagcaaccttgggcccgtaaaaatcgggacgtaatggacaaattgtaggtcaatttgtagcatttgaaactgtgtagctgctctagttgacagtagtcagcgcccaacgtaggcactatgattatataaaagaacgtttctagctgcctatcctttgacaaaagttcaagtgaaatgaatccta

SEQ ID NO: 205181 - DNA, 1258 bp, Cannabis indica
cgcaacaagcacacctagtgttcgttttcatcctctttaaattattcagggtgtttcattagaattttttcatccagatgtccataaaaaggcagtcttgacatctaattgttctaggtcttaacacgctaaaagtgccaattaaattctaatcgatttgtgcttaacaacaagagaaaatacctcataataatcaactccttcagtctgagagaatccctttgcaaccaacctttctttatactgtacctcttgtacacctgaaataccttcttttcatctgtacacccatttacatctaatgaatttaccgtctttcaacatcgatattacataccatgtctggttcttcttcggtgaatgcatctctccccacatcgctccattccatttcttccagtctttgttgtccgtggcttgtgcataactggtaggctcttcatgcacaatctaattagcaacataaaatgtaaatgcgattaaatcagcatgtttgcacctatttgaataatcacttccatgatctacaggtgtttcagtcaccactcttgctggaggcttcaccttaagttcagttcctggagcttcgatttcatctcgaccagtattagcttgacttccagtaaatttgttgataaatcctataacaaatttattaaaagtcacatccctactaattatatattttcttattctaggatccagacaccacagtttatatcatttgacaccttcgagatgcctcaagaaaatacactttaaggcccttgcctcatattgtcttgcctaatgtgtgcataattaaaacatctgaatacctttgagtgttcatatcttgttggcttccttgaccacacatcatttggcatccttaaatccagtgctattgacggatacttatttatcatataaactgcggtggacataactcagcctataacactttgggtaatccaacactcaatagcatttacttgaaccttttcagaatggttttgttgaacctctacacgattctattttgctgaagagtcttttggcaagacccctttttggatgtagtctttgattggttaacgctagtcattttcattcgcactatctttgagagttatcaagttgattgtattttcttcttcagctctttccgtggattgggataatacatggcgctcccttatggtaatttggatatccctttctccaggaagtgttaaccatccagctaaattaggtaatgcatcagctttaccatttt

SEQ ID NO: 205182 - DNA, 1287 bp, Cannabis indica
tctttaacctacttttataagattaacaaatacatcatttgattctaatacttaacataagaattctattaatttcttttaagtaaaacaacaaattaaaagattgcacattatttattattcaaaatactaatgattatataaagcataacttaaagaattataaaaataaatttaatatattttaaaaaaaaatacaaacccatattataaattttaaatgtatgaaaatataaaattaaataaaaattaagatattacatattatttattaattaatatactaattattatacaaaaaataacttaaaaaattataaaaataatattaaataaaaatacaaacacatattttaaaatataaaatattaataaaaggataacttatatacaaacacttaaaataatgtaaatgtgtatttatttaacttttcaatttaatttttagtgtatataatttctatttaatttacttatattaataataaaattatatgtatatatatgaaaaaaataaaattagatttttgataaaaaaaataatgttaaaacacaaaattttaaaggtgaaaaaaaaatcataggaagcccttatagagtcagttattttataataaccgactccctagggtccctacggagttggctattttataataaatgactctatagggtccctacagagtccgttatttcatattaactgatgtcatgggaaccctacggaggcggttatttaataaccgactccatatggtccttacagcgtcggttatttttaactgctgtagtgtcccttggaataacaccagcagcgaattttgtcaaaactgatgctgaaaggccttaaaaaccgcctccaaagaccaattttgtagtagttaaattgtactcaagcgatctgatgtttttttttttgaaaaatctatatctatatgtaattatgatgttatgtaaactaagttggcatttatatcagaaagattataattttttttatattttctggtacttttagattataaaatgcataagtaataatatattatatacataacgttaatttcaaagtttttatttatttaagcatttcttttttacaattttattgcacaaaataaaaatacaattttctctccttctcaatattattaatatatattattttggatgggatatttgtataacaattcttacttaattattatattttttttatagctcttttaacaaatatattgccttaaatatagttataaactaattagaaaaaaaaaaattagaaaa

SEQ ID NO: 205183 - DNA, 2111 bp, Cannabis indica
gcatctcaaaaccaattggtaattagagaagtaactcatgattttatatattttattagcttttcacagtttagcaatgtgggactgtctaacacagacaattttttttccgaatcttgcatgtgtagttttaagtcccaatataaatgatgttattaagtctcacacctgtagatgctgcatgcgccttcatcatatggtgaactttacatctttaaaatctgtcagcttcatttcccattcaacaaatcctaatggtcaatgaattttgaagtcatggcagattttacttatcttaattctaatgactggtggaatttattggaacaagttcctcctttcttactacacaaagttccatttcttaaggtttagacttgactttcagcccgtgctgtcttgaagttgagcttgcaattatatttttctaaaggtccttatatgacattggaatgtttgaaatcttatgatcagagttgaataatgtggttttacttctcttttttgagaggacctgatgatagggtaattctgtaattgcaataaacacacttatatatatgtaaacttaaaatatgtatatatatgtgtaatcatagtactaatctaatttgtaccatttgtaatcttctaatttgtttcattcctaatcttcaatactaaaatttttcctcttgtattattcataaacacttacaaaactactttgatatttatttgatttcttcaagttcataagggttgggattattgtattgtcctttaactagtgtttcggccaatcatgtgagtattttgataatgggattgtagcttgaacaaatgtgtgtgttagaatcccacattgactatgtataagattggttagtagtatctggttagctcatacatgggcatctcccctcttaggttagtttttgggggtgagttctacttaagtggttgtgtcaagtggtattagagtcatgcaccgtcaagtgagaccgatgttgcagaaggggcgacctgcagattaagcccaaagtaggctatggcagagtaagccattgtagagtaggttgatgtggactgttggctcgaagggtggtgtattgttagggtcccatattgactaagaatgagattgattagtagtatataactacttgggcatcctcctctcttaagcttgtttttgggagtgagtgctacacaagtggttgtatcaatctattattttttttttctttgaaaggacttcctaaccttgtcttctatttgtattctatgcaactgttttctaaaatgttttctatcattaaaaatttgaaagaaattcttgggccttgctgaatttcttgaatgagcatggcccttgaactgatcatttgggattgatgatctttacgcataatgaaatcattatagccataccaattctttctgttctatcgtgatattaatgtttatttattagaagtagaactaaatgaaagggtacatcagttggtgagaaattttctgagaaagaaagagtgtcaataacaggaagacatgaaaactacaaccaacaagaagatgtttaatataaaaacatcttcttgccggggactgaggcacgggaatccactttcacccttcttgtttacactaatggcggatgtgcttggaagaatggtgaacgaagcagtagattcaggcttttatgttgttttttggttgctaaagacaagattcaagtcagccacctacaatttgctgatgatactctttttctttgttaatgacgaagcgttgcttcagaggttggcaaggttagttgaggccttctgtgagatatccgatttagaagtttacctgagcaaaagtcaattgtagggattatgtatgaatgagcaagtggttgctcatttttctttctcaataggttgtaaagtgggtgagtggccgttgaagtatcttggtatgcctttggggggtttgcctacgaaaggctcgttttgggaacctgtgtgttggaaaagtgtgctagaaggcttgggtggaattgctcatttttatctaggggaggatggttaacgcttatcgagtcagttctttcctctctccccatttactatctatttttgttt

SEQ ID NO: 205184 - DNA, 721 bp, Cannabis indica
tatataatttcaataaaaaaattaataattatgttgattttgaagtttgaaggttaatttacagtttgtacattgaagtataattataaaatttggactaaatataacattaagctattctttgagttaaatttacaataaaatttgcaccttacattagagatagtctaatggcaatactcttcttaaaaaactcgttgcttagcctaacacacccaccaattgctctactcttttacaatattacaatatttttcttttatattatttaaatattattatttatttattatgttataagaaataaaagaataaaaaaaataaatatatatttttgggaaacaaaagattaaatatattgaaacggtatagtgtgtgagagagtgatagcattgcaagctaaacatcttagctattatatatatagaagacattttaaaagattttgaattatattttatttattatggcatttatctaaaaatattgttgaaacaataaatttacattaaatttatttttttatatttatgtgaattattctaaatcctttaaaatgtacatatttacgatatacatcattataactatttatcaataacacgtacgacctatttttatttttttaaaagacgtgtttaaaaagttttccccgaattatacccttgttttttttttttttttatttttttttttcttttttttctttatgtgtatatga

SEQ ID NO: 205185 - DNA, 1237 bp, Cannabis indica
aaaatccttgttctgaaagaactgtgtattagtcataacagaaaaaagaaaatatataacaaagtaaaatcaatgtatttatatatacaaattaatacatgtatatagatcggataagctaggtattttgttaggctctaaattatttaatgctatatatataaactgtatatatataccttgatttgggtcttctatcttcttgcttctatacatctacaaaaatacgaagccaaaaaataaagaaataattaatatatatgaatacgagccctgaatcttacacacacatatatatatatatgatcatatagagtgaaaaaactatatggccgaaatcttaaatcaaataataataataattacttgaagatgactcttgacatgagctatgctaaggccctttatgttcatcaattgaagaaccagctttggtgtagctcctgctccaacaaagcatattattaattcagccatttatgtataaaaaagtagtactgctatgtctagggttaattaattggatcgtttatatatgtatatatatatgtttacttactatcttgtcctcctaatctttcaactgctcgaacaaagcaaagatgcagatcgggagtccagcgaagccttggagtcttggaacgaacatattgccttacagatccaccagaagtagctccctgctgcttcttcgatccattttcttccactgtgctattgctcgagctctgctcattcttcctatcttcattatcttcatcttcgtcttcgtcttcgtcttcttcttcttcatcaatatgctccagagtattgtagtcctgattattgtttgtctttgaaacctgagaagaacctgcatcgtggtcatcactagtagtagtacttgatctcatcatctcggccgccatgatcgcgtatctatatatagatctcttttgtgatcaatctgttaggcctgacttaatgttgatgaggatgatcatgagcaaacgatcatgatgagactttagtgtcatatttttgtgttgagagaaagagaatgagtttttcttatgtcttcgtctcctcttacctcagccagaatagatggtgatcatgaagaacaattctctttaaaaatattatactagtctctttctctctctctctctctcaaatttttttacttgttatatatataaatatatatatgtatacaattctttattatttatactatgtcccatgttggtatata

SEQ ID NO: 205186 - DNA, 1440 bp, Cannabis indica
ggttctctctctcactctctctcatcaagcacatcttgaaggtttgaagttcaaacaaattgtaataaaaaaaaataaataaaataaaaaaagaacaatgaagaagaagatgaacatgggagagagatgaatagcttaagatgatgaaaaaaaatatgaaatcatgaaatgtggggtaagtgtgattataaaacaaaaaaaaatagtgagttgctatgatttgactatgaacatcacatcaacaattttttttaaaaattaattaataaaaatagagaaaggcatgtaaaataataagtggcagtataagcattataaaagacagttaaatgtacagtatttttgtaatttctatcgcatgccagtataaaagtaataaaatctaaaaaaaaaaaaaaaagtgtacaattgtgagttgggctgaaggaaagggtggtcataagcccaaagacattactattggacgagggcactactacagtaatagactgaatctgaaagtgcagtccaagatgcattagactgggccatggtgggccggaccacagtcatggtggccaataggctgttcacaatcaagaattctaatacaatagcagggagccacccaacacactatgatctgaatctaatgaatatcaaccatggattatatgcttcattaatagttcttcacttaaatctttcttttgcagaaaaatcattcatacccttgtttgtactgctagtagtattaatagaaaggctaattagtatctttgttacatgtcaaaataaaatgctaattagcctaatagaagattaagtattctgttttggttttgcttttccctttttctttccgttattttctcttttatcatgcagattcttaatttcccggcgtgcaaggaaagaaaagaatccaactttgtacttgtttaaaaatcataatcaaaatattatgcacattttgctttcttttttctttgtttatttctggctacttatcaattgttggggaaaaaaatcacaatatcagacaccacgattgttagcttgtacatatcttataatcatataagacaatagttcctttcagaaaaaaataaataaataaaaatagtatgacgttgttgtatgaatttgttacacaaactgtttaaaaaatcatcatagctgaaagtcacagtcatatccaaaataataatagaaaaaagagatagcaccaagaatctattatttgaaataaataaaaaagtcaagaatgtatacgaatagttttatttcttttttaattattattatagtgaatgataaaaaaaaaaaatgaaaatagaataaaacaccaaaccgtggcgtgaacaagacgagacgactagaataaaaacaaactaataaatctttgtaagagatattttaatcaaaagaaaaaatctatcaagagtaagagatggctcc

SEQ ID NO: 205187 - DNA, 689 bp, Cannabis indica
gcagttattaactccaagagttctcataataattaacaagcattcaatacaaagattaagaagaaaatatggcaatgtggagaagctatgatgatgatgatgataactactacaaatccaagaacatgtcatcatcatcatcatcatctcaagattaccatgatcatgtcttgaatttggctaggatgcaaagcactaacatctctactaatgttcctcgctatggattagtttctccaagattcttccatgccccgaaagctgtcggttctcgagcaacctcagaagagatcagagaagaagagtactaccaaaacagcaccaataagcagcagaagaagaagcagcagcaccctcaatttgaggacaaggttgagattattggctactcatcaaatagtggtgttactgatgaaaataatgttaggaaaagtactagtaattctgctatgaaaacaaatggttctgaagccagttctatcaacgatgaagccaatagatatatccagcaaaaacgcaaggcttttgatctcttcaagtggaaggcttcttttgttcattagggtaatactattttatgtggtttttatgaataagctagtgtggtttatctatctttgtttgaggtatataagatatataacttgatacttgttatatgttatatgctatgagaatgtgtttctcat

SEQ ID NO: 205188 - DNA, 1110 bp, Cannabis indica
taatgcaatatagttccacctttgatgtgctctgtttttttatttggcacaatagaataatgtggttagagattgaatttggtgattagtcatgcgcaagtgcaagtgcaacagcctgaaaattgattttacacttagaaaagaaaaagatagaatgggaattcattgtttgtttgtttgcctattcttttagtgggatgcccttttgaattaataaatatcatgggagtagtgattattgatttttgagagtgagatttctattgacttggaacaaatacaaatgttcttttcgtttgtttctatgttcttttttaatgtgtatatttttattttcagaaggtttcaaatgtgttcctttcaaggttcaagtaataaataagagacttttctatttttattaaataaaattatttataaattttagaattaattttggttattttataacttaaaagtatattttcattcatttgattttattattgggatagtgaaatttcaatattttaatattttagacataaaaaaaaaaggtatttttttaatgcaaaataataattgggtatttaatttctatgcttaaccaacttgtatttttcttataactattgggtaaatattgagtctacaaatatctctcattataatataaaaaatctatattttaccaaaatttatataaaaaaggacaaataatgcttatattaaaaataatataagagtcttgttgtgttttaaattatacttgattttagtttttaaaattttatattttattttaattttgttaaaagattatttcatgagtaaaattgtttatcctatgtgaaaatctaaggttgatgtacgtttgttcacttggtccaatccaatattatattctatttatacatgttttgtataattacaagagaaacatttatttatagctaataaattaaaattatgtcttagttataaatttttctattgtcttttctttaatattaaattaagataaacatcctaatcaaatattccatgtccacaatctttcacacgctaactcctccttctttgtcctctacttataaaaaaaaggtgtaatctttatcaaaatgaacccac

SEQ ID NO: 205189 - DNA, 666 bp, Cannabis indica
gatccttacttgaaagctgtcatctgtgattctgtaagagtcagtgtcgagacaaccttgattataaaattctgtatcaagtcaaataatataaatcctccaatggcaaatattcttaacaagaatcaaaacttttaaaccagatcaatgtgtaaaatgatcaagcagttggcttggtaaaaccgtaatagctggcaccagagagacaaagatatgcaaaaacatacacccaaaggtcaataccggataataatatcatcaaaagcttttgaaacaattcgccaaggcagaccatatacatatactttatattacacaactacatcatctcaactccaatcaaaataaccttaatcctataaacaattcactaaaaaatgtcccctacagtgccgacctataatttttacttctcaaaaggaggaagaaaaagttaccaaaaatctatccactcccacggatcagaaaatccttacactaaaacaaccgcaaaagcccaaactagctctataaatcaaagatttcaaaggaaacatacccccaaaaacaaaacaaaactcggaaagccacagtcgagtcgaaaataaaagaaaagaaaatataattgaactcatgatttaaacaaaaaagaagcgatactcacataagtattcaactgcctgacga

SEQ ID NO: 205190 - DNA, 1445 bp, Cannabis indica
ggttggttgagacattattaatttctcttattagtttgaaaaaggcttcacctatattttgtcctctgttttggaacataattacttttaaaaactctatagcgatgtcaacccaataacaacagatctaagattttgttacacctattgtataagctaattaaaagaatgacagagctaatttattaaatttgtgaaaaggtttatgatatattttcatgaagtatataacttattaaatgtttgtgatgctcaagctctgaaaatatacgaaccagttgatgaaattgaaagtgcggagtcgttgcagtacgattttgaaaccattaatgttgccacggatcagttttctgaggataataagcttggacaaggtggttttggtgcagtttataaggtaaaaattcaagtacaaaatttaaatttaactctaattaattgatgagaatcaatcaataaaatcaaatattaataaaagcataccgttcataaaatcaattttagaatgatatgatcattcaactttacattaaaaattctttcaagctttattgtcttatgatgatagggagtatgaaatgttaccatgtaaaatagggaaatatatttacttattaataattaatgacaattatgctaagttataaattttatttcaaaatagattacatctctttgacttatttatacgataacctaacacacattttttatctataattaatgtggtcccaaataaataaattcccaacattaaattgatctcacacgtaaaattttctgtggtgtaattcaggggagatttcccaatggacaagacatagccgtaaaacggttgtcgagggattcaagccaaggagatgcagaattcaagaatgaggtaatgctagttgccaagcttcaacaccgcaatcttgttagacttctcggtttcagcttggaagcaagtgaaaggcttcttgtctatgagtttgtgcaaaacgcaagccttgatcattttatatttggtacggtgacattgctctttttaaaacagaatcttgatgaatatattttcttaattctttaactaaattaatcataaacttgcatgaatatgtatttagatccaagaaaccgagtcactttggattgggatagacgttacaaaataataggaggcgtagctcgaggacttctttaccttcatgaagattctcgtttaaaaattatccatcgagatctcaaagctagtaatatcttgctagatgaagacatgaatcctaaaattgcagactttggaatggcaagacattttgtagtggatcaaacccaaggcaagacaaaacatatagtgggaacatagtaagtacacattaatctctacaactagagaattaatagagtactatatatattatacttgatatatatactaactttgattattaatttttaatttttac

SEQ ID NO: 205191 - DNA, 520 bp, Cannabis indica
atatatatatatatgtttacataatttaattatgtcactcataatatatcacatatcttaatttctttataaggtagtacattatgatcagtcatatatatatatttactgatctttttatcaggatttctggttcaagtttcttaatttatcggactccatacattttatttatattatataaattatcttttgtagagtcgagatcattataatatcgatctctatgaattaatgagtcattttaattagcttagatggaagaaattccacttatatataaaaatcaagatatatacttattttatatatttatagagttttttttttcaattgtaaaattatgtttgaaagttgaattttgatggaaataaataaataatatgcttcagcttatgagatgggcgactcagtgtaagttgtgtcggttcaaaaaacaagtaagtcttctctgctagctgtgattttggcagctttgtatatgatttgcaagacggtatatatatatatataacatgtt

SEQ ID NO: 205192 - DNA, 545 bp, Cannabis indica
ttcattgaaaagagaaagggacacgactagctctgtgagctcatcacgaaggtggagaatgaaaagagaagaaagaaagaaataaataaaaaaaaaggaagtgaatgttcacaagaattgcgttgtgtttttaatactcttattagagtaagaaaaaagtgagaatgacattagagtccgtgaaacaaagaaaagtattattgttatttagtgcatatcattggccccacaaatgtaatttcattataaaaagcttatatttatgagtattgctattaggtatttcaacaccttttataggtgatgctccatgattgcttattgatattttctaagagttattttcttaagttatatgagatctaatacttaactatataccaataacagtatagcactgaggaggattttaagcacaatgatagtaacttttagcaattctatatttataacctgtagacgtaatgtgaaagttattgctttgaaattaaggtctctcttcagtctcccccacctgctgttagctaattttgatgctaatcttt

SEQ ID NO: 205193 - DNA, 1153 bp, Cannabis indica
tgaaaactaggttgctggggctgctgctgctgctgggctttcacttgctcatgttgctgctgaagccaaacgggcatctgaaatggttggaacaatgggtgttgcattatctgtttgcacactgcctggtcaagttacatcagatcgtttgggcccaggaaagatggaattgggtcttggaattgtatgttaatacactgtgtaatgcttatattagtaattttcatcattgtagcttaatcatgataaatagtttcattgttgctggtttctgtataacataaaatagtttaatttgactgccaagagactagaaaataagatttattatctttaataagtgtaatgaacctaaactggatatttcaaattgttacagcatggagaacctggtgctgctgtggctgaccttcaaccggttgatgtagttgtttctcatgttttgaaccagatattatcgtcggtatggcacaatactttagggagaaccccttttaagtaaatagcaaatatgctggaaattcattagaaattttttaaaattttctgcttcacagaagttgtgcacagttgtatgtatcatcttttaaatgtggccagaggaggtaattctgtatacctgtttagttgcctaacaatatttatttgtttctatggttccctttataaatttctattttaatttacaatccaggaattaataggatgaggcatctagattcagtttagttgcccaacaatattctagtgagattcagtttgtggattccattctctaggttatgctaacatatatagcaatttttttaggtggccattgttaccaccttctacttcttcccctccccatctctcttctaaaagtacctccctgatatttcataactgacatattatagatattaggcatagttgagattttagtgaatatttttttcttcatcttacaagacattcaatctcacatcatccaaatatttttctttgcaggagaccaactatgttccgattacaagaggaaacagagtcgtccttatgattaacgggtagattaaactagtttatttttgtcaatataaatttatagatcatgtgaatgtgactgaaaaatatatttttaatcaaaattaaattgtgtggctaagatatgtat

SEQ ID NO: 205194 - DNA, 1687 bp, Cannabis indica
ggctgccaacagaagacccaaacttgcatctccctaacttcgaagagctttgtcaaacatttaagatgaattgagttagtgatgacgccattagactgaggttgttcccattatcattaacagagtgggccaagagttggttggtatcgttgccacccaattctatcaacacctaggaggaattggctctaaaattcctttccaagttctttcttcctgcaaagattggcaagttgagatctgaaatcaacaacttcacccaacatgacaaacaatctctgtaccaagcttgggagaggttcaaggacatattgagaaagtggccgaaccatgggattgaaaagtggatgcaagtgcacaacttctacaaatggattggttggaaacacccgaacactcatagatgcctaactggtggggcttttatgaggaaaagtgcaaatgaggcttttgaactacttgaagagatggccatgactaaccaacaatggtcaacaagccaatctaaaaaagttgcaggtatgcatgaagttcatgctataacaaagttgacagcccaagtggaggccttaactaagttggtcactgctcaggcaaagcaagctcaagttatttgtgagctatgtagaggacctcatacttatgatacttgcctggtagatgtagtcagtttgccaatggagcaagcccaagccattgggaactatcagaacaacaatcatggtttcaaccaagggggtcgtcggcaaaatttttaagggcagtctccaaaccagcagcagcaagggttctacccagagagaaatcagtctcatcaaagttaatagaatcaaaaaaagcaaggatctagtggagggtctaatcctaagacatatatgttactacaacttatgacagagattaaatcttccattaatgtctcggaaactcaaatggggcagttggttactcaaaatactaacaagtctcaaggtaacttgtctagcactactgaagtcaatcaaaaagagaactgtaaggtaattaccttgagaaatggtaagagctatgccgggcaaggccaagactagtcagaggatgaatataatgatcaacaagaattagcaccaacacaaggtaagaagaagactactcacggtcttcaacaaaagaaacttcacctcctattagaattgatcatcacataaaaatttcctatcctcaaagcctgcgtaagaataacataaataagaagtttagtaaattccttaaagtatttaaaaagccgcatatcaacatttcctttgcggaggccttgaaacaaatgccaagctacgtcaaattcacgaaggagattctatccaagaatagaaagatggaagaatctgagacagtagctctaacaaagtagtgtagtacaattctttaaaagaaactccctcctacactgaaatatcctgggagttttaccataccttgcactattgggaggcttgaaaatatccatgtattttgtgatctggaggctagcatcaaccttatgcctttgtcagtatttgagatgctacaactcagagaggcaaaaccaacaagtgtaacactacagctagctaatcgctctttagcccatccaagtggagtaatcgaagatgtcctgtcaaggcggacaagtttatattcctgctgattttatacgtccttgacatgg

SEQ ID NO: 205195 - DNA, 769 bp, Cannabis indica
ttttttttttttaaattaattagtgggttagtttaattttcactgtacaatattattattatggtaatgggatttgattcctattattattattatttaagaaaaaagatattattattattatgaaaaatgaaagaattagtccaatctgaaaacactaaggtggatttggtatttttaaaaaaaaaaagaaaaagaaaggtttgattttttcgtaatgggaaaatggattgctttatctttggttcttgtcttggatgcctaccttttactttttcttttttctttttttaaattttattttaaaagaaaaaatttaaagaagtgaaagggactgagtcaaagaattgtaaagaagtggaccaacatgtcgtgtttgtaacggttgaccattataaaaataaataataaaataaaattaaaaataaaaattaggtttttattttgtgtagttgcaagtgggatggctaattcattcaatgaacataataatattcaaattaattttgtatattaccaaaaagtatatttaaaattttgacttgaactacgtgtataattttattttttgaaaagataggttatttatctagatattaataaaaatattgttagtaattattgatataatttagtggaatgtgacaatagtttggctggaatataaagaagacattattatatgtatagactatagttggcctgtcaaatgaaataaaataaaaaaagaataaagctttgttgctaagattgaaaataaatgaaaaaa

SEQ ID NO: 205196 - DNA, 575 bp, Cannabis indica
aaaaaagtcaaaatgggtgggtgtatgaattgataaattttgtgtgtaaatgggaccccttttattttttgttcataaaaatttgttcttttgctaaattttgccattgccataacgtcaaacatactattcataatttggtcccaaaatttcatcattaattatggaagagatttattttttcattattcattcacataattgtatatatctaccacatttacacttttaaattgactatacactataaaattattagaatatgtgttacagaaaaaaaaaaataatttagaaatgctaacgggcatttatggtgtctaataattttataaaatataatattaatattggtgtaatttaatatcgtattacacttttttttttctttttgattaaaggagaagattttattaatcaaattgaaatactacacaaacgagcattcataaaccaatacaacaaactactcacttacatattacaaacaaaataaaaaatttattgattttttttacaaatttctctcctatcaataaaaataatctctctttaagtgctaatttaattaaattatt

SEQ ID NO: 205197 - DNA, 1461 bp, Cannabis indica
taatagttgtactattctcttattggaataatctatttatcgatctttaatatcattgtttcaaagcttttaaacagtaacgtccacatggtagttcggaggtttagtcctcaccaattattttttttgaaaaaaaatagaataaataatttaataatttaaaagcttggaaaatcaaaattaaaaaatgtcactagtatctaaaaaaataattcctgatttcttcgtaacatccaagcatcccagcaatatattctatgtatgtgcaaaataataatgtaagatatgtgcctgccatatcatatgtatgtctgaattgttatagcttgttcttgaagaacaaaatattaatgcatattattggtgtataataagttatgatgattaatgatttttggtatatatgaaacgttggactggtggtcgattagaataaggccgaagacatgtgaattatttggaactattagaatatttgacatgtacattttgtccatattagcattatatttatatgattcactcccggtgattcatgcccactaactctaacaataattacaaaaacaaagaaacgtttttttgttttctcttgagactaaaataacatataagcttcattttcaaaaagatcataattgtctctggttgaacgtgcttgagtactgttttctatggctttctcattcatatattaaatgtggaaacttattaatttaacctcaaaagttacaaactaatgcacaccaaagattctttgttacatattaaaatctttcttatttcaaggagcttccaaagatggttagatttttctcttagtacgacaggtgtgtcagcatttaaatttaccaaatgcttcatatacgtgctgtcactcactggaagaaagaaaatgaaaaaaaataatttaccctttaattttcacattacaccatcttctaaatatttaaaattttatttttatacatcaaaacaaactgtaaaagtaaattgaaaaagtgttctggtggacatgcactactgcacagatgaatataaaacaccatttactcattgatggatgcattttttgggacatttgaactaattttttaacatatgaaaaattatttatattgaaacacctattatgaattgtgagtatctaccaccatatcgtacccaccgaccattaaccactgatttggatgtgcattcattagtggaagtcccttagactcactttcgttccgtgtagataatgttgatgcactgtgtttcaaatttatgaattaaaatagttctcaaataattattgaaaaaacaaaaaaaaaaaacctgagtcgctattgttcaaattaactttatttatttggattttgagtccaaaaatacatacaaaaaaaagagtgacaaataaaaagaaaaatcaataatagctatttttacaacttctaaagttttattacacaatgaaag

SEQ ID NO: 205198 - DNA, 1209 bp, Cannabis indica
aaagaagataaagtagaaaagtaagaggaaaaagatttgttggcaacataaacaaagaaaataaatgtagacagatggattcccgcatccaccaccgcacaacccccatatttcatcatcatataattctttatccctttacataattccaatcaattgcactagcttaataatgtgaatctttctagagctgtaaataggacatgtcgtgtcgtgtgtcatgcataaatgcttattttcttgttgttgtatagtgtcgtattaatttatagtattatattatgtcgtgtataaatttatattttttcatattttgagctggtaaaatttccaaccgtgtcaaaaaaacattgatctttgctctagctagttgattagtttattcttttctaattaaatagtttcttttttaaaggacaaaagagaaaaaacaaaccaaaacaaaaataagtaacaagaaactaatatgatgaacttcttgcatgccatgaaaacaaaacacaaacaataaatagtgtgcgtgtatatatatatagatcatgatttcataataaccggccatatcagttatataaatatatgtatatgaattattatatagtgctgtgtgttcttgtcagtacttctgtcttcctggccttgcacaacaagtgattacccaatgagtctcaattttatttatttatttattttttttggtatagaaatctttttacaataatattcatattatacaagggccaaggcctttactttccggccgaaattaatgttaaagatatacatattgattttccttaactgcttttgctttacatacaaatctcaaaacggtcgcatttataattagatttttgtagtggaacttcctatcgatattaagatgatgtactgatacataaatgtatctgaagaaaaaaaaaaaagaagagtcaaataattgttacataaagttgaaaattaggctgttttgtttagacacttgaataatgggggtaattattgaaaatgagctaaataaaaggacattccaaaaaaaagttatcatttagcaacagatttctagtgtaaataatatagatttattgttattttagaaaaataaccaatttacttattggttactgaattttttagaaactaactaaataaaagctttaagaattaaataattatttaataaatgagatgaaagattttacgtggttt

SEQ ID NO: 205199 - DNA, 1007 bp, Cannabis indica
gtaccactttagacatgtgtcacgcaaagtttaacattttaaaagcaagggacatgcttcactcaaagcttgtcctttacagaagaattctatagtgttcgtctggtaaaaggatggtggtggtgcgcgcactaccatgctcaaatgtagaagacaagatctgattctgccaagaaaagcataactgtcacttaggtgacctggcgtatggaaaaagttgatagtatgcgatacctaatgagggtcgacatctcctttaggtccttcgagcgcgtattttggagtcaaccgcgaatgagcctccctacctgaccttttcgtgtccaggagagacatttcttatttcgcatttgggaagcaaaggctgacgcaagtaatccttcacgtgtctcttggttctagataatttttggtttagtgaagactgttcagcgcttgagcggatttaacagacatcaattaatagaggattaattgggcatattattatacgccacgtgtaggtcttttgcaaaatgcgaataacagataccatgttagaattgttagactataatattatatgaatgtaaggcatatataaacgatatgtaatgcggaacttatataatagtctaacaagaattgtacgatgcatggggttccatcttaaaattaattggtaatgggagaaatagctcattcatcttatatatagtattttattttcacacattagtaacgtgagactgtcaaataattagtgcatctagttgtagcaccaaaggcttattttgatagcattcttgagctaaataaattacaataatgaaaaaactaaaattaattgatcaagaagaaagaaatgtttctctttcaaatgcagcatctgtttttcctgtaaaaagaaaagaaaaaaaaaaaaggaaaatacatgaatattattacactctgtggcaatatctagtaaaaactttggcccaatttcataaaattataaatacaaatatataatatataatatatat

SEQ ID NO: 205200 - DNA, 1346 bp, Cannabis indica
aataatattaacaatttattagcagcaaaattaattatatctctcttatctcataaaagtctcaaaaaatttccatagtctttccttctcatatgtctaattaattaaagttgcattatgtccaactagtagaatatgtacagtgataagaaaaaataatcttaaaacaataagttgtactaatcttgttaggagaatctctggtccttaatacttaggttcaactctcattttttttatcaaccaactctcatgctttgctaattagcaaaaactctcatttttttgtggtgaataaacttaatgttatgttagttgaaaacttaaatggtatatctctttgctaggtttaatataaagggttggtcttctcacgtattataaatgctaattaatgaagatttacttgaatatatgataactttttttagttggctagtaatcgtaaatgaaacatgccaaagaaaaaaaaaagaatcataaatatcatttacatagttgccaagtcttttgttttgttttttaaacaaaaaaggtaaaaatttaataagttgacaagtaatcataaatatcatttaattagagttttgtaaattataagttattttttgagtagttattctactagtatgggccgggccttattatttttgtttttgtttgttgagtaatgtctaacattatttgcagtatattatttggtattcttttactgttatcaacaaaataataatttaatagtggatggttgataatgtgcatgaaaatttatactcatataaatatttgtgtatatgaaattaacaaaaaataagagaaaatgtaaaaactttcgtcttaattaagtgaatttaagagataacatagagacatgaaatcaaactttagaacataaaaacatgtaaaaaaaaaagagtgaacagaggtcccaacattgagaagttacatactaattttcaaataaaacatgaacacataagaaaagttttggctggtttactcagatcccatcattatctcctgcaaggtgtaaatagttttgaccaacatgaactcatcagcctttctctcaatctcaacttgcatattcctgcaaaattcacaatgattgtcatgcttgctttgatctccagaggtggtaccatttccatggtctgggaccttagagttctccatttttttttctatttggtgggtatgattctaagtgtacaaatgatttggtatgattctaagtgtacaaatgatttggtgagaaccaatcttcatattttttttctatttccatggtcatgtttgtgttatgttgtgttagtttgcaattgagaagtatatgtcattttgct

SEQ ID NO: 205201 - DNA, 1420 bp, Cannabis indica
ctttcttggctcggggttgtcggcgagggtgcgaatccagcactactgcaaaattgggaacaaatgtacgtcgcgattcaagagaccatccaaaaacaaggtgaacagattggagaatgtagagagcagcaagctcggtctgctctaaatcctaatcctaatcctctagcaccattagtagtgccacatgatgtgagaaattgtctggagccgttgtacaagcagttcaggaagaaaaatctgccagtgtttgaaggtggtgttgatccacttaaggcggagcaatggatgggtatgatagcatccatctttgacattatgcgtgttgagagtaacaatcaggttggatgtgctatctttatgttgtgcaaggatgcccgtatttggtggaaattagtatctcaggatcataatctagctaacatgacctgggatgcctttcagatttttattttatgaaaaatattataatgaaaccattcaagcggctaaggcataagagtttatacggctaactgagggcagcatgacagtgacagagcatgccaccaaatttgattggttggcaaagtttgcctctgatgaagtggccactgaggctgctagaaaggccaaatttattcaggggttggaagagcatatcgctcgggatatagttgtagccgctaagcaaccaggatttgttcgaacttatgctcaggtggttgagctagcccttgctgctgagggtgcagaggatcaaatttggaagagaaacagtatgagaagagatttgtggaaacaaacatctaatgtcagttctggtaagggtgctaactctaatgattgtaagaaaaaacctaacgacccaccagttacgggtcctaacaagagattctaacgtaatcaaggtttccgacgagggggaaacgaaaactggagaacctatccagagtgcccgaggtgcaagagacgccatcagggtgaatgtcaagctcgaccttgtttctagtgtatgtagaaggtagagaattgtcagtcaatttaattgaatcaaatttaaaagattttgatgttatactgggaatggattggctagaaaagtaccacgcgaccattaattgtaaaagaaagatggtaactttcaaacctaagggtgaggacccatttgtgtttgtgggcagggttcaaggatcccaaattctaataatcatagcgcttaaagtaagagatttgttgtgggatagatgtgttgcttttctagccagtatggtggacaccacgaaggaagtattgatgggaccagaacatactctagtggtctaagagtttctagatgtcttttcagaggagctactagggttaccaccgaagcgggagattgactttgaaattaatttgataccaggggtaaaacttgtatctaaaactctatatcaga

SEQ ID NO: 205202 - DNA, 843 bp, Cannabis indica
attgacttgtgtagtttgcatactagattggattctgtagacaaagaagaaggtaatgtaagtccaggatgtaattgcatataaacctattcattgaggtcaccatttaagaacgcattgttaatgtcaatttggagcatgttccatttctttgtagcagaaacaaccagtaaaagtttaaatgtgaccattttagccacaacagagaatgtgtcaaaaaaatcaagcccttcttgttgtgtgtatccttcagcaacaagacgagctttgtgtcgttcaactgaaccatcactattgaacttaattttatacacccaataacatccaattgctttctctccaggtggaagaggtacaatagaccaagtcttgttgtttctaagtacagtgagttcggtgtacatggcatcaagccattgtttgatttgtattgcttgcttatatgtttgtggctcattttgtgaagtaactacaagtatgaaagccttatatgagttagcaaaacgagtataagaaataaatttatttaaaggatgaggagtagaagattgattttcaacatgggatagaaattgtggaacaatattaagtgcatcaaatttttgttttaccaaatagatccatgtgaatcttgaatgatcatcaactaaagtaaggaaaaacttgtgtccagaatgagcaaaaatgtggtaaggtccctaaatgtcacaatgtacaagatcaaaaacattacaagtaaatttattattgctacaaaaaggaagtttcctttgcttagccatttgacaaatataacagggggtgtctttgtgtaaagcagcaacattacatttcagtttatta

SEQ ID NO: 205203 - DNA, 1983 bp, Cannabis indica
tggtttcaattgtcgagaagcataggcaaccaccttgccgttttgcatgaggacacctcctaatccagtacctgaagcatcagtgaataccacatatggttcctcactattaggaacagtgagaataggcgccgaagttaatctttccttcaattctctaaaagcttcttcgcaactatcatcccacataaactttacttcttttcttgttaacttcgtcaaaggcatagcaattcgtgagaaattctctacaaagcgacggtagtagcctgccaacccaagaaaacttcgaacttcagtgacattctttggtctttcccactttagaatagagtctatctttgcaggatcaacggtgataccatcttgagaaattacatggcccaagaacttgacttcagtcatccaaaattcacacttctctttggtctgtaatactgttgtcaagtgttcagcatgatctgtccagcgcgttgggtcgggcggtggccggaggtgggtcgccggagtgtggtggttatggaggtttatgggttttattttttggtattttaaagagagagaaagagagaaagatagataaatatataaacagagagagagagagagagaaaacgtaatctgtatataatttaaattattattttttttattatacatatataattattttaaaatgatgtgcaatatacgtaagtttaattttatttaactaatgtaatataaattttaaaattgtatatataatttaattaaataaataaattaaagatttagtaagttaaaatcatttcaaataaaattaaatgtttaatataaaataaatttccataaagtattgaaaataacattgtttttatatactgttttttatgaactttttctttatagatgttttatttgtattttacaaaaaaaaaaaaagtcaattgtgtgtatttttctaaaagaattatattaaaatccataaaaatatatatagtccatattttataaaatttttgttattttaagtatttatgaaataatcttaattttaaaagaaaatttaaataataacttattaaaaaaaattgtaaaagttaaatgtttaatttatgttcaaaacttatgataacagaaaaataatttttttggcacttattaaaataagtccaacaacaaattctgtcttattttagaagaataaaaatatatttttatttgtaatgatgaagacaaaaaaatgtttaacaaatatgttaattaaacatttaatcccaccattaatataatcaaagaaagaaaatagagaagaattaatgtgagtggctctaaaatcaaaataaaacatgtaaagttataatgatatttttttgagtcaattagtatgaaaataaacaaatcatagtagagtaacacataagttatccagcagacataatggagaaaactaatagagaagaatttttatgaacccatcaacctattttggcaaacaaaaaaaaaaaagaaaattacaacttgaagccccatatgagctctgaatttgaagagccatctcacagaattcttgagattatttgactcttcagtaatttgtatcaaattagagcatcccaaatccgaaacatacattgataaacaaatacatgaatgaatacgagggaagcttacaagatgagagcaaagattggacaaccaagaatcacttctcttaaagaacaccatccatccgtacactaatcccctacaacaaaagctactactatttcataaatatgtatgtgcatttatatattcatatatcaatagtggaaataatttatcaaggttttgattccatagagcaaaatcgaaagcaaacagagaaataatatattactgaaaaatcatatgaataaaaccctaacaagcaaacgattagcaatgacaagattaacaaacacaagcagtaatcgaaggaataatagggatgaacatagtatgagcaaccaaaaacaa

SEQ ID NO: 205204 - DNA, 848 bp, Cannabis indica
gatcaatctcaacttcttctaatgctttgactggatcaaaattttcacttagttccccaaggggaggatccatatcttcatccgcaccgtggggagacccctattttgcaatgcttttacccttctcttaactctagctggatctttcatccttttcggtctcgtttagagcatggttttagaatttcctgtagtcctttgattccctctcaaacaacccaccccattaaaaggctttcaaatcatatagagttggacggcccaacatgacattaaaagcataaggaaaatcaatcaccaggaattgtgccattaaagttatggttatcagagcttttcctattatgagtggtaggtcggtatgtccaagtggagcaatgctctagtcgaagaaactgtacaccaatttcatgcaaggaaccaagtctccgagctaaagccccatcttctcgtatgttgcttttaaaagaatatttgaagaggctccgttgtcaattatagtccaaaccattttatttgcaatttgttcgtcaaccaccagaggatcattgtgcgggtaaataacatatggtcagaatcttcttcattaaaggatatggatggttcttccttgcacgtttgtttaggctttctttcttccatgaccatttctgttcatgttgtagggtcgagcatccctctctctagctttttatgagcttccatcaaagtgagggtctttaataatcacttgtatgtgcccatccacaggtgggggtatcaactaattctgattattgtctagtagggtggccctctgatcttggtaggtatttacatacttttgcaagtgcgagttatttttcctg

SEQ ID NO: 205205 - DNA, 526 bp, Cannabis indica
gttggtaatggtaaaataattttcatatttaaaaataagtgggttctattgataaggttttctttgctctctatcggggtcacttagtgaggcagttattgtgtcaaaactttgtcatgctacatgcggttggaatttagcctagaattgttaatgtagtggctgattctcttgctaattttacattgaaaactatttctaatattaattatttggtggcccgactatccattttgtagtcaattatcaatgaatctgttaactctcgtcctcttgagttttttttgcttaacttaaatattctttaaaaactaaagtgaaaacaagaggttcagaagataaaaaaaaaaaaaaaaaaaacctaaattaaagaatgattgctcttaagtggtgtttcttgagactatttttttcaaaaaaaaaaaaaaaactaaataatttagtggtagataaattattttaatcgagtactcttattttaaatttttaattaggtacacacaagtatataacacttaaaaagtca

SEQ ID NO: 205206 - DNA, 806 bp, Cannabis indica
attgttgccaggattgacagatgtagaggtgtttttcttagaggcatagttggttgatggattgtgaagatccaaggcaataggggactgttgttgctcaagtcgaagttcttgagtttgaagcaagaattgaacatcctacaaggtaatgacatcttttgaagttagagtgacaataacagagtcatattcattacctaatcctccaagaatatagaggataagctcatcatcagaaatttgttgtcctgctgccattaaagcatctacaaggcatctcatcttgagaatgtattcgtcgacaggtgtagttcctttctttgtggattgaagcatgcctctgagttggagaattcttgctcgagatgtattagagaatagttggctcagaacagtccaaagttcagcagacgagttacatcgaataacatgtcctagcatttgttcagaaatcgaattgaagagccaactcatgagaaaatggtccagacgcatccaatctttgaaggcagggtttggcaccattcttgtggcatcaagagtatctggaattgtagctggaggtcgaggacgagatcctgtaagaaaactttcaagttgatgtgcacgagctgtagaaagaacttgagatctccaaaacacatagttggtgcgatcgaggcgtaaattcagaggaataagatgatgtggaatcacatgctctgctgcaactggaggaataagagtagtagcggaagtagagccttcggatcaaggagcagctgatgaggacgccattgatgaaagcttcaagaattcttcgaaga

SEQ ID NO: 205207 - DNA, 1827 bp, Cannabis indica
ctggcggaccccgacgaatctccagacggttggtcggcgtggttgagccaaatcgattgaaatccctataaatttttgtttttgtttgagtctaggaaaaaaataattacattcaatgtgtatggtcaaagtgtgttttgccatgattattttttttgtcaaaaactgatgacagttaccagagacagttatgtgattggtttctgtttgtttgtgcaggattgaacgatatttgctcgccaatggtaatacttcttgatgattgtgcattgcacgtaatttctacctaatatatatataagagaaatataaaatcgtaataccactctaaaattactttaatttttcttccttaattttttatcttttaatgtttaattatatttatatatcaatcgaaaatatatccttctattttatctatttttaatcatattaatctatataaaataaataaatttttaattataattgccaaataaataatagcttcttaaatcaaatcaaataaataaataaaaaaatcaaatataacaaactatagacacactttagtgttagagagtcccatattaagtatgtgtgtgtgaaaataaattatcatatataaaataaataggttacttaattttgagatgaaatctcattcaccttattttaaattctaacataatattagaacaaaaagagccacttgtgataaggataatgatgtcacattgctaatgtgtagaaatataatagaatatataagatgaatggactactcttcccattgccaatcaattttgaagttgaacctcattcatcttatcctaaatcctaacacttaatctagtaactatttctaaaataactattattttttaaataatataaataacaatatttatttatcaaatattgatttagggttattttctgtgacttctcattctctactctctcttctcaagtttctaatttctcaattgtctcttttgtaagtggtttgcatcgggaaagctttaatttacatgtaattatcacagagacattgcatcgtaccccgcagttctcaaggtacctacattatgcagtaaatctcattaattttattaaggttatgattatataatagtattcaaagttttcattcatgtcatcatatatatatatatgtagatgtatattcattcaatttaaagagatgactcaaaaagatatatttttttttccaaaaaacattactatttaaggtcacaatttaggtttttaatttcaacttaagtaataataaatatatatataaaaaaatattattctttaaatttttgatcggactatccaaataagtcatttattcatatatcttttttaatttgatcattttgtatagattttataagtttactttggtgcctttcattcaatagaggattttaactacttataacaatataacacacaatttttgaacatgctcttcaagaatattataaacataatacatatacaacattaataataaataaaattatttacaagtaaatgacaacattgaaaaatcattttttttttttgtaatgtgtcagaaaattgacaaaatattcatgtaattatcaatagttagcttcacgaaagaaaaaaaaaagtgaaatagctaaatttgctaactttaaattagaccatcattagcaagattgctattgtagcactaattatcataaaaaaaatatattttattttattttaaatctatttattttgctattgtttgttgtatcttttaaaaataataaaaatctctatttctatcaaaaatgttagtcaaccagattttttttt

SEQ ID NO: 205208 - DNA, 893 bp, Cannabis indica
aaatatagtatgttagacaaaaaaaattgtttttgaaaattgaaaataaaattttgatgttttctgttttctagttctttaaaactcaatttttaaaaatttttgccaaacgactcctaatagcttttaaaaactgttttcagttttaaaaaacacaaaacagtttttaaactgtaaagccaaacagcctctacaattttatggagttttataccttatatgtaaaaatatactttttctgtcaacaaggttattttataagaaaattgaaggaaaagttcaaaaatatgataaaatcaatcaagagtaaccacgtacccttatatggtaactagaggggtaatgataatggattaatcagacagcttatgatattttttatatatataattttttaaactttttttcaaatattttcataaaatgactttttagaaaaaagtcataattttgcaaacttataatttaaaaatcattaaaataaaaatttctctaaattttttagtttattttatttataattgtatatgttattgtagttatttagaatgatttacaaattttaaaaaaaaataataataaaataattgaatagtattcataccaaaaatgttcaaatattttattataggtgggattgttcaaatattgtctctacatagtccgtttggattataaatacaagtattttgcaaaatttatcaaaacaatgtcatttacaaagtgatcactttatattattacataacttgtaactaatataacattgtgttataattttttagggcataattgaagagaaaagtgttgatgattttaacatgccagtgtattgtcccactgccaaagaagtgacaaagattattgaagatgaaggatctttcaagttgaaa

SEQ ID NO: 205209 - DNA, 935 bp, Cannabis indica
tgatgatgctaaattagctcaaaggcctcaacttgctggctcttatggttatatggctccgggtatgttcttgatctttttcattcatttacttatgttttttgttctttcttaattgaaattagtgacataattttgttggattttaagatggtctcctgttttgtagttgtttttaagtgatttttatgagtcgatatgatgattgttttagggtttttgtgtttgcttaatttatttatgtttttgtttttttttaatcgaattagtaaattatcatattttgtagttgatttaagttatgatcactcaagcaaatataggataattgtttttgatctttttgattaatttacttatgttttttgttctttcttgattgaaattagtgaaataattttgttggattttaggataatcgtgtgttttgtagttgtttttaagtaatttttatgatcgctcgatatgatgattgttttaagatttttgtgtttggttagcgatcgtattcttaatttttttgaacaatttattcatgttttttttaatcgaattagtaaattatcgtgttttatagttgtttttaagttatgatcgctgaagcaagtatatgataattattttatgtatttgctttagcgataatattcttttaataattctttgttacaaaatggaaatgaattgtaaaagttaactaaactagtgtttaaagcaaatatatgataattattttataacatatacaattataaaaaaaaaattgactaaaaaattctcaataatgagatagattaaaagtatatcgaaacatccctgtactacatatatttcctaaagttacaaactttatgttgtttttatttttttgtttatatttgtgtttagattgattggtaactctttctttctttttgattactaactctgtttaa

SEQ ID NO: 205210 - DNA, 852 bp, Cannabis indica
ccactattagatctttaagatcaaagagttacaaagcaggatttcaaatcacaggtacgattggtaatccatttcatttacaatgtttattttctctctttctctctgaatatcttactgactccttcttcttcttttctccatgtaagtcttcttcttggtttggatctccgaaccctaaacctcgggctccaagacttaacctctgtaagtctcttcctctctaaattttcctgatctgatctctatttttcaatttgatttgcatgtatgtataactgtagggtagaagagagagctgggagttagttgcaacagttttgacaaactttgcaaccaactacaagttttgtcacagtaggttgttagaggccgaaggccactaaggtttaatactttgtatttcttgttaaacaatgttgatatggacagtgcatgtggagattattatttcaacaaattcactactacaaataacccttttaatgtttatgtcacaattaattcactattagtgatctgcggaggagcacttgcaatagcactttagctttataaacttggtcattatattcttgtatgacctcaagtgtttatatatcaaatcataataacgcttaattttggtatgcaaatagtctgtatgtgtagttgatcaacttaatgtactaaccagcattggcactaacacttcaggatttagaaactgggttattaaggataacgtcaatgtttcattaaatcatagacatagtaactcaggtgtgcaaatttttgaatttccaggtaacttctggttcccgtgttaatactctcactctccaagaactttagttcatgctacaaagtcaa

SEQ ID NO: 205211 - DNA, 1231 bp, Cannabis indica
gttatccagtttttcctgaggcatctctgattcattgtttatagtacacatgaattagcagttcgtgcacttagggtggatgataaactaatttgaataggtgtattttttatcttttctctatatataaacttttaaattatttttaatgaaagttcattagtctaaaaaaaaaaaaaacatgatagatatatacacacttatatgtatatatagagtgagagggagaggaataattgaaagcatgtgttaataagaatcaaaaggagaattttatgtgtaaaatgcaaatacatgtgtagaaggaaggtccacatggggacctatatgtaaaataaaaataatcataattattatataattatatataaatatatataatatggtatagtataatatatatatatacaagtggaagtgaaagtgggtcatgtctgtcatttatggatgcttctttttcaggtatgctgtctatttattcttgctgtttattttgtcaccaaatgctcacattacattacctttcttcaaattttacttccttttttttttaattatacacaaaaaaaaaaactttttttattatttatttcccctttttctaactaatcattgaaaccaataaaaattttcacaacttttttttaagagatcatgtttgcttgggtcaatgttaaatttaaatttttttaggtgacttattaatattgtattattgtttccattgttgttgccgacactagctagctaattaattatataaataaatatatttaattatcatatttttattagttgtaaattatttcatttcaacatgatagagagactaagtcctttgtacttggctataattcacctatattaaaagttaattaattaatatctttgaaaatagcaagcctataataagatttattgttgaagtagttaaaataataattcgtaaaaaaagaatagtaataataataatagtgacattgtacctagtatatagtagtactactatgacctttatgaacttaattgtatttagtcaatattttacaataatttataatttgttagagcattaattaataataattagatatatatatatatatattaatttacataagtgtaaattaaatgaactaaaatgcaagattatatataaccaggtttaggagtggcaataagccatatacggtaacacaattcgaaacttgcacgaaagttaacaggttta

SEQ ID NO: 205212 - DNA, 1397 bp, Cannabis indica
tggtgctaattaacaataacatcatcatagattacatgttataaaagttaattatataagaagtcattatttatattctcataaacattatgtgatagcctaataagtcaatataacaaattgatattatagcttgacctataatgtctttgtcattagttaattagttatgagaagtgttaattacactaatctattttttcaacctttatcttaaaaatatatgtctaaggtttactttttttacatatattttttttatgacactattcgttataattatgatattattcttgtaatttttgaaatgtcgaatatcttaccgtgataatttttgtaaaaataaatttgaaatttttaaatacttgtggtaaattaaaatattaaaaattctatatatttttaatgcataaaagtatgaagaaattacactatatacccactttcatttcctattttaatttttatttttcttgtattactctttaatttatacctattttataggtcatatctccattatggtttttttttgaataaaagtgtttttgattaatcaacaagctagacctcgtggtcattacataaaatgttcaaagggatggtggataccggaatatcaccaaccaaattgtgggaaaaggcccacttagccacattatgggcaacaaaattacaagtcctgctaatattagaaaaaatacaactagaaaaataagaagagtgactgatacaaaataagacatagttactaatgacccaaaattatcttacacttatatttgattgatgtaataataaaaaaatgtagttctcagctcatccctgctctaagcacggatttagcttgtattagtctaaactcaagcatgtgtataaatttgatattgtaattataattatcacataaaaagaaaaagtgaataaatcaaaaattgaaaaagaaattaaaatagaaggttgaagttttgcattgaaaaaagaaaaataatgtcttatagtttgatttagagaaagagggaattagttttgaatttgaggtttagggggagttagaatgaatattcaaataaactatataatatgtttttttttttaattattatttaaataaaatagaaaagacaaagcaaaaaacaagaaaaattgagtggaaggaattggaggcattgaagaaggtgtggggatcatccttgacttttggccaaatcatgttatgcaataatagtattctattaccatagctatcactatttctaatattgaacataaccacatataaaagaaaaagaagaaaaaagcatcatatctttattacctaattgaacaaaatatatttaatttgtaatgcttgacagtagtatagtacaattcaaagaatacaaaaaaaaaaaaaa

SEQ ID NO: 205213 - DNA, 937 bp, Cannabis indica
acaagatgcacttatttgatattgtttagaaagaaaaaaattaaggtagaaaatatttaatggatagcaacacctttttctaaggtgatttatattttgttaccaaaaaatttatcttcttaattaataattatatgctgttataatggagtagaaatattttaattaagaaatgaaacaaacaattaagacatattagctctttatcaattttttaggtggaaaagttagatatttttattattgtttctaataataataataataaaaaaaggttaaaaagtatctgtgtatactaattctattttaaataatttataatgacaaaaataaaatttacatattgtactagttacaagattatttttttataaatgtggtaagtaactttttaaatcttatttttgataacaagtagtcttaaataactacaacgcacacaattattaaaaaagtagactaaaaaagttttctaaacaccgaaacagttataagatttactagaacgacctttttaaggggtctgtacaaatttttttaataatttttaaagaatattactaaataattaaaaagacaactaatagctaaaaactcataaagaaaagtattagttttaagttagattcggcgttgtttgaaattgtaatataatagtattagtattactaggcttaatcctcggatttggataatgttgccacgtaccttaattatctttttcactttctctctcctacacttttcaatgtgtaaatgtatatatatatacccatatgagcttaccattctttcatatctatattcatcatcatcatcatcatcactctcccattttgtgttttttgatttagattaatttttcattttagcacacacaaaaaagaattagtttttttgttttttaaagtagtttttgtaaaaatgttggctaata

SEQ ID NO: 205214 - DNA, 593 bp, Cannabis indica
caaacgggattcgatggatttgagcccagaagggggtatatctaacagaatcaggggtaggagttggtgagacatcagggtgagtgaagaccatcaagaacttatcaaaatgccatggctgctcttcaagcacacggcgcctatctccatcacattggaatgaagctagaaagaggccagagtgatactcagaaatttgacagggaaagcggagggtccaagcttcagtcatggctttttcaatccaggatggtttaaccaatttgggagataaaagctttaatgcatagtttatttgccaatttatattctattcctaataataattaacaaatatacatttagtatttgaaagaaaaaaaaataaaaatagatactcgcgtacgtttttaattagtgaaagaatatgattttgagctcatgaagctcgatagacttctttgttttttttttgttttttttcttttttaattaactaatgttttttttttttatgaagagttttatattttattgtgaggtttatgaatttattttagtgttgtttgtgtgtgcttgattggattgcttttttattttgctcattgaaagca

SEQ ID NO: 205215 - DNA, 686 bp, Cannabis indica
cttttgaagttaacaaaaaaaaagaagatttggactttctatatgatcaaagttatacgtacaagagcatatgtagagaaatagcaggacccaaataaatataacaatgacataattgagattgctagtctattaaacaacataatcctaataatttcgtagtttacaacacccataaacgccattgataaaacccatcgatatctataatttaactgaaacagcacaatgccaaatcaaaaattaaaacactgataataatgtagaactgccgcaagacaaattaaccctaaacaaattgtatatattgattatttagagggttacttaccagatcgaagacaagcatggagaaagcgtctaaagggagatgaggcagtcttaggaagtgaaattgaggaagtggggagtaggctttggcgtgcgtagggggcaaaataggttagggaataagggcgaagtgtgcccagatactgaaccatcgacaaagctggctgataatattgtggaaatgcagaacaaaaaggagattaaggcgttggatttgggtatgatttatgacccactaaaagggaagaccaaaagggcatttttatttatttttatacaatttagtaatttacttacaaatatctaaccattatttacattttcacagtatttctttttttttttttttagtttag

SEQ ID NO: 205216 - DNA, 722 bp, Cannabis indica
agtgttctgggctttttttttgttaaaaaaatatataggaaaattttatggtgcatgatccttttcgttttttcggcatacaatatgactacatacaatgtagttatttaagatattttgtaaatttcaaataagttcaaaaacatgttatgtgctggaaaataaggttcaaaatgaaacaaggaatagaatgtttgaactttgctttctatattctatattgtaaattattctgaattttttaaaattttacagttgtcttaaataagtatgtcacatacatacaaaaaactaaaattaaaactatatgaatgttaaaaacacgaaaggaatgcattagttacaataataattataataaaaaagttagagtatcctttttttttcgcatcggttctccttgaagattaatgttagcgtcagttcagtaaccgatatttgtcaacgcatttcggttatgtaccgatgtcagcctatactcatttctctagtaatatgtttatatctatatctatatgtgtatacttaggtgatgcaaagaaaacagaacatttgatttcacttgatggagccaaggaaaggctacaactatttaaagcaaatttattagaagaaggttcatttgactctgtggttgatcattgtgaatgtgtttttcatactgcatcacctcttactttcacagtcaatgatccccaggtacttttatatatatatatata

SEQ ID NO: 205217 - DNA, 2371 bp, Cannabis indica
accttctccaaatttctcaaccaatctagggtttcgaatccacccccaatttcgcctccttctttatcggaattaggttacgcttctattttccaccaatcccctttttcaattttatatataaaaaccttgttttgccctctatctcactttttattccttaacaaactctctctctttctcgccggcgtcggcgacatgccgatgatgcaattcttttccggctagattctccgctgcatcgagactgagatcggacctttcatccatacagtacggtaaggagacattgacttccctatcgatttatgtaatttattcaataaaagtgtctcatttatttatttataataatttgtttgaattttgatccagaaagttcgttttcctggattagatagattttctttttgagagaaatttcgtgcttattctgtgaaaaccgatttttttctttctattttttgtttttgaaaagctgtttggatagctggaaatcgagggagaaagttttctaggatttcttggtagttcggtagtctaaaatcactttgaacgagtgatttttgttttctatttctccatatgtaagacgagtttttgatgagaatttaccaatttttttttattctaaaaaaaataaaataaattattatcgttttcagtcgtgattgatggcgtctgctttttccttcctcctagacgtgtccttttttatgaaatttcctaattttctaggtttggtacaatctataatattgatattataatattcatcctaattttctagggtttggtacaatcttatatttttaatattattctcctctcaataatagggtgagtcctgtacttaatacaggacaaggtcaacttattgttggttggagggttacttggatttgtacctgagttggatgaccttaattggattcatcacaatgctgggtttgaaaagtacagatgggtttattcgtacgagctctttttcccatttggctgaatggcatccactggaatagcaaagctcattcgggctccaggccccttctcctcctgtaaaatcaggttttgatttctttggacaatgtttatgtatgcacttttgcgttgaagaatctagaaacttgtattgtcatattgtcgtagttgaagtttttgatgggagttttgaaggttgattacttgatttgttttttgttaggtagtttctttgttgggattttgagagaaattacttttgtgctcttttacaggtttttaaattgaagtattttgcagttggaagttctaattactaaccaccgaaaacaccaagtttctcatgttgagtaagagttgttctattgctaaaatgatgggttgctgtagttgttttggcttcaccagaaagcgtaaaccagccaagccttcttctggctttaataatcgcctttcacaagagttattattggaaggaggaggagatacggaagatgatgataattgttcatcaaatgacgatttaattaacagcgaccaatgtgaagagagtgagccacaaactcgcaccaaacgctcagaagatatccttcacataagggcagagaatggaatgatttgcaggcaatgccctgtcaaggaaacccatagacttgttcgagcagaggtaaatgaaattcaattgctatagttacatacttggggctgtagattattactgcaaaagctgcgtgcagtgattattattatgtatgtgtcaatagtggaatagtttggctcttaagttttgtattgtgtttaaggaataaatctccatgctttacagtttattgcagcttaatatcacttacaatgcgtaggcaattagtcacatgtttgaggggcgagattaaatttaaccaatatttttacttggttgttcatcatgtgtcttaattagtaacttatagtgtactactgtttacttggctgtcatgaaagtttggatgtttagtgtatactatgatccctttggacttgcatgcattattggttttccttagcccctcaggacttgagtgatgatatctgattttttctgaacattctccaggacgaatatgggaataagacaatcaatgaatatgtccgcgagtgtaagattggtgccggtagctacgggaaagtggtaagtatagaatgcacaaattatttcatccttcttcttactgagatctttaacattttctggccttaatgtgctctgcaggttctttatcgaagccgcgttgatggaaagcattatgcaatcaaggtatacttctttgtcttgatatatggaattcatacatttttttttcgttaatgtgatgtaggtaatagttgttaacaatcatattctatttttttt

SEQ ID NO: 205218 - DNA, 751 bp, Cannabis indica
cgattgcagcgccttccaataacacgttgaacctcatagtcctaggcctattgttctcatcctttaacttcagcagccatgtatcccaatctgagaaggataattcatcggttttgaggtgccaaatactgccaaaccagatggctctggcaaagtggcaagttcaaaagatatggatagagtcttccacaaccgaaccacagaaaggggagcttgagtcattcagtttaaacatggaattcaattttcctcttgtaaggaggctgttggaaaggattttccacaataacatcttcaatctactgtgaatactagctccacaaatgattctccattttgtattgttgtcgtccctatcatctatattcttaaccaatctgtaggccgacttaataatataattaccattggttttagagagccaaatccaagagtcttcaggaggctgatttggcagagtaatgttgagaattctcttagcatcatctctataaaaccatcgtcgaaccatttcctcattctaaatgttgttgagtatgaagttactaaccagacttatccctaccgaggcatcaaactgaggttgtggttggaggttcccgttcggtaccaagggtggaaccaaattgaggtagattgcccattgcctatcttcttacaaaggcctcaaatgatgagacttctagtatgcattatggccttccatagaagagagtctcagttgttaatctcaatgtccatgaagcagcga

SEQ ID NO: 205219 - DNA, 642 bp, Cannabis indica
agaaatattatcggcctatttcttacaattaagtaatagaagaacaaaaaggggaaaagcaaattaaaaacaaaaaaaaaacatttttgtttttagaaaaaaaaccaccatgaagttccattccatctagtctcaactttatggaccatcaacagtatcaacctattattcaatacattcaaaaatagataataaagaataatatgatatcattaaagacaattcacagaaaggggccagaagcacaataactagtgtgcaagcaaggattgaattgaagtgattcaatcctaaacccaaataagagcaattatccctttgttcattaattattaattttaataagaaacaattactggttccccatttaaactcctgacctcttacatacaatttacacacataaatggagtttcataattagggttaatcgagctggtagaacttaattccataccagaaagaaagaaagaatcagttctaataccaaatgaggctcaaatccagcatatatcatcaacaaaacaaaaatatatattatatataacgaaatggttcgaacctttgaacgaaaatcaaccacaaaaaccaagacataaaatgcttccctttattaatttataaattgcaaaaccacttaat

SEQ ID NO: 205220 - DNA, 968 bp, Cannabis indica
taatgtgccattagcgtgcatgacgaaactcttgcaagagagtcggggggagcggattggtaagcgtggaagatataaagcgttgtgaagggcaccatgaaagtgagggtaagattgaatattactgagcctcttaaaagggggattgagggtggctattgatgatcaaggtaatgaagtttctctcctttttcaatatgagcacttacctgagtttttactatgattgtggcatcattggccacaaggctttggactatcctcttagagattttgctggagataacccacggtttgatggtgggaggttcggttcttggttatgtgctccagcatcacctcctcgagataatttccgattcaataagaagcgtgcggagtctccaaacagcaggccgatcatgtccatgggggaagcttcgaaaattatctctgcgatggagagatctcggccacggttttcaggccttactcaagaacagttggctcctacctctattttggaaagacgggaacgagatgaagaagagatggatggtattgttgctgaacagggggtcacggagatacagagctacgggggcgttcatctagtgggaaaatgggtggtcatttatctgaatgtggccatggtgatactggaaatttggtgaggatgtcgtctgtagtgtgtggagatgaggagtcaaaggataaagggaagttggagcttatgccgactgtggtatgtgtagatggtgagacttgagataatggaaacgtggatttaatgcctactggggtgtgtgaaggtgatgagttaactgctggaaccgaggtgttgcatgtcaaggagaggtctccacgtgtctcggctggtgtgggtacttcttcggctggggagatgatggatagtggacatgtgattcaaatggagggccccagtaatgatcggatacaacaaataaataaaggaaaaggcattttgc

SEQ ID NO: 205221 - DNA, 1085 bp, Cannabis indica
atatatgttgtcagattttaaaaatactgttggatacatacttaccttaaattgtacataattattacataaagataaaataaaaataaatatcaaataaataacattaataggagaataacaataagaatactatatggactaaaataaaagattacataatattttatttaaaaaaaaaatggaggaaaagtgtcccttttatgtattatattgagtctccaatgtttgtgcaattgtgcttacattttcttttagcacattaaaaaaatatataaataagatatattgtagatatttggtaaaaaaaatttaatatatatatgaatatttgaaaaatataaaatatacattattttctttatgaaatcattaaaattaaaataaaggtaaagaaaagattcaaaattaatacaaaaaattaggtaaagtgaacaaaattaaaattaattaataataggaatataatatttctataatacaaataactcttgttccaatttatctagttagaatttgataaggtataggtacgtatatatatagttttatttcaaaattaattgacaatagatggtagatagtttttgcttactaatttttgacagctcgattacaagtaataatattgattgacaatggatcttatggttcatctttttagatcggtgataatttgatttcatagtaaatcacaagatgtttttttttggctcgtctttttggactaattattagatgtgaatcgtatactcgttagaatttaatttaactttaataccatgttaaaatttagtaaggtgtaattaacctacatggagtactatcttataactaaatgataataaaagaagtagttcattcataatttatatataatattatatttccacctctaacatatctataaaaaaaaaaaaggtcttgttccaattttgaattatgttttatatagagttgagggtttgtatattgctttgttaacgttaattgtgtctgagtctcgttttgttggcctatcagccttattgccctttactcaccttttttttagaataatttgttggaaacttacaaaaatactg

SEQ ID NO: 205222 - DNA, 1859 bp, Cannabis indica
actcacataagtgaggtcgatccataaggaattaatatcaagtaccacaaactagatttatatttttacttggtaaagttgagaataatgtttaacaagaattaaatttaaaagcagtaaaattaaaatacaaaaacaatgtagttaaatatggatgaattcttaggaacatgaatcttgttatttcagttacccaattgtgaatgtaaattattaatgttctttcctccaagtgatgacagattattaaccatgcatggttttagagtcattccatctaatcccatttttttaaggtctctttatacagaatgttcattgaactcccattatcaacaagactcacgttattctcttattttagagctgaatggatatcatgagtggatctaaatgaggaaaccttgcgtgcatcacatcttcatcagtaaaagttattggaagttcttcattcttagctcgttttgtcatctcaggcacaaaaattgaagattgatttttaacttggtttatgtatctcttttgtgcagcgttacttgttcccacaagatggggtcccctaaaaaattcaccaagatgtcctcaccctctatagatggttgctggcaatttggttttgattctggttgtgggttgaatctactcattcccccattcttcacgtcttgttgaaagtaacctctagaaattagactttcaatctcatctttaagttatcgaaactcctcagtggtgtgaccaatgtacatgtgaaagtgacaatatttattctgatcccgtttattccttgcattcctcataggttctggcttgcaaaatgcgacctattctcattcgcaaggaatatattttctcgtgtttcgtttagcttggtatacacggtataaattaggacatactttttctgtttctttttgtcggatgagtccttggaatcatctttcctcttcccatgtggttcatggctttcactcatctttacaacgtttgtttcgacattgcttgagctggggtttattccccaagccatcctttaatacttttaattcagtctgagcttcttccttcctaacatagatgggtgccctatcattaaattcatttattaatttaactgggcacctttgcaaatcatcccacaacgcgcctcccatggtaggcaagtcagtagttatcccagcctggagtggtgtcaattgaatactattattcaagtttttaacctttgctactgtcatgctaaagtaactcaggaatgctttcaaagattcccccgactattgtttaatatttgtcaaggatgatgcttctggtcttctgtccctcgcaacctgaaattactttttaattctttagataattgttctcactaggtgatggagtgatttgtaaacttatcaaaccaactactcattgccccggttagcgacgtggaaaaaatatgcaacacaagttattagaaacattacttgttcccattatagtattaaagttattcaaatatgggggatgaccagaccaattaggtggttgatcacttgcatttttattatttctttgagacgtctattgccccttgctcgtgtttgccacgaagttttcgctccctaattctaagggccttgcccataaatatgaatgtcccttttctcccctggttgttgttcctaggggtgagtgtgattgtttggtttctgttcttcaatgttgggtccttgtgccctttttgtttgcgaaccatggggcatctattgtagtcatcgtacagtctgctcttcctacacaagcggtgcatctttttgagttactctggccacatccatggcccattctaacttgacaattgggacatatcttgt

SEQ ID NO: 205223 - DNA, 579 bp, Cannabis indica
gtcattgatgagatatctacagtaatctaaatgcaaaaaataagagtcaaacccgctttggtcaaaactatcaacgtttaccaaagacggagccttgactacacgaaatggcatcttaccactctcaaaagtactcgctcccatagtacctttgttctggatagcacccttaaagcagatagaaagttcttcagcttctctcagcttctttgagaattaacgattccaatctgcttaccacttctcatcatacttaatagactttaaggtttcctccatagtaatgacagtaatgacttccttcactttactagaatcaccattgaaaagatccctaactaaatccttcaccactaaactatcaatgctttggtgaggagctatcaaactagcctcctacagatttttagaagtcgcaagctctccaatatgtaactcttctactggtaaatatttctagaatgcctaccttgcttcaatttttggagttagcgatgattgcggaagagaatctgaaaggaatgaaaactaagaccaaatcaaaagtaaaacaaaataaggaaaaaaggaggccaaatt

SEQ ID NO: 205224 - DNA, 739 bp, Cannabis indica
ttttttttttttgtgttattattattccttttgtaaaaaaattgtagttatgagatatcatcttaatataggtaagagttctcttaaatataaaagttctgagattttttgggagggtacttaaaaacaaaacagtgaggaagtccaaaacggacaatatcatattaatgtgggagtaaaagtaaggtagtgatctaactaaggtggaaaaatggggcccataaagtagtatcaaagccaaaggttaaggagtactgagatagagaactgtatttacgatgtgtgtgagaattcttcaatgtgatgacctcgcgattgaagatctatatgatgccctatatcgaaaatctacttaatattgaggtagtcaggtggtgtgtcccgttgatgattactgtggtacaagatggagattaatgttaggacctgtgtcgaaagtcctcctgtcaaaagtgatggttaggctgcgagttctgttggtgatagcggcgtcataaggtggttttgctggagaagaagccacgagtatgtggtctttggtttgaggggaggattgttggggtatcaactcaagtctcagattgaaagtatagagaagagttgtcttggatataagtgtttcacctactccattaggatatgagtcttttcgagaaggtgtcgaaaaacaaaatcgtgagagtctaaaaactcaaaacgaataatatcataaaacatgattagaacgtgactcaacatt

SEQ ID NO: 205225 - DNA, 734 bp, Cannabis indica
agaaaaaaaaactaaaataaaaaattaacatcggaaagactgacctgaaaagcatcgaaatcggaccagtgagaggagccgtgggaagttagtaagcatgaagacggaggaaggacaggagaagaagaaagcggcgagacgaaagatgaatatgagccagttgaatcgacggagcttttgtacggcgagtgtggagtgaaagggagtctggttgtagtggtgattgttgtggcgctgctgtggcggcgacggcgacggcgtctcaccgttacgcgctgcctggaattgaggagatcgcatggtagtgagagaagaaacagaagaagaggagaagagaggttggaatcatgaggagaggaaatcgaagtcacggggaagatggggtgtattccatgggataactctgagggggcgtgagagtagtgagatggaaaagaaaagaaaagaaaagaaaagcggatgggaaatgagagggaaagtgtatctgaaaagtgaaaaaaaaatacagagtttattttatttatttaagtgagagagggaaaatgggaaagaaagaaagaaaggaatggaatggaatgggagctgggaggagagagactagtgagtgagggaatagcctttcttgcctctcatttcttcttttaattattattttatttttagaagaatattaattacaacttattattattttttaattaatttttgcattcgaaatgcatattagaatattt

SEQ ID NO: 205226 - DNA, 1407 bp, Cannabis indica
aagtggttattattttcttataattgtctaatcgaaatttctctcaaaattgaaatcttagaaagttaaagctgtatttccggatgctggtgctgcagcacttctaaaatatacttggaaagatgctacttttggattctccaggtaacttgcaaaacattcacccaaatttcaaatttagaaatgctttttgctttattgaagctaagatctgttgctttgcataatcacatcataccataatattctgtcttatcttaatatatacacagcttaagtgaccggaagcctgttgagaaagaagacgaaattgtggttatggttgttcctgattatcagatgctgggatatgtagagaaaattgcagctgatctttcagatgatccggtaacaatactgacatttcattttcaaacaatgatattcatgaattggcaaaccttttcttaattaatttgtaagtagatcaacagatctctctctagaacagcctgaagtaagtaggaaatattatattaatcaaagttcctagttgtatatgggcagccaaggcctctcataatgtggaatccacgtctcattagcgaggatgttggagttggattcaatgttcgaaagttaaggcgctactttcttaggtatggtttgaagtatctttttctatcttgtacgtatagattttatgaacttaataacatatcaatttgacatgacatgaggatgtcctttatgaacatttgttagctgaccgaccatattcgcctttctcagctcacctccaaatttgtttgttcaaccctttaatcaactctaattcattggtttgcagcacctttacaacagtctactcaatgaggcctatggcagctggtgcagtgtttagatgttatccagggtaagagtattatagcatgatatatattttattatgaagagaaaataaaaaagaacagaacttctcacttgattatgttcttgattcttttaatgcctgatcttgctagattgtggaaggtgttctatgatgataaggatagaccaaacagatatcttcttgccgaagaacttgttcgacgtccagatgccgaagaccttgaggtatgttgctgctaaaatttatgttttcgattgcaatcacatctacaaaactacaaatgaaaccaaactattggtttacttcggtttggtttcatcattcaaattcgaatatgaaaccataatgaaagctgaatgaactagtcattggtttggttggtcttattagttttctctaatcattcaaaatgaaacaccatatgtttgactatatctaaatacagtttcacatgcttgaaccacaaacgaaacataatcaatggtttcagaaattgctgttttggcagtgatgtcaaactctattctattcaa

SEQ ID NO: 205227 - DNA, 851 bp, Cannabis indica
ttatggggatagattgatggtgtgatgggtatggataagttgtgttgttatacggggaggtgaaaccttggccgttttattataatagattatttaggaaaaaagaaaaagattaattaactataagaaattgttgagaaatgaaatagtgatttttttggctgcttagaagtcaatttttttatccatttttgtattattggtattcacacggaaattttttctaatgatgtggatatcaatatttgacatgtggcatgaaagatgacattacggagttgagtagccccgaatcataacagtcaacctagaggggactctagtcttgcgctcatgttgactttgtgatctctgagatggaagtttggacttcaataacttgaatccaattcgctatctttcagtattatgtaccatgaagacatggagcaacctaatctaagtcccgagagctgaaattacacgaacctgtaacccggaagctgacctaggcacctagggttttacctggcgcccaagttgacatcctctactagagtttcaatttttgggaccttcttagtgcaaaaggataaaacttgcattgagacatcaactagacataccacaaacatatttgaggcattagaatcagaatcagaacaatttgatttttgagcacctgagggctgaggccccaagcacccaacgtctaggttgacaatttgacaatttgggggccttccaagtattagatcggagatccgaattttgcaccttcttcgtcttaatcaaaatggggaaataggtccttttggataaaaataacaattcttaggtacaaataacagggcccagtgcccaggttgaca

SEQ ID NO: 205228 - DNA, 533 bp, Cannabis indica
aaaataagacgtggataatgtctggatacttaagagttaggtatctataaaaattctaactgaaagttaaatttaaatatttatctcttatttgttttacttctaaaaacttgtttaacatatttatttactttatatttttagaccaaagtgctatactaattagtgcaaattaaacaattttttcaacataacaacttataaaagctaaaacagacatgaataataagttgcatcaaatagggcggacataattgttatgcaccactcaccattcatgatgcggttcagcatgatttcaaaaaggtacatcacaaagccaatggaagataccttgtattattaatgtcactcatatctctgcgatttacattaaatattaatatatcttgtatgtttcatacaatagtgtgaaaaaagaaaaataaaaaagtaaaaagggagcctgactgattatttcaacgtttcttttaaatgagtgagtgtagggaaaaagtcaaaggccatacaaataaggattatatatatatata

SEQ ID NO: 205229 - DNA, 548 bp, Cannabis indica
gtacatcactcacatatatatatatatatatatatataatatatatctgcaagtgggattatatatatatattataattttctttgtgtggatgtgaatatatgcattgtaattatttgtgtggccttcgtaagataattagggttttccacatgttattaaattacgtgtgccaaagtataataaattaaacagctatatatatataatgacatgatttcaattgttgttattattaatttgacgatcgatatgtatggtgatgaggacttaattagggttacattattggtttttattggaacaataattaataatttgttttggtaaaattatttaatatatatatatatatgttgttgactatattagtttttgaacaacttgctttgttccacttccacaatgcttgcatccaataagaacagcatcaaatcactcacgtacttttcatccaattaatttacattatatatatatatatataaatatattaattgttgtatcgatcgatcaacctataccacacatttattcattattatttt

SEQ ID NO: 205230 - DNA, 1030 bp, Cannabis indica
ggcacagaccaatcaagcccaataatttggtctatattaagaaacaagaagacgaacctctaaaggattacctacaatgattcttagaggccaccatgcaagcaaagatactcagtgaagacgccaaggtcatggcaatgacagcttgactaataataattagttgattatggaaagacttgaaacttaaatcaatgtaaagaattgaagagtttttagataaagttgatggtttcacaaacctcgaggaagccgttaagaaagtcagaagaattccttaaccaaaagtgaccaattacacaacttatttatttcttgagtctagaatagacattgaccaggaaagtgaagaagattcaaaacttaatacctccactgacacaaacacctctctgtttccaaatatgaactcgagtagagtaataatgatgacgagtcccctattgtttctcgagaagatctcaataaagaaagtagtgatgaagaatctctccctacttcacaagattactcaggagagggggctagggacaaatattcaccctctaattcaaacaattatctggaacaagaaagtagcagtgatgatgtctgcgatgagtcttctaaagatattaacatagaaattgtcactgaagactcccaatgagagagttccttaacacaaagctcgaagaagccgttaagaaggtcacaagagttccttaaccaaaagcgatcaattacacaacttatttatttcttcagtctagaacagacattgaccaggaaagtgaagaagatttaaaacttaatacctccactaaaacaaacacctcttttgtttccaaagatgaactcgagaagagagatagtgatgacgagtcccctattgtttctagagaagatctcaataaagaaagtagtaatgaagaatctctccctacttcacaagattactcaagagagggggccatggacaaatattcaccctctgatgatgtctcctatgagtcttctaaagatactaacatagaaattgtcactgaag

SEQ ID NO: 205231 - DNA, 997 bp, Cannabis indica
ctattatcgctctcacccctcatcatgaaccaatgtgcactcactcattcactcacccattctgtgatttttatttatttattattattataattattattattattattattattattattattattattattattattattatcaataaaatggaaatagaaacaaaagctaattttgtttaataaaagagataaaacttgtctgtcatttcattgaattaaaaaaagataatagtacaaatcttaccagtttacttggtgcattgcccttttcggttttactgtcttatccaaatttctttatctctttctttctttttctttttcttttttattttgccataaatattgaagttacatgaaagattaacaacaactatatatctgggtttgccaaaacattcaaatgtttttttttttttttttattcagatatatataggtcgattggtctgactcccaaagtgtcaagatttggagctaatttttttttttaaaaaaaaatatgatgtttctaaggacaagaaattgagttggccacacattcatatggagataggcacttttcttttttttcctgaaaggcaaaagctgcccaaaccacatgcttgccaactatatatggtttttcgactttggaaaatacatttaatatttcagaagggcattcgaagacttactgggatatgtccctagaaaacaaaggtagagttggtcattccattaacttttagtttatcaatctatgagtcttgttactctatacaggccaatcatatcggtgcttcatgctgttttttcacttcaatgcattttattctatttttgtatcctaaattaatttctgacaaagagaaaaataataaaaaatgagcctttttttggggacaagaaaaaaactgattactatccacgacaacattaacaagagatgcgtaacacgtacaactgtcgaattagcatttgataatgcaataataataataaaataaatt

SEQ ID NO: 205232 - DNA, 796 bp, Cannabis indica
caaaaattgagctaagggtcctagttacttatactattttagaatatacaaaatttagtttgtcatttaacaaaacagacgatttaatcagtcatttttgtaaaacataagatctaaaatcgtattaactcttgttattattattaaataacaaacatgggttctacaaataaaaaataaattattgaaattatattttgggtgtaatttctttaatgtttaaaactaaaatccacgagagcatctcccgtgaaaatgtaaatgagtaatgcaaagttaaaatatagttcacttagcaaaaaaaaaaaagcgccaatagtatttcaaaaagtaatgcaaatttaacacatagcaaaggttgttttaaatttggcacaatattttctagggtaaataccattttagaccttgtgttttacaaaagttaccaattggactctctgttttgttaaatggcaaatggaccatgtatttttcaaatagtagaataggaccttgaactaattttttgtcaacataaaatttaataataatccaatctaaatgtgttatgacaaaactatttacattttgtgtatctgttcctgttagaaattgtcttcaagttggttatattaaaaaaaaaaaaagtcgaaaattaaactcagaatctcatttttactattttggaaaatatagggtccattttgtcatttaacaaaacagagggtccaatcggtaacttttgtaaaacacagggtccaaaatggtatttatcccattttctatgatacaaaatggaatccaccccctgagg

SEQ ID NO: 205233 - DNA, 1077 bp, Cannabis indica
ttaattttatagcattcattgaatgtaatacgagtctataaatatgaaagaaagaaaaaatgtgttgactattatattttctaaattacttatctcataaaattaagaaaaaaatgatattttataataagtttgtctaaggtgtgatttatcaagttgtgagatttatatgtaaatgtgatgttattcattagtttcatatactcttaatttgtggtatcaaattccaattaacttagaccaaactatttagaactaaatcaaatgaatctggtgccaatagtttggttaatctagattatttatatttttgttagttcgatcacaattttaaaattcttgcttgtgatttaaaccaaaactaattcgcttaactcttgatgtatacttattatgatttcttttagtgaatattaatatttaagaacaatattaagcataatattgataattaccttaatattacattaagaatatttatttgtaatgttatttacatattataacctttaaagtaaaaataattcaataaaaaatattaaaaaatttaacgaatcaccaaccacgattttgaaccaaactaatctattatgaagtagattagtttattttggtttcaacttttaattggtctagttttgttttgaattttaaaaaactaatattactaatttggttcaaaaaatataaaaatttagaccaaaataaaccgtgaacacttctaagaggatgaataattgttgcattttgtgtggcaatggtttgtaatatttgtgtgataatttgttagtggtaagttacttaaaattgagtgctgcaaatgttgtgaatgcccttaatgcttaaataattactgtatagaatattatgaaaatcaaagtattgtatacttaaaatttgtaatcttattttttttttacccaaaaaattatatatatataaaaaataaatgaatgtatttttcatttttttaacacaaaaatgtggaaaagaagtttgcgatgctccaaattttagtataaatcaaaacacaatattcaacttaatttttctactaggacattcccattcaaccgc

SEQ ID NO: 205234 - DNA, 688 bp, Cannabis indica
ctttacatataattctgtagattattgctcaagtattaactttttgtttccaatctattactttatgttcggcttgctctattatatagacaaatttgcctagtttacagaagttgcaagaatacatgatggatgaatgatcattttgtagaatatgacatagaaggaatggatcataaaatttatagtgaaggaatgggtttctgcatttgtgaaagtgtgaaaccattggcaagaattagtagagtttaacataaaaaaatttaaattgccaacctgagtaatccacccaaattaaaccaaaaaaattcgaccaaaatataacttgccaataaacctaaactaaccctactaacttgattaaaagtttttttttaatatttttatatgttataatttataatttctatacatattttggaaaaggaaatataaaattcaaattatatttatatttatctcatagcagtcaatccaactaaatttgccttattactacaattaattgaaaaaaaaaactgtggtggtcaactgttttaactaaaattaaattaaactttggattcaaactgttttaactaaattaaattaaacttgcttttgattcgtaaatagaagcctaaagggtcacatgacagaaatagacttttgttttaggaaattttacacctatatacattatgttaaa

SEQ ID NO: 205235 - DNA, 827 bp, Cannabis indica
taatgatcttattattttttttccttatgaaccatttttttatgtattattttttttataatatttttttttctaataaattattttttaattatttgttaataaaatattattatttggcaccttaaaatgtttaatactatacaaatatgacacttaatacttagttagcatattctatattatatacttaattaaaatttgtaagacccgatattgaaatacaccaataagagtatgtcccatatatggtgtttagcacatcctttaatatttttcttatcatctttaatgtatggtgtataatttgagctaaaaaaatatgtcaatattatatttagctcagattttatcatagtgcttcaatacatttagggtaaaattaatcctttcttgatagaaatctgtgaaaaaataacaaaaatattaaattgttattgaaagtatgtaaaattttattaattatataaataaaatgtgaaaaaaatgattaattatattaataagtggaaaaaaagtaaataaaaaagtaatatgtattgtggtatctttggtacaacttttagtatgtgctaaatttggaccacttcatacaccactattagagtttacttttatgaagatagactaaaatatgcatatgcactacacttttagaactccattaaaagtgctcttaatatgtacatatccttattcactataataaaaattagtttcgcttttttttttttttcaatcatacataactttgcaagctttttttttacttgttccacactgcttaggtgagattttccttccttgttttttgtattttctcaaac

SEQ ID NO: 205236 - DNA, 1037 bp, Cannabis indica
ttttctgtttatatttttattatgttctttatttttgtgttgcctaaattcctcccacatttggcgcgctctgtgggaaagaactattctattgatttcggaggaaaataatcatggctggaaaacagacaaacggagataacaacactggatcaatcaatgttggaacaatgaatgttccactcctaggtaatgggacggcacttctcaacaccatcgatggaggagtgggacgaacaactattactccactcaatttattgcctgaaattgctgatgatgctagagaaatgtctacaccggcagccactgtgggacagttcccgcctatcacacctgctgttgtgtctgaaggcatcatccaattgaccacagcccaatatacagccttacaagaccaaatgcaggctttgctgactgagatcaatggaaggaccacgacccgacgtcctccacaagtaccaaccacatgctcagacaatccttaggtaacaaatactaggcgacaaactaatcgcactggcagagaacacaggactggacaacagggacttaacttgaatcagctgaggtagagggatcaagtcgcacgaaactccaaccacgaagtgccacaacaggaggacccagagcgacgcaaccctcgcagcagggctcaaccatgaaatgaggtaaatgacgttcaatctcgttcctcatcctcacaaagtcaaactcctagtgtttatacctggtctggctctgtggaaacaccacgaggaggaaggtatcaagttcagagaggtgatcttcgtgatcacctcaacgcagtttttagagcgcggtcctagacgccctgaaatcgtgaagagcctcatgatccccagttgggcgatcaaggcataaacaacggcaacaacccaacaaacgttgtcaacccgcctaacgcaccagctgcgactacagaattggtaatcccagcaaatatagttgtgattgccactgcacctacgatgactcagaacaatgtcgtcatgccagggggtgttgatcagagc

SEQ ID NO: 205237 - DNA, 679 bp, Cannabis indica
atccgattttatattattaatacattaataatatatatttttttgtaaaaaaatggtatgaacaaattttaccaaatacctgtagcaaatttttgctattcagaggaaacaaaatgacactagtatttgaacattttgaactcaacaaacctagaaaaataacatttcaaacccaaaaaaaaattaaataaatgtatagaactcctaatcgccactactggaccatgatcgaccatctatgaaccttttcatcccaccacctttgtcaatctgtaggaaaaaaaaaaaaaaaagaagtagatcccacaaatcgttacttcaaaattagcaagaaacattgagttttgaaataaaatctaaaatgactgccaatgaaaaatcaatacccagaaaaaataaaacttaagattcaaatttgtgtagaaataaaaaatttgacagatttagtggtgatgattaatgaatgatttcatggatttgagaaagagaattagtgagaaaaaaagaaaaaacatcaagaaacaatggaaagcttacttgccgtgaccttctagtttcgactgaataaatcgatgatcaaggacggcaaggacctagtgggtgtcgcctggggtaaacgatggcaacacctggagaataaagcttgccgctgctcgtcgaacctggagaagaaatggca

SEQ ID NO: 205238 - DNA, 527 bp, Cannabis indica
ttttttaattgacacaatgtgtactggtagatattgtcatcttaaaattatatttgttgtttagttagtttttgttattttaattatatattacccattatattatatactaactttgaaattataagactttattatttgtattattaatataatcattggtttaaattttaaaaaataaattatcgttttagttgtcactaactttgaaatggtgaaaaaaaaagttaacaagtatgaagatgtaaaaaaaaatatagtagtacaaatagttaatctgtcaaaattaagtaaaaaagaacttcattatacaaaaataagctgaggagttgagattattttacatattacaaggaggtcgatgtcttataatttttatgttgttttgtaactgttttttttatagttattttcatgttgttgtttaggtgttgtataattgttttattgaaacagtatctttataattttgaaactttaagatagtatttttgaaaacttaatttgtaaaaaaaaaacaaaaaaaa

SEQ ID NO: 205239 - DNA, 578 bp, Cannabis indica
ttcttccaccaacatgccagtaccaggaagaaaaacaatcaaatccgcaagctcactgatgcaaatggtaatgtccaaacaagttcccaagctcttttggctattaccactgattattaccaagatctttttacaagcaatggagtagatcaagaatcattgaatattattctagatacaattccatctgtcattgaccatgaatcacagatgtttctctctagtccgttcactgctgcagatgttcataatgccctcaaaactatgagtgatgacaagagtcctggtcttgatggtttatcagtgatgttctatacaaattattggcacatcgtgggtcaacaagtcactgctgctgtgttagatgtactcaataatggtgctgatccaagcaccttcaatacaacactgatcacactaattccgaaggtaaaaaaagccaactcacattacacaaactatcggccaatcagtttatgtaaatgtcctaataaaagctagtatccaaagccattgtaatgaggctcaaacctttcttccacaagtgatatctgaataccagagtgcttttatttcac

SEQ ID NO: 205240 - DNA, 1250 bp, Cannabis indica
attgacttatgcataaatagaacccctcttattatatttcgcaagcttgatgtattctaccttctcaaatgaatcttgctaaaacttcaagtgtttgaactccattcgatatgcttgaagagtgcttgcttccacctgaagcaagacttgaaatactttctcccgaaagctcgaattgccaccttcttcatcttttatcgcctgaaaaattggcctattaaaactcctcatgaaattaactttttttgtgacttaaaaagaagtccaacttgaaaagaagaatgtttctatcacttccatttgttgagcccatacatataaatattaccaaaagtaactacggcctttaccaccagtaatatttctacacccgaattcttccatcgagacgcataactttttaaaaggtggccccttttagaagacatgctcctctaattgacatgaagaggagggctaatgctatgctgatttatattgatgcatggtagagatatgggagaactctattcaatactgagaatcttcaaaagaattggctgataaagtctttccagcgagtgtatgctagcattagcttctcagatgaatcctggacaatgctactcgagcaggatgatgaggattctcaaagtacaattgtcatcttgtctcagacaatgtcagaagatgtgacctcagttcaaaatgacacagagtatttgaggagaatatctatgttcttagaccagggtgatggagaagttacctccaatcaaactgctctgaagaaggatagggaatcaacaggtggttgatgctccatgctgtgaagtttaaactttgttgttttgcttttcttatgatatactaaccacttgtcttttttctttgcaaacaacatgtgcctcctggctgctatggaatcttgtttaaactcaaagtgaaaattcttgtgccgaaggaattttaacctccagtcaaggaagttgtttagggtatcttgatgcttctattgctttaaagaataaagttagaaagaggagtagacctattaatgtcgatctccctgcccaagactctagtagggagaattttggtgttgttggtgctaataagagatctccaattgatatatctctggatgagattgagaatggtgtttggaactcaggttcatatttggttaagtagctgcgtgtgtagggctcctagcttctttcacatggaaatgccttgattggttcgaaggctaagaatatctcacttcg

SEQ ID NO: 205241 - DNA, 661 bp, Cannabis indica
tttttccctgttagagcacaaatattgctcattgagccttttccatccctgtcgaaagtcttctccatgatcattcatgaagaacgacagaggaaacttaaaaatccccaaccccctcctctcattgcgaccgttcaggatccttctccctcagctgttgcacaaactccctctgcatcagctgctgctgcacaccaaggacgcaacaaacgcatgagaccttattgtaccaattgtcacaaaccaggccatcttaaagagaaatgtttcttcttgattggattccctcctggctatggcgataagaaaaagactgatcttactcaaccttcagccaatcaagcctcggcttctacagatcccctatccctattggccaatatcaccaaacaagaagacattcagaccttaatttcccttttgagtcaaaaattacagcccacttcttccactgcagatatttcacagccatttgcttccaacatttctggtaaatcgacatctctttctcaaaatttatggattgtagatagtggtgctacacaccacatttgttgtaatattaatctttttttatcaccttaacaataaacctactgctacatctatcaaactacctactggaatgtgcatcaccttcaaacaatcaggcagtgttcgt

SEQ ID NO: 205242 - DNA, 972 bp, Cannabis indica
aaaagaaaaaaaaaaaacaaaggaaacaaaaggaaaagttataaaataatagaataaaggagtcaaaatagcgaagatgaaaactcgcgccaaaacaggatttttgtttcttaaataaatagttaaaaatgtgtgtgtgttggcttaacaagagaatctgccaatgttgataggtaagtatatctgtctacttggccaacacgcttcttagttcctatttcttacacatataataatatgacacagaaaagtgatattactaaccccctactacgtgcccttttctgggaatttggaaacacatattaaagtttctatctttaaatttgagaaaatatgtttaagatcgaaagtgttattctgctttcaaaagaagatggtattttgttcaattttatttgttggccaaattcaaaattcagactcaagattggaggtgaatggcaaccaaatttaatactagatagtctagactctctagattgtattcttcttgtagaaacaatcttggtctgtgtgttgttttatgtttctctttataaaaataaaaagtgacatgagtaaaaaataacgcttgtccaacaaaatcactatactagtaaaaaaattaacctccgcaaccccactttatttgttttcactttgttaaaagctaaagggggaatatatatatgtattgtccatatgtgaaattcgtactaatataaataacctttgcaaactttatatatatgcattattgtttgtagatctctatgtcttacattagtatgtgcttaaatattcaagctgcaacctttttagcattattctatgtctctctctaatcaactagtccttccgaacaaagaccaatttgctagtatatgtgttaacgtctacacttctacttccaaagtacattaattaatgttcaaagaataagaagtctcatcatataataatattatcccatttttctcccctacgtgt

SEQ ID NO: 205243 - DNA, 1193 bp, Cannabis indica
aagaaaattatggcaaggtcaaagtcaacatcattagattttgacaaagataactttagaaggcctattgcaattccatttgagtgggagtctcaacctagaatactgaaaatatcctcgacgccaccttccccgaagtatgattatttggacgacgacgattatgatgataataatgatgatgatggtgatcggaacatcaaagaggagaatggcttgagtttgagtttaattatcttctattaatgatcaatctttttcattaccattatcgcgtgacaataatgctgttaacggtaataataatagtaatagtaataaaaacattaataatagtttattatcgtcttgatgttatagtttaaagtatcaaattatccccagaggatcattacaggcttactttagatattttatattttttttctattagattaataaatgttttttttttttgctattaaattcaataatattgtattagttttgtatataattgagcacaattcgatcatattattaataaaattttatttgtttaatagggtttatgttctcactataatcaaatactaattactcttctaattttttaatcaaatacgtagatgatcaaagttcaataatcaatgattaaaaccaaaagaaacacaaaacagtcaatttatcaagtatacctctggtacatattaatagttgaaattaatttttaccatttttaaaatttgttaattgtttttttatttaatttttgaaaaaaatatatgactgagtttcaattaatggagatgagttccagaaattttgccctaacgatcttgagcttattggattttgtttgaccaataagaatttcaaccgtgattttaaatttgaaaagcaaacccttagtacctaattacttatattacttcattcctctcaaaataaatattataaaatcgtaatttttctaattatacttaataaatatgataattttaattgatttatatattataaatatacattattaaagagttaattggtttttaaatatatagtttgtatatatgaataaaattcaaaaagcttaaatcttgaaaaattatatgacttgctaacacaaattttcgttaaccaaatttgagtctgaatgataaacttgtacaaaaaataaatacagtatataaaagaaaatgaacacaaaggtt

SEQ ID NO: 205244 - DNA, 806 bp, Cannabis indica
aattttttatcaaatttttttatacattttaaattagattctattttattcttattcttattctcattcatatgcctatattttccttcctctaaaccaaacgctacctaattacaagtttataacataaattttggttggttgggcgagtttcaagttggcagatgcaacccaactatgggattgaatggagaaagatcctccaaccagcctaacccaactaatgaacagcaccagatacacattgaagcatcaaaaaaaaaacacaattttaccccaaaatagttttccaatctatttgttaaaaattttttaacaagttcacaagctagctcaatagtgagtgaggaataagcttcggttcgtacctagaattttcttgttgtttttcttctgttgggcaccaagtgtgccgaacatatcatccaccaaaagatctttctcctttcaccagctcagtaagctgatgaagaaaatcaccctggtcaaacaaataaatacagtagcaaattagcaatactattgtattaagataaaggaggaaagacaaaactgaatgggagcattaatgcaacttgcttctcacttaccaatcttgcttcattccttggtattttaaaaaatgttactaaaatatgcaaaaccgtaaccaagtaaccaaaggtagcttaaacaattaaagcatgtgatttgttcccacaagatctaatcttcaagtctctctaggtaaggagagtagtttttcatttttaatttttcaagaaagaaaaaagacaaaatatatatatattaataaaaaaaataag

SEQ ID NO: 205245 - DNA, 712 bp, Cannabis indica
cgaacaaaaaactcacacaaacaacaaaaacggaagaaagcaatctctttgacggactagccaaaactaaattaaaataactttaaaacttacatgcagtaagcagactctaccacttggagccattttttcccctttttttagttacttttgtgttctttctaatattatttaatgagtgtaaaatatgtcaatgaaccaccaaataacaataattacacatatgttataaaaatactaaatctaacatagtttattttccaaggttttcaacaaactgatacagtgtcccgtttaggcgagagtcaaagcatcatccattgaatagagttgtcaactcatctaaaatgataatcattctagcaaccttttattcgatcaagattggaattcagcgttgtcccgtttaggcgagagtcaaggcaattctatcttatgagcttccaccattgtttcatattttgtaagtcaaatatagtcgccaccattagggtgatccataccatataaaacacttacaaagctacttatctttcgagattaaacggtgctaacttgctaatgaacgttcctccattagggaggattactcactaaaacaaaagctatgtaaaaccaacaatggagatcgaatgtctcttgattaaagctcattattttaaaatatgtattttatttaatcatttattccgtattataataatgaaaaaaa

SEQ ID NO: 205246 - DNA, 1947 bp, Cannabis indica
ttaactcttttttgatctactactatatcccttttaattttccaaacttattgaaatgccatttctgtaggcggtcagcacacctatcaagacaagaaactaggccaagagagagattattgtctttgtcatagtaccaacaatcagatattataccagcacagtctgctccattcagccaaagacgctcaaaatgaaaccttgatcgatgtcgttcttgatgtagctactgctgagaaaaactaatatctgccataattgctctgtgatccgaaccaaagtagtccaaatgtgttacagttggtgaagcaatattgtcttgccaagcatggttgatgaaacaccaatccaacctctcctttagagatgctaaatcatttttattttttgctcaggtataatcatcaccaataaaaggaagctcaatcaaactacattgatctagtgtagagcaaaaagtatgcatttgattatcatttcgaagaggaccccccttcttatgagatgatgaaaaaatttcattgagatcaccaattaataaccgtggtctaagaggaaaagcatcgaccagtcttttaagaagagtccaggtgtgttttttattcataacatcaggaaaaccatatacagtagaaaaatgccaacaaggaccgtcatcaaacaagacatagcaattaaagtgatttgtattcatagataataaggttacatcaacattttctttccacaataacataatttcaccctttaaaccaacctgaggaacttctaaaccattattaaaatataaatactttttaaatctagaaagagaaccactagaaacctttgtttccataagaaacaagacatgaggagtatgctcacgaacaagcaagcgtaggcggcgaaatgcactttgactccccaaaccacgtgcattctagcttaaaatttttgtgatgaggagcgggattgctgagaaatcaccgctgcattgtcttgtttaccagtagaatctgaggaagttctaaaaactggttggataggctgaacttcgactgacaaggaagaagcatcaggttcatgaactgctcgacatcttttcagagtttgtcttaaagatttgggatcatgttgtctcataaagatgcgattaggatgtatattttctttctcataaatggctttagcagaagaagaaaatataggtgcatgagtagtagcaacaattgaaggtgcaagggaaaaggtatccttatcactaaggaaaggcatattaattggggaaggcttagtgaaagaacatgcaaggatatatggagggtaggtaacaaaggggagtggggaggaggatttaaatggggagacagaagagcaatcactaatatccagtatgaaaacatcaaatatatgggcagtggatacatcattattggccaaagataaggattgaatattgacattggtagtaatgagtgatgatgataagtttaagataggaagagtaaaaaaagttgatgtaactgtcgaagccaaagaagttgcagatgcagttgtaacattctgtcctatttgatcatttagttgttgagtgtttgaagcctctccaattaaaagtgggttcggatggtggggaagcctagtaagaatatgtagaatggaagcagtaagagaagatctagctaatcttgtaaaaaagggccaagcattccctttagagtagtcaaatcgacgacaatcatatgaagaagtaggtaatgccgagcccttcaacattggaccataagccaattccggttcaattccattgtcaagattctccaaaaaaattggacattttgggtataagtggccaatcacccctcattgcatacaatagtctggtaaccgttcatatcaaaattccactcaaaattcatcacaaattgttggcagagtaatcattttccccctcaatagtggttt

SEQ ID NO: 205247 - DNA, 697 bp, Cannabis indica
gatgatcttattttcaatcttttcactaatgaagtgacgattaatttcaacatgttcaatttatcaaggtcaaattgagatgccagctttgctaaggcatcaatattagagttttgttctcttggaatttgttctattttgaaataatcgaacattcttccgaactttcgctaaatatttggccattttaaggccctttgcttagtactctcccaagacttgatatactattagctatgaatcactaaagcactcaaggttcttgactttcaacatctcggctattcttaatcctgttaacaaggcttcatcatctgtctcgttattcaaagtttcaaactgaaacctaagtgcataatgaaatttaaagctttatggtgacaccactattactcctacccccaaggcattcttgttgaaagctccatcgatgaacagtttccaagtttctatttcatttcctattctgaagtcttctcgcgagttaattcctgtcctttgattgaagttctcggatgataagttatcttgaattgtcctaactcattcgaccatttaatcttcttgatgcatcaagttttgacaatacttgtcgtaatggttgattcgttaggaccttgataggatgtgcttaaaagtaggtcgtaaatttacgagatgcatgtaccaagtagagtgcaagtttttccaaaggtgg

SEQ ID NO: 205248 - DNA, 641 bp, Cannabis indica
aaatggaaaagatgatataaagtgtaatatgaaagtggaggtaaagatatttataaaaaatacagtaaataagatgatgatagtattcttgtgtaaaaaaaacgataggcattaaattgagttataattactagagtagatgcctcatttccattatttggctatgtcattaatggaaattcacatgtaaccaaaattgaacaaagatttgcattattagctgtttagtcaactagtggaatgtgcataaattctgagataaattatatagataatagagtagtgatggtagtagtagtagtagtagtaataaaatgtgtttttattttgatgaagagagaaatggatgttttatggttttggagtacaaagggaattgtttctatgtatagttaataagttttttgaaaatggcaatgaacagtcaatgtcaggtagtgagaactttttatataaggtatactaagaagaggtggaacccttgccttaccaacaaaaaaaaaaattcaaccccacatgaaagtttagctttgggtagttgtcaatgagcacaaaggactcttctacggtccaatatctatttagtgtactaaacaagattatggccatcttttctaataagggtgtaattagttaaaagg

SEQ ID NO: 205249 - DNA, 1338 bp, Cannabis indica
ttcaagctgattgaaggggacctgatggagcattataagaagttcaaaataatacttgtagtgactcctaaagctgagggtgaaggcagcattgtacattggcgttttgagtatgagaagcaccacgatgagattatagacccccacactttggttgacctagcaaatgagatgaccaaagatctcgaactcagtatattaccaaatatgtcttcttcctctgaccttactgggaagctagagactaatatagaaatcaaagctccagctgagaaattccaccacattttcaagcacactcctcacaatgtatctaatcatactgagaacttccatggttgtgaattacatgaaggggaatggggtacggttggatctaccatttgttgggattacttccatggtaagtaattaaatattatagctattaattaagctcaatttcaaatcaatatatgttcacaaatcacaataaatcttattacaataaatcagttgttgctgattaatatatagttgcataactaatttatcagcctttccaaattacatgccataagtaataataaccacgccattatatataaataagcacaatataatatacggattatttggaaatacacaaattaaaacaactaaaaaaaataattttgtacaaaattttaaatatttttggagtctttaagattttattaccaaagggtgttttggatattttcttgttatttttatgttataatcttgttattttattgttggttttttgttatttattattttttttactatttagatgttttttttttcatgttacatgttattttttttttttaatttttgtgttgtttttatacggcatgtcaacattgtaaaagtattaaaaatatatttaaaataaaaatataaaaattttaccaaaaataatattttgtatatatttccctattatatatactaatttcttataatgatattttgcccgtatatgtgatcttgtaattgacgacatattttattctaagtgaacatgtaaaaattataagataaaatatatttaaattcattgcttaaagagagcaaaatagagtataattatatagtgtgtaatataaagtaatttagcatttgtcaaatatatttagaggcacaaataataacaaacacgccttgcataataatattattaaactagccgttaaagcagactacccaacccagacctaaaaaaaaaaaaaaattctgtgagaaaatattaatacatatgttttcattgatatttttggaaattataccattttttcagggtccatttttttttcaagtggaaaaatattt

SEQ ID NO: 205250 - DNA, 1302 bp, Cannabis indica
atttcactatgtaagtttttctttttttacaggcttatggttttgtccgagcacgctacaccatgcacaagttttctctagcattttaaattatgtgtcataaattctgctagaaatgtattcgcactgcaaaggtttctcaaaaggtctaggaatcctgtttaaatgctcttaaatcttcttacacttaacttatctgcagtttgttgtttgcatttaaatgtaaaagaaacattaggtaatgcactactcatcatcttagttcaccatacaccatattttccatcattgtgcttgtgtccctaaggtactatggatatggaaatgagtcaataactatacctctacaggagctgagaagataagcaccactcgtacttagctcaagtgtgaagattcactaaattgtcggagggagcaatggactaaggttcttgataaatatggaagaaggtatgaattggtagccattcaagtcctagttttgagtctttgtaaaaaccttttattataatggattacatttgttggccatacccatgatttttccttcaagacttttagattagtaaaagaaccaatatttgcagttctgatttacatttacatcaactttaatataatctatttatgggatatagattggtattatttatcacatttatcccccagtctgatacttccaccagaatttggtccttacacactctttcaagtttcaccaattatctataccactattataatcaagaaaaccatgcagttggcagactcttgcaggaaaaatattttgacagcaatgttacctagggtggagccgctggatatcttctgtactgccttgcatctttgacatcactaagcgaatataccttcatgaaaaaaaaaattgttcaatagtacctcataatcccaaacaattaactgtaagaagattaatgcagataccattcagaacatgtcattacttgcaaaatctcagtgataaaaattgttgcatataaaaactaaaaattcctaagaattaagagtgcacataccacaattttgtgactaatcacctaatattaatagcaccgaaatgctactttaccagtaaaacttcctaagccttcttacattattcaagggtacatgtttagaaaaaatttaattatcatttattattatttttttatgagcacaacatgaggcgttgaccatgttttccatgagccaaaataaacaaaagaaaacccaaataaagttgcttcactttctttctctaaaccgaagaacacactgctcatcttaaagataaaa

SEQ ID NO: 205251 - DNA, 1251 bp, Cannabis indica
gacttccaaatctgatcagactctctccaacgacccttgataataatagacttataccgccaccctcagagagaacaacctataccttagtaaacatgtcttgtcatttgttcttagagaagaagtatgtgaagtctatacttcaatgttttctttaactaaatgataatcgatttcaatgtgttttgttctttcttaatacaaagtattttgcacaataaatatgaattataaaacataaaaaatactatttttatgtatgtcttttaaaaccttaaaggtttttttttatacctcaaatttttaaaaatatcattttaagtataggatgacatttcattactaattcctcacctatttatttattgattttgatttgtttttaaacaattgtattgtttttttttttttcttgtaagagtaaattcatacatagaaatgcaagcagtaaaaaatctaattataggttttaatttaataatataatttaatttccattacaatagatgtttgatcattgaaaaatattacataagttgttgcattatgtttcaattcttatgaaaaatatatattttatggctggtgtaatactcatcacttaaaaattctaacatgatcgtctcttgttgattctttaccaaatcgtcaccaaatcgatgtgagtagtaaaatatagaagttaagccctacaaaattggcaaaatagattaacaaacaagaaataactaagattattatgcataaaagttcttagttgaattgcaattaatgatttcaagaacaaaattatactttcaaaagagatttctagttatctccaactacctttgactagtacaaaacaaaaatcacttgttcaaaccaaattggaaagtgtttaagatttttcctcctacatggacagaatttgtttcatgaaggataaattcaacaacatcaccattagggccgactttgggctaagacggactagacctgcacttagggcccacttaacctatagctctaaaaaatataaaaaaaattaataatttaaaaatattacatattattaaaacaagagacgagtagttaactttttcttaaggtccaaaatattttaaggccgtaccctaatcaccatctgtatcaacactcccattaccgcaaagtgagtcttaccattgaatttcgccttcatcatcatctttgcaatgttaatcacttttgcaaggcatacctcacatgcaactcaaaacaatcatattg

SEQ ID NO: 205252 - DNA, 1403 bp, Cannabis indica
attattattatttagtttttttttaaaaaaaaggtttgactttttgacttggactggttgttttggccatgcatgactagggtgcgtgtggttgctgggatgggaagtatcgtatgctacttgttgttgtattatatatatatatatataaattcacaacgttattggtgttagtcgccccatgtaactaaattgttaaaattaattggttattaaacaacattaaccaaaaattatataatgacacttatgttcaataattatcaaaaatactattttatttaaagcattaaaacattagtgaataaaacatattatcttgtaaataatggttgtcttcatacattatcatcacttgtgctcttttaatctacactcaaaagagaagaaagagatgcaagagtttttcatgaatactattgtactctctatttctatgcacacttatcccatacacatccttagtcatcaataagttacccttataaggattaataggtatattgggcttatagcccaaattgagagaatttattgtcttatcctaatagtctaatcaaagaacgttttagagtgtgttcatagatctcaggcgtgttagtacgttatgtctatctcattatggcccgataataatatcatacattaccaattatatacttatcattatatgcttatactaacactaagtgagcaacaattaattatgttagtccacataaaatatttaaacaatctgccacttggaatacataattacacatatatatgtgctatcactatgcaatagtatcaacagacagaaatctcaagaaacactaatgtctacagaactaattgtgcatcatattttataaacaggatacaaatacaatatataataagacatccgcgattcataaaacatgatgataactactgatctggatccactagaacatagcgccgagactaagccacttgttcgtatcaacaagtttccacactaaattactactacaaagcagtcttttagaggttggttttttgacaccttttataaaaaggaaagctaaaaggtgtaaaaatacctgccttttaaaaattggcatttagaagcggttattttataaaaatcgtagttataatatttattaaaaccatttgccttcgatttttaattagaaataataaactgtaacaaaaaccccttatggtgtcggtcatttgaaaataacttacggcataggtgtcatttatatttaacacatgtagcctatgtcgtcggttattttcaaataaccgacactataaggttatatattaacccttcaacattcgtcttcacccattctccatcttatttttcctaacaaaaccaaacgaagaataactaacactatccaaaatccttgccacctttg

SEQ ID NO: 205253 - DNA, 873 bp, Cannabis indica
ttttttattattttttgtatattttaaattttattctatttttatttttgtttttattctcattttcaaatttatttatgtgtttttatttctcccaactaaaataccctaaatataagagaaatactaagagatgacttaaagtgtcaagtgccacatatagcattattgatgcattattagattaatatgaataaataaacagatacatgatcagatctaaaatgaatctagaaaaatatacatgaacatatcgtaaatgaatacagaacatcctctattttcatatataaatatacatatatattgaacatatatatttatatattctaatattctctcacttaattagtatttaaatttactacttaaatccaatattatttattacataataaatatatgaatcatagtaacaagtcttcattaaatagcgagtattagctttcatatatcacgatatatttattatataataatgtacttagtgacaatatacttaagtgaataaactttaaactatgtttattctagtcctctgaaaataattttctcagattaaaattaattagatgcacataaatatgaaaaaatatcgaaattagagtttcattgaataatttaattgtacaaagaaaactacaaaaggaaaaattgaatcacatgtttactttatgatccttgaattatgttgcaacatgcctttaatcaacgatactgcaattatacaattcagtgttgcgtgcttaatgacaacttatcacgtatttttatggataaatacttaatgttgatatactagcctcgactacaactattatagttcttagtcataaatactataactgaatttattgtaattcttaatggcct

SEQ ID NO: 205254 - DNA, 929 bp, Cannabis indica
taatttatttatttttttaattgataatggtggcatggcaaccaaccatacccactcatgttaaagccttcattaatttacttgcattactatgtgagtatgtggcactaaagtgcttaatactatcagagcattgttattaggcattattagtgcctaacacattttcgacatgtcacgttgtgattggctagtgatactccttaaaagctattatattaaactatatgggacttgatacttagttggactgataccaatattgacacttaggaaggtactaggcaccactgggacccgatacttagttggaccaataccaatatttacccctaagcttttaggatgctgctcatgatggaagcttgctctgatcccttgatttggaagcgcatatattagaggaagaaaataatgattcttcccaagttactcgaccatggaagctaatttctggctatgatattgatattggtgcgtccatgtggtagtcaagcatgagttaaaacgcagctatcaaggagacgtcttccaggaacagctatattttggcggctgctcactaactagcacaaaaataaaaaagaacatttttatcattacgtcacaccttgagttaaaaaggcattaaatgcagagatactcatagatcttcagtctccctagtcgttggatggagatcgtgccttgttctgaaaagatcgtgatcatccactcgttcctcacgtggatcattgccttgggatataaatacccttggtaatccttcagtcaccacttttgctttctcttttaaattttcacactctctaattgcacaagatttccccaccatccttagagcttcgaattgcattcaaggagaatcatccaaaaaagaaaaaaacacagtaaactactgccttcgcctgttgctgagaattagggct

SEQ ID NO: 205255 - DNA, 822 bp, Cannabis indica
ttccctggctttgggttgtgcccagcactccttagatggccattccattatgtgggcttgtgaccccaaaatagatgagctatagggaataggtgggggcgtgggcttgggacatgggctttcttgtttatttgttggtttattactctcaaagccaggagagactgttatatttgaatatgctctcttctcctccaaaagggaattggtttgactggagtcaccaacggctatctcttgcttgcctgagttgggaaattcgggaggagtctctttctgccctctgctgccctttggactgattcggcgtgcctcccttttgtctgtattagatgcagcagaggtaatgcgattgggtcttccccttgtactttctgatgttgcctctttgagttcttgcaggtctgagatagaaaccgtttttgagttgttgccaaaaggggcaacttcccctatacccggtagataaacgagagggatttgggtaataaccgcttcgtggggtgaggattcatcaccgtgctgatcgtgttcttcgtcggcaactatgcgtttcttggaggggagttgcttgcggttctccctgagttcatccatttcaccatggagaagtgccttctgcactttgagttggtttcgaagtgtagggtcgagaaatagcctcttttgaaagacccagtcttgaaaccatttggcaaggggggtggtgaatgtcgacttctctttggcatcagctttcagccaaatcccatacattgggtaaaagtttcctttatcgtctttaactactgtgggaggcttgaagcaaatgctttggtcatg

SEQ ID NO: 205256 - DNA, 1179 bp, Cannabis indica
gattatgaatatgagaaaggtggggaagattattgatgttgttaaatgttctcgtgcgagacggaatactgttgaaaaatttgcaccaacctctttcttagaaggacgggagagagataaagaacaatgccaattcagtttagttcttgatgctaatatatatacatgacaaggtgatagagttgccttcaatccaaatggtgagtgccaacccctcagcaactgtttcacgacgcttcccatcactgatacgctatgagaggttaatgacatacaagccactaagtctcatgtggtgttgagtaattttcctggtgatgtgagctgatccaaggttaaccatgggtcatctggtgctaacagtggtaaaagtggctgccacaaaataatgtgatatagttaacaatgatgaggtggctagtggaagaaaaacaattagtaaagtaaaagccattgtcgaatcagagttgctttttggtagactactttgggagacatttgatcctattatcaaatcataacacgagaagaaatagaagaggcttaaatcatcatcggtggtacatggctctagtagttctctgcctagtatgtcagcgccgccgatgactagtatctccagcccagggcattgtcttactactagtataaaaaggaaaaatgataacagtgtccttgtaaaagatagaagagtgaaacttaattcgggttcatgagtgtttcctattgtgttggatgctcctgcggctgcctgtgagaatgatgtattggcactgtatgctcagcaaacttgccagaagcaatgagtctcttatggtggaatgcctagggattggggaactccaatgcattgacctctctatgaactgtggttcgtaagtgttctccaagtttagtcattctgtttgagactaagttgtgtggtaattgggaagaaggcatccaaagacagattagagcactcccaactggtgctttataatagctaaaatgtaaattttttaaagaatgatgctaaatattagctccattagatgaggtaaactcatctttattttagctcacaagattttgagctaaatctttctccacatttaactacgtgaacagtggttctttaaaatttttttaatattattttgacttttctaatcacatcatacacacattacccatata

SEQ ID NO: 205257 - DNA, 585 bp, Cannabis indica
tgaggccaattccaatccaactcaacaactcttttgtaagtctcttgctaaattcacattgaatgaataagtgtccatgagtttccaactcaatctcacacaaaggacatattttatcagtctctaaaacaccttgagtctatttttagttttcagcgttttccaaccaaccatccaagtcataaaataatatttcagaatgttaaaccgagaccaaattagagaagcataccaaatagatgtaaaggaggcgggaaaaagatttgagtaggctggtagttccaccaatcttcatgttttaaatagactggaataaaacgaaaaattagattaagaaacccttttgtataccgaaacagagtttattgaagcacgctgtagaaaaagtgtactatagtcatagatttatcatatattgtatattcataaaatatatataattatataattataggtctatcatactaaataaataaaatagcttttttaaaaataatgtatatacaaattaggtgttttttattattaattgacttatatatggtcgttttcaaccattatacatttttttaacactattcatat

SEQ ID NO: 205258 - DNA, 807 bp, Cannabis indica
ggttgtctacggtttagatgttcacatagattagggtcccatcacctttcatttctctggtcgcaattgctaaccaacctagtagcagaatcattctcagattgataactttaagaattacttatgctttctggatcaccttgctagtggcaatgtgtaccttccccatcttgtgtttgcctctcatgtacatggattctagccgacctgctttgtccatgagtcctttatctcgacccactaggatttgtacttgaccctgtttcctgatgttcttctcacattagcctttgtctttgaagtagatttgacatgtgtcccctacttaagtaggtgtacgtgttgtctctgttattttagtttggcctttacgagtgtctcagtggtcgacctatactaggtcgatcgcctacacctctcgcatcgtgctaagagaatttttgactcctaggtcgtgtttgtctggcatctgcattcatgcgagatgactctgggtttttaggttgtacattcccacgatttacatttccatgggtcgttcttaaatcgttgggtcgtgtttctctatttccagtgttttgtgaattttgggggttctcttcatccattgggatcccttgtgtttccaagttgatcatcctaagtatctatgggatttctaggattattccctctaagggcatccccttgtcttctggtcttagagcttttgggtcttccttgaggttgtctagttgatgggtcaggttggtttggaagggcatcactgcgtgcagcccttgtggtcgctgcctcgtgctccaatta

SEQ ID NO: 205259 - DNA, 532 bp, Cannabis indica
ccttataccaaacgccccctaagtttattactacgaaatagatttttggtttcagttcgacaaatacacttaaaactacttttaacattttttctcggtttatataactgacacttataataatttttagtgttgattagtagactaacactaaaagtataaccgagacgaatgaaatttttaaaatatatacttacaaaatgagtataagtgtcggtttataaccgatattaaaaaattctttggtctcaattataaatctagactattgagctcattaaaaaaaaggacaaaaaaaaaccctactatatatacatattattctaaactctatatttcaaacccctctgtcttttttttttcttatgcctcacccgatctctctctcccttctcattttcatgcggcgccgccctcctccatccatctcctctggctgtccatctcctctgttcgcttctctctctatctctctcgataataggtatgtctctctctcagtagagttctttctttctctctctctctctct

SEQ ID NO: 205260 - DNA, 790 bp, Cannabis indica
gtttttatgttaaattataacaaaattgatttaaatttgcagttttgaaagccggtgatgacaaattcacagtgacctggggtctaaacaatagtttcccagctgggactgattcggcctacaagaccatcaagctaaggctgtgctacgcgccagtcagccaagtggagcgcgcgtggagaaagaccgaggacgagctctctaaggacaagacttgtcagttcaatatcgtgacaaagccttacagcgcctcaaaacagagcttcgagtgggtcgtggaacgcgacgtgcctctaggaacgtacttcgtacgcgcctacgcttacaacgccgcgaatgctgaggtggcattcggtcaaacgactgatgctggcaaaaccactaaccttttcgacatcattgcaatcacagggcgccacgcgtcactcgatattgcctccgtttgttttagtgctttctcagttgttgccctcattggattcttttgggctgagaagagaaagggaaaatcttcaaagtaaggaaggaagggatacttaagttttgtcctttctataggggcaaaatcgtctcaacaaaagtgaagaaaaaggactcatatggttgcggaactactcttttgcatgtttctttctagttttggtttttaatcatataattatgtggtattactactagtagggatgaaaaatcactcaaaattcgcttgtgtttttcttttgagtgtttaagactttgaaaatgggattgtatcgtctatatgttctaagttggacttttgtgaaggtgg

SEQ ID NO: 205261 - DNA, 2164 bp, Cannabis indica
tcgagaggtaagtttaattctaggtctcaatataagaaaaaatgctatatatctgtcataaaaatgaccatctcaaaaaggactatcttgaactaaagaaacaagattcaagaagcatggcaatgttgacatagcttcagaaggtagtgactttgatggatacaaaagtgcaggtgtaatggttgcctctaaagactactctggtgttgattgggttatagactcaggattctcctttcacatttgtccagacaaggatcaattcttggagtacaagagagttgatggaggattcgtaagacttggggacaatagagcatgtgagatcattggaattgggtttgtaaggctgcaattgacatgaggcaatacacatgaattgcagaatgtgggacatgttcccaacataaagagaaatttaatttctgtagctatgatggacaaggagggatgcttagtcagggtggaatcaggggctttaatggtgcaaaaagggtcagtggtattgatgaaaggtgttatgatcaatggggtctatgttcttcaatgaaattccaccagtaactttgcatctgtggcctcgaaaaacatgatcaactctactatgctatggcatagaagacttggtcatgcgagtctcaaagggcttgggattcttgacaaacaagggttacttggaaagaatatggtgtcagatttggaattttgtgaataatgtgccctaggaaaatcaacaaggatcaaatttggcactggaatgcacaccaccaaagcaacactggattatgtccacttagatgtttgggaaccatctagaatcatttcaaggggaggatttagatatttcatgtcaatcatagatgactactctaaatatgtttgggttcacatattacaaaccaagaatcaagcattcagcaagtttagagagtggaagactctaatggacactcaaactggtagaaagattaagaaattgaggactgacaatggcctgaaattttgtgatgatcagttcaagaattttttcaagcaagctgggattatgagacaatactgtgataaagactccccaacagaattggcttgcagaaaggatgaacagaactatcatggagagggttagatgcatgctcatccattcaggtttgcccaagaatttttgggcagaagatgtccttacagcatgtcatgtaataaatagatgtccctcttcagctacaaattttcaaactcccatggaaagatggtttggtcatcatgcaaactaccaaaatttgaaaacctttggctgtattgcatatgtgcatgacaagaaaggaaagttggatcctagagctatgaaatgtgtgtttataggctacctagatggagttaagggatacaagctttggagtcttgaactagggaattaaaacagatttattatcagtagagatgtgatctttgaagaagacaaagtgtacaaagacactctcaaaactcaacacaataaagcttctaccagcagggaagagagtatgcagtttgaggtggaactgtcaggcaattcaacactggaacaaccattacatgaacagacagatgatgaaccaacccctacagataacatacaagcatcacaggaagaactaaaagatgaaatggatcaaggagccactgctgtccatgactatcaactaacaagagacagggacaagaggcctcacaaagctcctcaaaggtttggctttgtagacatcattcactatgctttaaacatagaaaaatttgagcatgatcctagaagctttgttgaagccatgaggtcagttgataagaaaaatggggaagagcaatagatgaagagatagaatctctaaagaaaaacaagacatgggttctgattttaaaacctgcaggaagaagagtagttggctgcaagtgggttctcaggatcaaagatggaattcatagttatgaagaagtaagatacaaagtgaggttagtggcaaaaggattcacacaaagagaacgggtgtattacatagaaatcttctcaccagtggtgaaacacacctctataagactaatcctagcactaacagcaatggatgaccttgaattggaacaaatggatgtcaaaacaaccttttgcatggtgaatttgttggaattattttac

SEQ ID NO: 205262 - DNA, 618 bp, Cannabis indica
aattgtaattttttctaaaggggaattaccgacgattaaaaatcgtgacctatactatagctgacggatttaaattgtggcctatacattttaaaatagtcgtctaagttattctcaacagtttttaagtgtgccataaaaattgtgattttcttaaagggaaattaccgacggttaaaaatcgtagcctatattataggccacgattttataccatcgcctatagtgttattcttggcgatttttaagtgtgccttaaaaattgcaattttttaaaagggaattgctgacggttaaaaattatcacctatagtgttatatgccactgtttttaatcgtctataactagttcaaatctaaaaaatttcaaataacgtattttctctcgctccaatataacacgttttagatctaattttttttttttttcaaatgtatacattttcaaaatgtcagtctctctctctagagttctccctctctctttctctcttagatggcgatccatgagctccatcactcgtctcttgctctctctttcacgagctccaccataagcgaaagcccattcaagctccaccatggtcagccatgtccacgagctccaccacgagaacc

SEQ ID NO: 205263 - DNA, 1110 bp, Cannabis indica
cggacggcgttcaatggccgtgtcacagcctgagatacacccttcgtagaaacacctgaagaacccatcagccgaagcacctgaggccatgtttgggttttgttcacacctcacaaaatttggctctacggcaaagaaaaaggtggacaaagctaaaactcacaagggttttgaatttatatatacataaaagaaaaataataaaaaaagattcaattttttttaaaataaaattaaaacttaggaaaaaggaaattgggatatttatttgtttttttggttgtaatgacagacaaaaagttagttgtcggctatcgtgctacgcggcatttaagcgttgaagaaggcgtgtcatggggggtttatggtttattatggtaatttctttttttttactaaatggtttattatggtaatttggacttagttattcatttttttttgggtaatattgcagaagttttagcctattttttagtgggttttattatttattttgtttaaagtgaaataaatctcttttagccaaaatgttaggagagaaattttgatgggtgaaatggttaagttattaacaagatattctttggttcttagtcttagattgccccaaagttattcactttgtttgattaatatatggaattgttttgttttgttctttttagtagagtaagtaatactttggaaaaatcaagattttgggtgttaaaattaaaaaagaaaatgtattaaattgtgttcaacaacaactcaaataaataaaaaaaattgttgggaaaacaatggatatacatgtatcacgattgataaacaagtgaatttgattaatactttttctttcttaaagtcgtttgataatatattgtgaatatcggatatgtgatgtgtgaatgtgatgaattgatttttacatctttaatacataagttgtttcaatcaatcggatgttactatggagcataagaatcttattagaattttcttttaggaattttagttagggtttgaatttagaaaaattagtttttttgttcatgaattttttatactatcaagttgtgctcttatattagttcttccattatattttaggggttttttattttt

SEQ ID NO: 205264 - DNA, 3018 bp, Cannabis indica
accaatctctactggctttagtcaaggtcaaggaaaacataagcatttggcatcgtcattgacccgggcaacttgcatcatctgtatgcttcgtccaagtgtgctcgtggatcagttctccccccatactactcaatgtggggcattttaaagttttctagaagtgggatctctgcgatcctccttacacagggttccgggtgattgtcttctgagtccgagagggctctacttgttttttgaccaagttggttagaacagctatctattcctctaacctctttgtatcactcttgggaagatcacgtcccctcatcttatcactcaagtagtttctaaggtgactcccacttggccttgcttttcactcttgtacttctcgtacttggcatccaatcgttgttggaggtctgtggtggattagctgtcctcaaaatatcccacggttatccttctgtcctgattgacaaaatcactggggtggttcccttgccctttaggcttaggtacctttgcacttcgtccccgtggtgcgattttacctctaggatcagaaggttgtccatgctcgaaagcaccgatggcctttggtgtccttgagtgctggccggcgggattcgtatcttttcgaggtggtttacgagtagatttttgtgggggcccggtaaccttgcttatacctttatccttgcaaggatttgaggattctgcttttgtttactggtgagcacgttgttcggccattaactccactgttcatcgtctgactctgccaagtcgtcaagcttgttttgaaggcgttccatcattcttttattttttgcggtgagcttcctcttttctaccaactctgtttgcgtagcttccaaatctttggtcactcacaacaagtttttgtcatggtcatagtaataaccatccttgtagtactcgtcatgcacatactcattggcatcgtcttcttcctcgcattcaaggttctggtcatcgttaaggtcgtcaaacacgttcttagcatcctcccctcgattatcggcatcggtcgtgccttcctctctaacactgcctgtttgggggccagatgcgagggagtctgcctcctccataatagtgtctaatggggttttcttgcttgcattcttttaggtattcaccatggtcgatgtgatgcagcaactagtaaactttcctcagctatcaatgaaagcaccaaaatatttattaagatttttggaaatcaattaattagagcttaaagaatatgtaaaacaataaattatagacaaatggttttttacgtggtttgggcgttaataatccctagtccatgagtctgttatattagctttgtcgccgagtattcaagtattacaagtgtttacaatattaactctgtatctttttttatttctcttggagaagaaagcttcttaagaatttttgtagaggttttgttagtaaaaaatgttcaccccttgcctatgaaaaagtagggatatttataggctcatgcgtgggtgagggcatacccttcacccacataaatttcgtactcatcgcgcttcattaggtggccttgaaaacatggagattcgaccgttggtagattgggaacctcctcatcgtacggtgcacaacttttgtatcccaactcataggactaatgacacgtatcacccaaaggtttcaccttgcaaagttggtgtatatatacaagttgtttggcaaaaaggaactacagagcacgtacgcgcactaccaaggtctaacgcaggggacacgatctgatttggtgtcagaagatttacaaccgtcgagtttagctctagattaggcgttggggagttccgagaccgtctggttaaggctttcccagacgaaactaatttgctaccatcctggagcatgtgcaacttctgttctcttccggtagcagcatgattaatgagaatcccggagcttctctgcctttgctagcagggagagcatctgggtactacaacgccttctgcaactccaaaaagcagagggcgtactataccaatgcataatccgacgtggcgtccttacgtcattcccacgtacaattcatctgggaacacggataacactaactaactctataattatcataattaatgttgcctaatcttaataataagaatatggactaatacattcattaccaattaattttaagatagaactccataattttctacaaagtatcaaaactatatctcttgcgggcaagtgaccatatctaatcctcacatatacaattgttttaatccaccaacttctattgattggagttggtttaatgatcataattaatggtaatagccgagttagactaggatgatcaaaggagagttaattgtcaacttatgtctatttgcatagagattcttccaaccccattaattattataggtaatattttagtggttaaacaaatgattagtcccctattcttcaaccatattcttaaagtagattcttaaatatttgtcatattatgcttatgtggttgtagtcaaatgcacataagcagttatataagcattatcacatttcgaaggaactgtatactatatagtgtttgccagctagggttattctatttgcgtaattatcactactacataatgtcaaattgacagtttgacactgactaaataaggcctctaaactaacaaaaccaaaacactatgccactttctaatgcctttaatctttttttttttttctttctttttttccctgtatggttgtaaatactcattaagcttttctttttttccaaaaaccagaatggcaagtggattttcttgggggtgtttgtgtgattttttctaccgcagttgatgggtcaatgtatggccctttcagtcagtttaataattgtctttgtttcctgaataataattagtttggtaaattattggtcactgcccattgaacaagttcatataaaagtcgtatatatatcaaggcaaattatgtaaaacctca

SEQ ID NO: 205265 - DNA, 1904 bp, Cannabis indica
aaaaaaaaaaaaacttttagaataaacaacaaataaacaaacaaacatgtaacaagatatggaaagttagttaaaatatttctattttaatttaaataaaatattatgaaaaaaaatcataatttgaattcaaattaggtagttataaaatatttaagaaatattaaatctaacaaaatcctaaaatatctcaattcaaattcaaatattcaactaatttttaaattatttaaatgaattaaataactaataagataatacaaattaagatatttctaatattatatttctaatattatatttctaatctttttttttttaaataaaatcttgattcattagaaaacaatgtaaaaaggtaaaaatatcaggattagccaggaaggcaaagagccattccaaatgtactcgttgtctaattctaaaccagccctagcacatttatgcgcaagcttattaagatctctagatacaaatgtgactgagagattaggactaaacgacaacaagttcctaatacacgagactatatcacttaggaccgaatgattacaaaacttattataaattttatccactaagcttttacaatccgattatatggtagcaacatgaaggttaattgcttgaatccactctaaagccagaagaaaggttttagcctctactatctcaggaggcacacttcttgttatgggagcaattacacctgccatcagattaccctaatcatcatgagctaccactcccaagctatgattattttcattattgtccaaggcagtatcaatattaactttaaactttgtaggcataagttgggcaggttgccttcccatagactgctattgttgccttcctttacttgccatgcggtctactttttcaaattcctgcaagtaagttgttgcatgatcatatagaaacattggaagcaaacatttgttgtgatgaaagcaattatttctcggattccataaggtccaaaggaaacacagaaaaatatttaacacacacttgtcaaaagtttcaaaagccttagcaataaaaaagcaataatattaaggaacttattttcagcaaaataattattaaatggggaatgtttccaagcagtttttactctaggacattcaaggaaagcatgtgctaccgattctggttttgtgtggcagaggggacaaataggggaggggattatgtgcctatggcagagttcaactacaacaggaattgaattggaaagcacacgccagacacaatgtttaaccttaggagagacacgggaagaccaaagtgttgaccaaaatcttttattatttttgaaagaagaggaggtatggatggccctagaactaacagcaaggtgataaacagattttacactaaaaatcctagtgctatttttcccccaaattatgtcatcattagaattatgcccagcaataggaatgtccaatatactatcaatgagggaatcatcaaagtagaattttagattgtccaagtcccaagcaccagaaggggagataaaaagtgataaatgaggagaaggaagagggttcagcaggtcattgtgatttagaccaaaaccaggcagccaacagtcttcaattgtattaattctttgtccatttccaatctttcaaatgagtcccttttttagagatccctaccccaaggatgcttctccatgagaaagaaggactatgaccactgacagcatcaaggatggtagtatgagaaaatacctagctttaagtgtgagacttaagaaagaatcagggcttttaagaattctaagcaagcatggcttcattaaaatgcatcagagaccctaaaagccccaaccctcccaccaacttagattgcaaaactgctctcccaatttttcctacgtgtag

SEQ ID NO: 205266 - DNA, 1387 bp, Cannabis indica
caaaaaacaattaaccctaaaatcaaacgaaaaaaatcctagcaattaaagtaagtaagagaacaaaccataaaagtgcatacacgactcaacaacatctaaattgatcttttttgacaggattaatagtgaaaataataaaactagaaattaagaaaacttgaatttgttaggctacgtccccatgatcgagctctttttgcactataaatctatagattgatttacaacaaattaaggtgattccaagtcacaaagatctcgactaattataatccctttgatctacaatatatagaatgttattttcattttctaataattacttaatctatatttatataataagttctaattattcataattaaatttctggcatattacttacttgtttttggctcttgataatgttgttaattgttcttttattttgatccccagaacccatgggctgcatttttctgttctattggttttcttaatttaagggaggtcttctatttgttttattaatttaagggaggtcttctattgattttcttaatttaagggaggtggttcccttgtgaccaccatgaactgatagtttcttttatttcaatgaagtctctttttagaataaaaaaaataaaaatctagtatataaactttttatatgaaatatatatataatatacttgcttttaggtggtattactttatgtatggtagaaaaaaaatatatataaaagatatatatatagatagattataattataactcatgatttttatatgaataatttataggatgggtgtaaattaaaaagtcaaattggttggtttacgttacatttcattcaacccaacgtaaagattgggttataaaaatctaagggcaacccatccaattaaaaaaaaataaacccgcccaatgaattggtcggtttggttggattaacccgtccaaaccgagcactaatattttttttgtcatattcaattgttatatttcagtcaattatgatgatgagacaaatatatatataaattaaattcaaattcaaattgaccaccatgaaagaaatatagtagtttgaacttttttattttttattaatgaatatgtatataaattacattatatatagattatataaaataaaaatagaaaaaaaaaaaaaacctcttaatcggattggtcgggttagtttgggttgattgggtagtttggtatattttcaatacacccaatataaagattggcgtgttatatttttgtcagattttttagtttgcattttttgtgagtaatctcggttttatttgggcaagttattcaagtggggcggtttataaaagtttatgtacaaccctaatttatagtagatattccattagttgttg

SEQ ID NO: 205267 - DNA, 1701 bp, Cannabis indica
attttaataattgagttattacatgtatatactacactggctcacttctgtgtttggtcgaatggtaattttatgtgtgttacgtcataaaaatcttcacatatgattggagccaggtggttgcgatcgactccgatggtggtaggggagaataatatgggtgtttacggggacggatagggcagtggcgtcagctggggattgtgttgtaaacaagaaatgttttgttaatggagtacgggataatggtaaggttgtggtgggtggagagggttttggtgttagtaaggaagggtttgtcaataagctgagggttgacgaaaggttgttatatgtcagtgttcttgatttggtggagatgaaggaacgaaagttaggtgctaagggggagggtgtgttgattatagttgttatcgaggtgatggaccatgatgctattgaggtgtcaaaaatgttcaagggacgggacctatgaagcaagccgcctgtcaatatgagtatgttaagttggaattattgtgagcttgggaatctacgaaaaactcaatcctttatgggtcttataatccaaaaaagaaatctaattttattttttttatgtgagacgatttgtagtaaggaggttattgagagattcaaggttcgtattggttataaggggtgtttttctattgatgctcaatgacaaatgggggtattcctatgttttagaaggcatttgaggaggctactatacttggttattcaaataaccacatagatgtggttgttgcggttgggggtatggaggcttggagacttacaagtttgtatggggagccaaataggaggtttagacaggatacttaggatttggttcgtactttgaagaaccagtccactcttctgtaatgcattattggcgatctaaataataaggggagtaattaggagaagagaggacggagggcatatctaaactggctattggatggatttcgaggtatgttaaatgactgtgtgttgtttgattttgagttgagtggatatcgttttacatgggagagtggtcgtggtacgaatggatgtatggaggcctgccttaataaggctcctcttacgcaatattagcttgatatttttaaggaagcttatctggttaatcttgagtttttaggctcagaccattgttcaattttcttaaatacgtgtattcatgttatttatcagtgtgttaagcattttaaatttaaaaattcatggtcacaggagcctatgtgtgagcagttggtgaaggggttggggaggggtagtttggaggcaagtctctttgagaaaatctctaggtgtggggtggttctgagtgattggggtaagagtgccaccacatgttttaaggagatgctgatgtagtgtaagagacggttgagggagtttcgtcaaaaaactgatgttgattcacaaaggttgtatgagaaagagcaacataagttttatgagattctgactgaaaaaagaagttttttagaagcaaagggcgaagcagttctggttgaaagagggtgataagaatagttgatattttcatgcgatggctagtgctcgtaaatgtacaaatcatatttctaagttgcaagatgataggggtgattggtttacctggaatgatgggcttccttagttagtaaaaaactatttgcaaggtattcatattgcctcaga

SEQ ID NO: 205268 - DNA, 693 bp, Cannabis indica
tctctctctctctctctctctctctctctctctctctctctctctctctctctctctctctctctctctgttcttctttgctttttaatttttgtagttttatagtgttccgaatcggttgatcagtgctgaaagttagttacaaaatcagttataactaacttctggttcctggtcttgtagaggcaaagccacttagaatatgtctttattttttgttagattaaattgtagttgtatgctgatgtggatattttgtaaaaggactgcttataaaaggaacttattcaacactttcaataaattgatactattataaaaaatatataaatttgtgtgacttatttttactattttagtatatgattatcaaataaaaataaacatatttaattttttatgtgatttttttttttcaaagtggggctatatataaacatgattggcttaaatgtatatttccattaactaaaactaatatattatgtatgacataaatatcattaactaaaagattaaaaatgtgtattgactttctaataaataagttcagcttttactaaactaactaaataagaaagtatatataaaaggactattaaaaaattgtaagtaggaaagaatgatcaataaataatttattgatgactctattgcatgctaatcaaaatattattatgtaagcataagatt

SEQ ID NO: 205269 - DNA, 1180 bp, Cannabis indica
gtcacttgtattagcagggttggctgcaaccggtacaactgagatcgccggtgttgaacatatcgatcggggctacgaaaatttggttttgaaacttcaaaagcttggagctgatgtcaagagattgatacctctttcttgtcaatcatagtgtttggagtttaatgagaagtttttggtggggttttggagaagaattgagtttgagaatattggtttttaggccaaaaaaaaggcttaaaattgcatgggacttaatggcaatataacaagctaaaaaattgaagaagatctcaattgaaattggcttatgaagatttcatcatattgtttggagtttaatgagaaatttttggtggggttttggagaagaattgagtttgagaattgagttttaggccaaaaaaaaggcttaagattgcatgggacttaatgacaatatatcaagctgaataattgaatgtctctttggaatttggaaattggctatgaagatttcatttgcaaccaataatgaaaaagttaagtacgtttctctttctttaaataggtggaacttaatttccaagataaaaaaaaaaaatcagataagagtaaccaggtactcttatggtaatcagagggctaaccaattaccaggtaaccaagtattttatagtgttttttctgttttttatctttttttaaaaaaaaaaatcctatatatataattttttgataaaaagtcacatttttacaaacttattctttaaaaatcataaaaataattaaaaaaaaatgtaatttcatttaatttttatttaaagaaaaatgttattaattgtgaaaaaagttgttttatagttgggccattgtggacaaacataagatccactcaaaattattgggccgaactcttgggcccaaaggtatatttcacaatatataccacttttatggaagaaattagtgatcttgtaagagtgtacaatttcttataaaattgtttcattagttttagaaataaattcatagttttatgaagtaataatattcttaattaactaatattttttttaaggtaataattaaccaaaactactgattttttgtttggtcgatgtgctttacctatgaatgaatcaatactttttcttgacaatatatatgtattcttacaattgattaattatttaatttt

SEQ ID NO: 205270 - DNA, 965 bp, Cannabis indica
ttaccaaagttagattttttttttctttttacctcaaatttttacatgagtttctttaaattattcaatatatttagagctgctaatgaaagtgtgcttaggggtttttttttttttttttacatgcaaggataattagctaagtaacttatatattggcaaaatttaatttttgtgataattttgatgttatatacattttaaatatactttctcattgtatatatcttggtacatgaaggatattttgcatttatcaatgaagtttctttttttttttttagttttaataaatgaagtttctttttaatgttatataaatataaatgtaaaatattgtttaatatgataggatggagtggagaaaaaagtagatcctaataaaagcaccaattgacttaaaataaatggtatgtcgtataaaatagatcttaagagctaggcaattttttaaaggcaaatccttattttttttttattttttttttttgggaacaaggcaaatctttatttcacttattttgtgtacaaattagctacaataataaatgaaatttcaataagaagcgtaactcaggaggaaatgtaatagacctcatcattcattaatcaaatatggttctttattttgaataagtatattcaatattacacatgaaataaaatttcataaaagataagattgctctttctatatttttttttttcttgatagtgcttttttttattaatattatttattttttttctaatcaaaacaactacgacagctaatgaagtcaataaggtatcagtactttcgtcagcctacctttgtcattagctatcaaatttgaataaaagggccatacacatactgatgtgtccctaaatatagatatgatttaaagtctcttaccggcccaacctcatctcaaaatttaaatgaatctgttacaactattcaattctaactcataagaaaa

SEQ ID NO: 205271 - DNA, 689 bp, Cannabis indica
ttttttttttaagaaaaaaaggattaagtggtacaaatctcttcctcgttaaatttttttgataattttggagatcatgtactagttataggagtcttgtacatcaatctatcttaattaagtcatcagtaatacttcgagaatttttatcgaaaatgacaccacctacaataaattagtctttagagaccaaacataatctcttccaaaaaaaaaaattataatgagtttcgaactcttgactaaaacaaaaaaagatatcgtaatgacaatcttgaccactgacataactttttttcactcctccttatcaaagcctatcaattgtcttaatagtataaatcataccaaaattactcttatcttgtttttcaaatttttttttttttgtaaaattaatttaataatttacttctctaaacattacgttcgtaccatttttaattctaatttagagaaaacatattttgtcttgtgaaccacaatcaatattcttacctccacttttctttcttaccaaattatacgtgctatttcttttcttcattctttttcacaattctcttaaaacttttcttctataagagcaaactttattaagtcaaaactgcctcaaatttttatcgtcattctaaatgataataagattaagactaattaatccaacacattgtccacataccataact

SEQ ID NO: 205272 - DNA, 2600 bp, Cannabis indica
gattgggattgctaacaagcttggaaatctttactatatccagcagcaaatccatgaaaaacctctttcgaattccatttcttgtaatatgcaacttactccaaaccaatggcatactcgccttggtcatccttctgtaaaaattactgataaaatcaataaaaagttgcattgttcatctgatttgtctcatctccttaattgcaaaatctgtcactttgctaagcaaagaaaactaccatttaatagcaataccagttttgcaacacaaatttttgatcttgtccacatggacatttggggaccttatcctttagaatcaattgaaggatatcgatattttctcacaattgtagatgatcattctcgctatacttggattcatttacttaaagccaaatctgaggcacccacactcattcataatttctttacttatgtcaatgttcattataaatgtcatatcaaagctgtgagaactgataatgccaaagaactcactttaacacatttttatgctagtcaaggagttctacatcacaaatcttgtgttaacaggccccaacaaaatgccatcgttgaaaggaaacatcagcacatattgaatgtagctagagctctagcttttcaatccaatttacctcttctttattggagctatatggtaagaacttctgtttatttgatcaatagaactccatctatattattaaaagacaagacatcttatgaactattgaattccaagattccatcttatgatcatttgagaaattatggctgtctatgctatgcctctcctcacaccagcagccacaaattatcccctagggccaaagcttgcatatttattggctatcccgataatatgaaagcttacaccctattagatattgaatccaacaatattttccactcaagagatgttatcttctatgagtctatctatcctctcaccaaaaccagcaaccacaatgtcaatattgacacattttttcctactgctaccaaaccagcagctactgctttcgataatccctcacccaatgacacaaatttttttgccactcaatctttaattgaaccaaaatcctatgctgaagcttccaaatatgctgcttggttaaaggctatggatgctgaaacggatgccttagaaagaaatcacacatggattgttacaagtttaccatcccatcaacatgtcattggaaacaagtgggtttacaagattaagtacaatcccgatggctcagtcaatagacccaaagctcgactggttaccaaaggttatacccaacaacaaggtattgattttttttgacacttatgctcctgtagctaagttcaatacactaaaacttctttttgctcttgctgccataaaacaatgccacctacatcacatggacatagataatgctttcctccatggagatttaaatgaggattgttacatgaaactacctcaaggttacactcccaaaagggtgataccacctaatgccgtttgcaaataaaaaaaaagcttatacggtttaaaacaagcatctcgacagtggtatgctaaacttagttccactctcattacacaaggctttacacaatccaaaagtgaccactccttgttcattaaaagtacatctaatgctttcctagctatacttatatacgtattgtagctacaaacaatgtttcagccctcaatcatttcattgctacactagattcaactttcaaactgaaagatcttggcagcctacgatttttcttaggactcgaagttgcacgatcgaacaaaggaatttcagtttcccaaagaccattcacattgcaacttcttcaagaaacgggtcaccttggctcaaaaccggtctccacaccaatggaacctaatctcaaactaagcaatgaatcggatgctcttttgccaaatccaaaaaataccgcagcctcataggcaagctcatctacctccccataactaggcctgacatcagttttgctgtcaacaaactgagtcaatacaccaacaacctcgccaacctcattttcaagctgctacgagttgtcaactatctcaaacaatctccagggcaaggcctcttctaccatgcttagcacctcaccctcttcaacttcaagcctttgcagatgccgattggggggcctgcccagattcacggagatcaatcacaggatattgtgttttttggggacattctctactgtcttggaagtctaagaagcagcaaaccatctcaagatcctccgctgaagccgaatatagatcaatggcacatgccacttgtgaactcacatggctcacctcaattcttcaagactttgctgttcccatcaaaactccttccatcttgtattgtgataacactacaactatccacattgttgaaaatcccgtcttccacgaacggacgaagcacgtggaaatcgattgtcacactgttcgtgaaaagattaacaacggtacacttcagatgaatcatgtctcttctgaaaacaatctcgctaatatattaacaaagcctttgtttccacaacaacttcgtaacatcatgtccaagctggctgtcaaagac

SEQ ID NO: 205273 - DNA, 613 bp, Cannabis indica
gtacaactaccctaagcgatggtatcaagaaaacattactatgcatgtcttgaataaccgatagacaatcagattcaagctctaccaaatttcatgattacttcttgatccaactaagagcctctttgatggccaatacttcagccatatcgagtgccaccaaaccccaataatacacagtcctagcttgaacaaggtacccatgacaatctctcgcaacaattccaaattcaaaagaagaattttctccgaaaatagctgcatcaaccgagactttgattatgttttcttgaggcttgacccaagattcagctccatctccaaccataccagtaggaaatcgagcaattgtagcaacatcttgggctttcttccattgcacaaagtactgcaatactgaaacattaacatcgttaacatggtcacgtttttgctgccaaacaagattgttacatgctctccaaagtgcccaactcaccattgctatttcacaatgcttttcacttttcagtgcaataaagggttagaacactcgagaacaagctaggaaaatcacttagatcccccttctaaaatttggtatgatcttttattaaagtcattggcccactgg

SEQ ID NO: 205274 - DNA, 1866 bp, Cannabis indica
tatatatatatataaaattataactaaaatcatatatttcacatacatagatttgttttcttgggaaaaacacacacatatataattaaatttagcatttaagtatatatagtcattttcatttaacttatatttcatggatagatgatcaactatacagtagctagccaacatggaaacacttaaaaactttgatgctaactttgatttgaaaaggatgcatatatttatccgcttataattataagtatatataatgttatttttgtacaataattgagttatagataagaacatatgctactcaacttattgccaattgattttaagatggaatcctataattcttaacatagtatcagagccatatcttttgcaggcaagtgatcctattccgtaatacggttcaagattgatgagccaaaaataaccatcatctcaaggataggctgtcatgcaaagcatgccgagttcatccggcctaagagatttatgtatactaaaagtccaattatgagaaatttacaagagatatattaaagagaaattatagtaaatgatcttaaattataggattacttatattggtagcacagcgaaatatgaacacctagtgaactcgaaaacctttgaactctgaatagttgattgaatctcttcaagtcttcctcagtatgtgccctgagtatatctcaccaaaaaagtgtgggcagtttttcagtcactaagaaatacgtgatagccaaaatcttagagatagaaggagaatttggcctatgtgtagatgactagggtttcaatattttcttttctgttagatgaaatactgaatgagatgagtgtgtaaactaaagtctaaaactttctaactacttttttacatagggaatccatagacttagattaaatgtaaaatagctatatgataaatggtttaaacatagatcttcaatgaaaaaaaaaatgtaaatctattcctataaatcaaccaattaaaataattctttttattattttttatttaaatttctaattaattaattaaatgaaacaaaaaaaaaaattaagccactaaaatatagctatgggtaaaatacaatagtgtggacccacacttgtttgctttttcttatttcaaaacttaaaatctaattatcttttatttattcactcattaattaaaattaatctctttaaatactagtcttaattttataattataaataataataaattaaactataattaaatatatttactaatttgaccctcaaaatgtcataattttaaaataagcctttatttctcaactcttctcaatttaatacaacttaataaaaatatgtcaaagttgacctagttagtttttcgaattttaattagttaattaaattaattaattaagacattaacatgatattatctcgccaactgtagagactatagatctatgaaattaagttgtcaataagttgttatgaaatttaacgaataaattttttaacttattaattccttgtgattccactacacactcaaaattgaactcttgatttcatagactactttatacatccaaaatagatgctctacaaattatctatcgtttcaataagaaaaatcaatgattttttatagatggtatacattaagtagagactaaaattgctattttaccattttatgtattttaatcttcaaacacttagtccattgtaaatgatatatattacagtaaactgatataattacataaatgagtactcaatcatttattgtatttaaccaaagttaaaataaattgtcatttcacttttaataaattataaaagctatagatgtccaagtctatgattaacactctc

SEQ ID NO: 205275 - DNA, 921 bp, Cannabis indica
aaataatttccaacactctctttgtgtatggtacatgttctaatattgtgatccttttagtatacgtggatgatattcttgtcactggccctaatacctcccttattcagaagctaatttctgatatgaacaatcaattctccctcaaagatttgggacaagttcactatttcttaggtgtggaaatgcatagaacctctgaaggtctatatctgtcccaaacgaagtatataactgatctcttactcaaagttcacttagaaggagataagagttgtgctagtcccacttccacctctcacaaattgtctctgcatgaaggggctccttttgaagatgctaccttatatagaagtactttgggtgcacttcagtgcttaaccttgacaaggtctgatgttgcttgcattatcaataagctgtcccagtttattcatgctcctactcatgtacactaggaagcttgcaaaaggctcctccgatacttaaaaggcaccatctctgatggaattcttctcaaaccagtacctaggctgtctctttttgcctatttcgatgctgactgggctagttgtgtcgatgatcgaaggtccactggaggcttatgctatttttcttggaccaaatttgatctcatggtcagctaaaaaagtagcaagtcgttgctcattcctccactgagtctgaattttgtgcgcttaccaacacggctgctgaaattaagtggcttcgttctcttctcagcgaacttcaagtcaagcttgtggatgtgcctgttatttgggttgataaccgaaggggctgcttcattggatgcgaattccatctttcatgctaggtgcaacacacaatgagatagatcagcactttgtccatgatcagctatgaataaggacttgatatgcgttatatcgcctacca

SEQ ID NO: 205276 - DNA, 1350 bp, Cannabis indica
gatttagaggtgtcaataaaattatgattacatttttgcttctgttcgtgttaggaattgtttttcaattagttatattattaaaaaattatcaaaaattgagctcataagtcctatttttataattttaaaaaatacagagtccactttatcatttattaaaacataggggctaaaaatgtatttatcctatatataatggagggtctagaatttaagagtaatttacaacataaatacttaagattaattctctttaattagtttacttttttataataataatacataagttatatttctggaatttctgtaaatacttaactgttaagtgttaagttattattcacatttaaattaatttttaaataaaaaataaaatttaataatcaatcaaaaactctcttgtggccattaagttgaacttaatgtctaagtatttataaaaattctaaaaatatataatttaagtattattatagtaaaaattaaatattgatgtatcctacaaattagtttttaagttaataaaagaaagttaatatttttttatatgggagaggtcgtacttattatatatttatattcttttactataaataattattggaaaatctacaataattaacgtggtccattatatataataaggaaggagacatagtatatgtttggtggttaatttatacaaaattaaaaatttatacatattattaattattataccatatttatggcaaaactatctatacgttacacgtattcttttactcgatccttttaaaattaaattatataaatattataagagaataattaaaataaataaataattaacaaagcatcctactatttacttaattaattaatttttataatattgaatgagtgctacgatttatttttattttccaagaaaaaattttgcctcatatatatggtgttatatccagccgtccatttaaatatatatctatataaaaaaaattatattatattctgatatccctcgtggcaaaaagatatatttatatatataataaacacatcacatacataaattattattatatatatacaaatcaatgtattatagtatatatctgattgaaagtttcatcatgcatcgatcttgcatattaatttgactatgtaacatatttagcctctataaattatataaaatatttttattaattaattataatttaatcacttaatcaattaattaattaatatgacaactgactaaatataaatatctggaatatacgaatatttattagatcagatatagcttttgtctataaacgacctacctagcttttgttgagaaatgaggttactact

SEQ ID NO: 205277 - DNA, 931 bp, Cannabis indica
tggaatttaattttgatccttaatctctttttttgagactctgtttacttaatgataataaaaacataaatacattttatttttgttaaggaaatattacaaaaaaaaaattgctaaaacaatttttttatttaattattctttgttttttcaaaaaaaaaaattaatataacaatatacaacaacaacaaaattaggaacagtaggtaacactttgtttttaatttttataaaaatgaaattaaaatttgtgtttttaagattttgttaataaaaaacaaaaatgtgttctataattatttttgtttttgaattttaaaaacagaaaacaaaaatgtactttataatttttattttatttttatttttgattttattaaaactaggtttagattcggatttggggtcagcgtcatggtccgtgtacgggactggggtcggggtcatggaatgaaatttgtaacaattttggcaattatgatgatgaatgaaattcgcactcgaattgattgggagattaaccttgtctcgaagataacctgatactaacaagctaactgttatcataaatagctcgagattgatggaatcccaaatgtgttcattgacctatatgtattatgctactcgagagccaaaggtagcaagtagcgacggtggaagaggtggtggtagggatggatatttttcccatgaaaaacgggacggggacagagattattttttgtgctcgaatgttaaacgaggtggaaatagagacgacactgctcgttccgacagaaactcatttagtattttattttatatttctaataatattttataatttataatttatgtttgtatttattttaatatattagtatattttttataaatttaaattttagataataattcatttattgaataaaattaatatgtaatattt

SEQ ID NO: 205278 - DNA, 593 bp, Cannabis indica
atggtaaaacaataaatcatacagcacatgaatttagattttttttccaaaaagaaaatattgaatctctttaaatttgaaataaattttctgttcagccgttattttttttttgtttggtttgctgatttttttttatatatatacaaagttttttcttaatcaattacttgtgatagtaagataaaaataaacatgtggaatgtgttcatacttctttttttcattaacggtacttttctttttctctgattaccttaacgtcgtacttaccatataaatgtttattttgaaaaaaataaaattaattaaataaattccatcataggcaatgtcaattgaagaacaagccaaaattgattccaaaatacaatcaaggattcgccaccaaacatgcaatacagaatgaaaattttaaaacccaatttaattataatattaactaacgaactataagtggacaactacaaggcaatttatgggaaagctaaaattaatgtaattttatggtaaatgcgaggtgtagatttagatagagttttctgtataagtcccaattttcatttcatagtattagcttactgttatttcta

SEQ ID NO: 205279 - DNA, 923 bp, Cannabis indica
atatctcatgcagcttttcatggtttctactaaattaaatgttccataactatggtttctccgtttggtagttgtattgaggagtgcaaatctcttctttccaacttgaataatgttaattttcgttttgttaaacgatctgctaatcgtgttgctcatgcttttgctcgagtttcatggttacatgctgattgtagttattcggtttcctccattccgagtaacatctttgatgtaattgagcaagaaatgcattaataaaatcatcatctttaattcaaaaaaaaaaaaatgttcctctagaccttattactgccatttttagaacatttcagaaggacaaattttggtttcaagtagccggagaaaagttagtatttagtttagaagatgttctctatttaacaggtttgccaattgatggcaaacctattactggagaagattttaaagataaagaaaaaataaaacaagttttttttaattctttcgaaagagaacttccagataaagcctttaaaaattcaaagattcgtgtgaactggatagctgctaattttatgaatgttccacttaatattgaggagaattcaaatgatatattgccttacgtaagggcatatattctttgccttagcttaaatggtatgattattatccatattttagctgaacaactcatgttagttatgtaaagatgaattatgtccaatatttttttttaacttacagtaatcaccaaaatttattaattagtattgaaacatattcactctttcatcatttcttaatatatgtctagctataggcactttctcaaagttgatactaagatcttttaaaaacatgttacttgatattcttttgcctatcttatttggttgctgttggtctatgtagaaaaaaacttatacattccatat

SEQ ID NO: 205280 - DNA, 1128 bp, Cannabis indica
attctgttttttggaactagtacaataagagttttattaattaattataaatattccatatttttaagaacaaccagaacagtatttcttaatatattttaatttttatgataaaaataaatattaaggacatcaactccaagagctttatccactgagagttggaaaagaataatttttacttcacaaacagtataaagggattataaaatattaaattagtcctcgctaattctctactgacaccagacaacacatgacttatagattcattatgagtaccctcagaggagaaaagagaagagtaaaattttgcaacttcatttctgatagcttcctcattgacaacaaaagtatcatcatctagaataagatttctaataagattagttataaggatggaaattaggtgggtaatgagtggagaatgcaccccaaactccatctccattccttatttatgtctcctatctttgttctaacctcgcttaatcccctacggatttgaggtaggagaatccctattaggtatggagatttattgggtactcgtgaagattaaaagaaatgataataataaaataatgtaatgtaaattcaaaataaaaatgtaaagaatttttgaatttgaaataaacattctatcgaacatatatcatttatacttcatattttataaattgtaaaagataaataagccagaaacataaccaatatattgatgttaagtttgtaagtaataagaaattaataaagatattaaaaattagaattgatacacaaaacactatattaaaaaatattattatgatgtcaataagaaagaccaataattaattttgtaactaataactttaatacggttatataataaatatttaaaaaattatatggaaattatatattaggatcgaatatggaatggatagtatcaaccccaatccctcctcaaactcacttcgagtatatgttattgttcctggtccctgcccccaccccctaacccaccaaagtgggtattccccaccccattcaggatgagtaccaagggatgggtcaaattttcatcactaatgaattatttattgttgttattattggcgtaatatttttttcaaattaactttg

SEQ ID NO: 205281 - DNA, 1079 bp, Cannabis indica
cctcatttgcgacataaccttcagcaatggaccctttaggatgtgccttgtttcccacataattcttcaattttttcatgtacctctcaaaaggatacatccacctcataaatactaggccacccaatatagattcttcaggaaaatgtattaccaaatgtatcattatgtcaaaacaagctagaggaaaaatcaatttcatcttgcataatattagaattagattcttttgagcatcctccatatctcttacatttaaagttttcgaacataattgtttgaagaaattacatagttgagtaatagtggttgtggtatcacttggtagaaatttgcaaatatctatagaaagaactcgctggataatgacatgacaattatgggattttaacccaagaatattttactcatctggagaaaatttgctctttaaatttgaacaaaagccattaagaaacttgattcctttaacaaattgacaaaatagttgtctttttccacgtgtcaaaacataaggagcatgtggtttcatcaaccttccattcccatcttcataaatccacaacagaggcaaccaatcaccttgtaaagaatactccacatattgaaaaacacgttgatgaaaatctaatcaatgaggattgtaaagaggaaacacgttaagatgatctagaagtcgatgggaaaggaaagatgaagatgactattattatgagctagaccctatagtcgctaaactagccaaacaactcgctaagatgtagtagaaactagtggcacaagaagagttctcccgtcaaagacaagctaccttgactaaaatggaggccaagattcaactagagaatgttgatcgtgatggagaaatgcatgacggtcctattcctcaggacaataatactacgagaagaacagatcgtaacgatcttagaatcttttatcccaatagggaaaaaggaaaatgagtcacgggggatcctccaaggaaagagcttcaaccgctctgtgtaataatgcaaacactgtcaaccaacctcaaaggaaaaagaaggtagcatgtaacaccctactaacttagg

SEQ ID NO: 205282 - DNA, 901 bp, Cannabis indica
tttttaatttataattttgctagtagttgtatacttactctttggtttccttctggaattcaccatgtaaataggtatgagagcctcaatctaaatgaagttcaagggctgcatgaaattgaggtggaatcttattcgtattttaatggtcaattgcatggaaatagaatttggactgggtaagttcagctccttatttggagattttcatttgtttggttagttcaaactacatttcaaacacagtataagtactctttatctatcttttacagtgttgtctgtggcattggagttactttaattgaaccacagtactactcatcctttttcagccgtgagagggtgtatgggtatccagatgactttgaacggttagtagttaaaagttactctcttaacacagtctgctagttcactacaccatcatattaatatttttcctacttggcctttatcgtaggcactgctttccccctctctctgggactatagacatttcttaatgtgaaaatgttggggctttcgataaatttctatgcaatcctagaatcagtaatacacctcgttctttcaggttttcctatttttctcgagcctctttggattacatagtaaaatcaggaaagcatcctgatgtgttacacatccacaattgggagactgctatcattgggccacttttttgggatatttttgctaatcaggtggaaatagcaatattattatagggatgtcttaattttgtgtgcatctaacagattctgctcttagtttcacgtaatagttaaacagtgatgatcaaaagttagctcaaactttgatggatctcttctgtcaatactatttgtatattattaaaaataaaaaatatgaagacttttacaagtctttgttcttt

SEQ ID NO: 205283 - DNA, 818 bp, Cannabis indica
ctgtatgtgtgccatttggaactctagaataaaagttatttgcaaattcggatatggctccattgatgttatggcttggattaactctttcatttcagattaccaggaagctatgtgtaatgtaaacaggtataaagcagttcacaatcagcaagcaactggcatagagaagacagttcctcaaaactgctatcagcttacatggatgcagcgactttgtgctgagcacatgaagttaggatttggagcagttattaaggattggcagggtaatttggtggtaggtttatctatccctgcagcaggaaacttacagcctacgatggcaaaagccttagctttaagagctggtttgatttggtgtcatcatatcaaaattcttttggcagtagttgacgctgattcaaagatgctggtaaacagagttcttggtcgaaagagtgatcttttagcactctcggacgtggttgaagacatcagaagttctttgtctcttttccctaatgttatccttcggcataccagtaaacagtttaattgtaatgctcatagtttggctcgaagggcactagggcaggatgaagaattatgctggaatgttttagttctagttctgtagcttcttttcctgaagcattttccgtcaaaataaataaataaataaataattattcaaaaataaattataactttataaatataaataaataatttgagtaaaaaagaaaacatgttaagagttactgaacatatgttttaagattttaagtaagtaaaaaaaattaattatgaatagaacataataattatactagtac

SEQ ID NO: 205284 - DNA, 588 bp, Cannabis indica
gatgaatttaagctgtcacctgccaagatcaaaacaaagaatttaacagcagtgctgtacaaagcttgaggaaagagggaatgtatggaatatagattacaacttaccatgcacaaagcattgggcaacgaatttgcactttgcatatacgttctcaattttttctggagcaatatactctccctgtgccagcttgaaaatgttctttttcctaaaatggtaaacaacataataagtggtgcaatgcttgtatttaagctaaatatttttcatttttttaaaaaaaaataataattagacaaatgcttgaatcacaagaacccatgagaagttatataatcagattcacatcagattgagtctgaaaagttctgtaaccaaacttcatttgagcctaagtttgtaactccatgtataaaaaactttattttgctttcaaagggtggtggagtggtgatttggaaaggtggaatggttttgtttttaaaaaaactttaacagttttagaaagtcctttatgccactatgaaatgacaaaggctcccacaagtttggataatacacattatccagatctctagtgtgtaa

SEQ ID NO: 205285 - DNA, 1698 bp, Cannabis indica
ttttttttttttttgttacattatttaaatattgtttcatgttattttcatatgatctttttattatttttatagaacactataaaaatataaaaaaaatatttgaaagtacaagtgtggaagttttgccaaacttttgaaagtataatattaagatcttcaactctttttaaattagaacgcttagattcttcctcccaaagaaagactcatgaggaagaattttttgaaacttgatgaacaaagtcaaagtgtattcaacatgaacaactattacaagaaaaataatacataagtacattacaataaccacgaaaaactttctggactcaagttctccaagcaaaaaaattatgaaacaaaacttaaaaagtttttgaaaaataataaacaagagagatactagtataaactcacgatctaagaatttctacatacaccctagaaacgttttaggtcatgaaaaagagaaaataaaacaattagaaagtaaatacaaaatatattccaaaaatagtcccaaacaatattccttaaataaataagaacacaatattcttatgaattttttcattaaaaaatagtatataaaatgatgcttatattcttatctgcacaatatattttaaacaaaaagtcagattaagaaattcaaactaaataaataaaatttacataaatataaatatcaatctatattatatagaaaaatcaaattttccactaaaaaaaatggttgaattcatacttatcaaacttcctttttctttctatttttatcacattatacttcccagtccgaacattgacccaaaaaaaatcaaaccatcggatataatacgtaagtgagttttggtgttgaatttgaatgggtcgtccactctactggttatggttatgggagtccatgagacgtagtacaaatgcagaaacaccactttaagtcccaaagctctcaacttttccatcaatggtgagaagagaaacaaatcccttattttacttcttctcattctggataatattcattcagttttctaattcccaaacagacactatagaacagggtcaacaactcaaacatgggatgcacttgttctccgcttctggtattttcaggctgggattcttcaaacttggctcttcaaattcaaatctttcatacgtaggaatatggtacaacaatggagttaacgagaaaccagtatgggtggcaaaccgtaataacccaattccagacgagtcgggaacaatcggaatcgatcaatacggaaacttgaagatttcccacaacgacggagaccccattgttactctgtactctgctcaatctccgattaatgccagagcaactctgctcgattcaggaaactttgttctacgagaatcgagtaatcatctatggcaaagctttgattatcctactgatacccttttgcctaaaatgaagctcggatttgaccggagaactgggctcaatcggactctgacttcttggaggactgatgattttcctgctttgggttcattcactcttgctatagactcagaccaaatgatcgtgtggtggagaggaaacaactattgggaaagtgggccatggggagatgggtgttttgattcgctaaaagacgagttctgtaaccatttcaagtacaaatttagctatacttcaaatgaggaagagacttacatgaa

SEQ ID NO: 205286 - DNA, 707 bp, Cannabis indica
ctacttgggaaaccaaactaaatctctcttagtatatgtttataaatatatatatatatatgatttcttttcagatccatttttttgaattattttttaaattttattacagtactatatattaattatttcttgagtggaaaagatattatagataggttaggaatttaattagtaataaaaagagtaaaactcactctttgtaattgttgggtaaagtaagtaatgtgttgtatatactttaaatatttaataggtcggatttttatagattagaataatgcatgtccgtacacaaacttctttaacacatgcaggggctcactcggggatccacaattggggttctctctacatggatgagagagagacaaagatgatgatctagagagttattagccgttttgggagagagatcttctctgatttgtgggttattattttgatctatcgtcgtagtgtactcttcatgtaaatatctctatttctctctctgtagaggagatagcagagagagagagatagagagaggtagcttaactttacgtagagtgtcgatatattttatgagtgagagattatttgcagagtgtgggaatgctgggctttggggagtcatttattgcaaagaacgagaacgtgagttccaacaaattttacacccaagtggggtaagtgagaaacttatgtgtgtgtgtgtgtgtgtg

SEQ ID NO: 205287 - DNA, 1425 bp, Cannabis indica
gaaaaaccctgtgacatttcacttggccgcatagaaacttggaaatgatatcaagttctgttagctgtaagaacaaaattctcatccaatgaaactatacattgaaactaacatcataattagcatcacacaagtaactgattctaatcaaattggctttcagtcctttaacaaatagaattctagctaatggaaatgtacctgagagatttaaatctccttgtcccataatctgccctttattaccatcaccaaatgtcacaaagccttctgttgaatcttgaaaattttgtagggattctctggagcctgtcatatatcgtgagcaaccactatcaaagtaccagtgattctccttcatagcaaataatgaagtatgagcaaccaaggcaagattggcaactttgggtttccatgtcttagatgaaactttttgaaaagcacgaggaacttactaaaagttgattaattatttatgatgttggtcagatatgttctgagtttatagcgcctaggtctggtatgaccttttttgttgcaaaagtgacaaataggaacaaagtgttctggtttttcggtaatatgctcccttttcaaggtatttccttttttgctatcttctcgtattcaactaagttactattagattcaccttccttattcactgcaggagacacaaactccacctttccatctgaagaagatgattagttccatcaatcgacaagtcctgaccttgtttgtagagcatcttatacccaattgaagtctgatcaccataaggcttttgattctgaagggttgattcaaagtagctatccccagaggtatgaaggacaaagactgcttggctctcacaagttggacagtcaacttgtatatttcactatctttagaacatagctatattatcattcacttcagtttctcctcaagctcaatcttactgtcatcaagagccttgttcagatcttgcagttctttaactctctttgccatgtagctccactgagcgaacatctcttcacaggctttattttttctacaataattgaatctgaatcaaaaaaagactcatcaccatcagatcccttggacatagtttctttagccataaatgttatgactaacttatcttctttagactcaccactcacttcatcttcttcactatcactccaagttgcagcaaaagccttcttcttcttcttcttcttcaaggtgtttgcacattcgacctgtatgtggccataacctttacattctcagcatttgatagttggtctgcctttcatctcgttttgttggggatgcttgttttgcattagagaagtttttgctggaagagtctttccttctttcaggtaatgtttttcttgtaaattctttttgagtaagtcgtagctataatttttagcctaagag

SEQ ID NO: 205288 - DNA, 1050 bp, Cannabis indica
gctgagaaatcgtcgactacgacgacgtcgttgtcgtcgaaatggcggtcggaggagttgagatcgtcgccgtcgagaccgtaggcgtcgaaggaagccatagctttctctctctctctctctcctctgatctgattctctgtgtgaaagggtaaaacgacagcgttttattgttctgtgtaatgaaataatgtgaagaagaggagtcgttttgaattgggaatctatatatatagttaacggtgaagagactgaacttaacggaaaatgggaaacgggaaatgggagtgaatttatttagggtaaaatggtaaatataactaaagttttaagttttaaacttaatgtttatttttagcggactcaatatttataaaattataaatttttttttaatttttttagtataattctcttttaaatttattaaaggaatatttagaagtaaatcatactatatgtttcagtcttagacttaatgacctagaatctatcttatatatggcttgttcaaaaaaataacagagttgtactgaagaaattagagagaaattacagttttacaaatattaggtacttatgccgctaaaaataaatattaagtttatgtcacttacaaacttaaaactttaagtatttatgccgctaattaccttttttctttattttattgttttaattagtttttctctgtaagggtaaaataagagcatttttattattgtgtgtatatttaataatgtaaagaagatgagtcgtttttaattagtttctcgataacgttttatcagtgtattgtaataatgtaaagaaaagaaatcgttttgaattgggaatctttatatgtatatagttaacggtgaagagacgaaatgggaaacaaaaacaaaaaggattttatatttattttttttataattagtttatcttaatgttgtttatgtagtaataataataataataagtctacaatttgggatttttttctctaataaattagaaattattattatacttctcatcgtgtttttttgggagtcctatgccttc

SEQ ID NO: 205289 - DNA, 1883 bp, Cannabis indica
aaccggttacccgattttccccagaaaacccacaaaaattcaaagcttcaccagaacgattccaaactcaaccaaactttccaaacctgcatattataccccaataaaccatatccaagcaataaaacaactacccaagctcagaattgaaaaacaccattaaagctccaagtttgagttctaaaactcaaaacttgactaaacttactgtcagccactaaatcatgcttaattcaacataatctaacataattaaacctctaaaacaataacaaacaactacagcaacaacaacagcaaaaactacaaattcatgcaaaattccaaacttgaaactcaagaaagctaaagagggagttgcttaaagactttaccttgccttaggttcactacaaccctgctgaattcctaattaaggaacaaaaaccagcaaaccctagctagtctaggggtttcgagagagagaaagagatagttgaaagagagatctttttccttacttttttctaattttttaaaaatgatttaatgaaagaaaaatggttttgttttattgtaaatatcagcctaaaacattaatcgaaatcaaattaataacataatataaacccacaaaaagacaaaacaccaaatggacagaaagaccattttgcccttccacactaaaagtcataaaaggtcacttaagtgtattttgggaaattctaaaatctcgactattcccagcattcccaatgtctaactatattgtcccgctatactaaaaatactaagatgtgattctaatagccaaacatcgcgttccaatgttgtcggacacaaaacatgcaaaatttacgaaatttctatatttgacatattaaatgcatgctgaattcaaataaatcatcataaataaataattcaagtttaataaacaagtttcataatcaaaccctaattatcttctaatttacaaattaaaactaagcgatctttacaacttctaatactccaacaccacctgccaccactcctcaaacaataccagaaactactgatattatccatcaaaaatcactaccctctgatgaaaatacaccaaccaatgcctctgctgatatcacaccaacacctacacttgttgatagaccaacaacaactgcacctgctacaaatacatcatcacaagatcttgatactcttcctaaggccacaatacattcatcaatcacaaaagcaggttgacaaactcttcctcctgcccatctaaaagactacatttgtcagtcttcaactaatcatcctctagtaaaataccttaactatgaaaggttaagtgttgcttttagaaatgccatatttcatgcctacattgaactcgaaccaactacttttagacaggcatctaaattctcctaatggttgaaagccatggataatgaattttttgcactcaagaaaaacaaaacttggtatgttgtctctttaccactaggctgtcaacccattgtaaacaaatggattgataaaattaaatacaatgaacaaggtgaagttgatagatacaaggcacgccttattgctaaagggtattctcaacaacatggcattgattacattgaagcattttcctctgctgcaaaattcaatacccttaaactgtttatggctttggctaccattaacaactggacccttcaccagatggacatcgataatgtatttttacatggggaccttaataaaaaagtttacttgacactccctaaaggatatgttcatgagggggagctgcctcccaaccctgtctgtatattacacaaaagcctttatggcctcaagcaagcttctcgccaatggtttgcaaaattaagctctactttgattgagcatggttttca

SEQ ID NO: 205290 - DNA, 564 bp, Cannabis indica
tttttttttttttttttgtaagaatcagttgtgtttgcaattagggtttagaattggaattgaggtgagacatagaaagagaatgagatttaagattagaagaatgaattttgtgggaattgttgtttgtgtttggttgggaaaaatgagaaaatgaagccctgaaagttgagaaattgcagcagaagcagtagtttggtacgaacaactcaagtaaaaaaaaaagctctaccacactagctgtcgctactgatctgttctagttatgtggccatatgaccagtggcattatggcaatcgtgctcaaaattatacaagtgtgtatagtgtgctgtgtgtatgtgtcgtgtgtgttgtttttctttttgagagcattacaaaagttcaattgttttacaatgttgatactcttttactagactcaatctcaaaaggaaaattatagggggcaccatttttttttttttggtgtagcactattcttttaactaaattataaccttaatttcttctataatgaaaaatttcattgaatatgcttatatctttacccatatctaaaaa

SEQ ID NO: 205291 - DNA, 1301 bp, Cannabis indica
actaggtttgatcatatatatagttaaaaaaaaaaaagacgtataggtatagggatcgatcatataataataaaaaagaattaaaaaaaagaataacaaacaatttaaagaaaaactatgtactcattgaacaatttaaatttttaccaaaatgataatataataaatatatatattatagctaccaaaaagaataaattaattataaatagataataagcagataaaaatgatattaatttataactcaagtaataattaataatataagccatgcaatgcatgcatacgtagttataatatatataatatgtacgtaccagttggtttggtgaagaggtatatgcaagaaatgtatttggagcctttaggagtattcagagtgatatatagaatatctattaatttgttgaattttactttgataaattgatgcaaatgaagatagatcgagtagtatatatatactatattactatatatatatatatattaagatttattaaaacctaattcatcaaatggatttattagaattggttacaaaatgctgttatgttatgtataaacacgtaattacttgagtatatacactcatttacgcatgttaattaatttttagataatttattaagtgatagtccaattaatattaaacatgattaattaattttatccaaaaatgtgttaattcttatatttgacgccatcaattcgttcattctcataactatattaattatagctctatatatttatagatataaaaagaaagaatagtattcccacaagcttagacctagctatatatatatatattcattaattatagatagtcacgactaacaaattttatttaattgggtgataatatatattatttgtatttggcaaacataaatttttattgtctattcttaagagaaaatttatattttgttaatatttagtaaaaaaggtaacttcattaatttgttgctaattctcaaattaaccaacaaaaaacaaaagtaaaagcaaaataatttgtggatgataagaagagtatttccttttattataaagctatatatagatattctacataaatatatatagctatgagattgagtatttttagataaattaatatgtaattttgtaatcaattctaaatgtgaagtttttataatgggttgtgttgagttctccattaaatcaaaaatggtaattaatgtattaattggtgttataattcgatggtataatatataatgtgataatacaaacaaggataaagcatgaattgatgtcgcgtaaaa

SEQ ID NO: 205292 - DNA, 1026 bp, Cannabis indica
ttttattgatatcaaaatgtgtatatgattcttctgtatgagctacatgattattacaagaatcagtacaatttgagctatcagaagcaaccgtcttggtggtaagatgacactgcagagctgatccaggatagtgttatgtgtcatctccaagcatgtagagaccctacttaaccttccctttgaggaacacaatctcaatttatttatccttgataaaacaacaagatttatgaaattcaatgaagacatcattgtccttagctagtttggaaacactgacaatgtttttggtaataaaaggaacttcaagcacaaatttcaattttaaaggataatcattattgaaagaaatatttgttgtgccaatatgagagattttgagatgcttaccatcaccaatagtaagtgtctcctgtccagtgtagttagtagttgaatgaaaattgtccagttcatttgtcacacgtgtagtagtcccagtatctgcaaaccatgtgtcatcatcaccaaagtttggtaaaactgcgggagtctgatttgtattgtccaattcatatttagtaagaaatgctttgggaggattggagtttaattttggagtaatccaattcttgttaaacctgtagtgacacacaactacagtgtgacccatgtgcaagcatacttaacaaattagcctgttgaagggagcagaaccacgagagtagcctcgaccaccaattcttgaaccagaattcgtggatgtacctcttccaagagggtgataagcacgaccatatccatgacgagaagatcccatggtaagatactggcctagagctttacagagagatcattaactgaatgatgatgatcaagacgactttcatatgcaagaagcagggcttaaacctcatcaagagtgaaaaaatcatttgttgatgttatactagacacaactgaatcatagtccggaccatgaccattgagatgctgaaggatcacatcttgtctactaatatactaatctagcaataatgattg

SEQ ID NO: 205293 - DNA, 1221 bp, Cannabis indica
aactctcaaattatgagatagaaatacagcattaatctaataaatataatacaaaacatattattaacacaactaaaagcaattccttttttagtttaatataccaatactcttcaagtttatgattcaatttaatataatttattatgcataaatttttgtgcttaccaattattattatatctatttaataccacgaaacttaaaataataaggttaattactattttttattgacaaataataatgttatttattatatagtaaaaatgtaacgaagactctgattgagtgccacgtggagggaagaaaagtttgagtttcagttgagttgaatttttgttgtatttagatggtttaaccgtaggccatttaattaatctcattttttttaataagatttaattaatctcattcattaacctttttttggtcaatctatttaatgtgtattttcttttatacccctcaaccaacttccattcattttcttatctttttttttaataaaaaaaactttaaatgtcacgtgttgtaatgaacaagggcataagtgtaatttcacatcagacaccgctaacctgttactgaaaatggttttggggttttcttttaattagtttctaaataaatcgtttttagtaattagatttaattaattaattatttggcgcgtaataaactaactgacttgttttttattaggggctattaaataattaaaattaattaaaagaggggaaaaaataaataaaaaagaaaaaaaaaaaggaagactctctttcagggttacgtaatggaaaaaacaaacacgctttgaaaactgatagagagagaaagtgaaagaaagtttagagagagagagagagagtagaagaaaaacgcaggcaatctaagctttgctttcttcttcttcgtcttttgcttttggggagttgggtttttttttggttcgagtgtgaaagagtaaaattctctctttctctctttacaaagtagtttttgtttgatagggttggtttggtttggttctcattcccattctattctctttctcgctctgtatttatatatatatatcaatatttatatattctagaacaatcggagatataatcagactcattttctctctctgtttgcttctcactctctaccacctggcgactgtgttgtgagcttttgttttttgggggcagactcgaagagagagagagagag

SEQ ID NO: 205294 - DNA, 776 bp, Cannabis indica
atttctgtaaaattttgtaaaatgttattttttggtatttttacgtatagatgaaacaattatcccgggatcccttcaatattggttgggctttagattcagtttaggcccagccccctaatgcttaatcaatatttgggctttgtcgatttataaggcccaaatccactaggtagctttcaaatgttctaacacgacatcgttttactacttccgagtttccctccctaacttccctttctctttctttgttttttttttttattgcagagaaacaaaaaaaggaaacaaatggcgaaaaatcttagccgaatcttttcatcaatctcgaatctatcgactccaaaattgatttcctctttcgccagattcgatccttcgaacccggcgagtagactcatctgctcctaagctcaaaaaaagcgtcaataatgaaaagaaagacctggaaaacaacgggaagaacgaagtcgatgaagatagtgatgaagaggatgatggagatgaagttgacctgaacacggagactggtgagatcggtggccccagaggacccgaaccaacccgatatggagactgggagaaaaatggtcggtgctatgatttttgaactttaacttttcttttatttcaaaaattcctctacaataaaatgtgtgctcctatgaaaaattcatgcaattgattctcagttgccattttctttggctctatcgaagtggttttttatttttatttttatttttcttgaaaaatgggttaagatagacggtaat

SEQ ID NO: 205295 - DNA, 985 bp, Cannabis indica
atgtatgtgaagaacattctttaatttttattcttatatattgaaaaaaagaaaagaaggaagaaggaagaatagtaaaactcacgagtcggagattctcattctcttactcgtggacatgctgacccctttgactattcccttccatggttgttgttagttcgtttcccatgcatgttcttggccactgatttttctatttttcactcgtgaaagatgtgatacaacctccaaaagtgctaaaaaaagttcaaatgtcatatttgtttatcattatttgattaagaatttttatatataatatttagatatacgtatcacgaaaactaataagtaagatgaaaagaagcatcaaattcgaatatgtacttatttactcattattgtaacctattcagggccggtctttatggtgtgcaagttggattactgtaagggctcttaaaaaaataaagggtccaataaattttttttaatgcctttaaattttttttgatgaactcaactttttaaggggctaaccttattattagatacttccatcccaattttcaaagtttattttcaattctgttactgttttaaagcaaaaaaaaaaaaaaaacttgttatttattacttttttcaaacatttcatattccttttttctattaattttgtggtattggaatcaataacaagtttaataaaataattggagcttttggtgttttataaaatatataatcgtatgataatatttaaaaatattttttattaagggcttaatttaaaaattaagaacagtgcttctaatatattttagatgaccctgaacctacatacaacatataattagatgataaggttggtgtatcattaaaaatattaagaattttctccaaacgtttgtaaacttttgcttctttaacattttttctagaaaaattttctagaactatataaaatgttgcgaatattttttttttttcttaagtacgaaag

SEQ ID NO: 205296 - DNA, 900 bp, Cannabis indica
tatgtaaattatatttttcttagttacctagtttttttttttttttttttacaggtgtacaattactcagaaattatttttaaagtaattaatattggttaatttgaacagttgagaaagtgcattactaaaatgtagagttaccaaaacataataaattagctaaatattattatctattttgagtttcgatattgggtataaaactatataagctggtctaaatttaaaaatatatatgcattatttgtgtttttatacaacaagaccccaaaatatagaaaaatgtcatttttctatatattagttagagtataacattaattttgtatatatatatttatatataatagacttcacttattattatatcacaccctacatataaaattgaaattgatcactttgaaattattaatagttaataattatgttaagtgttaattatatataggtgaagtgcaacaatagctaaataaataggtgacaaagtattattgttgtaatttaatataagattttatcatttataaataatataaaaattattaactattcataacacaccacatgattcaataataaattaagtaaacttataaggagaaatttaaaaatatatatttataaaaaaagtggcgagtcagtggccctacatagttcagccactggtcaagtcgatatggtatttattgatcaccttaaaatatttaataacaatattacgcataataagacctttaatagttagggttttaaaagttatttttaagcttctgaaatttcaaaaacacttttcatcaaaaaagaaaaacgtttcaaaagcactgttgttacctaagagagtattattgtgccacatcatcccacatggaatataaatagtaaaatattgagtta

SEQ ID NO: 205297 - DNA, 546 bp, Cannabis indica
atgtccagttggatgagtctagtagtgaagacgtgcgactcgtcaaacaaacaccagaggtggctgaaaaatccgttcaaagtttgaacctccaaactttgacttgtgatcccgagctaacggcaacgaaaagggcagcgtcgcttgggggttgagtctagtggtgaagactctctactctagtattgaacaatcaattaccctttgaaatagtttactaaaaatctcctaattaaattttttttaaaggttttcaaagcagcttgctatccttgtattcgtccctactagacctacgaatttcaatatcattcagtcaaatgcgggaatcttggctatagtggctcacacaaagaatataaatatcttagcaccataggcaggttgtatatctcacgaaatattatctttaatgagagtgattttcctttcaaaatagactttctaagtacatattgtccaaaagaacaagtttttgttagtgtgccatcttggtcagcgtctttcctaatttctccagatatatgtctctcaatcaagtgacac

SEQ ID NO: 205298 - DNA, 1389 bp, Cannabis indica
ctctctctctctctctattttatattaagttattcaattttttgactaaaaaaaattcaattttcagtaatggtactagctaataccaaaaaactgtttgtattatttttgatggagtaaatagaaaattatcaacatcaaattgaaaagtaaaatttataaatgtttgaaaaatatatatattttttatgaagaaagaacttcattaatcaaaataaccaacaattacaaacagcaaagcgcctctgaagacctgtgagctcaattacatttgatcaatgaacttcatttgtttgaaaaatatatatatatatattttttttgaaaagtgtttgaaaaatatattgaaatgatagaattatataatttattattttttagaaaatatgttaaaaaaaataataatgaacaactcgaataagaatcgtcttccttttatgaaattacttaattctttctaggcatggtacatattttatgatcatgcgcataaaactataatgttcaccaatatcttattataaatgagctttgaccatatatatataactttaaaactctacattccataagtcctcaaaacgttggggacgaagatcttattctctacttctaaaccaaacagaaaatcatggatctacaaatatgcctcattaattagtttactgcagtaacaaatgtactgcaaataaagcaaaccgaaaattaacaacaaatgaataaaaaaaaaaaaaaaaaagaattttaatacatttatttatttatttttaataaaaataaaattaagaggagcatctgggtcgtcgttgcagcgagtagggcccacacaaattttttttgcttgtgttgtttcctttctctcaaaagtataaacgataaaactacccactcccatcattttgtattactaataatcccttcttctctctttctctttcccttttcttccaccctggcatcctcgtccgtactttgtccctcccttctcttctctctcctctcaattctggtttacccgttaccggttcaaccagtcacccaattaaattactcctctctatcaccccaaacccaaccccgcacacgtgtgttgtccagagaggaggagcctgcctgccttgcactgttccatccatgaccatccgcacgtgccacctctccccatactattcctcctttctgtggtgcaacacattaaaaagttgaagagagagaaaccaagaaaacacaagctacacacacagagagtgtgataaagagaaaattgatagacacagagagagagaaaacaccatttattttttcccttctctaagtctctctacctctctccctttcctttcgtgtgttttgtaattttatttatttactagtatcgaagtcttctgc

SEQ ID NO: 205299 - DNA, 1694 bp, Cannabis indica
aaaaaaaaaacaaataatcctgaaaaataaaatcttaattatgaaaaaaaaaatagaaataatataaaatttgattatttgagatggttcctaagaagaacaaccaccaaaaataatacaaacctaatctcagccgccaattaaatcttacataaaacttatttaaaaatacatgagacacgaaaatattatgttcggcaaaagtgggccccactaaatatccgctccagaattgacctgattgacttgggccaacaagatcttacgcaccgttttcccaatagcaataaatagaaaaaaaaaaagaaagggtttcagggatttaaggggtggggccatatatgagacgtggcaaacaatgaatggagaactgtagataagcacgaaactgttcgtaggggcgtgaaacacgttgactagaaccacgtctccctcaaggtgtagacagattgagcaatcagtattgattttgtggccataaatataagtgtagtctccaccgcaccagataattagttagttgccttttcgcttttgacgggtgccactgagaaaagagtgttgacgggaaatacccaaaccatatgtacccgctccttttattttttatttttattttttacactgattaaaaacaatcaataaaattatttttttaaaaaaaaaaatcaatataattatcttttaaaattaaataaaacgaaatattccaataaaacgataaacattgattttttttttttttcagatgtgataaacatgacaggattaagtccacagaaataataagtattaattttacctattttataaaactaattaaaaaatactttataattaaaataatactaaagtaattctaaaattaatatttatatattaattaatattaaaatatttttctttttctatgtattttttcataaataaaattaaatatatagtagttttttaataaaacttatatatagaagtctgacaattggacagcacacacttataccacttattgcatagagtatatgtttagtttttttatgattattttttatcttttgaaataaagattagcattcaaagaaaatcaattgttacatgattactttaaaagtccgtacaagtatcaatctgtccaaataaatttccctacagaactaataacataagtagcaaatgcatgcccaacaccagagtcgaagctaggtgtagatccagctgaaaatattacgtctcttcttaagttatctacagcttaggtctaaataattttttaagcttttatacgaatatctttctaatctaacaattttaagtgacgtttgtttggtacagtggtaaaatttattttaaaaatttgggggtcataagttgaacacttcacactttcattttttatttttattttttcaaaaaagaactaaaatattattatttagatttgaattacctagcaactatatgtaaggtaaatacataaaatgtcattctataaaattcattttaacatacttttttttttcttattttgagagaaaatacttgttattattaaacaaacaaagattcgtttacaataacagagtcaataggtggaaggatagtctccaaacaagtacaagtctcatccacccctaatgcaaacttaacaaggtcatgatccgcgttatttgtagaacgtttaacatgtgaaacag

SEQ ID NO: 205300 - DNA, 1230 bp, Cannabis indica
ttttgtaccattttaaaaaatacaaggtttattttatcatttaacaaaacagatgcaaatggtctaattaataatttttgtaaaatataaagtctaaaatagtatttaccctataaaaaaaaaaggattttttcctttctttaatttcagcaagtgataaaaaaaaaaaaaaacgaagtgttaatatcactactcgtacaaataatggaaaaaacccaaagcaaaccctttttttgtttaggtatatggttgctactataactggcaaagtaccatttatgatataatgaatttttattaatttctcaaaacaaaatatggtctagtacaaaactgaaaccttgtaatttgttactgaaagttcttcatttgatcaaaccaattaatatatataattaatagtaatattatcccagtattggtaagaggattttttttaatggtaagagaaagatggggcctgggggttgggggggcatataattggatacttatgcattagttagtaaaagaatatttaggcatatagtgatgagattcttcttcatcaactctctttttttcagtgcctttcttaatcacaattccataatccatagaatatttacttgcacgtattaaataatggttctctacattctattattgacctcactgtagtatagtgagtctccatctgttatatctactacttttattaaccctatttatacgagtagctgtgctaaaaatctcaaataaattatatttttggaggttggtttactctcatgacattgaaaagttggttaggatcatatgaatatatataatgagagactttacatactaattacactgccagctcaagatctcaaaggtttattataagctattttgaggttggcctagtcaactaaatattccatattattaaataactagagaataaagccgcgcgaagcgatcctagttttgtaaaatttattttacaaattaagtgatataatgtaaaatataatattttgataaatataaacttatatataaacataaatatgtctttatttttataaatagatatatacttacatatttttaagcagtggaaaaataatcttcttaactatacatactcaagatttttttttatactattttaattttcattattataataatattaatatactaatcacaattttaattttattattatttctttttcttgttgttattaatttttttttt

SEQ ID NO: 205301 - DNA, 602 bp, Cannabis indica
tcttatgcgaaggtcgtttttttattcttcaagtagccattgcacgtgtgcaaaatgaaacttttcttacctcttaaacatagttttagatgtatcgaaaaaaacatttgcagacgatcgacagtggtcgctgttgacaatgtttgttagctaatttctttcttctttttgaaagaatgtttgttagctatttttttttttctttttgaaagaatgtttgttagctattgaaaataaagagttacattatgtttggtaaaagataagaggaagtgggtagaaaatataggatgtgaatgatgaaaattgagagaagaaaatgtattttgatattttcctaagggaaatttcatagttttctagaacgagtatttttctatcatatcaaacaattcgtttttttcttctatattttcttttctctcattaaagtaatattttgtctattggacttttaatatgtgattaaataaagaaaaataataatttacaaaacaaaattatacttaaagtgaatggctttctaatgtaataactcaataactcaattataaattatataaaaaaaaataacaaaattaagcttttccattaataatatt

SEQ ID NO: 205302 - DNA, 1261 bp, Cannabis indica
aactttgcatttatttgtacaaactgagtgtgttgagcatcccaaatttagaatttttcacctatgtcaaaatttcataataagttcatcgtgatcatctcgtttaacatgtttcttctcattttaatttatactacaaaaaaacaactatatttagtgacaactttttagtcacaacaaaatttttttgtgactaaatgtaacttttagtcataataaaaaattacttgtgactcaaaaatagcatttagatataaattgttactaatttagttttagtcacaataattattgtgactaaaacatatttaatcacagtaaattataatttttgtgactaatacttttagccacggatcttttagtcacaatatagtaatggtaatttataatttagtcactaatttttttacttttagttcacaagatttgttgtgactaaaaataaattttttttagtggtgtcatattaggtagttgaccttaaaaccaaaaacaaaataaaataaacgtaattctccacaaactaaaataattaactaaaacataatctctaaaatactttttaaaatgcacataaaactactagtctatcactaggataatttagtcacttctcttaattaattagctacctaatgattaattagcagagaaatattgaaaagtatcagtggtgcctagcacccttctatgtgttaatattgttattggtccaattaaatatggggtctcatgtagtttaatgtaaataacttttagagaatatcgctagccaattataagacaacatatcaaaaagtgttaagtagctacaaaacaaactaattatatgcatagaagtatatacacagtcattaaaaagtttaatttttttttaacaaattataagttattataagaaaaaaggaggttagttataagcgcgatcaacgagaaaaaccgaaagttttcctatattttgacaaaaggtatagctaataagctcaaaaaagaataaaagagcagccaaaagtcatggggagtggccttcaaacatccctcatgtctcttacttggaaaatgcataaaacaggcatgcgcacaaatagtctatgatggattacaattttttctttcttctatatatttatataaattacatacatttttctataattttgttgtaggctcctaaaagactcctttggtacatgctttatctatctccacattaaagtgagcattttagtctgatttgtatattataattatctaaaat

SEQ ID NO: 205303 - DNA, 896 bp, Cannabis indica
tggtgtctctgaaattctggaaaataaaagcaggatagccactcatcttgaagcattggactttgatgtttcccttgtcgccactgaatggtttctatgccttttttctaaaagtttaccgtcagaggttagattaatattgagaacttctctttttgaaaatttaatgttgtttctgtgacttaacacttctttaatggtgcttgctttgtgattattgcagacaactctgcgagtttgggatgtccttttctatgagggggcaaaggtgctatttcatgttgccttggctatatttaaggtagcaaaagctgaacctttggatctttggttcattttattaaaagaactagtgataatatcccccaactgttgatctagaaaaataataagtcatcacgtaattgacattgtggtctctatttacagatgaaggaagatgagttgcttttaactcatcatgtaggggatgtaattaacattttacagaaaactactcatcacctctttgaccccgatgaactgttgacggtaatattaacattcttttcagttattattttatatcacaatgtcagtgttctctcgcttagcatatcgaaacaaatttgattaatggggcattacatgtatatgaatatgaaatattttctggttggctttcattgcatcaaaagtagacatctatttatgatggataacattactgattaatgaagattttctgaagcacaatgaaaattgctatcaacagaaccaaaattagttactattgttcagatgaagtatgtcatcacctctgcttaaatgatttgttcttatttggtctgtctaccccaattttgaatggtgactgaaagcttcacaatccaccaaaagtttcttttcattattga

SEQ ID NO: 205304 - DNA, 2685 bp, Cannabis indica
atgaattttcgatattatttgatcatgccccttaaaatatacggtttactaaaaattcttctaaaaatataacagttacataattatgccatttctattaaattctgaatctttactgttaaaaattagtatttttacccctgaaactttaactaatataaatattttaccttgttagaatatataaacaattaattctattattatataaaagaaaaattagttagaatcagttagagtggttggaggttgttagtgactgttaaggtctcttttcttgaattgttattgtatccagaaatagtataaataatagagctactaaatccaacccgacttattcagatcgaatctgatccaacctaacttttttcaaaagaattttaaatttatatctaagcttataattttatatctattttaattttgtattagtattatttaatacaatattatagttggtattgacttgtattaatagattgtataaagttataatatattttcaataaacttgaccccaacaccaaatataggttgggttcgggttcgactccaggtctcaggttcgggtcggggtcctgggtttgggtccgagtctaggtacaggtcccaagttcgggtctaggtctaggtctcgggtcttgagtctcgagtttaggtcggggtccatagtccgtgtttgggtttaggtccgtgtctcaggtctaggtttgggttctttgggtcctgagtcccatgtccaggtacgggtttgggtccaaatttgggtccaggtccgggtctccatgttaggtccctggtccgagttcaggttcgggtccaggttgggtcccgagtttgggtatcgagtttctcgagtccaagtctcaagtttggtcccatcaggcttaggtcccgaaccccgggcctaggttcgggtctcggtcttaggttcgggtctaggtccaggtctaggggcccgagtcgaggtcccaagttcgggttcgggtttgagtttgggtccagatcctgggttcagttcggatcccaggtctagtctggttctcaggtttgggtctgggtcctaggtctgagttcagtcctggatttgggtctcgagttcgagtttcagtcctgggttcgcatctcaagtctcgagtctaggtctaggtctgtgtctgagtttgggtccgagtctagtcctaggttcgggtctcgggtcttgggttcgggtctcaatcttgagtccaggtttgggttcgtgtttgggtctgggactaggtccgagtttaggtttggtcccgagtccaggtcctgggtccaggtcccaagttcgggtctgggttcaggtctcaggtctaggtctgggctcgggtctcgagcttggttctcgatttgggttcgggtcccaaggggtccgggttcggggtctgagtcttgaattaagtttttttttttttaaatatattcttatccagaaaaaattaagcagggcggagcatatctgatttgagatccaataagtatctgaatgttttggatcataagtgatcgatcggatcaaaactctaacccgctctaactaaattgatctttttaacatgcctaggcgcgcgataatatccctagctagaattgaatcgtctttgattggtcatgtaaaccttaatttggttcttataatgttaagacatattgtagaaactaataatatatgtatatatatagttttaatatatattttagtggaatgttagaaaagtgatggataatattttaacttaatctaaaaaaaaataaaaggtgtaaaatattacctaaaatacaatatgagtcacatttgatacacattaatttttgaaaatttacatttttaccaataatcactaatcactaatcaatatcacttatttattatttattgtgatttaaatttaaaaaaaaaatatttcatttatttatttttaacaattagcataatttattaattaaacctctttaaaaatttatttatttatttatttactgtttttaagtatgtatataataaatataagatgattttgttcctttacatacttaattataaaacatttggttaaatatattattaacttattttttatttaaatttaggatcaaatttggaatatttatcaaagatgatctatgtaaagcgatgtttggttttgttgaatgaagttcattctttgatcacattcgatgtaaattgtgatgatcttataacttatttttttcggatttatatatgaacgtttctttctattatctactatgggtttaaaaccagcctattctaaaattaatattaaaaaagaaaaaattaagtacattaatttctttattgaagaatttggttcacacttagaactaccagtgatatattcttgcttagattagaaaataattgtgttgatttatatggtcacttttttgagctaaaattagatgcaattagaaagttgcttaaatagttgaaattatatatataaaaaaatggcgaagaacattttttataataaatacaaaacttttatatttcagacaagagacttaggacatataatatgactaaattgatatgtgatgtgtgtgagaatcaattataaagaaactacaaattgaaagtttgtactttttagtgcaacttataagccccaaaattcaagtgggaactcttaa

SEQ ID NO: 205305 - DNA, 1423 bp, Cannabis indica
ccacatatgcaatgagttgctttcgattgcctgttactttatgtcgccaaatagaaagtatgatggcaagattttggtggggttcatcagcttcgggtaataccattcattggaagaattggaattttctttgtaaggccaaaattcaaggaggattgggatttcgcaatttcatccactttaaccaagctctcttggccaagcaagcttggcgtatcattgagtctcctaattctcttttaagtagcctgcttcggcatagatatttctcaaatggtaattaccttcaatctggtcttgggactaatccttccttaacctggagaagcattgtttgggggaaggaattactcttgcatggactgagatggagagtaggattgggtctgaacataaactgtaaaactgattcttggttacctgggcacactacctttaaaccttatttttttaaaggattcagactccaatttgatggttgcagacttaattactgggcaaaggcaatgggatttgctctcacttcaggctaattttgatcaacctgacatagatcggattctcaccattcctttaagcctttttcctcatgacgatgtactggtttggaatcactctttcacagggatttataatgtcaaatcgggttacaagctagctgtttcaattgctgaacaagatgaatcaacctgcagcagttcaatagaacactggtggtcaaatttttggaagctgaatctccctccgaaggttagaatctttgtttggaaactcttccatacatctcttcctgttgcagcagagctctatcgcagacacattgctaattcaccatactgctccatttgtaattcttgtgaagaaacaatcattcatgcgttgttctattgtccaagagcgaaatctgtctgggatttgtctaacttacacattaatttccaaactctggggcaaagttctggtgctgatattttaattcaactgtcatccactctttctacaccagattttgaattgtttatagtcttttgttggaatatatggcatgaaaggaatgctatctatcatggcaatgttgttcgaactccaaaggctgttgctcaatatgcaccatcgtatttagctgaatttcaggcggcccgtgctaatcgtccacaactttatgctcagtcagcgactactgtcaagacaccacgaccagcaaaagagttcactcatgcacctaaatggacagcacacctcaaggaaggctcaaacttaacaccgatgctgcaatagacaaagagagaaacattgttggtattggagcaatactcagggattctgatggctatgtaattgcagcactctcaaagcctatccaaggaaactttaaggcagaagaaatggaggctctaggtcttgcgctgagtctgaattggtt

SEQ ID NO: 205306 - DNA, 669 bp, Cannabis indica
tcgatttgcggccaggcccaatcctcaccgccggaagcgatcggagcatagccacagaaggagaaatggtcgagaaattcagtcgaagagcaatgagagctccataaaaaataatcttgggaggatgatgcagatggtatccacggtccgtaaagaggaaacggggtggtcaacactaatcaccagcgtggccggagaacaaccattttcgatgcacgacacaccaggaatcgcactgcagtttgcacttcgactaaagctgcagggatgaagcaaagggacgatgtgaaaaaaaaaaacagggactgaactcaagccaaaatctagaacacaacagtctccacaagccccggtcatagcaagaccatggaaaatcctattgggtgagcaattactatgttatggattctgtcaatctacatattaatggaatttaggattgtttggggatattttatgataaataactccctaaatttttagagaaacttttttggctaggttttagtcgtggttatgcttatgtttacgggtgtttattggagcacattttagtatttttttaagcctattcatattcgattccaattatatattgaatgttagatttttaccatccgatttcgatccagtcatccaatcgtggattggatcggttatccatttgaa

SEQ ID NO: 205307 - DNA, 1251 bp, Cannabis indica
gaagaacgagaaagaaaaaacatcaagcaataagacttaacaataaatgttgtatgaaatacatagcctagcatcctcacgttaatatgataaaattgaatcaagtaaagagaaagaacgaagaaaaaaaaagctgcatgactgaccaatatagcaatcaaacagttggtgcaagtcaccaggtctacaaagcggctgagcacatgcgagcgaaaagccaagaacatcaaccatccaaaacgatggtactctgacagataaccagtgtgattgccaacagttgattgcttatccatatttgcatcgcttgccgttgttaactgattttccatatttgcaccgcttgtaataaacagttccaggtatgctcgcttatagaacctttcagagttaagaagaaaaaaaaaatcagatatttaattatttgggcaagagtaggaagggcacattgagaaacaaaagtttacatataaacaaaatcgattgttaggaaatatgatctccacataattcaacagaagagttatatttacattttacagcatatgactgaccatacagctttcaaggaagattcatgaacatttagttagacaaagaaagactacggagaagcaaaatactcacttgcttagaacgttcaaaaacacaaaattggtctgcaactccttggcctaataagatcaaataatgtacaaacaataaatgagcaaaagcatatagagatataaactgcataaaagattataatagagaatgataccgccttaatgaagcgtaaacataaacctgtaccaagtcatacctcaagtctgttttcccaatccgcgccataaacatcagtcatgactggtccagctttatcaacaaactgaggaagctctttgaaaaaatcgacaatgctggtaagccaacaaaaacgattatacaattaaaaaacccgcaacaaacaaccaaaagtttaaacaaaacaaaaagacccacatcaacatcaacatcaacatacttaagcttcgcagctctcaaaatctgccataacgtaaccccaccatcctcagagccacgtttcacttcactttcatccttattacttagcctcttcaccgagaacaaaataaaggaaaaccagtagcgttctgcttcttcagctatgccccaaaattaaaaataaaaataaataatattaaaaaaaaaagttactacattagtcaacaatgagagagaaatctcccgccactaattttctaaacc

SEQ ID NO: 205308 - DNA, 573 bp, Cannabis indica
taattgaaatagtgaaaaatctcgcattttttattatggtacccctttgtggcatgtgactcacacccttcacgaaatatttttccatactagtcacaataaatttatactacactaagacatgaatatgaagattgctttagcgttaaatttagttaaaatgacccataattcaaaaattaaaaatattcttcttttaaaggtaaattttaacaagttttttctaattcttacacttattagtattctcttaaaatagtgaaatttcatacggacaaagtcaagaccgttatgcatgctttacttttctattagacacgttgagagaaaaagtagttttcaaactacaaaaatcttagtctacactgagaacatgtatactgatgacatatcctcggtaaagctatatattttcgcactagagggaatgttcgcgcttatgttttgggtttagttcatgtaccgagtacatgttctcggtataggtgggtatactgagaacatgtttggttatttctttacttacaaatttgcttattgaatagtgttatggtttgagttagtttatgagca

SEQ ID NO: 205309 - DNA, 704 bp, Cannabis indica
ttctcacccgaaatcgtgaaccttaaccagcccgatgttcaccttaattgcaaagtaacaaaatttagtttatattatataatgtggaaatataacctttgtaacctctctggatacaaaaccgaatccatttctattagatcctcttgtaatggatttaacaatatttaagaactatattaaaggtgatctggatcaataggataataagtaattttctatatattttctgtattattatatgtatgatatatgttttgaagcgttcttttgcccatttgtaacaaacgctataaaagtgttgttataagaatttctagaaatgatacattggaagaaattttcggtggtcttccaatatcaatgtgaatagattgattgtaatttcgttctaaaatgattgtatgattgttaaaaaatgaagtagcaacccttcaactataaaaatgttactccaatgccaaaataagatacagttacagagttttccattgataatacgtgaaaactatataccatacataagatgcacgagctctctcattgccaattaattttaagataaaactccatacatcttattaaattctaacatgatattgagtagtgcaagattggtgagaaaaaaattaataatagaaactacatactatacgtaaaatgcatgtatgaacaactcctctcattactaattaattttgaga

SEQ ID NO: 205310 - DNA, 576 bp, Cannabis indica
tgttattgggcttcagtggtgcctaacatctttaatacgtgttgctttgtaattggctagcgatattctttaaaaattattatacaacagtcatatcaacacgtaggagagtatttggtagcagtgtaccactgatacttttaagcatttatctttatagtcatatatttttttctttgatgaagaagatttatagtcatatgttggatttgacattttagagtttaactttcgtgaacggtagaaaaattaacgatatgtgcaatcaatcaatgtgaagataaagccacttttggactaaatacattataatatgtaagaccaagtcaaaaatcctctttttgactaagtatttaatcatgatattcggttaaattaaattatataaatccaatgcaatatatttttgagcatcgctattaagtaccaatagtgcctaacacgtttttcgacatgtcgcgttgcgattagttagtgatactccttaaaaactattatattaaattatatggaatccaataattagttggaccaatagaaatattgacacgtagacacataggagagtgctagaca

SEQ ID NO: 205311 - DNA, 1339 bp, Cannabis indica
gagagagagagagacctttagggttttgtgaagtttaggttaattttgtttttgttttaaactttttatatatttatattagattggtaacccaaaaactttctctggtgacatggatatcaatgtttgacacatggaatgaaggataaaatcacagagttgagtaaactcgagtcatagcggtcaacttgggagtggaccctagccttgcatctaggttgactctgggatctccaggatggaagtttggacttcaataagttaaatccaacccactatcttttagtattttttactatgaagatatggagcaacctaatccaagccccaagagttgaaattacataaacatgcaacttagaatctaacctgggcacctaaggtttcacccagtgcccaagttgacatcctcaactagggattcaatttctgggaccttcttagtacaaagtggtcaaaacctacgatacgacatcaactagacataccacaaacatatttgaggcattcgaatcaaaatcaaagcaaattgatttttgagcacctagggccccacggccagagcatccagtgtccaaggtgataatttgtcaatcaaggcaccttccaagtatctgaacggagatccaacttttgcattgaatgtgtcttcatcaaaaacaggaaaaataggtccttcaaaaggaaaaacaataattcctgggcacaaataatagggcccagcgcctaagttgacagtttgttaatttgcggcatttaaaatagagtttttcaggaatttttttgatcatcttctccgtctttagaaaatactgagattcaattatttctggggaccatacggaattttcagaggggccaaactggtaactagcgcccaagctgacattttgttaacttgggctattttcgatcaagttcagcaaaaagtgttctgggaaatttttccattatcagaaataacaaagattcaagtaaaatcggggagaaaaccacaaacttgagcccctagaaacatggcccagcacccaggttgacctagggctgggcccagcgcccaggttgacctagggctgggcccagcgcccaggttgacctagggttgggcccatcacccaagttgacctagggcttggcctaacgcccaagttgacaatcaacctaggacgttgtcttcaaatgctcaaatgccaattctaatgcaaccattgaatttggcatggtcgaaaacgtgggaggagaccccatcctccaatttaaaagtcttggaagtatcaaaaacacaatcctgggagcttagttggacgggctcagcgcccaagtcaacaaatggcctagt

SEQ ID NO: 205312 - DNA, 1055 bp, Cannabis indica
tagaaatagagtagcatgtgtgttggaagtgctgaaaataaaatcaccactaagtgtcaaacaggacttctcaatccatcaagtcaaaaaagtctccttaatagagtttgcttttcatgtattcttctttctcattttaccaaagtatctctcatttttctttgctactcttttaacaatctagttagttctcttaagctctttcttattctatcaaggtaagcttgcgaaccataaattcaataacagccaaaaagaaattctactcaaaccgtatgctactacattaactttcctgagatgatatagaattttataatcataatttttcactaattctagccactgttctaggtaatataaattgtaaattgttttattaaattatatatttataaaaataaaaattcttgttcgcaatcaacattatctttatatcttaatgtaaagttgttattatcattatatttaaaccgttgtaattactctattctacttgaagtcaccactattaatggttaaacttaagaaatttactcattacataatacaaataaagcaatgagttataaataagttcaaataatggaagaaaatatcatgttttttttttgggtaaatggcggtaaaactcccaaaacttttattttggtttcacttaatctcaaaactatacttctattctgttagcaatttaatatttctgttcattttaggtgttaagtgtcatgttggactgaacaatacgtgacacaattttattggtccacttctttttctcttttcattctttttctgtctgttcatctcatctttctcgttctatcactctctctgtctctcttagtctagatctagggtttttaaaacccttgggcagccaccccggtagttctccgaccactccaagccacctcgactcctccctctctctccctcttagtcccgatgatctcaaaaccctttggcagccaccacaggccaccttggtggttctttgacaacccccaaagaaagatgacggagtggacaatgagtgaacgagcgtcgaggga

SEQ ID NO: 205313 - DNA, 606 bp, Cannabis indica
aggacacaaatgaactttcacactccaaaagtccctatatataaatgtattttcttgaaaaccctaacacttccactctctcagcagcacatcactcatatataatctatgtttctattctttgaatcaaacacatgagatgataatgatcatcatcatcatctaccgcacatcttttcaaccaagtgaaaactttattacaggtattttccactatacacatacttataatattgtattctttatttactctgttttagctgatttttaagtgacatatcttcgttcctttttttttttggttataaacagacaaaagtaaaagaaaaatattgattttgattgttttacatacttaagttacaaacacctttatagttgttaattattaagcttttgaatacgcatgactccaacttgtttcctaaactctccttagtactagttatttaaatgttcatttttaaggtatcaaatcaaactacataaaaaagttaaaataatatggaaattatctatgtgatttattaacttgtttctttgtaaaattcttgagaaatcatacccatttatgtgttcttatatgtatgcacatatatagttgaa

SEQ ID NO: 205314 - DNA, 832 bp, Cannabis indica
ttctcttctcaatacgacataatatccaacaccaaaaataaattaagactaatctttctcaaaacaaaacaaaagtaatcgatgggaataatttaataattaattcatctttatatatagcagccctcgtggttaattaatttataaattttacctaatattgtttcatcatatcacatggtgttagagccgttaaaaagtatcatataatatatttatatatagcaagtatgtaccttattaaataaaaaatttacaatgtttttgactatatatatgattatgagctcacaacattgattcatgatagcaacctttattatttttttgcttacaaattattaaatatcatcatgaccaagatgacacaatattcttgtttagtgatttttcttgttcttagtccttattgttgtgtttttgcacaactaactccatttttctaccgagtgagttgtccaaaagctgaaagagttgttaaacaagttgtcttagaagcatttcaaaaggactcttcgatcactgctggcttgcttcgtatgcacttccatgactgctttgttcgggtaagaatttttaacctaaatatgtgctttttaattttgatatttggaaaaattattgtcaaaaagagagtttaatatagtcaattgttttatcttatcgaacagggttgtgatgcatctatactaattaactccacatcgaaaaagccctcagaaaaagatgcaggaccgaatttgacagtacgagggtatgagctcatcgatgaggccaagagaaggctcgaaatcatatgcccttcacaagtctcgtgtgcagacatcataac

SEQ ID NO: 205315 - DNA, 1761 bp, Cannabis indica
tcacacaacctttatctcctttcatcctccaagcaacgtatttcgggtattctccatcatataggagaagtcagcattagaattagtcgcccagaactcataaaaaacaactttggcaaggtttatatatgaatctagtttgacatctttttcctcaagagcaacttcaacaatattttcccgatcttccacatccttaaccttctgctcgaggtctttgattttctcaattttactttgaaggtgtgtgcggaggccattcctttcaacagtgaggtcattagccctttttgactcaacttccaagtcttcttcctgtaacttttcaatagtgggcatataagacagcttattctcaagctcctcaatttttattttgagtttaaaatttagcattccccatggcaacttcctttttttttttacctccccactcagccttattagcagcaaattgaccaattaagactttagtttgagaatagatgtatctggcctaaaattgcatcaagaatataataacaagtatcaaaaaaaattgtgcactatccacaaacagtaaataaagggaatatgagtataccttagctagctctctcaaaaaggactcgaccagtgtgtccaagggaagccccttcgaccgcttcaaaaccccattccctttagcctgaacacagtcttggtaactcccaacaaccttatttgctctcttcatctttgcaccacaaaaagagtcttctccttcaccttttgagtagctggtggagtaggaagtaggtctttcaagtccttcttctattatagttgggcagtgaacgtaggacgaggaagataagcaatcacaatctcctcactagacgtggagagagaaggtggcaaaaccaaggatttagttgaggccttattttctctcttttgtaactatgccagactcccttgcccgaatgacccacctactttcctcttcaaaacaaatgttagcttgtcagacatagctgcaagaaacaaaaaacttggttattatatgaaagaaatataaaacacaattgatatcaatggattttaccctagatggcaagagagccccttctcaaagaagaattgatgggacatcatcgtccggtgagtccttctccatttcctcaatagtagttttcccctttcttgctataggttgcatggcagaatgggaaagctcctcaacaacttccccaatttgaatagggacctcgaccgaggcctttgtcctattggctctccatttcttcttcttttttggttcagaatcgagcagcatggaagcaggaataggaacatcaacattcaacccctcatctgaaatccccccacggcaagtacattccatacttgataaaattttacctaggtagccaactaaaaaaaaatcgcgtgcttcacgaggaatttggaaaataagattgggagctatcccttaacccaacgagttagaggtgcctattcataaattttagtccaactagaatggtagatgtttggtcatttatcctctgaaagatatagcaatcctgtacgaaattcccaatcttcttgactcgcttgtcattggtgtcgaccaaccacgagcagtcgacttgagagaaatagaaataaccccgagtaattttttccctaggctggacttcaagccaataaactagtttgtgtcgtggggtgaaggttttccccgatcccagctatgtgtagggcatgtacagtgctgccaaatattaatggcctcgc

SEQ ID NO: 205316 - DNA, 2226 bp, Cannabis indica
aaagacctaattcatattataaaaatgatgaatagtatatcggtctaaatcttaagtaatcatgaactcttgttcatgttattatgttctgttataccaatttttacccacatgacgtggcatgtccacataggcaagattgatgccacgtggagtacaacctgtgaataggtgaaccaagtcatcatgcatagcttaccatttgatgaagggacagaatgcttgaacaagaatgaagatacaataaactggcaaaccaagagggtctggtcagaccacccctgaccggccaaggaaaagcatgtgccaaccagccttagacaaggggtaagccaaccaacctctgtagtaacaaccagaacaaagcttaaacgatcgatgtttctgcagccttcaccctagatggaccacgactcattctcagttgtgaagccactctaaacccacaaaaatatgggttcaactccaaatatctacctattctttaggagtaattaatgggttatttttgtataattaaatatctaaaaaagggataatatttccacattttaagggatattagtctattttaaattagatctttcgtaagctctaacctatataaagagcattaggctagacaaaaaagctaggttccaagtccttagttttgagttctaactcttgaaaccctagctctctctcacccacatgctacctacaccatacaagacaccaattttatttctcacctcacatatattcttctcactattgtaatattcaatgagagccacactagaaattacaaggtaaaatcctgtaatctatgtggtattatctctcgaatcaatacaactaaaaatggagtaggttattatcctctaatcaagggggtcgaacctctataaattagtgtgtatttatttacttaattttattgtttacacgtggtgattttgatcataaataaggcttcgctggtgcagttgaccaaatttgaggttaacattttggtactttcattgagagtgttatttatctattcgatcaatcatcatggctataacaaggagaactctggatacaacttctacttctttgggtcttccttaagaccccatgactgttgatcctaatgttcgtgttccaaccgccactggagtttccacgaacccaacagatgtagtcaatcctgccaacccgtcaggcctaacaaactcgaccaacacaactagtccagttgaccctgctaactcagttgatcccaatgaacaacctctgatgcctagagtaaatccgccatgggcacctcaaacagaaggttttatcaatgtggaatagcccccacgcaccacaactgactctgttccccattactatgtaggggaaatagggccaagaatcggcgaactagctattggcgagcattatgtggacctaggagaagacattgaattggccatgcttagaaaggtcgtaggccaagtcggccaaattgaagaaccacacgttgttggttgcgatgctttttcccaatagagacatgaattcctaaggtggatggatgaccaagaggccgtcctctaggcccattaggcgaagcttgactactgtaataggaaagctagtaacctgattatgcagtttaatgagagaactgttgggagaagacatgatctgattaaaagtcctctacaaggaaggctcattgatagatcgggtagagtctacagctaagtagacaatgggcaaacaatccagccaagttcattgggaacaaggatggatttccccttaccgaggatgaacaaatcctaccaaatagatcttatggcagaaatagccagtccttggcaccaggtggtatggggggtcggctaggtattcctgtctcagtaataacaccattaggccagcctctagccgactaacataatgatattcctctctaaaacatttgagagtaaatcgttctatggcctatctttgataaactaggccccataacaagtggaaacacccatgacatcaactcaaggagtgagaattgaagtaactttattccaccaccaaataatcacttcagacaatcggatccaccaaacccaagtaattgatgtgatcaacaccctatcaacacacaagccacaccagccaattagaagaaaccaatcgaccagacactacctagcatagagttggccagccatagctaatcacctagattagggatggccgacc

SEQ ID NO: 205317 - DNA, 871 bp, Cannabis indica
aactatatttttatatatataccttgccacaaaaagttatgtactgggaaagtaacttatcgatattttcttgttctttctttctaataagttctaacatctcttcacttatgtaatttgcatgcatctttccaactgcaccaaatatgaaaatcatcaaataattaacaaaccaaaataaataaattaattaagagctatatatatatacataaaacttacaataggtgtcaacaatatctttggtgatgtttatgtggagaatgattatagaaagtggatgaaatctccatctttgcagtgtccatttcaaggtcttgaaaccctcttctctttcgtttccaagagccacataaaccaccttattattttcttgaggactatccattttactggagaaattaacaaagaaaaagcgtttgattaattatatgtagagtcaaataaacttcaatataaaatggtacttctactaaatacgtaagtacaggtgataattataataaattcagattttttttattattattttacattaaggaattattatagtggtgttgagtttggagtaatgtgtttggcttagttaattgataaagtgatacataagacggcaagttttgattaatcatatgtagttttctatttcagtgaacagtttttttttgttagtggtggtggcaacgtttgcttctcatttcgttaggaatcgtagtgaatattcctgtgaatatcttctgtaaaaaataataatggcttatgattatccaatgtttcttcttgattttacaagtatgagtacgacgtacgatgtttttgggtcggtcggcaatctcattttcttaaaaaaaaaaaataaagtactttattt

SEQ ID NO: 205318 - DNA, 1200 bp, Cannabis indica
tatccattaggccatgggcgcttattgatggtgatttaaaatttaatataattatacaaattaccactagtaaataaataaaacataaatgcataaatatttccataaagtgaaaagattattaatcgaacttttttatttcaatattcagaagtaagtaggtgacacctcacaccggttaccggtatatataaaccaccgatctgtggtttatgtttctattaaaaaaagaaaaagcctaaatgaaaacattgatgaatatagagagtgaagaatcagtatgatgatgactgctgcatttatgagacactacatatccgttgactatttaaatatgaataagttttaacgaaacattaccctataaaattgtgggtggaggatgggaactggagaggagagctacactacagcttaccaaccttcacacaattattattcctcacaataaattttgttggacacacatggacttccagtccaaccaatattaatttatcttttatatatgtatatcattttaaaattcaatttgactataataaacgtttatttgaaaacagatgtatatatatttttcactttctcactctcaatcatttttttttaatatatatattgtttttacttattcaatactttttttgttctcaaacgaacatatagttatattacatatatatatatatatatgcatgccagtgttgcaaccatttgtacattttgttaacctttttatatatcaaatattgctcagatcatattctcatgaggattcgataataatttattatagccaataattgtagaattacatgaatcgatctatcttaactgacaataacagttaattctatcttttgaaaaactatatatattcgataaagtcactaattataatatagcataataatttttctcccgaactttgacatgtagtaaatcatgtctcttgaattttttttgtccgttaaaaattctcatgaactattagattgttaaatttatagacttttgtctaattttagtaaaaaaatttaaacatggatgaaagttcaggaggcatgatttagtcaatatcaaagtttgagtgtcataatttggtagatatcaaagtctggggagtcgattttttagttacattaaacaaatctactcaaatagtaaaaattgaaatgaaattagacaaaaatcctaaaa

SEQ ID NO: 205319 - DNA, 718 bp, Cannabis indica
acactaaggtgttgttatgaagtgaaattcaagcaaggaggctcctgggcacatccttatagaacacaaagaagacaagattcacactttagaaaggaaaattctccaagtcactcagtcaacaagaatagttagaagaattcttgtagactgggttgcaagtgttaaccctgaaatttggcgctgctaactctcaagataagtcgacaaataatcaaaagactaataagaacgcattcaaaaagcttattcactcggcgtgcatttctcaaaatcattgttgatacttgtagctccaaaacaaacctcgtaaattgtacatggatgtgtgagcattgtctatgtgtgcgggagttgggggctcgcctatgagcccatgagggaggctcgcatgcgagccgtggggtgtgtgcttgcgtaggttgggggctcgcatgcgagcccatgtggggggctcacatgcaagccattatgttgtgtgcaagtgtaacgtgcgtgcgtagcttgggggctcgcatgcaagccattgtgttgtgtgtgtaacgtgcgtgcgtttgttgtgtagatgggcgctcgcgtgtcagcccatgtgggggctcgcatgcgggccgtgctatgcttgcattagtgtgtgagttgtgtgtgcattggggggctcgtatgcgagctgtgcatgcatgtgtgtgtgttgagtgtgtgcattgggggctcacgtgcg

SEQ ID NO: 205320 - DNA, 859 bp, Cannabis indica
gtggaaaaaagtcaatatccgcgatacccagtgagggtcaatatccactaggtccttcaaatataagtttggtgatactccaagcgaacttccctatttgattcttccagattcgggagagaagcttccttttctgccatccaaatttgggaagctaaggtagtcgtggataggcttttacgtgccccttcattttggaagattcttggttcgaggatacctttcagtgatagaacaatttcaaaggacttcaagtaataaacgattaatttgaccttctttaataaatgtcacgtgtcatacctcgtagaaacgcagataacaaccatgggtaagggaaaatggtggttttaaaactaagaacattaggaatgttatattttaagaaaatactttcccttgcttacctaatggaaatcctagtacaagaaaagaggatactaaccttgcaggtacaaaagtttagacagattctgctcatgtggaacaaaatgaagatacacatgaaatggttcagatggaaccagctcagacacaataacctgacaacattgttcaggtggaagaaattgacacccaacaagagatcagggatgaaggcacacaagaggacctaacatattatcaattggcaagggatagggctaagatgactcaaaaacctaatcaaaagtacaattgtaaaatctagtgtgaagagttggcctatgcactagtaacaaacttggaaatagacaacatggaacctaagacctatgaagaagcgttaaggggaggaattccaaggaatggaataatgcaatgcatgaagagatgggatctcttaagaagaatagatcaaatggatgtcaccactacc

SEQ ID NO: 205321 - DNA, 978 bp, Cannabis indica
aaggaatttaaaagatcacaagaaagggtgcttaggcatcttatagatggtgaaatttagaagcattttgacgcgctttatttgtcattcattgttgattctagaaatgtgtgagattggaatatgagaaactcatatagcatgtggctagttattttaggagaaatgctaaagggcaccagtggtacctttctatgtgtcaatatcgttattagtcctactaagtatcgggtcctatataatttaatgtaataacttttaggaagtatcgttaactaatcgcaacgcgacatgtcgcaaaggtgttaaacaccactgatgcctaatagcaatgctcttattttaaccccatataacctactcccatagaggtgcatgaaatcggagtcattaatgttgtctattttgattccacgtctaagatcaccgtgaaagatatagatatttttattagactattaataaatgtactgaaatacttgagggagacaaggcaggcgttgaatatatatacatataactacataaattcaaaaatactaaaaaaaaaaaaactcaaataaagtaaaatttgaaatcataagaaaaataagaaagattgattaacctaattataatactaaattaaaataattttaacacaaattaccattaattaccattagtgttacctttgctgagagaggaactttgtggcaagcggagaggcggccactttacccattattttgatctgaaaggaaaacctaaaataacaaaagtagaccgtaccatgaccatatacattatattataatatttatataatatactcagagagagagagagagaatcgagtgatagaaagagacatgagcaaggagaggaggaactctcgccttccgtctgaccaaaagaagcaccaatattcgatgaccgacaaatgatgactagatattggattttatcattcgatccaacccaaccaaattgagtcat

SEQ ID NO: 205322 - DNA, 731 bp, Cannabis indica
ttttttgaagttgatattggggtcccaaggtttcgtaataacaggtcttttattgaagaaagtatatctcccattcagcacttcatttctttcctcaatactatgaaatctaatgaagaaaatttcataggataacacacctactttatcgatcttgtccttctaaattcgtcgagcaaatccatcaagaacggataaaggaggattagctgctagtacatagcatactaaggatgatttccagaatgaaacctcatcctcaatatcttcatgtgtaattttgaccttggttttactctttgatccatcaaaggagggggcctagattctttatgatactccctgttcgtaggactgggatgtttgtcgaatttcctgctgcaacttccttcaaacacctttgatttgccttaatgaaagacgaaaagtcatctcgaatctcctcctggcgcagtatctcaaacagtgaggatctcagagataatggagctttgaagacgtcctgcaattgaggatcaataacagggctcttactttccaattccgcctccacatttgagaattcaagaggttcgctcaattattcttccagtacatttagagatcccttcgatgctaaaatcgaaccttgtttcttcttccttgcagttgctttcggtctcccctgccctcttcctcgagttttggccatggcttcagctcgcagagctgcgagagagagagagagagag

SEQ ID NO: 205323 - DNA, 1459 bp, Cannabis indica
ttttaatgacatgtcgcataatgactacaaaatagatctcaaaatgctcaaaaattgaactttctaggctaaaccgtcatgacatgtacaaacattatcgagcttttgactaacgggtttttagctttagcctttcctttacctacacatgacaaacaacactggtgagtcgacagactcaataagaaaaacataaaacatataatgtataccgacttgtacctaggtgcccatacaactatttacaaggcttatcaaatggtcaagaacattcttaacagaagtataacctctgtacaacagacacttaagtacacgtccatactagtgttggtagggctaactcgtactctcaggtacaacttagtgttgtaccacatgcactacgtactcatcccgtactagtgttggtaacactgcatcctaccctttaaacattatacattgtaccaatacactccgtaccactactataatagtgttggtagtatatgactaacataacttgaatgcaatttatatacatacacacatacatatacatattttctgctaatcttacctagtttccaaattcaagcgtgtcggtcgacctgaatggaaaatcacgtgctgaacagaggctctatgccacaatcacgtcaaacgggtaaataactttctaagatatttttagggacctcaactcaaaactaaaagtttctctatcgataaatagaatgaaaaatccctaaatatagaagaaacacacacaaaaaaaatgatattacaagaaaactgcctaataaatggtaggttgtttctgtaaaaataacaagctatttttctaagttctctgccagtaaaaatagcagaccattttcttagaaatggtctgccgttttctgctgcagaaaacaaaaaagtatcaaaataacccaatttgaccccaaacttcaacacaagctccagatcacctaataataacataacaaactagttccaagcaacaaaaccccaaaatatgtagaattttaaaaactgccattgttaagccaaaactcaaacttgctcaaccactcaaaaccccattaaaaaccactcaaactagctccaagtaacttagaattaacccaaaaactaaaatatcactcaattaactcagacagaaactaattcccaatttgcatgcttaaacctagtaaaacctaaaacattcaaaggatgagagttttataaggtttacctttactaaaacaacttcaattgcttgctgaaatctctaaaaattggtgaggttgactggctttcctttggttcttgtgagctgaaagtgagagagagaaagcaagaaataattttgctttcaatttagcttcttaattgatagcttaattgataactaaaggataaactttaattttatgtatttactaaataatggtcagcttccacctggttgtgtgccctaaataaaact

SEQ ID NO: 205324 - DNA, 725 bp, Cannabis indica
tcttatatctaacattttctaaacgtgtttaggtctaaaacatttttcttcaacaaattaaatttatttcttcatcttatttttttttttacagaaaaaagaagtgaaggggatatactcaagaacaatggtataaaaaggcaagaaagaagagaacagccaacaggcaggtcccttgaagagaatgaagaagaattaggataccattgctttaatgataataacttgtatttaatatttcatgcgaattttaaaacttttgtaatagatattttaatacttaaatgtgtcaaatatatattataaatttttatatattacacttttgaaaaaactaacagtatgacaatgttaatttagtatatgaattcttatattagttaaaatcaaagcaagtgttttaattcttatattctactaattatttattcagctaacgatcattaatcatttttctattctttccaaaatttctgtaacaatggagataccaagcttctttggcacactgaagtatgcattccttaccaccattttgtacctaaaacttatactaatcctctctgctggtctgccttcgatcgaaaatgagtactcccttaatacaatcattttccactcgccaccaaaggtttctgcattagacattccacttcaattggaaagtatattcaccaagtctacaatgaaatttctatcggtgataattccggtagtacaatcaa

SEQ ID NO: 205325 - DNA, 1299 bp, Cannabis indica
aaacctttcaagctttccaaatccttccaagaatggattgatctgggagctaaccttttccaccaatcctcagcagacttagtgagggtcaaggaaaagcataaacacttagcgttatcgctcaccctaggcacttgcgttatcttattatatctggcctggtgagtctttggatctgtgtgctcatcatacaactctattgagggcattttaaagttctccgggagtggaccttctgtgatcttccagacacaaggctctgggtcttcatcttcttaatcagtaagggtcccactttactttcagaccaacttagtcaatgcggctatctattcttccaacctctttgtatcactgtccaggagatctcttccacggaccttgtcattcaagtggttcctaaggtcgttaccacatggcctcaccttctcacttttagctttttcatattttgcgtctaaacgccttttgaggtccacggtggactaactatcatcaaaatactatccttctaccccactgtcctggtttaacagatcactagagcgatctctctttccttttggttttgttattttcgtaccagctcccttatgcgttacagggcctttctaggcagaaggacgtccaagcctagaggcattggccgtcttttgcacttaagaaagcctgttgggttgattcgtatatttccaaggaggttcaggggtacgagagttcttagggtcacccacttttgccttccccttatcctgtacacgagcaaacgttctagcgttagcggggttttccttggtatttccttcgatgtactctagcgaagggtcatcatcaaaatcttggtaatctagatctctaaacttttctcgaaggcgagccatcattttttccatcttatgagtaaacttctcttgacgggctaactcttattttgtttcaagtaactcattgaacacttggaccacctcggggtcgtgatcatagtgttagttgtctttgtaatatccatccttgacgtaattatcttcgttttcttcctcttcatggttcttagaatcactatcgtcacaaacatggtcatgctagttatttaggtcctttacttgatcattcacgttagacgtacctccatatctcgcatcggtcggttgggtgttctatgaaaagagggaaattacatcctccatgaccgtctcgatgccaccttgaagggtctttttgagaactgtctttcgtgcgaacaccatggcagtagcagtgatctacgtctttcttcggctctcaataaaatcaccaaaa

SEQ ID NO: 205326 - DNA, 1107 bp, Cannabis indica
tatatatattttgtggatgggaaagatcaatatgtacttttctttttctttaactaaccttaactaactctaacagttaattatttcgggtattatgagctattctttgttcctgttttcagtggtatgctaggccaataaatagctttcctttttcattactttgagacagagaattgaagggagatagagtgtatgagaaaatggtgttagagctgtgtaatcaagttcttgtggggtcaagaacttaagggtgtactcggggttgggtgtgagaactatgactgttcttagggtgtaattctcgagtttcagatagagtgttgtatgctctgccattggtgtttgtaaattttctaattctccattaatgaaaacttgatggtgtttctctggagtatagccaaggatcatgtttgatcttgaggaccagaaccagaataaaaattagtgttctcactcttgttgtttaagtgttttgcagatttagctagctcaagaatatcttgcttttgttactatcaaattaataataatgtcgtttacaaatttaaaactttgagtacttatactattatttattctaatttatatcaatattagttttttttttttttgacaaattattatcttaataattatatatatttatataactatgtatggaacaatgtttttgttgggtcgttgtaagaatatcattgggtcccggccagccatgtatacttgtataggatgtcatctttgtttagaaattcttcatgttttggcactgtcaaataaaaaaaaaaagaaaaaaaaaaagaaaaaaaaaaggaaaaagattagatcaacttgcatgtacgaccttctttcttttcttttttcttttttgatccatgaagaatcttcacttaagattggatattcgattttcacaatttcacaaactatctaacacattaatttatattacatatacaataaacattgttttcttccaaaagttaaagaggtttttttttttttttttcaattgtacgttgatatgattttttgttaattaacgcgcgcaagaaaatcataaataataagtaagatgaacacaagtatccgtcaaatcattat

SEQ ID NO: 205327 - DNA, 542 bp, Cannabis indica
gatatctttctaaaactcacttagcgggagtatgcccccagcatggccgtgtatcgaccttcatcagtaaggcctttcactttggtagcctcgtccataaatctgtgaatataatccttaagaggttccccttgtcgctatttgacgtcgacaaggtctttcagctttgatggtacaattatcgaggatgagaattatgtatagaactttcatgagaactcaacccaagagttgaatcccttggggtgagtttaaagtgccatagttgggctgtctctgttagtgtggttagaaatatgttacagcgcataacaccggtatccttcttgaggtcgagttgcatctcaaagtatttgatgtgagccagggggtcctctcgttcggtatacatattccatattgccattttgaacttcggcaagcgcaaagcatttatgtatgacgatgatggtgatcccctcgaccgatcaagtttaaggtctgaaggctttgagctagcaattccctggatcatgtccatgagttggtccaactgtgcttgc

SEQ ID NO: 205328 - DNA, 845 bp, Cannabis indica
ttttaattttttttttactttagttatcaagtgtatatttgtagttgtttcttaaataattttattttaaaaaaataatactaaaaagtgaagtttggtggcatcgaactcaagttcgagccaacataaatcttaccttccgactgccactacgctgggcctaaattgattatattggctgttaattttagttaaatatagtagttaaataatgaggtcttaaaattttaaatgggcccctaaaaagagtggggcctaggtacgggcctagcccgcttatgcctagggccggacctgaatatatcacaattttaatcttaaatattatattatttaataaataatataaaaaacatatgctccaaatttgttacaacctgctctataaaatccggcaaaaaaaaaggcaagagggtctaaattcaggtgtatacattttatatatatatctataactatacagaagaacgaacaaaaaaaaaacaagtggtttttgtcttgttgtacaaatttattattatatcatattttcttgtcttatgatggcacaagtttattattattatatcatatttttttcttttaatattacaatattatcattaagtgatcacatatatcatgaacaattttattgctttacttttatttttcattctcttttttgtatttttattgaaaaatatagttttttaaaaaaaaaataaaaaaaataacttcctcattattttaattatttttttttatatcattttacttatttcaatatcaacaagtaaaattttgttattttacattacttttatcattttatcaatatatatctacttttatatatatatata

SEQ ID NO: 205329 - DNA, 957 bp, Cannabis indica
ccatgttgaggagcaaagggaaatttaccctgaccagatttcttattgataatgtttgtcaagtaagttcagagtttgtagcatcttggcctgatatgacctcttttattacaaaagtgacacgtaggaacaaatcgatctgtctgcttgacaccagacttttcactaactggaccttttctatcaagattagtcttaggttcatcagaagctttctcaggttgttcatccttgtgaattggagaggcagacacaaactttattttatcaccagaagaggaagctgagttatcttcaatacgcagatcatgaccttgattgtataacagtttgtatccaattgaggttctgtccccatacgacttctgattttgaagagctcgattcaaggcacctgtacccgaggggacatgggaaagagattgcttagctctcacaagctcagcagtcaatttatatatctcactatctttggaacacaactccaacgtcagcttcttgagtttatcttcaagttcacatttactatcatcaagcgctttgttcaaatcctgaagttccttcactctctttgccatatagctgcattgtgcgaacatttcctcataagctttattcttctcatcaactgttgattcagaatcagaattaccctcatctccctcagattcttcagggacagattccctgaccataaaggccatcacagactcttcatcctttgattcatcactagcctcttcttcttcattatcactctaagtaacagccaaagctttctttttctttagagtattcgcgcatttcgcctgaatgtggccaaagccagaacattcatgacattgtatccttttcccctttttttttttcagattgttgagactgcctgttgggaccagaaaagttccttcccgaagagttttctttattgtcagtattagatttcttgaagttctt

SEQ ID NO: 205330 - DNA, 1016 bp, Cannabis indica
gtaccaaatgtactatttgaattttgatttgggcactattaaaatttaccaattttttaaagatttataaaatattacatgatacttcaataatgcactctgtttcggtatttgagatagttttttagtttattttttttttatataatcatcgacgttatagttatttaagacattttacaaaattttgggagatttaaaaaaacttaacataccgaaaacaaagttctgttaaaaaattctaccatgcacaaattctacaattggttattataaataatataaataaaatgttaattacaacttcttagttaatcttcacgtttgaaattatatgttgaaatattttttttcatacctctgtttgttgtaattataatatcatccctataaatttttgaaaaaatctgaataatttaccactcatgtttaaaaactttaaatttatttttcagtactgtaaattattcgaatttttttcaaaaatttacaaaaataatgttataactataacaaatattgcaataaaaaaattaaaaaaaatattccatcatatattttcgaacacaagattagtaagagattataataggactttgatacagcacaccttcaactattattagaatattagatgcatatgggtcctttagctggcttggcctctcatgtgtcagtcctttaatcactcactaagtaattttgtggaagagttggtggtggtggtggtgtgtgtgtgaattggcaccatattgctaaagcaatcaaagcttgaacacgttgataagttgtttatcttaacgttttgttcaatcaaatacagatcaatagagtgttgtttactactcaacactcaactctaatattcacttcttaaaggaatctttttctaaaccaattaataaatatctaccacaccacattgtttttgtttatcacatgtgtcttcttcttttcctcttaacaaaattgctacaatttatttatttttcctaaaaattaaaaaaaaaaaaaaa

SEQ ID NO: 205331 - DNA, 716 bp, Cannabis indica
aaaaaaaaaaaaaaactgtagaagtgttttaaaaaattaataatataatttataaaagcttcacactttttttttattattattgtattgagaataaaataataaaatagaaaacagatcacattctaatttaaaaatcttcaccaacaacatgaaagacttactcttaaaaataatttttagactccaaaaatgctttcaatgtcataccaaactatattctgtatgtatttttatttttatccattttagtgtttgatttaagtaatcataatataatagtaagagtaatgatatgtgaatgcaaatcatacacaaaaaattgatagttttgtacgcacaccattgtataaaaattaaaaaaaaattagtaattatctcttttattcctatatttttcttcaagtggtgtgtcacactccacactccacatcatatataaagggataactaatttcactacgtaactctgtatgataagtacgtatcatgacagtttttttttcttgggcttaacttattaactgcatcttgtatcttcaaagccttatcttaataattgcaatatttttttttgacttttttgttcttaaaaaactatttgaattattgaatataacgctttacctaattttgtattcttgtaattattgtatttgtatgataaagggagtgtttttttctctatatctttgtgtcacgttaagctaacttgc

SEQ ID NO: 205332 - DNA, 720 bp, Cannabis indica
caaagcagcggtgttcctgcaaaattttccttctacttgtaaaatgcacgaactaaaaaagaaaacaaaaagaacattaagagctaataatagagagaaagaaatctatttctcttaaatactaaaagatgagaagctaccgaatgtccaagaagtaaagttctttaatggttaatacttctatattatttgttcaagttatccaaaaattaggtcctccgtagtaatcacacgcagaacgaaagaagaaataataatactacaataagactggtgaaacataggggatgcattatcttatacaagtgtaccgacgataaggaagcaacaagatttccatttaatccataataaagacccttgaaaattattctccctccaacatgagcaacctaaaaatgaattaatatgcacacatattataatcacaattatcaaagaatatgtagcacaaacaggtcgagaaatgtgttaaaatagtcaacccttcaatgtagctatagtgagtagagacaatcattgaaaaattgtaataatatatacaactacttatcttaaaccatatcaaagattaaaaaagaagctcatacatgcagcctaaaaagtgtcactaaaactactgaagagagaagctcatacagaatcatgaagctcataccatttatatctcatctcttctctctcatatatataatgtacattcaaaatcacacaaaataa

SEQ ID NO: 205333 - DNA, 707 bp, Cannabis indica
aaaatttaaagacttggaccaataagggattgccacgtggtgattaacttgacacttaacggccaagtatctacatatatttcaaaaatataacttggatataattaccgtaaaaaattaaacttatttatctacaacattgagttaaattctagtatttttgtcacaaattactcttaaaattattgtaatctaaagtaatgcgagaaactaaatttgagaatattaattgaataaatatttaatattaaacccttacaaaaaataaacaaataaataaataaaattggttattatttatataactaactagggttctttcatcacttgaaagagatcaagaaagtttaactgaagttagaaatttttttatataataatatttttgatagtgtattagaaattaaattagaaatatatatggatcttaaatttatgtcagattattaagattactctatgaattaataagatggaagacaaatctgatttcatgatgttaaaaatgatatgagattgtgggtatatggtcttccacagactaatcttctctctatgggttcttacgcaattaatgagaatggaggagaagaatggttgagattagccttgggaaccaaaccctaatgttctttatatatagcaaactaattagagttccataaatcctaattaggttaacaaattgggtattacacattacaaag

SEQ ID NO: 205334 - DNA, 1438 bp, Cannabis indica
aaaaataaattatgctttaaaaaggtttaataaatagacaaataacatcttattaaaagaattcacacgcaaaaacctaaagctatagaatttaaagtttggctataacaacacttaatcacttcactctcttataataacaccttatattaacattagctctctcttaagaaaattattcataaactcacatttcttttattttcttttgtgaaaatgagatttttctcaagccatggcaaaccaccttgccctaataattcttcttctccaattcatttttctctttcaaatgttttatatgaaaagtttagaagaatcactaagatccaaagatccaaagcatttgtgaaatataggatacaaaatgagattagaaacactaaattgaatccacctacacatattagctatggcaaagtggttgatcatgactattttcactttcaaggagccattataggtccttgtgataccccatttgaaggtggtgttttctttgtctccatcaaaatgccttataattatcctttcaagcctcccaaagttgttttccttacaaaggtataatctttcactcttaatcttttattttattttattacatgcggggatcgaatcaatcccttctagttgacctagcttggttcaaatccttcctcccaattaccgacggaggaaggaattgaaaattaggtgacacagtgtgaatacatttatttgaactaacctcgattcgttctaaccctacctcccaactcacacatacttctcaagtaccatttgagccaagctcggccctgagcatctttggaaaaccattcctgttgctagcccaagggttcataaatttttttccctattaaaattacacatttttttttactgattttaaaaaatactatatttttctaaataagagttcaactttattttttcttatagtctactaaatttcaaggccaaccctgatctgagctaatctcggttgattcttcttaatctaattataaagatgtaatttattagtgatgacttgattttgttttgttttttggtaggtttttcatccaaacataagtgaagatgggacaatacacattgattttttaggaaagacatggggagctgcatggaccattgagaaaatattgctagggttgtgttcattccttgatgatccagacccagaagaccttcttaaccctatctcctatttgtaccaaaatcatagagaaacttacaacaagatagcaagagagtggactaagaagtatgccatgccttagtttttctttttatatatatataaaaccatatataaataaataaatatatattgtcaaaagggaatttaattttgggttattatgatatgttgagttgttacttcattaataatatagtatacattaatataatcaatttacaacactct

SEQ ID NO: 205335 - DNA, 2040 bp, Cannabis indica
gttcatgagttacggtcaggtttcaaaaccgattgggctatccgagaagcagctcgttatattggccaatatgttgacactgatccgaataatttccaaggagtatggcaggattatctcagggttcgggtaaggattaatgttgctgaaccactaaaaagaaggatgaagtttcgtagtcgaaaaggtgagtcgttttaaatatgaaagggtcccaactttctgctttatatgcggtataatgggccatgctgagaagttctgtgataaaatatatgatatgccaatagagaaaattgtcaagtcatatagtattgagatgaaagcaccaaccagacgccagaattatatgacagtttccccgtggttgtgctttggtacggcagcttcaggctcgacaaagagatgccatcaggatcttcccatgtaaatgcagcagctaaaaatcaggggaagacaactgctagttatgaccccaatatcagccattcgaattcaagtgctattgaccaatcccgattttatgggatagataataatgctccaaaagatcatgttatttcagtcaatgagaacacagctggctttgcatctgaggatataattgagatttctgatttgaagaggaaaaggcttgaggcaataaaacaaactaggcctgcaattttgataaatgacactatggaaacagaggagggtaagacagtcggccctacttctgtagcaattccaaaaaatgtggacaaggtgggtcttggtttccaagcccactaatcattatgagtactataagttggaattgccgtggatatgggaacccacgggcccaacaattctttaatgacatttgtgtccaaaagaagcccaaattcttattcttatgtgaaactttgtgtactaaagatgttgttgaaaggctaaaggttcgtttggggtttgaagggtgttattctgttggtgctgttggtagaaaagggggtcttgcacttttatggagagcttcgactgaggctcattttcttaattactctcaacaccatatcagtgtcgaagtcagaatcccaggcatggtaaagtggcggctgactggtttttatggagatcccaatcggagtcttcttcatcaaacttggacgcttcttcgaactatggctactgaatcaagcctcccatggtgtatcattgaagactttaataacatcatgagcaatgaggataaaaaaggaggcgaccctaccctcaatctcttattactgggtttcaagcagcagtatcgtcttattatctcattgaccttgagatgagaggctatccttatacctgggaacgtgggacaagtagaagtgttgagattcgcttggacagagccatggtcactcagagctggctcgatatctttaatgaggtatcttttactaacttagctttttcctcttccgatcattctcctattttgcttgaacctgaaagtgtgatgggaggggctgctatggtgttatttcggtatgaaaatgctaggaatagggagcccttatgccgtgaaattgttgctgatgcttggcacttaaactagcagcagaatatcatggagaaaatagagctttgtggtaaatatttgtctgattggggccgtaaacttacagggaattttaagtctagaatctctaaaagcaaaaagcttcttgcaagacttaaagtttcagacgatgctactgatgctgagaattttgtgcaagagaagatcaactattttgagatcctagctcaacaagaactgtattggaagcaaagatcaaaacagtactggcttcacgcaggtgacaaaaacaataactatttccatgctaccgctagtgctcagaaaaggtcaaatcaaattcagcaacttaaagatgttaatggtgagtagaagaaatggggaactagtcttgaatctaccataaatgattatttctcccagctctttcaaacatcaaacacatttttacagcttattgttaataatattaaagtctctgtaagtgccaatcataatgaaga

SEQ ID NO: 205336 - DNA, 746 bp, Cannabis indica
tgtggcatcgatttttttttagaagaacgggtgacacgttttgacacattggatgacccagaaatagacttaaaatgagaatcaattttagatagaggcggagctttaccttgaaaagtacgaggcttttgatcgacttgaggtggtggcggagatgatggcaatggaactgataatggctgatatggaacaatggccaaacacggagaagagagacaagcaaatgtctcaatgattctagatgagacaggaagatcaaccagtggtggaatcaagataactggaatggaggactccagtaacacaacttccatggtggatggagacatcaacgactgaaaaatcaaaaaattctttggttactacaggggttagggtttcttggaagaatgaagaagagaatgaatgattcactgtcatgagactattaatagagaagtgaagagacaccttgacagactttgaccgtgcaaagaaaaaaatgtcatttttaaataggctttgcacgaaatgagtatgacaagcccacaataaaagattaaccccacaattcagcaaaaaaaaatgaaacacattgacattgagtaatatgtgtacataaaatgaatttgttatacctgaaattcggctatgtaccagaagctgacacatgtcctacaaaaggaataggaatcaactcagtgaatataataatgatattatatcaaatgcaattcaaataaatcgttccaattaaatacaagttt

SEQ ID NO: 205337 - DNA, 900 bp, Cannabis indica
cataaagagtgagataaaaataaaaattctaaacaatcacaatcccaacatattgcaattaaaacatcaaataaaggtggaaatgagattgtacctcctccatcgtcctttcaatttctgggtacctccccagtagtcaacttcaagcaactaaatttggtcacgattcaacaaggtgataaatagttgaatcgatttttggggttggatctttgtgacttatttctagatcaaaactcgaaggatttgggtttcgattaggctagagattagggattaaagattcggggcgttggagttcttggatttcgaattttcaccttttttgtcgttttaatttttagttttaggttttattttttattgtaatttagttaaaaaatttttttttaaattgttaatttggaaagtattaagaaataagtaaaacataataaaaagagattaaatcattggcgtacacgtgtaccgttagtcatactaacagatagggtatgaacggacaaacatgaaagtccagcttaggtactgttaccgctatttttggaggttggtgactaatctgcatcaacgtgaacttttaggagacttttgctacaaatttccctattgggttttactaatatttttagagggtaggcccaacactgtatatagactttatacttttatgttgtatttaacttcatatcgtacttcactcaaattagtctatttttttttaaaacaagccaacctgttttcttatacggagttgaatttgtactctacttttctattttttttataattaataaaataattactaaattacgaattaatgtggtacactaaattacatcgtattttgttgtatagtattaaattaaaatgtatgttatgcaatatttttatgtaaaa

SEQ ID NO: 205338 - DNA, 629 bp, Cannabis indica
caagaaaagcaaataacgaacagtcaaaaatcagggaaaagaaaacctagaattacatccagcaattttagaaaatgaaatctagcaaaatcagagaattagaagggaacaaataaaaatataaatgatttagagagaatgagaaatctgggtcttggaaagctcaccgacaaccctcgatccttcggaacccatatcgatcatgaatcgcaaaaccctaatgggagtaaaattaggtgggtagtagagagagaaatggaattgaacagtttagagagagagggagagagagagagagaagggggtttgggcgatgaagacttgcgagtccaagtatggttcacaaggagaaagccatggggtccaacattggaggataaaaaagcaaagagctggacgagaaagaagacgtgtatgtcatcccctgctctccgccctattctccttcccatacgcccttctccatttatattcttatttttttaaaaagatttacatataaactaaactaaatatttgagaaaaattacaaaatacatcaacatgaaaaaagaaaattatttttactcttgaatttttttaatttcaaaagtattttttttaaaataaatcatttttttagttgtttt

SEQ ID NO: 205339 - DNA, 1348 bp, Cannabis indica
ttatgtaataacaaactcaggtcaagaagactataacagactgaggccccttagctacagaggagcagatgtttttcttcttgctttttcccttataagtaggccaagctatgagaacatatcaaagaaagtaagcttatttaactcttgtttaattatcttaaattcttattaagaatcatattttggagaagattgtacagtcaatcctaaccattcatttatttcatgaatggttatgattgtacactggtaagagtatactgaccttttcatgttttcttatattttttgttttttgttttttgttttttttttttaattatgttggagaagtggatcccagagctgagacattatgcaccatcagtgcccattattctagtggggaccaaactaggtgatttaaatcaattcatctcttttaatttttacaagttgaacttgttacaactttgaatgattttgattattataagtttatacccctaaatactaacatatttttttttttaatatctaaatatgaaagattcagttatcaatatcatttcttttcttaaacttttctctattgagtggagttggcccttacgataggctacagcaactactaacattcttaaaaattaaggaacaaagcaaactaggcatgtgcttcccacaatactaatgtaggttctggtatccatcatttgcttttgtctttctgtctggtttttttttttttttaattattattaaatgaatgtgttttttttttatggttatggaccgacttttctttttttttttggtaaaattaagattgcactaacactccttatctcataagaaagcaggggaacataagttagtttttttagcactactttgttaagttattaaataacaataaaacaaagccatgccacaaaatctatttatttatttatttttttttgtatggataagttacatttttttttttataatttcttaaaaagttttaagaattttatagataccaaaataattattaattcaaataatttattgtactcccatatgtatatatacatatatggaacattttattactcattaatagttgttaaataaatttaattataaatactaatttaaaaatattaaataatttaattttgatccaataacgaataataaaagaaatttttaattttatgctgaatattgctacttaattaaaataaatataaaaaaaaaaaatctaatttttacactatatcaaaaatatatttatataaaaactatttaactcaatttttttttttgtccgattttctttttgttaatcttttttagttgaatggaataacctcaatgc

SEQ ID NO: 205340 - DNA, 577 bp, Cannabis indica
attaattaattaattaaacaaagctcattagattatattaaaaagtatttttattttgtctacctgtcccgccgccgctagaagacaaaagaatgaggaaacaaatgtgtcatattccataaactaatatcaattattatttaataataaaaacaatatttattattatcaataaataaatataaacaataattaattagtgtaaagctcagtagatctaaagaaatgtaggatatgctcatggtctgtgtaaatatattactataataatcattataatattatacataaaatgagcttagatttgaggtttagtttaattgtaataattaattcattaaaggggcatctagaaagtaaccctagttataatatatataaataaatgtatatatatatacatactttggtactacgcactactttgcttttggctttgcttaattagggtttgcagaacattaatttgtttttaatttttaattttttgttcaacttcaatttttatgtaaatttttagtttaattcatgacacgtacataacaaattatataactacaatataattaaattgttt

SEQ ID NO: 205341 - DNA, 1190 bp, Cannabis indica
atagatagtaaaatatgataaataaagtcatataagacaaggtaggtgtttctagggtattgactaatttgctttcaacaaagacaaaagcttacccacaaagaaaagggtaacttggcaatttctaaattctgacatttccgaagcctaactatgacaccctgctaaaatattctaaaacatacaaaatgagactctctagaggcccaacgttgctttccaccgcttccgaacacaatcacataatacaaggaatttacatatagcataataaacatatactaacttaaataaatttccacaatatgtattttataaataataattaaatctcatgcataaaccctaattatttaataatccaaagtgttaatcttaggcggtctttacattgggccatttgcaaacattttttcaaagaattctttctgggcatattctctattttcatcaacaattaagatacgagtgtttccaagaattaaacggaagcctctggtcggtaaaattaggacccaaaacctagcttgacctggtgcctgggcccagcgcctaggttgacattttgtcaacctatgccagttcaaatcattttctcaaaaaagtgttcaaggcatcttttttgttttcaaaaataaataaggtacaagtgatatcggggaaaaaacaatatcatttggtagccaaaatagggccacaatgcccaagttgacatgggtgctgggccctacgcccatgatgacgtataacctagctcacatgtttccgctcctcaaatagaaattctgttctgggtattttctcattttggtaaaaaaaaaaaaaataaaggggtaggagacctcgtttgcaatctaaaatgcattaatattaaagcgagccccaagaagtccttgaggagcacccatcgcccatgttaacatatagcttggggcactgggtcctgcttatatgattctgcttccgtctcgaacatctaactattttttttgtagtaaacaagagctacaacctgtgacaagtcaaattcataatttgatatttcaactttttgacaaagtaaaaaaattagctgcaaattgggaagtttcgagtctatccgatttcgcaaaaaaagtgacacctccaagaatcggtgaacgacttcaaaactaagaaattgactacgtaatgtcaaaatatcacttagg

SEQ ID NO: 205342 - DNA, 787 bp, Cannabis indica
gatttttgaagaggaaagaaatagaggcggacccaatggcggccttcttgttcaatgtcaaatttgaaggaaccaatgcccgtgaatattcgagcagattggtaaattggggaaggggcaccggaatttgaggtagcaactattgaagttccactttttagaacaatagaagaatggtcagaatcaggaacaaaagttcgaccttgaaaggtgacatttccagatgaaccacaagttattaagtagttatcaaggggagtgaacaaggcatatgacctacagcccatcaacaaaacaacagctagaacaacaggtagccattgaactagcttcattttcactaatatcttaaaaacccagatcctcaacaaaatctaatagaatacctatgctcccaactcaacaaccgaaataacttccagaaccaaaacccaaccactctaccaagatttcaaataacaaaagtcacattccctcaaattcaccatcacaacccaaccacccagttcttcaaaataagtaatacaaagattacccaacttcagcaaccccagatctaactcaatgccagaagaaacattaacaattgaaaacaataaaagagctcaaactttgctcaaacataacagcaccagacactctattttggttagagtaatccaaaaataaagaagacaagaacttcagttttctcagaattcttacctcatccgaaaacaataatcaaattggagagagagagagagaggagaggagagagagagagagagagagagagagagagagt

SEQ ID NO: 205343 - DNA, 1185 bp, Cannabis indica
atagtatgtcgcttcagacatccccataagattgtccagtgatcacttcaccgacttctatagtcaacacgaaattatgaagagcttctcagctgtcgccaaaccataggaacagacaagttgaagtcgtgaaaaaaatattgaagatgacattgaagaaaaagctctaagcttgtaaagcccatttgctagaggagcttccacgagtcctctaggcatagaaagaactttaacgtggcataccccatattaatgacttgtgggtatgaggcagtcatttaagtagaaatcaaggtcccatctcaccgaggagacacttatgacccaactcaatatctttctcaactctaagaatcattagatctgattgaggaactccgagaatagtaaactcaagatgtactagggcaaaattgcaagacactttaattctaaactcaaaagtcatacatttgacattggggatcttgtcttgagaagagtcttcctggcctcacaagaatcgggggttggggtcttaggatcaaactgggaaggaccctacgagattcaacacaaggtaggagagggaacatttcaacttaagagaatgaattgattagagattcctaggtcctagaatgcagatcatttacattattattaccaataggctagggtatctagtttgatgttcctctacagttgtgtgtgagatttttgtgaactttctctttttttaatgtaaacctgtgggtacaatgaaatgaaaaagaagaaatttgcagaggaattcacacatttgtttcatgcacatgctatattttaaataagtgatcatgactttagagatgtccaaacttcctagatcactcgggggtatactttatgttgacctacgtgtaaatattaaattaagtaaataaaatacacgcaacaattttatagaggttcgacacccttggttaacgtgtaatgacctactctcatttcaattgtattgatttgatagagaatgccactcagatcacaagctttgtgatctccagagtggctccctatgaattacaatagtgagaacaaaattaggtagatcatagatgagtaagatgacagatggacttcatgtattacatacaacaagaggcgtgtgagagagagagctacggttttagaacttaggttttggtttagcctagtgctcgt

SEQ ID NO: 205344 - DNA, 1293 bp, Cannabis indica
aaagcttccaaaacttaattagtatcacatggggaacttcataagtacaattgatcaggatatgaaactttgtgtataatgtgaattccaacgccatacccttttatttatagactacaacatctcaagtgtgattctctatttaacaaattctgacatttgtaatggttcattctccatccatacagcatgtaaagcatttgaagttgaacagtgtgtattacaaggttagaaaaatgtcaagtcctggtgttcttcgactttatgcaaggaaataaatgaatgctcaatataaacatagcacaaccaataatatgcaatttgcttgtagattccaaacttaaagcctgaagtaatatacaaaactcatattctctgctcttaaaatgtaccattagcagaagataaacgacaaaatcagtggtaaaaaaatggtaaagtggatagatcataatgaaaaataacattgaaaaggaagaaaaaaaaaagaagagaacgactaaccatcattcgaagaaacagcatttagtggatgcccatttgaagatttcagcttaaagtgcttcattccatgatttcttgatccaacctgacaaacccacgaggggttatgcttctttctcgggaatatgatgaatttacgaaaaagtgttgcctcattgttgagcaaagaggaaaagatgaaggccgaaggagacgacgaagtagatgaacaagaactcaattgtgtagccatgcaaatttgctgttgggcaaagagaaaaaaactaatatttcagaataatttaagttatacaatatgtatgtgcactgatcttaagaaatattatcgtatctaataacattctattaatatccagttctgaccggttcttcgtaatatattttttttttgtaacaaagttcatcgaaatacttgaaaagatgagtttacgataaaaaatctgttttgtgaggtcaagaatttttcaaatttatttgttgcagtatattatttttcacacttgtaattgcgacggcaatgaggtaaaattgttacatgagacaagtttatttttttttttttttttttttctttttttttttaaatgaacatttaaactggcaaagagcttacaatgaaaaaggtaagactatctacaatagatagtgtaaaatttggggtgatttgtgacaaaactctttttatatattaattttaagtttttagtggctaaattttctcaattattgttttatttgcactaaattacatcttatattatttttatattgtcctcttttatttttatc

SEQ ID NO: 205345 - DNA, 680 bp, Cannabis indica
tttttttttaactttttttgttgttgaaaaatagactgaaggctaacgtttcatgttaactctccttctccaaccttctttccacacgattattttggccctaaccacaatctcaccccccactcccaaacgacccaaattgactgatatatatactctttttctctgtttaattcatagatatctttttggctttatccttcaatcgtttgtgtaaattttactttgtgaatttttctttgtatataaagttttctctatcctcgatttttggcagcaaacttcctgatgcgacgacttataatattttggccataattctttcaatattgtccagaattagacgattcaagatattttggaaagctaaaagagaaataaaaaacttttattcacaacatttttccttaaaatgaatgcttcatagtcgaaaatttgcttgaagcttcagatttgattttcgatcacaaacggagcgtgttgagcattcaaaacttaaaatttttcaccacttacatcaaaactctaaattccatgataattcatcatattcatctaactcttcaatcttttcatacaacaccgagcagaacaaaatcgatctttaggtttcttcctcttgtcagttactctttgaaaatcattcactacatccactctacaacaggtaggaatttcaa

SEQ ID NO: 205346 - DNA, 566 bp, Cannabis indica
aaatatgactattgattattttattacaattaatctattgaaaaaattacttatagattaaaacaaaaattttagtattaaattaaagactatttaaaaaatttccctccaaactataacatatgcattattgtatctcttattttctcggccaattaaaaatagtactcggaccattcaaagtaacgtaaagttgtttttctgttaaaatatgtcacatgtgactatcaaaatgctgatgtctgttagtccattgccatttcaccaccacaagtataattttaataaaaataatttcaaattttaaatataatatttctttattaaaaataataaatcaaactaaaattaatattatttttttttattttgtacttttttttcatcttagacaagatctagtggtgagatcagcaagaaagggctctaggtcaaggtagatcaaagggattccagcgggatcagaaagattgtgctcagcttagggtgaagcgagatcgaggggctacattggagcttttgcaaggtcaacatccattgatgaaagcctcaattgatgatgcatc

SEQ ID NO: 205347 - DNA, 626 bp, Cannabis indica
cttctccattatcaccgccaccacaatcactactaccaaagctaccgccaaaaccaccaccacaccacctcagccactaccaccagaactgccaccacaaatcataatagccatcagaataaccaccacacaatcataatagccattgtcaccttaaatcttaaccgaaatcacaacaaccactaacgatcttaacctaaacacaagtcacaacagccaccttaacttaaaatcgagcttcgaatggctcatcgggatcctgagatgacttaattggagtcgtggagcttcggctccgccgaggtccaccacgaagagagagaagagacgaaagagaggatttgggagaggcacggagatggttcgaacccttggtcgacgatggtggctcattggagttgtaccgagaacagcgaggaagagagagggagacatgtcgagaaatagagagagtcagggtaggagtttttggtcttggggttctctgggtattggggaggtcaacaatatcgatgatggtggctcatagaagctgaggttagagccgcgtgcggttgagagagagagagagattagggtttacgaataaaaaaaagaagaaagatagaaaaaaaaaagaaaagaaa

SEQ ID NO: 205348 - DNA, 1224 bp, Cannabis indica
tacaaggactatttgtaacaagctgaatagattaaggggcataataatatagtgtcataagtacagggggtaaaaaagataattattcttataagtatgctgatagaagtgttgtgtaaaaatagactttttatgtgggaaccaatttttcaaaaaaagattatcttaaaacgttcttcaggggcagtataaattcatgaggctattttgtaaatttgacacgtttatgttagtttagcttaatttttggaggggaaaacagcccataattgctttaggtttggaaattgaaatgtatatacatgtatatataatatatatgattctaagtgttttggttatttttcctcatttatataaccttcttcacaattggaaatatgcttctgacttgttgaaattcggaagtgtagcatcagcttcctcttgctaatcaccttgtagttttttttcgttttactttttcacattgttgtctgtatactatattgcattatattttgtcttatgcccttttatgctttgggcttggcagaaagaccttggaaggtttcagatgctagattagtgcttgaagatggttcagtatggaaagctaagtcctttggtgcttcaggaacccaagtgggtgaagtggtattcaatacatctttaactgggtaagactatattcatatgaggagacaaacaaaaaggaaaattgtatcataattgctgtgtgttgttacctttggcaaatgtggtttatttcgttgttggaaagatagatacgtcactgaagacctaaaaataatttgtctctgacagaaactattttacttttacataataagcttcctttaatggatgaaatgagctagtcaccacccatatctttgattggtattattgtttactaacttcaacttagggccactaatatgtggaaatttcctggtcttttataacgactttatttatgataatgctcctgctaaatatatttttgaaaaaaaaagttcaatttttttgaagagtaaatgataactatttgttctgcagagtatattggctttaacattagttgaggttagacacttcagaagatgtaagtaaagctgttggagtcaatgaaaatacatttaagctaattgtgattgcctctgtaacactcaccacctccttaatgcaaatcttgtgaataatattgaggctagcaatgtttgtttcatcatttatctctct

SEQ ID NO: 205349 - DNA, 908 bp, Cannabis indica
aaggtataaatgttaagtttgattactcaactaatttctatttatcgttgtgtatatatgaccctttgtcagtttcctaaaatgtttgattagattttttgtgaagaaaattaaagcaagtctttccttttctataaaagaaaaatcgcgcttgctgctcacgaatatgtagttacagaacatgaaatttctgagttgattgaataattttttcagaatgtttccaagtgagctgtggtcttgtccagaccatgtatgggcaattagtaaggtgtatattaattataaatacaccttataataactaggtaatgtacctctttcacatctttgtatttcattcatatcttgtaagaaagaatgtctttgttgtatagaggagagggtgttcgtctcttcctctgtgtttatgtattttgtattgtctgagtttgtaatcaagtctacaaaagaagaataacagtgctacctttgggagaaggtttttacaagcttttgggagataacttttcaagtcttgtctcgagaggaagcaagtactctccaaggagatcgaagggagttcgaacacttaaagttttatcaagattcaggtagaaggtggaatacatcaagtttgcgacatacaattagagcgagtctatttgtacataagtcaattactttgtatttttgtgatctatctaatgaatctaagctttgggcgtgacctagtggactagtaacaatgtctgcaagaattgttgatatcacgtacaaatatattgtgtgtttttatttttctacactgtttgttttttagttttattctacaattatagagttgagttctataactacaaaataactgtttcagtttcatatttattatttcccatttaattatttgattaattaaataataaatt

SEQ ID NO: 205350 - DNA, 899 bp, Cannabis indica
aataatactaagagttctcatatggttccaagggatattacctaaatgtaatgtgttacaattaaatttaaaagtagaggaatcatcatagtatttaatttttattctttaattaaaggaagtgagagaaaaaaaaagggtgaaacgttagcacttaattaagatgataataaaaaatattgtacatataaattattaataagacttcttattattaaaattacatttcaaaaaatatacaatttattgtataatagttttacatattcttatttttaagtatacaaggtttcttctactaagactatactacacatgtactccagttagatcgaaattgcatataaatacgattattttgtttatgtaaatttctaattaggttttttaattttctttaaatttttcttaacaatttgcatgtattaattaggattttaacaaggtaaatctagaattctaatcaggctttttaattttctaattttttctatttttttacattatatattattatatttactccatgaaaacctaattgtgtcttttattttctagaatctcccattgacatgtaataacttttaattattttattatatttattccatgaaaactgtaaataataacttatcaccatgaatttacatggatattaatttttcatttttttttatttaataataacgtgataataataatataatggtttcttattattaatcactcataaaattatcattattataacaatcctaataataataataattaatatgtttctagataaatggtgaggctacatgtaatagataaatacatcactgtaagtaataaattttcaatggttatattttcataatgagttgatttattgttttggttgaaaatatttcttc

SEQ ID NO: 205351 - DNA, 1120 bp, Cannabis indica
aacaagaaatactagaaaaatcatttaatttttcttctatactttctacatgacattcaagtggatttttccatttgggcaacataaaaattaaatctttctctaaaattgagcaaatgggtagtagtgtcctcattttctgagcattgacatcaatctttgtcatatttgtcagacaaggataaaaatagaatagctctagccaagagcctcggcaggctgttacaatgatcttttttctttttcttcataaaagtagttttgtattatcttaagctcctatttcaacggccaagaatgatgccatgactgcagaatgacaatatgtgtaggatccacctaacatattatcatttgacagtatttatgtacatatatttataatataaagactatatattatataaaatataaaagataacccagttagcagcgaaaattggactgttctctcattatatatgcacttcacatggctctggcagtgaagttttcttttgttttgtttatgttcttactagtatgactcatgaactttacaagggtcttgatttttgaagctgtaataaggtaacttaaaccataaaaataaaaaaaaatactaataaaaaaggactactaccaactattgtaagtgtgtagtgagtttgaaaggtgtggaattctctgtcaaatactattttgatgctataacatgggtctttgtcattaggcaagttgtcactgaagaaaaccaacaaccaatatagctcatcccagtgtttactgatcttttcacagaatctcttaattaaatcacccccattctagaatctagatatttggaggtggtgggtttgtttcatcattattagaagaactatgaagtgagcagttattggtggtgaaaccgtgaaaacacatcatagatcatggagttcttaagtttgtggagatgggttttagttcttagtaactagtatgtagggtattgattgaatagttgtttaaaagcttaaaacttcataaaaaaaaaaaaaaaaaaaaaaaaaaaaaaaaaaaaaaaagaagaagagtaaggctttattatatattaccttgttgaaaatgcttgatggggccatgaaaatgtccttccata

SEQ ID NO: 205352 - DNA, 1075 bp, Cannabis indica
aaaaaaatacaatttaataaatttttgttaactaatctaaattattaaatttaagcatagttttttttttatgattggggatcctctacttgaaatattacaagacatggcattacaatattatcataaaaatatatttaaaagttcaaaacaattgaaatacaattcctgacaacttacaccacttgtcaaataaacggatatgtacacttactggagaagattcctaattcattgttttccaaacgtttctacatattacctgcatcacatagcacctatgagtcataaggactcagcaagaaaagtaataacaataatcatataatttattatttagatattatcatttatactcagacaatcaagatcaaatgatcacacattactcataaaattaaatccagattaccactaatatcaatcacaaataaacgtcagtataaaaatatttagtaatatagaattactgagcttataatataagtcatatccattacattataaagttctcataatcaacattcgtacaatacttgcatgcataagtccaagtcaatacagacactcatttaaaatcaacatcactataaatattacataatatgccaatatttctttaataatacaaacctgtctgttacttcataaagtaaccattttctgttgttgcctaatgaatcaatttgatgccctaacatggcatccatatatcacattgcataatcaagcaagccaataccctaacctaacattcatatatcacattgcctaatcagtcaagtcaatgccctaactcggcattcatatatcactatcattgtctaatcagacaatcgaaagtaagaaacctaacaatgattcccatttatagttagggctgagcattaagcccgttaggccgaccaacacagcacactgaaaccgaaaatggattgaatagctcgtctgaatgtgggccaaaattcaattggtgtagaaatcttggactcgtataataagggttggaaacgggtcaggccttttataccaaacccgggctgactacaatgaataataaaaaataaaaatttat

SEQ ID NO: 205353 - DNA, 825 bp, Cannabis indica
aaaaaaagtatatatcatttttccaattatatttatttttcaaatttgtttacttgttattaagggatcaaacacaataccacgaaccaaattaataaaaaggcaaatacctctacacaggttgagaggtagaccataggaggaagagtctgttccaaaagggagaagctttaatgagtgtaagtaacttttgttagattatgagatttttggccaaaaagtatattgtcaagtattattattagctacccgtaataaaattatcacgagatcataacgtttagcgaatagttaatgatttttacatcaaagacctcttttaacatttttcgtgagtctttttcattctcttgtaaaagaaattaaaagaaatcaagaaaaaaaaaaaaaaaaagccactcatccattagctatagaacaattttttaatcacttatatttttttcttaaatatagggagtgatgtatgcagtgacggacccagaatttttgattagttggggcttaattattataaaaatatttattatttactttacattaaaattataattattttgtggggactttttactattttgttgtataattatttaattaaatagaagatatttaatttttgagtaatttgcgacataaatacgtaagtttatttaatggttgcagtttaatacctaaattaaaattttggcggtaaaaatacattgggtaaatggcagcaaaacccccaatactttggttttggtttcgccaaacccccacaacccaaatttctgcgggtaaacccccagaccactattctgttatcaaaaacacacttccgtt

SEQ ID NO: 205354 - DNA, 594 bp, Cannabis indica
tgtcttttcttttctttcgtttttttttattgaaaatgtgtaacatatattgagaattcattaagctctctgttcttgaaaatttggaatgttaccgttctaaactgaactttttgtttatctagccttaatgcatctttcctacattgtgtgctctaacatttacatctcgagtaatatgattgacagcttcatcaagggtataagataaaaaagttttgatacagttgatgacatcgaaaagagtagataaacttgtatagaaagaatttaaccaataaactacttttagaatttgtctcaattttctcaatgggcatcttcacttgagaacaccactaagctaaggctttagccatagtcgaatccatggtgtcaatcattgggatagcacatccaaaaactacattactaactgagtcatgaacgagagcaattccaagattgtggtcaattcgctaaacggaaaggaatcttgctggaggcttgtcatttatgcctcattttgtaaaagttctttttttctttttgtgagttatattttgattaatattagtagaatttataatttcgctgcacacaatatggttaggt

SEQ ID NO: 205355 - DNA, 1742 bp, Cannabis indica
caatccagaggtggcggctcccaactctcccacaagattggagtcggactaggcacaagagaagtacgtaactctgcaaaataagtggaaatactaccaatacatttcataacattaggggcggtattattgtgaacaacttcattgcgcatcctccagatgttgtcaactacaatcgacgcataaaggaatacatcctcagtacggagacccctattgttaagattccacataaatttcacccagtcccaaacacggattccattatcacagacagggtaaatgccccaaggtgaagagcgccacaagcgtagcgccacatcacacgacagaaacaagtgttccatagattcctccattaatccacataaaggacatctcaaatcctcgatctgaaaccttctaccaatctcagctctaacaggaagcgcctttgacagaatacaccaccaaagaatcttgtgtctctccagaattttactattccatagcttgttccaaagcgacggagccacctcacagtgactagctctttctgtagcctgagcaaggtaagccgatttgcacgagaaacgaccattggtctccaaagtccacacccatctatcctctccccgtcccgaaggggttcctccatgaaggattgccgcaacagtttcctgatcaaacatatttcttaattggtgaacatcccatacgccagagggtgtaaggagatcagccacacagttattgtttgtcaggactccagccattggtttcataatgaaacctttataatgaggtatccaaggatccctccagatgcttgtatttctgccattcgccaccaatttacaggcgccttttctgaggattgcattggctttaaccaaatttttccaaaatcatgagtcagagtctttgtatctatagcagagaagatccttcccttttaaatatttagcctccaaaattttgcagcataaagactggcaacctgttagaatcttccaaccccacttggccagaaaggccaggttcatttctttagttttccggaaaccaaggcctcctagagacttaggaagacagagtttatcccaagctctaaggtaaagtccatgattccccttctcaaatccccaccaaaagtccctgaccagaccatcaatccggtttacaagccggtcagagagcttagtagtctgcatggcatacattgggagcgaaaggcctacagacttgatgagcgtagcgcgacccgccttggacaacgtctttgtcttccatccctgaagtttagaagtaagactatcaaggatgaaattgaaatccgcatctttttgtctagatctgaagagaggcaagcctaaatacttagtgatcccttcaggagaatcaatgcccaatgcttccttgatccctctcctcatgccattgggagtattattactaaagaatattgacgttttgagcttattgactttttgacccgaccaagaacaaaacttctccaggcaattccaaaaacctttggcttcattcacattggccctacccactaggatgagatcatcagcaaagaataggtgcgatagaaccggccctcccctactgagcctgatacccttcatctcatcatttcgtaggccctcttccaagagtcttgaaagcacttccgcagcacagatgaaaagataaagagatagaggatcgccctggcggaggccacaggagggcaaaatcctgccaacctgacc

SEQ ID NO: 205356 - DNA, 888 bp, Cannabis indica
tgtagcatggctaagttgagtgtccttttctagggaatttggccagacattagaaagataatattctctaggattctcaatgtgcaagaaatgtgcgggtcatgaaaaacatactcgagaatccattcgtttctaaaagaaggaagatagaagagtaccaattcttgaaagacaaggttttgaaagagaattgaagggtgggaaacaaaactcctatccttcgcaaggcgttctacactggttaaaacagtggctttaagtgtacaaacttactccatgtctacatgcaagatcccagtctctacttgttgagaaattgacagagcgattcggaaattttggtggaccgggggtactgagaaggaaagattcctagccttggcgggatgggatcggttatgtctccccacagctttggggggtctgggtttcagaaagcttaaagatattaacaaggctttattggccaaacttgcttggtagattgcctctaattgcgataagccatgggtcaaatgcctcaccgtaaaatacaataaaagaaattccttctggagtacaaatccgagaggaaacgattcatccttatggaagggaattttgaactcaaggggtattattcgcaagggaagtttgactatactgggaagagattattcggtggacatatggaaacaaccgtggattccttggcttgattatagtgacttcattgatcttttggactacgtccggacccaatatccttagcaaaagacagttgtggacctttctactattgatggctgataggaccatgagatagttctcgagatttttggtggtgaaattggagcacgaatttgtaatattgcctgattacccaataacaatagggatctgttagtt

SEQ ID NO: 205357 - DNA, 588 bp, Cannabis indica
cacgcttaaccgtggagttctttcgtgatgggctaccgaaaacaagatgcaccttgttgacataggtagtaccaatcaatccatttaagctctctttagctgtgtagttccatatctacacagtctcagaatcatcacacatgaccttctccaagcggtgtggaattgcacaacttactcggtgtttctccttacggatcacggaactactgactgtcacaaatattgagacacacctactattttttttttaattttatggccacatttgttatcatattaatttctttttttttctcatggtcatattattattctatttgggctataattataaatttagatttttttttacccaaaagacaataatttgtagattagctattttattagcaaaaatgttttgataaaccaacatattacaagttgagcaactgatcactacagtggattgaagttagtacagtaacattataagtagaatttgatatttagcgatatggtatccttataatagtgttgaacattgtagatggtctttaacatctttttaaaatattgaggtgaattgagttcgtatataacaaa

SEQ ID NO: 205358 - DNA, 1325 bp, Cannabis indica
aaatatactaataagaaaatgacttgtgataatgacttaatatttaatagtaaggtagttacaaaaatataacttaagtattattaccataaaaaattaaatttaaaaatttatgtacaactaatagttaaatttaaatatttatgtcataaattattaaaaatatagtaataatcttttttaagaaaatttcaatatagtgaccataattaaaagaagagtgctacggtttatcttatattacaatctattagttaattttttagcctaaaaatacatactcctagtaataatattattcttgtaattttttttttaaaaaaaaattatataatttaccataatcctaataataataagtttgaaatttttggagcatgcctgttggactaaaatatcataaactttattttcactaatataagctattctgaatttttcaaaaatttagaaattatattataatcataacaaatataactataaaaagtattgaaaaaaaatatttcgacatataattttgagcatgaaaatttattaaataattgtaatagatagttgtaactaattattattctaattaaaatttatgattttggtatagtaaaaataattaaaaaaaaagtagcttaatataaaaattatacgaagtttccttccactattttttttagttagtaaaaagacgcgtagtagtataattaattaaagtttagtactcccggtcattacataaagaatcttccggaatggaggcatcggaatatattttaattcgtaaataactactaacaataggtatactatacatatatagctacggttttcataacacaactctttaaatgttaattttcaatgagcggaaaaattgagatgctttaacttctactttttattaatctgctgaaaaaaacagtcaagaaaatttaactagtttcaatttataagaatcactcttacaaaaaaaaaaaaaaaaaaagaaaaaaaaagaaaaagagagaaactaagtttatctaggcataacttaaacggtttaactatcaaaatagcataaactcatcccttccaactattataagttgtagcaatattatactatatttctgtttggtgaaaataatgtgtaaataatattttttttttgaacaacttaaaaccaactgtaactgtttataaggaaaaaaaattccaaaaaacaaagacaatattctgtaaaaatataaattttttattgtttttagatatttgaaataattatttctttttagaggaaattatattgtataccctttttatattaacattataccaatttttgcctc

SEQ ID NO: 205359 - DNA, 2975 bp, Cannabis indica
agtggataactcaagctaaaagaaaataattagcatcagctattacactaacgctaaaagaggaaccgaggaaaaaagtgaaaaattaaaaattatcttttaccttttgcttcggtggaaaaaagatgcaaatttctttagcttaagttataaataaaggtgaaaaagtttgcgtctgttatccactgaagcaaaagaatttaatttttgtatacgagcttcgagcttcagacccaattaaaaaaccctaacttaaacataaataaaaacaaactgcacctctctctatctctatctcacagtcgcacccttcaccatcgtcttcatcctcccaccagttatctctctttgccccaaactccatgaacaacaagcactagtatttgggctatctctcgcttaggccaccatgagctgaaacacaaaggccattttgaccactcaatctccctccaggctgaatctctttcccaatctccactaaatctctattcccttcacccttttccttagaaactcgtagcccaaaccaccagcgccaccagcccgatgatccaaccacaacaatgcgcacggaagacgaattccatggacgcctaagcttatgaaaaaacttaggtaatttcaatccattttttctttttttcaatattgatttttatgtgttttttagtgttttcaatctataatttgattattaaattatttttggtgtaagtctaaggatttcaaagtttgaaaccctaaatcccaaattttagggtctgaattttttcagtcaaatatagctaaaaagaaggaggaaatagaggaaaattaggaaaaaaaatgctctgtatattgctgaatttaatgcccctttttctgcaacgattacagtagggaatgttcccttatataaacattcggaatatgctagaagctatttccctattggacaatacaataacagaaatatattccctatggcccacataataatataaagattgagagaatcattttcctaatgattggtaactgtaataacaaatctagtcagcatcttggatatcctcaaccaattgggctgcctttgggcctttcatttcagcatgccccctcaagctgtgctgtgttgaatgacacacagtaagcttgtctttgagataatgaaaggttgttataggctgggactttgtcaatatatcagctatttgttcctcggatgctatgtatctaacttcaactgatttgttcatcactttgtctcgtatgaagtgaacgtcaattttgatatgcttggttcttgagtgaaagacgggattggaagcaagttgacaagctcctgaattgtcacaccagatcacgactgtgtgactgtgctctattctaatttcagtgaaagagagattgcaaccaagtgacttcagtacatgcttgtgccaatgatctatactcagcttcggtgcttgatcgagcaacagatttttgtttccttgaactctagctgattagatttccaccaaaatagacacatatactagatgtggactttcggtcatcaatggagctagcccaattcgagtcacagaaactttcaatgatgggattgcttggtaatgatgcttcaccaatgctccctgcaataaatcttagtattcgcttgcaatcaagccaatgattttgggttggagcttggagaaattgactcaacttgttgactgaaaaggtaatattgggtctacttaaggtgaggtattgcaacgccccaataacactcctgtatttagtaatgtctttaaaaggtgggttgtcctgtagatggagtttgttactttgaatcatcggtgttggactcggtttagttgccagcatatgtgttctttggagtagatcaagttaatacttggtttgagacaagtgaagaccatcttgccccctactagtctcaaaaccaaggaaatatgtgactaatctgagggtcttgagtgagaattgttggttcagctgagatatgatatgtcgcacacgagtggagctgttactagtaagtaaaattttgtcaacgtaagcgagtacatagagtcgagcatcaccttcagcgaggaagaaaagagaggcctttctgatgaatattacgctcttaaaaagaaaagacttggtaccttgtccctcggttgcctcatatgcatgttgttgataacaagtggatttttcgtcagaaattcaactctgatggctctcatcaacgctgaaaatcgcgccttgtggccaagggttttcaacaacaacccagtgtggacttctttgatactttcagtcccgttgttaagccttccaccattcgagttatactctctcttgttgtcaccaatgattgggatgtccaacaaatggacatcaacaatgtgtttctaaatggcaccttagaaggagaagtttatgtgtctcaactggtttgctatgttgatccccaatttcccacaactgtgtgcaagctcaatcgagccatctacggcttcaaacaagccccacgggcctggttcgacacacttcgccaagctcttttgcgtctcggcttgaagaactctgtctttgagtttcctggagcaagaagattcgggtaaaatatgcacttccttgggatttgaaaatgccagcttttgagcgtgtcaccataggatgggagggataggactgatgtggtgactggtgtagagatgattgcggctgttgatgtggttgctggtgtggtgcatttgagggtgcggtggctggtgtgttagtagtatgggaggtactggatgatgagggtgacatgggttggataggtagatgtatagctaatggattggtggagtaagacttggttgtggaggtattttcatgctgagatttgttggatgcatattcgaaaataggagaatttggagtagccgtggagtcgagttgagttgttcaagccaaatttcttggctctgcagcatatattg

SEQ ID NO: 205360 - DNA, 1010 bp, Cannabis indica
atactttgacagaatagaccctcctctttttagtgatgaaggtagtaagtgaaatccttagccgaccctgaaccagtccaagacgaatgttaatacaatacttgcgcctctcatcttggggaaaacctaagggaaattgaataaaattgtaataatttggatcctcatgaaagggatcgcaggcaataatgccatctgcagttaaggtatcatgaatcaaagatagccagtgtatcattccattgcaaataataggaggttgatcccacaacaattgatagggaaaagctatgatattactccattctcccgtttcagaagaaaagattatgcgagcaaaatcagcattcctcctccatactaacatgattctgtacctgaataattcatcattcttgtttttgcaaatcaacccaccgtgtccgctataatcgaatactccagttaagtcgataggagtcttgggaatcacaatccattgtttggtaaagggatgcagatcatgaaatcctttcccctttcacgtgaaagcagaagcaagtcgtcggtaaccgaaagcaaacgaacctccggcaagaaattgaggtaataatcatcttgagaatgtatgatgttggtgttgtctgtgttcttctgatgtagagtagtctgtgattcttctgagaaatattggtagggaaggggtttcattagtttgtgagtgtgaccatgtctaaataaaagggtacatggttttgattgtttctgcttttcgtggcgaaagtagtcggaattgatgatagagaaccaggacttgcaaacggaagtagatcggattacagatcggtcatcatcgattcggatgaatatttgacagagtatatcatctgaaataagcatcatcaccgccatagcctcctccttctccttctgctctgctcttctcttctttatacccatatttttgaatacttctcttattgttcaacaaaactcagtatttcccttatttcacttttatatatatatat

SEQ ID NO: 205361 - DNA, 2579 bp, Cannabis indica
attttgcaattttattttttatattaagtgagatacaaactaaccaaatacataattatttgaataacattaccagtcaactgataactatttatttatagtaagatataatataaacactacattatagtcaatataaagccaaaattaatgggaagacatgataaagacttgagaggtagactaatgtatgtcatcacatgcaagtcttttatataattaaaatttaagtagcaaacttttttattggcgtaattaattacctaaaactttatttttctaattgattatgaaatagacttatgatgatgagctacatagttttctaataacaaagagtttcattattaattaaagctaagaagagctattgctctagactactttcactatattgaaattttctttctaatttggtgttggaacaaccatgaccccaccaaccaaacaccttttttcagtctcactattctcttatcattgtcattgcttataatttttagtttttaataaagaaaattatcaaaagaaaatgaactcgatcctagaattcgactgaaataatggtatatgcaaaagacgatttttggcatttagataagcatttataacaatttgctttgttaggttagtttagttttttgttctttacttttttcattatatatgttgggtattaattttatttttttgacacaatgttggatattaatttgatacaatgtaaatttgtgtttgtttgtggtccacaactatattcttttcagtttatatttactataattttttctttttctggtaaaataatttaaatattaattgattctcttcttcaaagagaacaatctcaattttttttaaaggtgcaaggggtccaaaagggtgtgaaaaaagaagcatattttattggtaaatgacatcttttgatttggaatcttttatagcttaacaactccctactgttcttatagatttttacatgatataaatacacttacctcactaatttaagtccggcctaaacatatagcagtttggatcattacagaaggtttttatattaaaagattattttttttattatctctttatatatataaaataataaatattttttgtacaatttatacatacataataaatatttataaaagtaaatatgcacttagcgtttaaaaaaattgataaatacacatgatctttaaaaaaattgtctattttagaatttataaagtatttttttaaaaaattgaatttataaagtattgattaatatatattttttaataaaacgtttattaattttaatttttcgtggaaggcctccaaacaacttaagttggccctaactaactatgaggagggcaatatattttgtaatttgcataattctcaattaccctatatttcattagtgcactgcataccttccaagcatttagaatatttcaatagtacttttctggttgatttataaattataattttgaaattctgtatgtacatataaattaataataattattcatttgtataatttttttaagggtataaatttaaaattttgatatccaaattaatttataaaataatgaatcgaagttattttttttaacttccataaatattgatatgatgggtggggagataaccatggacggtgggatgataacataacctattctcaggtttgttagaagttatatattcaatcataaatattatgttcttttacaaaagaaaaattataaatattattatgaaaatatgaaagaaattaattaggtggggaaagataaaacaataaatataacaactttttaaagccgcttattataataataagttaataactacagtaactaattactacgtacatattaatttttaacttgtgaagaatcacctatcttaattcattcctatccaaatctttgttttccaagctttcttcattgcaaacactgcatgatatataatacataattaatgcatatatttttaatatatcactttatatatgtatataggtgatttattggtcttcaaattaaatattcttactttagtttttgtttgtgttatttctcaggatatacaaaaaaagatctcatatgttattgttaaattttatattagactctttgtttttaaaaaataataaataagacttcgtaatagttaaaatggtaagaaatatagtcccctcagtctcaacatgttttggtaaaaaaaaaaaaaaactaacaatgttatctcttttaaaatacttaaaatttaatacatacatcaataggaattaatttaaaaaataaataaaaatacttaaaatttagagtagtaacatttttttgaattaattttttaaccttttaattcaaaaaacatgctctataaatatttttaattttttaattttttaattaaaaattaaaatttttgaaaattaaaagaaagattcattacaaatttttttacttttagtcacaacaaaacttgtgactatatgtaaaaaaattgtgtactaattataaattatcattcttatactatgactaaaaggttcgtgactaaatgta

SEQ ID NO: 205362 - DNA, 667 bp, Cannabis indica
tttaacacttgggtatttccacaacctatgaataatagtttccacgctagccccacacccaccacaagagaggtcaaccgctcccacaagcaaccaacccttacacactcgctaaacaaagttgcgaataactttaggggccagtggcaacctccatatagtacaccaccaatgctccatcacttcatttgaggagcagctactttgaatgagattgagaatttgagagactccactccacctagtacccattttttacagtgccaagccatatatcgtcctccccactcacctctctagatgcaacccttagcacaagggagacatcatctccgtggaagctcttagaaacatgttgaacattattccattcaccatcctcactttatttttcttagtttattttttaacttgtaaattttagtttactcatatttagttttttaaaattagtttaatttgctgttgtttgtccgttttagtcatgttaatgtgattattattttggtagattgtatatgagtttattttttgtttatttgtttatattgtagtatattaaatttaggttagctatgttgttaaaaaaattaggtttactgtatttgttatttttagtattgttatgatttattgtattgttcagtattgtgatgggtagtttaac

SEQ ID NO: 205363 - DNA, 876 bp, Cannabis indica
ttatggagttcattttttctatgcacaggaagtcttcctccatgtactgtggcatccaagcgtcatcacctttatcaggtattgtctttatcgattgagtattgctatcaggcaccagtgatggtgtctaccatcatgaagtgacatcatgcaaattggctagcgaaattctattataactatcacgtgggacgtaatacttaatttcactaatagcaagataacactttgggtggtactactaggcactagtagtgtcttttagcatttctcttatatcttagttttgtctctaatattcaacatcatgccaagtaatttgttttattattttcctagttatgccagagacacttaattttttttgtcgtcttcacaaacaagttcgcaaaatatctggactcgattttatagccatggttaaacatcacgaaatatgtggactcaattttatagccttagtttggttaaacatcgcactacaccatttggtggggaaacaaagtctcgtgtcagctagcactatttgtcttcttagtatggttcactggtccccccactggacagtagtttataattgatgcatatctaatacaatgaaattaaaggtgcttgttcaaacattgaaattatttgactttttttcattctattacagatttggaacacctatatcaagaggccaatgatattagttggaccaagtctcggtgcttctgttgcaattgattttgcacttcattatccagaagctgtgagtttattacttttgttgagctccttactatgccttcaataaataaaatcatcatcatgctcatgtctgaaaaatcctaagttagaaggattatgattaaaaagggaaaaaaaattgtt

SEQ ID NO: 205364 - DNA, 516 bp, Cannabis indica
tagttggggtaggagagtgtgggtatcctcagctttaacacttgttttcccactggtttggacttggttagccacaacatctttaggcttgttgggtttgttatatcctggtgggtagccatggatcttgtagcatctctcaatggtgtgtccatggatgttacaatgagtgcagaaaggtcttcctttcttggatccttgagatttctggccttgattatcacctttgctggttttgtcaccttgaaaaacgaaagcatggctggtgttgggatcatttccagcagcaagactacctttttgattttcttcttgggtaacaagatggaagacccgattaacatcaggaagaggatccattaaaaggatgctttcacgaacttgagagaaattgtcagacaaacccatcaaaaaggacatgatatattccatatgataatgttcttgaagtttcttaactcctccacaggtgcaaccattgcaggtgcaattcggtctatagttagacaattcttc

SEQ ID NO: 205365 - DNA, 643 bp, Cannabis indica
ataacacacgaatatcaatagtacatatttttatgaataaataaatatgatatgataaaaatatttttctgtcatttcgttcgtatagcgacagtgacgaacaacacgcaaaggggaaggaccaagtttcattttacgaaaaaaggtcaatcgctttctacaaaaagccattaataataataataagttgccttgaaactatacaatatgattatcgattattaacaatttaatcggttatttttttttattattattattaccataaatataaataaaaacaaaaatataaatatatataatattttcatgatatttatgctgtacgtacggaaagcaaaaaaagtgtaaagagaagagagagtactttgttaatttgttcttacctgtggccactgcaaaactcgtagagcctaccgttgccggagaagacgatgagtccaatctccacatcgcaaagcacagaaagctcatgagccttcttcataagcccacttctcctcttcgcgaacgtcacttgtcgactctgcttgttctcgattagtttcatctctacttttcctctccccatttcgatccaaccccaaaccctaaccaaaaccagtactcaaattctcgattctcgatcgatcgatcgatctaa

SEQ ID NO: 205366 - DNA, 639 bp, Cannabis indica
agaaaaaagaaaaaagagagagaagaagagaagagtacgagattatttttcggtatatttgaaattacgatattagccctgcttacacaaacgcctacacgctttaagcttatattatatatgcgttttttaatgaagaagaagaaaaaccctaaaaccttggcttgattttaccaattatttttcgtataaatagaacaaacacatacccattctctctcactacccccgcagcactagcgacccctcaaaaccctagacctttataaacccttgggttttgctgggttctcttctctctacctctcttcttctccttcgttaaaccctaactttttcatacaacacttcttgtaatgggcaagtcaagcaagcagtccgctactaaagtatgctttacacttgaatttctttcatttattcttttaaatttttatttgctttttcttttttgtttttctaacaagttttgatttttgtgtacaggttgacgcagcccctgctgtagtcccagtctcgaagtctggcaagaaaggtattttttttttttatttctgttacagtttaatcttcatatgtatgtttagacttattgatactgagttgggtttggtttgttttgagtttgatttggggttt

SEQ ID NO: 205367 - DNA, 1096 bp, Cannabis indica
atagtatcatccctgtaaattttgaaaattttcgaatagtttatagtaccgaaaacagagttctatttcagtttaccacgcacgttcaaaaaacttcaaacgtattttcggcactgtaaattattcaaaattcttaaaaaatttacagggatgatgttgtaagtataacgaacactcccatgtaaaaaaattgaaaaaaaaaatattccgacatgtatttttaagtattaagattgactaagagcttgtaatatgaagttgacggcatcactcctctatatttattgttcttttctctttctttctccttcttcttcttcttcttcttcttttttctttttattatcttagtttgatatttcttccaatatggatcatgatctaattcttcttttccataagagaagtgactttctgactttatgtgcaattttgtttcttaatttctattgttgacaaatttgtatattctcatacccaacttactagtttggcgagtacatatcactttccacataaatatatctttatacgtgtgcatgtataaacaaagtgagaatattgaccttaattttcacttgctcattaattattagagaaaattttgtgggggtaataactttgtttttgttgtattattattaggaataattatataaaatattaattttttttttttttgtaaaaatttatatttttacattaaatatatatattttttacatctttacgttattttatcaaaacataaaactgtaaattgttaaaaaattctgtacatactatatttttgcaattattcttattattattagcattgttatttgatattttatgttttgtttggtacaccatattaaatagtattgtatgatataatattatattaaattgtgtttcatatcatatatattttttatataattctgtaataatttttatttatatataaaaatattgtatatttatatgctcatacaaattaatactgtaacataatactatataaaaaataggatatatataatatacaattttataatacagtgcaccaaacagactttttaagtgttcaacttctacattgatgtagcag

SEQ ID NO: 205368 - DNA, 1186 bp, Cannabis indica
aatgagatgataatgaaataatataagctagttaggatctttgctttttcaattttgacgggtactaaattatatttcttgaatttttttagcagttaatttttttttttaaaaattattgtgattgttgaatttaaggatttttttattcaatttcattcaatttcactaatttggtgattgtccaagtattaaatcatgttctccagatttagatatgtaacaaatcataccgttcgaactttaatatgtctcttgaatttttatctatgttagacttagtaaaattggacaaaaaattttaaatttaacaatctcaataatttaaggaaaatttttaatggtcttaaaagtttaggggcatattatttgtacttgtcaaagtttggagagcaaaaaccataattagctaataataaaatgtgacatcaaagtaaattaaacgttttaggatttgcaaaatatattatcatgtgttttaaatttggcacaattttttaaagttgtcaaatttgatattttttggcacactattaaagttttttcaagagagttatattttagcaattaacctttttgtttgatttgtttgtggaaattactaaattagatagtaaccttgttgaatttctctttgaacggttaacatttgatggtgactagtcatcctagtcaccatttaatgaatggagactatccgaattactattttgccgattacaaatataaaactttaagtaattatgccataaatatctgttaaaagaacacggcaaatatcttccttcttctatgattttgttgttgaaatttgtttacgaaactaattagtcagctgatttggttgctaaaaagttggtgtataaaactatcatgtaagcaacattcttgtctgattaacttgctaaaattgttgtacacaaccaactaactagaaagaaaccttcatagtttgatttccttgttgaaactcttctgttatactactaaccaagacttatcctatgtttgtttggaagagaaaagtaaaagtaataggaaaagaaaaaagagcaagtgggtcccactaagttggaggaaaatttagtgaaaataatgtaaaattacttatttaccttacaagttatttaatgtatgcaaaaccatcttatcttcttgctgaaattctttaatattcaatgatatc

SEQ ID NO: 205369 - DNA, 668 bp, Cannabis indica
atgtctgcatattccaaattgagttgatcataggtatgtacaataagaaaaaccaaaattactaaggaataaaccaaggacacttgtgaattttttcaagaactaaccttgttgccattgtaaaattcacccccatagaggatcaattcagtatctttcaagggattaatgttcaactacacaaacagcacaagcatcaagaaatctttcaattaaggggaaaatatcaaaaacacagccacagacaaacaaggtaaggacattaccgtacagtttgatcgaggagaaggagctgggacattttcctcaacatgaacttccttcttcttagcttcctccttttgtatacttaactgtgtcaataacaaaatggtgttatatttcttccaaaatcactccattccatctctctttcatcaattgaaaattttgtatgtcaattcaattacccaaaacaaaagtactcacagcattgataaacacatgtcatgttacagcaagttctgaatgacacattaaatgataaatatgaagattttcaagtcaaagtttaaatttttataaatgcataactctcactacaataatcaaaattttcagcaaaagaaagatcaatcaaagtgtttcaataatacccattaatctaaaaacgaaatatatagtataga

SEQ ID NO: 205370 - DNA, 504 bp, Cannabis indica
gaagtttcgagtctacccaattttgcaaaataatgaaatctctgagtacttgtgagcaacttcattagaactaagaaaatgaataagcaatctcaaaatattatcaaggcatcaaaaaatacaagtctgggatgtttttttcacccaaacagcgtccaagttgacgtcagcatgtcaacctgggtgctaggcgctgaataaccttcagtaaaatggtcataactctttcattattaatctaattgatgcaattcaacttgagttttaaagctttttcaaatcgtgtatcacattcatatcgcaattctaaagatttcaagtctaaaattcgtccccaattcaagtgcaatttttttcataaattaggtgaaaccgatctaacggatgtgattcaagctctaaaaattgactttcatcaacagtcaattttagccattagatcaatgatcaatggtcaagatcagcccagggtgattttttaatatttttttgtattattttaat

SEQ ID NO: 205371 - DNA, 1489 bp, Cannabis indica
agatggacagaatataaggaagttattccaaattttgaagataccaaaataagagctagtacactacttgagcatatgaatatgaccaaagatcaaacagattatatttggtatactttgaggtaaatattccaacactaaaagcctaagaataatgtacttatatgcacaaaattatatatttttatgtaatagttaataattgttgtgattggttataaagtgaagatattaagtgaagaattaagatctgattagtaatggcttcctaatacaacgattttggtttatggaggatcaagatgaaggcttttcttgtgcattaagaaattttagaaaccatttgattgagaagagcttgctgcttttgaagaagacaagaagaaaattaagaacaaggcacatagtgcgatacttctgagttcggggatgaagtactcaaggaagtttcaaatgaagaaactgtagtaggattatgggagaaattgacttcaatatatctgaaaaggtccctagccaataaactttatcgaaaaagaaattatacacaatgaaaatggatgaaacaaagaatctcaaaaaacactttgatgagtttaacaaagatagtcaagattgaagatgaggatcaaggaatcctattggtgagttcattaccaaagagttatgagcattttgtggatactattctatatgaaaaagaatcactaagcatgacagaagttgagtcaacatcaaactcaaaagagattcaagaaaggagggaagaaaaatcaatggctatggtaaagagttgtttgttagaggcagatcagaaacaacggaaaatagaggtggttttcacaagacaagtcacaaagggaagcaatacaagggctcaaatcaaattcacaaaccaagatcaatttccaagacaggaaaacagtgttactattgcaagaaagagggccattacagggatgaatgcatagcattaaaggccaaactttagagagacaaaagtaaagaaagaggagatgcaagggtagtgacaaatgattatgagtcaactgatattttggttgtatctagccaagaatctggagactcatggatacttgacttaggattttcattccacataacacccaaaagagaactgtttgacagtttcaaaaagcttgataggggagcagtcctattaggagataataaagcacgcatggttgttggaattggaactgtaagaatcaagctccatgatgatcaagtcaaaaccattgaagatgtcaggtatgttcctgacttgaaaagaattttctttccattcaagaactaattgaaaggggtcatactataaagattgacagttcatttaaggtcatgaaaggatccctagttttcatgaaaggaaaattgagaaatctattatctaaaaggtaaaatagtcactggtgagagtggcatggttgtcaaaaagctagatatggaaagaactagactatgtcat

SEQ ID NO: 205372 - DNA, 641 bp, Cannabis indica
agattcttattaaaataaatctgaaataagaggcagtaaaaaaaaagaaataggcctatttttttagtagaattatattattttttaattaaaatcttattttattcttctgccttttttctaatgaaattcatttttgtctttattatttttttcaataaaaaaagtataaaaagaacattgaacaaaaaaaaagtctcaagagaagaaattaatggtaaaataaaataggctttaaatatactaactctattaaataaggggatatacatttcattgaggtggaacattttaattggatcagaatagagagacagagaaaatttgagacagaagatttggctccctcgatttctatattgaacatgaatttaaactttgacacatttaattaattcaagagacaaaatataagatgagctccctccaatcgagattgaatttgaagattgaagtgagatatgaaaataatttccaaaaataataggtaggtgtataattttgaaaatgtaaaaacattaaaaaatttaataatagagggattaaaaatgaaaatagaaaggcagagtgtgatataggtatacctattgttcgtatatggaaagttaggtctgaatgtccgctgaagagaatacttgaga

SEQ ID NO: 205373 - DNA, 630 bp, Cannabis indica
tcataatataaaaataataattttcgttgcttttatttctgtagcaattgttgtcaatgttaagtatattttttcattttgtttattttatcttagtttacaacatccaatcaataacttcctttaaattctaaattgttaaataattactttaatactaaattttacttgtaatctttgtaaaaacgatttctatttattacttttttacttttgtgaatgtgtacacttgcacatataattttaacaacactaatagcactagttgttgtaagcagttgcacatggtaagagtgagtgtgtgttaagagataattagggtgttttaagtagatgcactagtcctttcattaatggtaagagttaatatatagggtcaaaaataacaacgtgggaaaagtgtgcaataaataagaagtagtagatgggtcaaattgagagtgtttttattgtgaccctttgatttaatttcatttgatggggacacttcatggtgtgtaataaataaaatagtacacgtttggttgcaatttcatcacaaattaataattggacaactgtctcttaatttgatttgaacatggaaattggaaatttgatatgggagtatgttcacattgtgaagctttg

SEQ ID NO: 205374 - DNA, 701 bp, Cannabis indica
gttgactagggtaaaaattaaattcaggatatatacacacatataagaacagttaggtaccagtctgtatacaaaatactaaattttgatgtgatctagagacaagaaaggaaaaaaagagaagaaattatatatcaattaataaaataaattatgttaatttttgaataatattggttatatatattagttttttttttttttgaacaaaaagattttcattacttaaatggcatcttcgaaagaaagaccagatcaaaatactgtacaacttaagggataacacccttttaatcatagaagtttatatatagtttttgaaagccatgcaaataaagattgtgcggaatgatgatgatgagtacagaagtagtacatattatatctatttagttttgaatttttgatgattgacgatgattcaattattttcttctacttacacatttatttaattgaagtgaagaaagtgtgagtaaatatattgaccaaattaaaggaaattaaaggaaatactggaacttgattagtttccagttaagctaggtacttagctgtcgatcctattcctattataccgacttggtcaattaatgtcttaaaaaacttattagtgcaccctttttatctccttttgacttctcgaccatccatattgacacatactctatatattttagttaatccacctctctctctct

SEQ ID NO: 205375 - DNA, 522 bp, Cannabis indica
atatatttatatataaatatatagcggtgactgtatatatctaactgtgttattactgggttctaggtgtagccaacaaacctagtcatataataatacattttcaaaataataataattgcttaaacagctcacgtggccaatcttaaggtctgatctggatatgatatgtgcatatatatatatatgcataactagttttacatatattacacccgcaatccactgcacaaatttgaaatgaaaattatgaaactatgatcccttaagcaaaatctaaaatggttttcttccattaactgtttaaacttgataattaatcagcttatccttagtgttatgtagatttattatttaattatatagttcatgaatgtgattctactaaatttatctcttttattagcataattgcatctaattatttatgtataaatataaataaaagtaccaaaaaaagtcttaagtggcatcctaatttttttcattatatttttaaaattttatgagattttcataatt

SEQ ID NO: 205376 - DNA, 898 bp, Cannabis indica
agagagagaaaaacagagaaaatctttacttctgcttcagaaataatttaactatataaactttagtcgttagattttatatcctcatggagttttatattttttttatttttgtgagaaatcctggtggagtttttgtttaggaatcatggttttagtttttataatctaataagttagcacaccctccttattaaaattttaagtgtcatttggttggatgtaatgaaatggaatggaaagaaaataatttttattctattttttcggttgcattagaatattctaatctaccattatggtggaatgactattctattttgaaatgaaaggaacaacatttcataagaaaaaaattaatagttttttttataaatttttttatacattttaaattttattttattttattcctatttttattctcattcttatttctattcttgtattttcatttctttcaatcaaacatcatcttagtttttcgccattatattaggattagtctatcaaaactcagttaagcaagttttcccccacatatagtatggaagttgtcagtctaattaaaccttttttagggtttttaatttcctttccattaattaaaattaagctcttcatctgaatttgtccttgtgcattttggccttgtaatggactttgtagcatagaatattgtttaagttacatatatatggataggaataaatattagtgaccatgtcaccatatgattgaaatgataacttgcggcttgtataaaatttggccaaaaagaaatccacaaagtaagcaaatgttttattattatatcttaattattatagtacattattatttttaatgtatatgaaaatttatactaaattaatacatatatatgtgtcatcgagct

SEQ ID NO: 205377 - DNA, 686 bp, Cannabis indica
aaggagtagaaaaactcaccttaaaacgaagaacttcaatgatcatatgatgaactaattcatcttcaatttcatcattcaaataaaatattgtcttcttcttttccttcttattattcttactgtacataaatagtccaacaaactccattgaattttcaaaaaaattgtagaaaagtatcaaaaccgtgtattaccaaagaattcttctaatgattttcaacatttaagcatttaaatatagttataacctcatcaagaattaattaccatttgatgattactttaattagaagcaaagatgatcaaccgtaagtaatccctaaacaagatgaaaagatttaagtaccaatacttccataacaatccaagagagattagaaaacaatcttaaactgatatttttaccatctctcctatcacatcgttcaaattaaaacacctatttctgatgtttttcttgtattctatgaatgctcacctcgaaataaaattgttggagatttgagtactaatatttcctaaacaaaccaacatatatttgaaaatagtaaaatcttgagttgagctttttgtgatctctcccatcaaatcgttcaaatttaaaacattattttttttttatgtttttctttggtattctatgaaagctcacctcgaaataaagaacttcaatgatcatatga

SEQ ID NO: 205378 - DNA, 1100 bp, Cannabis indica
gagagagagagagagatcaggtacagagaaaagcgaaagattgagtttgggttcagtatgaaaaatattatgtagatgaagaagattcttaagtaagagtgtgagataaatacttttgagagaatttaacagagaatcgatctcaactatattgtaccatgttcttacttaatcaataaatgaggatttggtggtattacaaaactggagtagagccatagatcacatcgatctataagactcgaaccagtatgtatattggtgttgattttattgctttattatttctagttttaatactttattcatcattgttttaatctccgattattgtgtgtgatttgttaatcttgtcattttttaattgcttttgactaagttttagttcatttgattctgtactttagttgtaattttcttacagagtctttgatgtcaagttgttgaactcttgggtgactgtaaattgagttcttgtgcaatacaattcgatcatttaccaaaacaaaccttacatatatgtatatcatttccaaatccataaatggacagttgtatattgataaagtacaatttttcacgatagttttatgaacatgttatacaaaaataatatataactaatgtgtgaaactgtgaataacttttaaatttttttggccaggcgttcttttggagatttatttgtatatatttgcgcttattgatttaaagaattcgtctcttttcttcaaaagaatacataataaaaaaataaagaaattaaattttagaaaaaataaaactaaaatattgtatagttatttaaaatcttttaaagctattaaatatattcaagaaacacactactacaaaaaggacttttagctacagattttttcattcattaaaaaaaatgttgtcataattaaaaagaaaaataaatattctagaacccctttagctacggttatttggaaataattgcttctataggggttgcgaacttctagatgggcttcagcccataaaaaaaccctaacaaatccctataaaatcctaacaaaactccaactgcctcacgcataaagaaatcctaaaaaccctaaagaaacacccaa

SEQ ID NO: 205379 - DNA, 1771 bp, Cannabis indica
gcaggaacccgaacctgcctccagcagctttgagtaaagtggcagcaaacaaggacgtgtagagatgtttccggggcagccgaacacataggacagtcagaatttatagggacatgtttagtagtaagttgaaatcgagtaggaagactatttgtacacacccgccataaaaaatctttgacttttggaggtagtttaagctgccataactttgtccatgcaccagaaaaattcggctgctccatgctggttttttgctgctgcagaattgcatatgcacttctcacagtaaacagctccgatgactcctttctccaaaaccaaccatcactttcaacatcagttgacaaaggtatcttccacactagttcttggtcccttgtcgtgagcacatcacttaaaacatcctcatcccattcacgcacatcgactttcattagggagttcaccattctatccacaaggcacatttgttgagactcaacaaaaggattaacatcatccattagccacgggtctttgaggatgctaacatttgagctattacccactaatcttctagctccatcctgaaccaacccttgagcctccaagacacttctccaaatataacttggattatttcctaatgttgctgtaaggaaattaccattggcaaaataccttactttgaagatttccccaaccaagctatgctcacaagtaagaaacctccatccttgcttagcaagtaaagcaatattaaaaatataaaaattattgattatattaatcatagaaagagagttaatgaaaaaaaaatatttattgtgatgtaaaatttgacttattttatattttattttaaatttagtacaacttttaaggtgtgcttaagttaaaccactttatacatcactattgaaattcaattttataattataaactaaaaaatacatgtacaccacatttatagtactctattggtaatgcttttacattacattgtatccatctatctctatacattatcaatcaactttaagttttttttttttgtatacctctaaaattgtggcctaaatcagcactatacaaggtcaagatcaatgtagatggagtacttttttcaatggcaaattgatatgggattagatgtgtggctcatgatcaagatgggaaattgactaatgctatttctattagcagagatgggtgtattcaacctgaaattgcataaggctttggtgtttaagaggcgttgagctggataacacaaaaaggttggatgaatgtggtggtagagtcgaactcactggttgttgttcaggcagtgaacagttctgtcgacatgtcttatagctttagaatattggtgcaggattgtcgttcattgctctcacctttaagtaatattttattcttttttgttaaacgatctgcaaatagaaccgctcaatgtgttgctcgatagtcttattttatgtcagtgtttggtgagcttaatgctcctcttgatttaagtagaaattacacaatatatgggaaaattataagagtttacttttttatggcataaataaataataccatggggttatggatttttttttacatattccatatttttttgtaaaaaaaagatagaaatcccatatatgtaaaacaataataagtttttccaaaaatgtcactggcattgaaaaagtcatcactgttggaaaagtcgttagacaagttagtgtcaccgggaaagtcacagtcgctggaaaagtcactgtcgccggaaaa

SEQ ID NO: 205380 - DNA, 1774 bp, Cannabis indica
acttttggtcaatattgttttaagaaaactttaaaaactatttttgctctcatttttctaaaacatttttttgaaaacaaaaacagaaaacaataccaaacatgctcgtagtactttttatttttcatttttttaatttgttttctttgacttaaactggctggatgtaactcagttgctcactttttttttattttctttcagtttttttgattaggtaacataaatttctccctacaacaaataaattaagaatttctcacaataagaaacttagagaattgctaccgtcaacctcctattacaacctctttgtcaactttcacgtctaaaaatatatgtcgaaatactttttttcaatttgttttttacaacggtgtttgttatgcttacaacataatccctgtaaatttttaaaaaaattggaatagtacagtgctgaaaatacgtttgaagttttttgaacatactcgtggtaaaaggaaatattaggaactctgttttcgatacatgtaaactattcagaatttttcaaaaatatacggggatgatactgtaactttaatgaataccgctatgaaaaaaaaattgaaagaaaaatatttcggtatttaatttcgaaagattgactaagaggttgtaattatcacctgcaatttgttagagtccatcaatgtacttatatttgttttagcatttatgagaatttgttagtccaaaatatctcacctgcaatttcagcgtgataaattttttgaattttttaaaatttgataaagtatcttaaatgaggactataaaaaataaaataatttaaaaaattctaattataaaaataataaaaattagaaaacaaaaagataaatttcatcatcaatgacgtgtccaaacatttattcgaaataaaaaaaaaatgatgtgtggcaatattgaaaacgcgaaaaataaaccgcgttgcttaataatggcggtttaatctgttcttggcttacgccccaagtcaattacccaattctcatcttttttttctcatttattataataaaccattaaacattactacttcttcacaatatttctcatatttttcaaccgaaatctttctcacaaattcttcttttaaattaaaaaaagaaaaagcttcaaaattaatcaatgggcggaggaggaggaacagaagcattccctgatttgggaagacattgccaaaactccgattgcaaccaattagattttcttcctttcaactgcgacaattgtaacaaggttagcattaatttcaaccccaaaagttcatcattctcaattatttgattatatattaattaattactctgatcgaacaggtattttgtttagagcatcgttctcacaaatctcacaactgtcccaaacctgatcacaacagcagaaaggtcatcgtttgcgaaacctgttctacggccatagaaaccaccggccaagacgagaagcttttgatggagaagcacatgagttccggtaactgcgatccccgaaacaagaaaaaacccacttgccctgtcaagcgatgcaaggagattttgactttttcgaacaccagtacttgcaaaacttgtcagattaaggtctgtctaaagcaccgatttccggccgatcatctctgccgtgaccgtcagcccccggcggcggtgaaggctagcaatggtggtcgcagatggaatgagaagtttttgatagctttgggttcaagaaatggaaaagattgtggcaagaatgggtctggtagctctgg

SEQ ID NO: 205381 - DNA, 509 bp, Cannabis indica
aaaaaaaatgtaaaataaaaattactattcaattataatttctataaatagtaaaatatatatgtatttttgcatcaactctgtaatcatgtgttgttcataaaaactttgtaatcatgtgataaagaaaaaaaaaatcaaatcatgtacattaaagtttacaaaaatcatgtcaaatatatcactgattttttatgtgttatatttagcataatacttgcatctcctctcccaatggagatagaagtctaataagctacgcacactcagactcaataacattgcttctattttttcacttattaaatttgaatttgtaagagtttaaattatggaagaaaaaaaatttaatttctcaaaaatatatgctatttaacattcatctattatttccattaattgtatttatcaaatcgaaatgtaaatagtggtacgtagaaaataagagtatcaactaatgaaaaaggcccatttaacacctcagtccagtccagcccaattcagtcacc

SEQ ID NO: 205382 - DNA, 1305 bp, Cannabis indica
tgtaattatattccacataatgaaacagctgatacttaattcagtataaataaacatataactaaatttgactaaaatgtttattaatgaaagctatatgaccctgaatttttgagagcatgataaaataaataaataaataaatgattagtttcagttattttgatcaatttaaaataccaaaaacagatttagtgatacgtgtctctctaaataaagaatagaatagatagacacaaacgtcgtcgtctcgtctcttgaagacatttaaatttatttggctattgattttgataaatataataatttatatatcataagcattattaattagttttgtagaaaaaatgaagttgaattattgaaattcgaaataatcgtagctgtcgttcttttaataattaatatcttttgaaccaaaatcgcattgacagatttcaacactttctttgtctccaaaattattagcctttttctttaaaaaataaacaaataaataaaataaaattattcatgctaattatgatttcttattaaaattttttaaataatttttacacccaaaatcttgaaatatatatttttaattttttatagtaatatttattatatgtaatttttttaaaaaaatttcaataatttacacaaatactatagcatgcactccattacatattaatattattcaaaaacatcttttctttctcttgaataaataaataataataattaaaaaatgttaaatttattggcttaacatttaaagacacgtgtcattgtttgtacacgtcataagactaattcttatcaccatgataaattgtttttaattttgataaaatggaactttcaaaccggtattttaggtattaattctatgagaacataattgagaagattgtagagctttcaggtccttcgatcgttcaggatcaaaagtgtaatagtttgactaagtgtgttattaattagtataagtcattttttcaaaagaaaaatgtttagttgaatcactattaattaagtttagaaggtaattaacaaatcattccttttcaaaacactaccaaatctcctgaacggaaaatattgatagttggtaattactatggtccgcaaactaaaagaaaattaaaaaattccttacaaaaataaaaagttgaaaatgttttattaggaatgataatttttatattccggtatgagatttttatattttatttataggaatattatttactctaaaaataagattggaaaattctataatgcaatatatctttatgttttagtatctaaaataat

SEQ ID NO: 205383 - DNA, 1097 bp, Cannabis indica
caaattatcttttttgggacccaatgatgggcctttgatgctgacctaaattctacgtgtctcttgctagaaacacggataacaaaaggaatcctaccagccaccttgtcacgcactagtatccttaactttctaggtattactccaatgatcctagaaggtagtatcaatccttttcgccatcacttccatcaaaattaagaccttgtcgtggaaagattcattccgaaataagtcaaagcttataccacaccattgaagcaaacaatctaaattcagcaatcacatttccatcagcctgagcaaggaaaggaggatcccagagccaattaattagctatctaccagaagatacatcactatcttcgatccgtaaacaccatttactacggaaccaaataatcttataaaaattggaaatctagtgaagagatgaactaagagtccctttcatgttctccacacagactacacaccccaagaaggttgccaaaaatctgttgcaatctctcacccattgggaggatctccatataaatcttccatagaaaaagtttaaggtggctatgcatattgttgttccacactttaataatacttcctttcaatcttagaaacctttgttcgttaagcttccagtatgccacttttagagaaaacctccctgccccctcatgcttccaaatgatggtatcctctctaaaaaaagtgtttagattcatagaaataatacctgaggctatctcaggattgaacagacgatgaatctctaattccttctaattgcacatctcattattgatcaaattcttaatgcttaaacaaggtgtttgcactgcattaaaagcctcccctatcactaagaattgatcattgcataccttgatccacaaagcatctccacccttcaacaacatccaccacaacttggccaaaaggcagaaattaatatctacaaatcttccaatactcagtcctctataacttttaggcttgcaaattgagttccaagacttcagagctagaaaatattttttctcaattgatatatgtccaccaaaacctctatgctactttgcctaattctttagttactt

SEQ ID NO: 205384 - DNA, 1070 bp, Cannabis indica
gtccattcagtttacatcaacatggacaaagctagaaattgatagtgatgagagcaaaagagaattttttttaaagggggccaaaatattaatttcgaaggatcataatgtaaaatttaagaaatttaggttatgtcatgctatgtatcagtccttatacatcaagaataaagattggtggaactacgaagctccacatgtgagcagttggcattggaaaaaatgtagtaatcaaggataaattaatggagttaaatgagttcaagcaaatgcatttcaacatatcagaactctatttaaaagtttggctaaaagatcaaactcaatggagctggaactcttttatctgaatagacagagttttcccaagcgctgtttcatctcctagcttgctggttggagaagattgtaaatttatagaccagagagcgaattgtaagacaatatgaacttgatacaaaactttattgaatcaagagatttaaacactcttaagtttcatatgagaattctatgttgttgtcatcaatgatctaatgcatcatatttggggtggttaggatgttgctttatggaatcaacagatgtatattgtacaaacaattgttacaaatgcaatcaacatagaagtgaatgtaagattttctaattttaagaaagagaaaattagtagggtagattattcttagtaggcagattattcttagcattcctcttttatgatattagaatgataaaataaatctatgctaaattttatttgcacccacaaaattataaatgtactccaatattaaaataaataaacttaaattaatttaaaaaatttatatttaatatttttttaattgttttaccacattattttgtgctaattttaataatgattttaatttaattttttaaataatcatatatatattattctaataaaatttcatgtaatttttttaaaataatttgtccaaatagttaaaatttattttatttttatatttattttgtatatgtattttttaagaatttgaaaagaaaaaaaatgttagtgtaaaataaaaatatatttttta

SEQ ID NO: 205385 - DNA, 585 bp, Cannabis indica
tcaaagtagtaaccgaaaagttttaaaggacaaaaaatactaattattttaaaaattaaagggaaaacaattttgtgattttattactttatccaatattcattccaacaaagaacagagctatgtaggatatatggggccttggctccttaaaaaatatatttttttcattaaaaaattatttagtgggcctcgtaaaattattatgtgaaaattacactctatactctttttatattgtcatcttttatttttaccctttttttttaaagtctatcattttaacctcttttttaaatattatacaaattttgcccctgtcactttaaaatactctccatgtgactctcttatgtcagggtattttgagtacaatacatataaaaagaggtatgtttcaattaaatataaaattataggtaaatttgattaattgattaaaaaaaatagtatttttcaacttaccccattattattttttcactttgctcccttcacaaattctttcgggctctaattccaacaacaaatcaaacatcataatcaattcatattatagttcttattgggaaatttatatggtat

SEQ ID NO: 205386 - DNA, 829 bp, Cannabis indica
atatataaacattgaggaagccaaggttagccaataatatacctcttccctcagcacaaactgctttagccactacaacaataacttccaccaatccaaaggcaacaactgccaaccctccggccaccaaaaactctgagcacaataataagaggaagggcgataatggacgagactagaacaatgccaaaaagagcaaaagttactagcccatgttcacaatatactctgaacttgtggagacacaagaaaccatatatgtggcaaacgaacatcacgtggcctttcggatacctgaacctttgaagggaagtcgtgcgaagagggatccaactaagtattgccaataccataaagacattggacataccactaatgagtgtcagaacttgagggatgagatagagactcttatacgtaatgggccccttgcccattatgaaaggaataggcaatacaacccacaaggggtgaatgcacaagagcttgtagctccacgtgccaatgtgaaaccacatgtggcgccaggaaacaatgctcataatcccccggcacaaccacaagggggataaccgagacataacttgaaccttcctccacttgtggaaggagaggacgtgttgatcatatcgggaggaccacactttgcagggacaagaaatggagctcaaaagagatatattaatgagctcaagaactcagataagactcctttcataccagaacaatgtgctcccaagcaaagttgaattgaagattaggccataacattttccaacaaatatgcccatcgtgtacaaagtccgcattgttggattttatgccctaa

SEQ ID NO: 205387 - DNA, 505 bp, Cannabis indica
tcctcaagaaatctaatcaaacataataggaaaactcacataaggtcagattaacaaaggtggatagatagaaaagagagtcaccaaacttaccatttttaccttattttccataaataatgaagcagacaacttttcttctaaaaataaattaattaatataaaagtcaaatacataaaatataaaaatcaatttaaataccgagtcgaatttaaacaataaataatacaatatttttgtgacattaaagatgccaaaaataaaattaacaaattcaaaataaacttagctttagtactatggtatcatgaaaaataaattactataaatttattgtatctcccttactagctggtcgtgtccaaatttctgcctaaacattgaactattatgaaatatacgtgctgtcacatctctttatccagcttaaaccaacttcgaatgaccaaatcaaactttagaaagaaatcccaactcccaagcacttacaaaaaaaaaaaaaaa

SEQ ID NO: 205388 - DNA, 1526 bp, Cannabis indica
attacacaaggccacaactcataaaccagcagtaacacaatgttcaagcacatctatcggtggctgcaaggctttgcctaaatggcagccaccagctgctgattttttcaagctaatatggatgcagcagggatcaagcaggggctatcataggtgttggagctctaatccgtgaccacgacgacactattgttgcagtttttcaaagcctatccgtggatgcttttctcccaaagagatggagtctgctgctatgttccatagtgtggaatgggcaattgagcaccagctgcaaatttaagacagattctcctttaattgccaatgctgttaatcatatgtcttctactagatttataacatattttcatgatttagtagatgatattgcttatcttttatccttttttctggagcaaagtatctcattttaaaaagatgctaataaaacaacccacgctgtaactaaatttgctcttcgattgaatgatacttagttggggaaattctttctttaatctgttattaatgactctcatttttaataataacatattttctaaaaaagaaaaaaaaaagtaaaagtcaaaattaaaagaataaaattgctaattattccaattttttatacaatctattaatctatcctgtattattagtaaaaaagagtatataaggataaattgtattattttggagggttggcgtgttagccgatattctccttcacccgaatctcttctatttttccgttcggtactgaattctcggtgaagagcatcttcatcttctccggcagatctatccctaattcactgtgccctctgtcgagatcgatctctcagattcttctggtacgtggtctctctctctttctctctaattcgtctggtatgtgtgtgtctagctatattacacatttatttaactggttttttttggatttagatctgattttgttttctcagtggaactcctcatctccatagctctctctcacgctcaaaggtagctcagaatcagaggtatacatggtttcttaaattatttgttttttttttgggtaaagtttgtttgtctgaaattatattgttggatctgatttagaagctttgaaagtactgatttgatttctcagcggaactcctcatctccatagtttttttttgttcttggtgattacgagaagaagattgagaactttataagctaattgagactttttttttttaatattaattcgttcttttgaatcttaacttgattatatgtccctgcatataatgaagggaagacatagtcactgtctttgattatcgatatgtttggagaatactttcatgctaatcaagttgaaatctgaagctgtttacatgaaattgttgcatttttatttgtatcttttgttgggtttccttttgtgttgtttctctttttctctttggtcatttttcttccatgaaatttgtttgggtcttttttttttttttttttttttagttttgtagtgtgttgttgttcgcgta

SEQ ID NO: 205389 - DNA, 1780 bp, Cannabis indica
tttcaagcactaataatcatttttaccgaaaagtaaaaatctcaatttttttgatagtggtactccttttttcagaatatttttttctcactaggcacaatgaattcgtactactaaaacatgaagatgtagataagttttacgttaaatttggttaaaatagcctcctaattcaaaaatttaaaaggctcttcttttcaaggtaaattttgacaagttttttttccatattcttacactcattagcttactctttaaatctcaccatatacatcttaagaaattgtgaaatttcatagagaggaagccaagaccgttgtatatcacttttatattggacacatggagagaaaacttacctttctggtagtggtacccctttgtgaaatgtatctcgatatatttttcctcgataggcacaataaattcatactactaaaacgtaaatatgtatataggtttcacgttatatttgtttaaaatggtcacttaatacaaaaattaaaaatattattcttttcaaggtaaattttaacaagttttttctttactcttacactcgttagtgttctcttaaaatctcaccttacacatcttgaaaaatcatgaaatttaataaggaggaagccaagactattgtatatcacttttctatcaaacgcgtggagatgaaatatagttttcaagcattaataatcatcttttaaaatagtaaaaatctcacttttctgatcgtggtacgtctttgtgaaatgtgatgtggacccatctcagaattttttttcctgataggcacaatgaattcgtactgctaagacatgaagatgtagataagtttcgcattaaatttggttaaaaatggccccctaattcaaaaattaaaatgttctacttttctgtgtaacttttgacaagttttttccttactcttacactcgttattttcctttcaaaatctcaccctacacatctcaaaaaatcgtgaaatttcacagggaggaagacaagcgttgtctatcacttttctatttggacacatggagaggatatgtagttttcaagcactaataattatttttatcaaaatagttaaaatctcgcctttctgatagtggtacccctttgtgaaatgtggtgcggacacatcttagaatattttttctcgctaggaacaataaatttatactactaaaacgtgaatatgtaaataggtttcgtgttatatttgtttaaaatagctccctaattcaaaaattgaaaatgttattcttttcagggtaaattttaataatttttttccttactcttacactcattggtgttctcttaaaatatcaccctacacatctcgaaaaatctagaaatttcacagagtgaagtccaagactgtccatcacttttttattggacacatggagagaaaacatagttttcaagcactaataatcatttttatcaaaaaagtaaaaatctcacttttctaatagtggtacccctaaaatatggtccagaccaatctaggaagatttttacctactaggcacaatgaattcataatactaagacgtgaataaatagataggcttacaattaaatttgtttaaaattgcccactatttcaaaaattgaaaatattattcttttcaaggtacgttttgacaacttttttccttactcttacactcgttagtgttctcttaaaatctcaccctacatatcttgaaaaatcatgaaatttcacaagaagaaagccaagactgttttccatcacttttttttt

SEQ ID NO: 205390 - DNA, 726 bp, Cannabis indica
ttattagtgctaaatgagttaacaaaagcatttaatgttatccataccaccgacaacttctacaggaacaaaccaacttttcagtactatgagttgttgttgttgttaattcttttctttttttcaaataataaaattagtgaagattctgaagaataatgacttgttaattttgggtgttctttcaaggttgaaataaaaagaagatgataaaattaaaataaagattctttgaaaatttaaagagcaatgaagcaaaaatatcatctaataccatttctagtaattataccaatttgatgtagaatatacaataatttagtataatttttttcactttttagtgcaccaattttgatgattcatactaaatattttattaaataaatatattttacctaaaagatttcgcagtttatattatttacatttagaattcaaaaataactaatttatgaaataattagtaagaattatatcatgactactagtaaaatagtgactgaaccagaaaatataaaacgatccggattgatcaaattattcacaccgaatttatttgatctaatctcaaatagtttggtccgaactaattaaagtttgcaaccacaaattacgaattatatgaacacctctagtctttatcttttatttagggcggaattcgtattcatgattgagtacgttatctaaatttttttaatttatctattctcgtttgtgaga

SEQ ID NO: 205391 - DNA, 1662 bp, Cannabis indica
gatagtaaagtcatcgaatgcttaatttaattgaggtattttctccagttattaagcacatatcgattaaaatttgttggcacttgttgaatgtcaagacctcaaattagaacaattagatgtgaagactacttttttgattggacatctggatgaaagaattctaatgaaacagcctgaaggatttgaagaggctaggaaaggaaaactgagtgtgcttgttgcggaagtctctgtatggtttgaaacaatctgcgagatagtggaacatgagataatgattatgtgacaacgataggtctgaagagaagtaagtttgatccttgtatatatttttgagagagaaatgaaaatattttgtatcaattgctgttcgtagatgatattctgataaccagcaagagtatacaagagatcaagcacatgaaactccaactaaagatggggtttgaaatgaaggatttgggtccaactagtaagattcttaagcatggatataagaagggaaaggaggaaaagactattgtacttaaatcagactagctacatcaaaaaggttctagatacctttgtaattagttactctaaggcaatgagtactctgcttgcacaacacttcaaactgagtgctacttaaatgccagaagatgaaactaagaagtcatagatgtcgagagttccatatgctagtgtcgttgaatccttgatgtatatcacggtttgtagtagaccaggacatagcatatgcactaagcatggtgagtagattcatgggaatcctgaaaaggagcattgggaagccctgaaatagattctactttagttgaagggaacggctaagaatgggctggtatttggcataaataactagaatgaagacttggatattatcaatgattatgtggcctctgattatgcagggtgtattaatacctgaaagtctttgaccggatacgtgtttactatgtttcgaacagctattagttgaaaagcgaaccttcaaaaaggtgtggcactgtcgacaactgaagcataatatatggcattgacagaaactatcaaggaataagcactgtggttaactgggttgatggaggagctaaagctcactcaaaaggttattactgtttattgtgatagtcagagtgcaattcaattaactaagaattgtgtgcaccatgaacgtacctaggacattgatatcagcatcatttcatacaagagatcgtggagaaagaagctgtgaagattgccaaggttccaactgaagacaatccgtctgatacgataaccaaggtagtgccaagtagtaagtttgagcattgcctgaaactaattggaatcagctgaacccggagggggctaaggggacaatataatttaaaacaatgatttatcaagtgacttcaacttgaaattaaggtaaaatttgttgattatggttacaatttttgtcatcatatattggaagttgttatctagagagcagataccagaatcttagtgtggatttaaaaagccatgtgcgaaaggtcttgtaaaatttagaaggtacttccggataagcttgtaccgtatatggaatgcctctcctggatagcttgttattaatccggaggtacactgccggatagcttattgtcaatcttgaaggtccatccg

SEQ ID NO: 205392 - DNA, 971 bp, Cannabis indica
acatgtacaggaattagtttcccatctctatcacgacctccttgaccgacagcaacaacttttccagtgttcagctaaattattaaacacacacagcaaaaatgagcccatgaagagaaaaggaaagaaaagtaagattaatataatgctaaacttattggaaacaaatttcaaatcattgcagaaatgtaaggttaatcaaaagtagtttctcttctttttcgtgtaaaatgaaggacctaatcaagaacatgataacaatattagcaagagaggaaacgcaaatgaattaaataagaaaacaacaaagaggttcatacttacattaaaatccccaaagaagtcgaaagcaaaaagataattattgcaagcataaccaaactaattacaagtatatacaaacagatatacagaaaaacggaaacacatttgaaaaacatatgaatcgtgaacagaaatcacaaaaatcaaataaaacaggcaaactttattacataaatactggtgttttcttttcatttcttatcagaatcaggtagtcggagttgtaattactttagaagccatgtttcgaacaaaacttatagaataataagaactctgtgtgtgcggataaaagaaatgtggggagaaaagagtaaccttggaagttttttcaggaagaagaatgccggagttagtctttgcaggagggacgattttctcaatcaaaatgcgatcgaacaatgggatcagccgtctcgccatatctaatcagagaagagaaaacaaccgaatgtagaagagtgtagaagcttcttctcagctttgagctctcaacgatgagaaagatggatactgaagctccatttagggtttaaggaggattttaggttgttcctgtaagtttactcttttaccctcgtacattgtgatttttagcctaagatatatggagcgaaataggaaaatttcgtttattatacttaaaa

SEQ ID NO: 205393 - DNA, 490 bp, Cannabis indica
ccatttttttcaaaacttggaaactaacattgaaatagtatgtgcaaatgttgcatttaggattttaagcaaaaaaatgttgtatttaggataagtcgtaatgatataactactgctatggttatatttgtaggtattacgtacaaatgggaccacctaaaaatgagttgttgattaaggtacaattcaagcaattttgatttatctctattatattttcagtttgaaaaagacattgggtaagtaagtataactaaacttataaacatatctcatagcttactggcaaaacagcatacctgagatgggccagaaattataaaaaggtccaatataaatgggtcaatgatttatagctaatccatttctcttctaccatagcttagggccggtcttgaggttgtggaccatagtccatggatgagtctgatcagtaaattttttttttttttttaaaaaaacacttttcatttttttttaagtacttttt

SEQ ID NO: 205394 - DNA, 981 bp, Cannabis indica
tcccttgattgtatgaacaagaaggaagcacttctgaaagccttgaacaaagcatcttcaagatacatttataaagagtattacaacaagtgattggcctatcatcactaggagtctttaggtcagccaccttaggagttagagagattacaatttcattgagcgacttaggcagattaccatcttgaaagaactctaaaatagtgttagagatttgatctcctatattcttccataatcccttgtaaaacccagatccaaagccatctaatccaggaattttagatgaatgcatactaaacagagccttcatcgcatcacttttactacaaggcctcattagagtaattttttgctccaaatcaagtctattaccctagtttaaaaagttaatagcaatttccctactggccgaacttctcctccccataaagttctcgaagtgggagcaaaagtgcttaataactttcgagtaatcatcttttattctatccccaactgtgaaagttgtaattctattttccaatcttattttcctcataataacaatgcttttatcactgaaattaacccaattaattttactttgctgcttcaggaagcaggaatacttattctgcaactccaaaagctactgctgagcttgtgaaactgtattgtacaacttagggtctattgggtgtgaagcataagcctctttgactttgataaattcctcctttgccatcttatactccaaggctatgtcaccaacattatttttataaaaccttttcagaacatgcttggcccgaaaaagattttgaacagttttacgaagggctcctccttgatcagcaattgtattctaactactcaacacagtttatttgtatccagtataagaagtccaatgattacaaaacctaaagggtttgaaacccaccttgagctcctggttttaatcacacaaaaattttgatttgagacgaaatcccattt

SEQ ID NO: 205395 - DNA, 638 bp, Cannabis indica
agtatgatcctgatcaatgtattactctgattatgtacatatgtttattggaattattaattttgtatgattactaaatatgaattttcccccattatagataacctcggcactttctaatgtaatatttttaatgaatacgattttttgatgtgtcagtcatttgatagttgtgttcaaacttctttcttctaatgatatctttatgtgtcctttttgttagctctatctgtaaatactgcactctctggtcccttattgagcagatttgatatagtccttgtccttttagatacaaaaaatcctgaatgggatggggttgtgtcatctcacattctttttgaggtattcaactcgttaataccaatctgttttctataaagccatttcatgactttattgtgatttttatcttattacttttacagggaaaacctgaaaaagatgagactgctgaagagttgtcgaaaatctggccctttcctttgcttcggaggtaaaatgacatagaacgaacactgttttatgtacttctattttttagaggtacaagattaacatttgaaggaatagctttatcgtttttttttttttttttaatttatttgtcattcccagttaggtattttaaatatttc

SEQ ID NO: 205396 - DNA, 924 bp, Cannabis indica
aataataaaaataattcgtgatgaaggtgacagttaaattttattgtcatgtgttaactgagtttatcattgtatacacctatatatacatgacactaacagtaaaatctcaaaactaataaaaatatgccatatataagtgtatacaataacaatttagttaatatttgcggtaaaatttaattgacgtttcaaaattacaaaaaaagtgttgttaaacgtataaaattaaaacataagagtttcaccgccaattatcgtaataataataataataataataataataataataataataataataataggctacttaattcatcgatgactcgattgtgaaaagatattaatagaatcgattattatagggtgagtttgatatgtattttaaattaatttgaagtattacaagggaaatttgtgattggtttaagatttgaatactattttatgttattaaaaattaaaatggtggaagtctacctaagaattcttgattagttgagtgttttcaaaaataaaatttgaatactattttgagttttaggctaaaaaatgaaaacaccatttttatgttttttatgttttcaaatcatagaatctaaaaactctccaattattctcttattttttattttgagattcccaaccaatcacatattcaatttttaaaactcaaaaacattaaatcacactacaaccaatcacatatttagaactaatttttacttacaaaatttaaattttgtttccaaaacatattaaaaaacacaattttgaatcacaaaccaatcaaaccaacttaatatggttaaaggtaaatcataattttttaatatatcacctaatttgaaatatagtatctatactttgaatatcttttactcccaaagataccattacatttcaaaaaaaaaaaac

SEQ ID NO: 205397 - DNA, 544 bp, Cannabis indica
gaagaatctcctcagcttctgcaaatctgttactcctgatcaaaaccttagccttatacaaagcttgggaggatgacccagatttaactctgattttcggagttcccgcgttaatcattgccgtcaagttcaaactatcttcgtctccggccgagaccgccgattccggccggcgagccaccagaacactttccggagaagatacgtggtgctgcctcttcggagccctctcgttagtgaaaaaaacggtggtggtggaatgtgcggaagagcaatgcgggataaggtggagagtggatttggagaggtggatagggttttgagaactggaaaagagaataggattagggtttagaagaagaaggaagaagctgcatgcttgttgtgtatgtgtgtgttaatggagctgagcttgaattgaactgtttcaaatggagaacaagaacactgcaaaaaaaaaaatgaagaaggagaagaagataggtatgtgattttactatcgtgcccttctcggattttattctactgacgtggaaatatatta

SEQ ID NO: 205398 - DNA, 661 bp, Cannabis indica
ctagagcacggtacaatgaccttaaactatattgtggcttttgattagctccatcctgcagtctttcttcagcgtctacttttgcttccttataaaaagacacaatatttttcaccaattctggatttgatacgctgtcacccaaaaatttattgacaaagagagtgagatcttcatcatctgagacgtcatcaacaaaatattcagtaaatctgctccgtaaagagaatggaagatccctcttcccagcatcagttgcaggattcatacaagcaaacaaacgaaaattaggatgtcgacgtacacagctaatatcccctctttcagttaaacaaagtgaaccactgtctccatcaagaacaccaacaactctctgcagagtctcgggaggagccaaattcacctcatcaagcaaaatccattcaccacttttcaacgcatttacaaaagccccctctacaaatgaaaatataattccagatgaaccatctaattgatcctcgaccatttcaagctttccagataaattatctaatcgaagttcatcctcttctgtcttctgtcgctttcttccacttttagttgatctgtcatcttggagaaatttaacaccgtgtcgaagcccttttataaccgatatccatttttttttggcgagatt

SEQ ID NO: 205399 - DNA, 848 bp, Cannabis indica
taagaggctgtgaggctgtaagatagtgagacaggggctcacatgtgagcgtgcatgtgtgtgtgggtgcattgatgcgaggttatgagacagtgagacgggggcttgcatgcgagtgtgtgcacgtgtgcgagtgcaatgttgctgtgaggggctgcaagacaagagctcacatgcgagcatgcatgtgcgtgaatgtgtgtttgtgagcatgcatgaaagcatgcgtttacgtgtgtgcatgtaagtctgtcagcgtgaaagcgttacgaagtgctgagtatgttgtttgtgtgaaaagaagtaaatgtggaatttgaatgcacataaaaaaggataccattataggggaatcaaaggagaaggtgtgcaatggagaaatgtagaaccacaccttctacaaattctaaaagtaaggaggtacgagtagtagaggcaacatacctgcaaggtctgaggacccaactgagggtacactgcagccacagtcttgcaaccagggaccacacacctgcaaccagggaccacactcctgctaccaggaatgacactcctgtaaccagggagcacactcctgcaactggggaccacctaacacttgacaaaggtatgagttgcaagccactcctgcacatgcgacgtgcatcctaaaaatgacactttgtccccttgggactcaccatgtaactcaggccattacgatcctataaaatacccatttcttagatgtgagaaggggttgaaaaattacttctgtaacttgactttgagagcaagtagaaagtttattattttctctctatttttagatactaattgtaatttatatttcatctttctttcgtctt

SEQ ID NO: 205400 - DNA, 671 bp, Cannabis indica
ctgctgcaattgagtgtgaagaagcctcaaatctgggcaagtaatattctcctgctgtaattcctctagaaaatcataacaaccagcactttaaccgatcaataatgatgaagaaggtgtctcaaactttcgggagagggcatcaacagcaaaatttaatgtacccgctttgtattcaatagtaaaatgaaaacccagcagcttatgaatgaactgttgttgttccggtgtttaaatgacttgtgttaagagctcccgtaaacttctgtggtctgtcctgataatgaaatggtggcctaacaaatactgtcgccatttgttgactgcttcaactatcgcacgcatctcccttagataagccgacgaacccatgaaacgaggtcccaatttcttgctaaaataagccaatgggtggccatcctgcattaaaatagctcctatgccgacgttagatgcatctgtttcaactataaattctttagaaaaatcaggcaacttgagtacgggtgtctcggtcatcgctttcttgagatgggcaaaggcagtagcagcttcggcagtccatttaaaattgtctcgcttcagtaagtcagtcagaggggatgctattgttgcataatgagatacaaagcggcggtaatatcctgtaagacccaagaatccacgtagtt

SEQ ID NO: 205401 - DNA, 784 bp, Cannabis indica
attttggaccctgactctgtgatcggacaccggccccaacccaagacatcgactcctgggtctcggctaccggcctggaccttagacactaaccctcggccacgacctgactcggacctcagtccctttctcaatcgcaacctggccctcaaacctggaccccaaactcattccttagacatgtaactctagacctcgatcgatcccagttttgcccccgaacttggacccaaacattagccccagacccagaacccctaagacacagacataggcatggacccatacttgtacctgtacctgtacctaaatcccaaccccagacacgaactcaaactctaaacctagatcctagaccccaacccctgtctcagactccagactcgaatcacgatgccgacccactttctcattgcccacttaaaaaaacaaaataaaaagaagtttttattccatgtacagtaaaactaaatataataaaaaaaatagtacaaaattaacaaattaaatgtacaatttttattatatctataaaaaaaaaacaacagtgctcactaaataaatgaatcaataaataaataaatcaatcataaaaacaatataaaaaaaaaacataccataaaatataaattaataattttcaattacaaaaacaacatactcaacatatataatacgtatatgcttaattaaccattttcaccataaccaattttacattatatatcaatgactgccataaaattggtgagaaatactaagaactaatactcatttgtacaat

SEQ ID NO: 205402 - DNA, 934 bp, Cannabis indica
tttggagtgatttggacaggtttttggtagtgcttcagtgagtgcaaaaacttaaaatcgtgacttttagccaccttctgaacttgtccactggttgtgaactggttaaccggttctggggggaagcagttaaccgtttctaggcagtcttgagaaattgagaatcgtatttttgttgttacttttcactcaggtattcgctttggacgttctatatactattttgaagcttatgacaagctataccatatggtgtatgtttttgggataacacttattggtttaccgttgttgtaacataaggccgagatcattagggatatttatcctcttggagctgacatgcatgaatctggatcaatggtaagaaatgtataatataccacatgacatgacaggtttcataattatcgattgtctgattaggcaatgataatgtgaatacaaaaatacaagctcagctaattaggtaatgtgatatatgaatgtcacactatggcatgagttttcttgattgtgcaatgtggcataagaatgccaaactatggtatgaatttgcctgattatgcaatgcgacataagaatgctggactatgacatgggcttacatgattaggcaatgtgatatacaagtgcacatgattaggtgatgtgatatatggatgccaagttatggcatagactgaaaccattgttaggtttcttcttggcaacgtacctaattaggtatgagcagtagtgacacgtgggtgccaggttatgacacagattgaaaccgttgttaggtttcttcctggcagcataccttataagatacaggtggtagtgatatgcgtgtgccacattatggcacagattgaaatcgttgttaggtttcttcctggcggcgtgccttataagatacgggtggcaatgatatgatcatgccaagtta

SEQ ID NO: 205403 - DNA, 654 bp, Cannabis indica
tttaattattaattgtggattatataatctatattaatttgtcttgtttgcacaaataaatatccccacctaccatttttggaaactaacattttggtgttatatacataatttcaaaatcaaattttgataagtcaatttgccatgctttccatgtgatatttttaatattattttatgtaaaatatatataggtatatatatgtgtcaccatattatcaagacctaaaaaaattaagactagtgtattttttaaaagaaattgcgaataagctatcagctatagtaaatcacttaaataaaaatctagatcaatatctacctctgtcatcaattgttggggatatacctttttaaaaatttctcattttcattttttataactattttaaattgtcggaaatactaaatattaacttttatcaatgatgatcctaaaaaaacaatttaagtattgatgggaatagtattttttttgtagaacaagattaattatatggacctaacctatattaattatgaagtagttacaatacatgtacaagctgtgtaaactcgaaaaaatatatcaatccaactagttcggatcaataacattatttttgtttgttttgacgtacattagagaggtaagattcaaacttgagactttat

SEQ ID NO: 205404 - DNA, 827 bp, Cannabis indica
atctattcatttgaaaattattgtttgtgggaaagaaatgtctaaaaattatgttttgatttcgttaatggtttttgatgcaaagaagagcagataaatgaaattgtttgtgggaggagatgtctaatgaacatgttttggtttattttatgatacaaagaacgagagagaccatgcaagaggtgcatctcttgctggagatgttggaagaattttgagacaagaaagaccaccagagatggggagagttctcaggcaagagagaccatcggaggtgcatctcttgccgaagatgcacactagagacgaaacaacatcataaattcaaaacttacgaggttatgtgctttttgtaaaaaaaaatgttatgttttagaatggggaagaacaggttatgttcagtgtttctcaccccctccaaactcactcacactcaaaagacgtctcatgccctaatattggctccgagacactcccaccgatgggttcttggagcccggtagaagaagctccttttgagggaggagtgttactattacaatttattagtcaattttatgttcgaaattacatgccagaatttttttttatttttttctatagctgtattgtttatagttacactatcatccctgtaaatttttgaaaaattcctaatttacaatgctaaaagtagagtttttgatattccagtttaccacgcgcgtctaaaaaacttcaaatgtatttttagcactgtaaattattcgaaaattttcaaaaatttacaagaatgatattataagtataacgaacaccgctataaaaaaattaaaaaaaaaatattc

SEQ ID NO: 205405 - DNA, 583 bp, Cannabis indica
aggattttgagatcgatgatattgagatggattattatttcgagtgggaaatcttgatgaagattcagatgttgttcctctgccagcattgttgtaaggcctagacccacaatttcttgatccaaaggtgagattagctgctagctttgtaaagagatccatcatagttgtgtgacgttcaagtcttgtttcatgagacatcaacaaggcttgaacctcctcaagagagaaattatcacttcgagatgtgataccgaaaaccacataatcgaacttaagtccaagaccatttaacagatgaagaaccagattaatataagaaatttgatgaccagcaatagcaaaataatcacaaaggactttaatcttgtcaacatagtcagagatccattgattacctttatgcaaattggataattgattcttgagctgtaaaaattaagccttcgattgacttgagaactttgttccaacgctttccaaacaacatttgagctggtataacatgccacaataccaagaataccttctattgaagatttgagctaagaaaggagcttatctttcttgcttgataagcagg

SEQ ID NO: 205406 - DNA, 817 bp, Cannabis indica
ttggtgatgtcaacccagccactgaatttaaggaaacctccactatctgagcttcagctgcctccatggatggtgtttcaaaggtgccgggagtccaatcttccggtggatcttctaatggttcatcttgtacacaatcacttgtaactccgctgatttacattcatgccccctataccaccgttcatcacacttatagcacacaccacggtttctcttatccctcaattcggccttctgtatattcttgaatcgggtgggtgaagttgatgattgagtggatttgtaactggagttggacgaagctagagaaagaggagatgacatgtgggtttgcacgtgagtccctttagtggcttcagaattgaaaaatgaattaatgggtcgtattgggcctgggctggacttacttggcccaatccgtgagttacggactagggtttggttggcttcaatggactctgccagctccattgctttgatcaacccattgggctccaagagacgtaaggggccttgcacctccatcttcaatccattaacaaaggcagcttccaacgccggttcagacatctgccccatggatgccgctaaagcttcaaatcggcgtctatactcctgcaccgaagtcgcctgctgctgtaattggaaaaaacgatcatacatcgttccttcatgcgccggctggaacctacgaatcaccatttcttaagtcttcccacgagttaactggctgccgagaattttcccatcgaaaccatcgaagggctgctccttccaaacacaacacggccgcttcgagttgctccgctggtgt

SEQ ID NO: 205407 - DNA, 1330 bp, Cannabis indica
agacattgtaaggctgaattggacttgaccgaaccatcactaagcatgtatagcccatctttacgctttcctttgaggagaagagcacctgttttcttgtccttaacaaaacaacagtttttgtgaaacttaagaaagatgtcattgtcatcgaccaatttagaaacacttacaagattcttagttatgttaggaacttgtaaaacagattgtaagtgcaaaggacaagaagggagataagatggaataacagagttgcctatatgagaaatgacaagtttcttaccatcacctatagccacggaatctgtgccagtgtaaggatgttgagtgtcaaaaggtcgagttgtcaaaggtaacatgagcagtggccccagtatcagcataccacgtgttgtcatcaccaaaaatcttgaaccatggtagtggtgtaggtttgagggtcatattcgaactcaagttcagtgagatgagcttgggagggggtggatttggtctaggcacaacccagttcttgtcgaacctgtagtggcacactggtgcagtatgacccgatcgaagacacacttgacatatgacacgttgctgattgtaacgtggaaagcctctacctaggccattagacgattggggatagtaagattgattgttcttggctgtggaatatggtcgaacacctcctgatctaccattagcaaaggcaagatttgcctgcatcttgacttcaagatcactcacagtttggtgatgttccaatcgactttcgtgagacagaagtaaggcctggacttcctccatagtaagaacatcacttcttgatgttattccagacaccacataatcgaattctgggccaagaccattgagaagttgaagaacaagatcatggtcatgcaccggagaaccagcaacacttaaggcatctgctatggactgaactttgtcgacgtattcagaaatggagagattccctttctggatagtggaaaattggcccttgagctgaagccttcgagcccgtgtttggctagcaaatttctgttccagtgcgtgccatacaccagcagaggaattgtagtttgccacagaggcaagaatgctctctgtcatggaggatcgaagccatgacagtaagagttggtactcgtctgcgccatcgcagaaatctgggtttgggtcccctgtaacaagatgttgaggaggagggacacccgtgaacaagatctcatcgagatcatggccaatcacggtgggaaccacttgagatttccaagaaaggaagttcagtcgatccaatttgagagtgagagtaggaagtgagggattagag

SEQ ID NO: 205408 - DNA, 745 bp, Cannabis indica
atttttcaacctaccccgaaaataaaacgtttcatgatataaaaatctagtctagctagctcattaacaacacttagcacactctttagtctttctttgctttaaatagtgtatttactttataattactagcttcaatagtaaatatacttaatactcatttacaagcattaatttccccaactgcctacaaataaatagggttgaggtctcactttacatgaaaaaaaaaaacattgttgaatttgcaaacttaaaagtcaattgaaccacctaaaatccttaatctttcacaatttagtagttgacaaaaacataagttaatagcatcatatgttaccaaatgagtaaattttctaaagcaaaataaaaagctcacttcaatgaggaaaaaaataaaggatattattttgattagaagtaaagaattttttttagatttttatccaattttggtttgtaatattaattaaaaacattatgtttgatccatatatttcatgtattgccaaatggtaataccacatcataagtacatgcattttaaataaaaaaaaaataaaatttaattaaataatcgtataaatttaatattttttattattcagaatatttataattattgataagtatgatatgctacttgttcatttgggatataaatttagtgttcttcacattattttgatattttatatttatactagtttatgaatcattagtttttttttttcagttttataaa

SEQ ID NO: 205409 - DNA, 974 bp, Cannabis indica
aaccaccaaacattaaatattcaattatgatcggattaattgtttatttttgaatatctaattgaatcaaatcagaattggattaggtgtcccaaatctaatacaatatttaatcgaactaattaatatttttatttaatttaaatgagtaattaaattttatattattatacctaatccaatctaacataccataaatgttggatcgattggatgactgctgaaattaattggattggatcagattataaaattcaacatccaatatataattagatgatatctgaataaacctatgtggtccaataaacctccttaagcatgtgtacatatttatgagtaagattccttggatttaaccaaataacacaattcaattaatataaatctaactaagtattcacataattaccaaccaaatacattaacgaattaaataatgcaacttaatcaatattaatctagccaaatattcccttacatactcaaccaaaataacatttataaattaatctttaaacaatcatatatgtgtatatattttccttcttaaattcatcaacacacccctaatatagtactgctcgatctataaagctggcttggtactgtgatgaaggcctcatattcggatctggaatcaaatccctcaatctagaaagaacatttctagtatattaaatattaaaattattagctccatactaaaataaaaaataaacttttattagtggcagtaaatgttatttttattattattattttttttgacttactaaagtaacaaaacattagtcattgtgataaaaagatttatttactaaatggcaagactattattgctagtataatgattatgcctttcattacaataataattaagaattatcaccgcactatattaagtctataacgtcgtaatttttctttttcttttactttttctaagtttttctttaaaaaaaaaaaacgtt

SEQ ID NO: 205410 - DNA, 994 bp, Cannabis indica
aatttagtgaaccaagtaatagctaccatcttgaatggtacatatatattaaaagaattagaagaaaatcttgttctgtcaaattccattaattaaatcgcactaattaattaatgaaattattataattaattcaaagtgatcatcataggtacaatagtgttaaaaatgtgtttatattaaatgcattttagtaatcaaggttaattttatatgaaggtgagcttaattcctaactacgatttttataataatagatatttctagaataatgattaaataaagttgaaagattgagtttaataagttttaattagtggggtctcaaagaatatatatatattaataaaaagtccaatatttaacaccaattcatgcatgtgtgtctagactctagacactaccaacacaataccccacatcacaccttagtttgtcactataacaatgtacaaatatataatgtgtaattatttacagcataaatacttaataattcgtagcataaatatttaaaattaattctcagttacatattataattatctaaatttaatttttaaaggtaataatacttaagttatatttctgaaacattcgtaaataattgactgttaagtgtcaaattattattcacgtattatttttttattggtatatttaaattaatttttaaataaaaaataaaaatttaataattttgactaatcaaaaattgttacgtggctattgacttgacacttaatggttaaaaatttcgaaaatataacttaattaatattattattgtcaaaaattaaactttagtatgggagttatacttaagtatttatgtcgtaaattattcatatataaatagattttcttagttatatgagtatcatatcgggagttaaacttatgtatctataccgcaaattactcatatataaatgaattttcttaattatacgagtatcatttttgctcttattattcaggcatttttattttt

SEQ ID NO: 205411 - DNA, 1201 bp, Cannabis indica
gtctttatttgttgacttgcctagtgccaaataatacttttccctgagatcggaccataatttggccgacagggcacgtcttgtgcttcatatgtgtttttttctgtacaaactatactgtatacgaagaaaatactcttacatttttcattgtttggaagttgaacgaggtggtggtgctccctatggaaatgtacaatttgtttgtctgtgaactttgtattcttttaggtcttgtttggtgagcaggattggattaagtaatcctaatctggtgtttggtgtggcaactccttgtataggattggataagtaagctttacaaagttggagccaatgaatagtagctaagaaagagaaaataaaatccctttgcttctcaattcttgcccaaaccccaaatcttccaaagcttagatcttatttttaattttattcatcatatcattttttttttgctatagatttttatgtcgattattggacagtgatttttattttctgtgtgcagatttaacaaactgtattcaggatgtactgtacaaaaggaaagtttgaggaaatttttatcttggtggtgaaaaaaaaaatcatttctgttgtgtttctaatgtttaattttaattcgttattctttggaaaataaatagacaccattgatacatatctttctattttattaattctatttatatcaattaattactcaggttacaatgcaaaaatgacaattcttcataccatactataccataaccaagcacctaaatcatcactactagtgtcaatctctgcactcgtgcaaatacgtgtatatatagattctttgttcctttgccaaacaaacaaacactagaaaagattattatgctttgcatgcactatacgtgtgtgtctgtaatctggttttgcaaattctagttctccatcacttatgggccccaccaagatggggacattagatagatactgacctcttatcaacaaaatcttaaactcaatattttgtttgtggttcatgagagtgagtatgaataagtagtgtatctagttgaaaaggagtatggaaaatgaaatgacattaacaaaccacattgccacctgttttgtgttttgatgttttataattattatgaggattaagcatcaaaggaagattgtggccttgtgtttaattcatgtgatcagtgagtgaatgagt

SEQ ID NO: 205412 - DNA, 914 bp, Cannabis indica
ataatatgaaccatacataatgtctagtaaagtatggattaatatattaggatatttttaccgtgcactttcttaaaaatgattcactaatgtatctacaatagatgatttatacaaaagggcagagaagtacatccatgtagaggagactaacaaagtcttgggaacatatacaagtgagtattttctacgaagttcgttagacccttacaaagtctgctaagtaggtatggcaaaaagatctatttattcgagttgggtcggtgatctgatctgacggatcattactgatctgaaatattcggatactcattgaatcttagatcaaattcgctctgcccgctttttttttttttttttgcagatcggatctgacccaacccgttttgaatatatatatttttgaaaatcgttttcaacatattttaaaaatattataattataatctcacctgtacatttaacatatctttctaaaaactaaccccatttccttattttttaatttaatatcaatataaatatataaaggaaagttaaaagagaggtgatgtggcatcttatgtgaaattttctttgtcgttttcttttttttttttttcaattttttacattgttttaatatttttatgcttttggtaatatgagagtcatgttaaaaaaaagtcccacatgaggttaggtcatgttagtgagagagaggtctttatgaattggagaaacagggcattctcaaaggcaaacttggaaagaaattggggttctgtgaagagtgtgtgtatggcaagtgcagtagagtgaaattcactccaggattatacacaaacaagggtaagttggattatgtgcactccgatctctggggtgcttcaaggactaaaggaccattgggtgtgctagttatttcatgagta

SEQ ID NO: 205413 - DNA, 663 bp, Cannabis indica
ttgaattactttcatgtaaccatagtgttacaataaaaaatagtaaccattgaatagttatatatatatttatatataatacaactcagatctctatatattagaaaatatagtagaattaaaccaaaagtttacagttttatttatttttggttgaaaagagtgtttattattcgcttatcacagtgccacagtaaaggacctcatactgtcatacatatgcatttggaaaacactatataatgtattttatcagatcatattgtaatgtaagcttgtcatgatgatgataatttatatatatatatatatatatatatctatgagtaatatatatgctctaaattaaatatttataaattaaaattttaaagtaatttgaaagattccatttccatgcttcattcagtcagaaaggaggtgaagaaaagccaaagtaaaaagtaaaattaaatgaaaaagaatgcaaaaactctggcgcgagttctggcccatatggaagaagaaggtcataaagattaaggagaagaaacacacataacataaacagctgcagtaataaaagcaaggagctaggtagaatatttaaattatggataaagacttttttttatgtagtattttacttttgcctgggaagatcttgttttgtttgaataattt

SEQ ID NO: 205414 - DNA, 906 bp, Cannabis indica
acctaatgtataataaatttaagcttatacgccaaaggcaaaggcaaagctgcgtccgtacgtgtcattatgtgagtgcatggagtacagagttttggttcccccaactggtttagaagcattttcaaaggcagaaataaaacaaaacaaacaaaaagtgaccaaaagaaagcttggttgatatatagaagtggtaacatgtcacacactctctcacactcactccctcactcactcactcactcactatagaaagaataaagtaattcatatatttacaacaataaagcttcttcaccagacttgacatatgctttgcaggggaaggatctaaaggccacacaatgtttttctccctcttttttctttctttctaatatcattattatttaatttctctgaataataaactgcatgtatattatcatatatgaatactacagaacaaaacatctcccatttaaaatccaaaattttcaaaaaccatagctattaaaagcatgtgagtgtttaaaacaaacgttgttaattagtccaaaattcccgttgcttataaaaaatctttaaacaataccatcaattactaatagacacaaattttaattttaaaaattttaaaactttattaccgtcagtttaataaaaccatctgcgtcctataaaaacatatatcacacatcttaaaaaacgtcgtattaggtcgtattgtactatattgtattatatagaattggattatatatcatatgtttatataatactaatgtgttataagctttaatttatactaaaatattatatatttagatgtctataaaagttaataccttataagttttacataaaaatatttcatgaaatgcaattcaatataatagtatactatacaatacggtgtaatacggc

SEQ ID NO: 205415 - DNA, 693 bp, Cannabis indica
tatttttgagacattcatgtgtttaatctttttgtttggcctttattcttatatatgactttacatgtacttttgttcggtgtgtaccacgctatgtgtaagcataacataggcatttatttacagtcaactatttaccacatataagttgttcaaaacgttgagtaatgcattaatgctttaaaattttaaattttttatatctacttaagcgagagtgcatttttacttactagtgtatgtatgggtgtggttgccccaaagtgactacgtaagttcacttcttggtcacttatcttatgacatgggtgttacttttatgtcttggtcacccactataacctcatacaccattgaccattattaggcttaaaatttgattcaataataatcatacaagctgcatcattatgtgaaaataacttgcaattttatttattaatgagattggcaacaatgccttattacatcactaattggcagtatctgctttaaactaaaacaaatctaaaagactaaacactaatagaattggccgtagattgaagggtacatcttcaactagtcaagcccaatctacctaatcacaggcactttcataagattcggtaaatgacattgctatgtttaatctcttttcatcacaaatcgacccattaaatatggactttgcaaagttagcaatgtttaata

SEQ ID NO: 205416 - DNA, 518 bp, Cannabis indica
tactagttatataggtgattatattcttaatttaatagcttaatagatattaaagttaaaaggtgcttatcaaaatcattaacacttatcaagaaattcttttttttaaagggtaatggaggaattctttagaattataagattttctttttgttgttgtagtaacaaaattaaatttataaaaatattttttttttttttggtagaaattataaaaataaaaattgataacatgtacgtacaatttttctttttgaaaaaaagtacaggcattaccatcgccattaacttcaaacaatgttttatatattcatcaaaatattccttgtgcttatcttacttagacatttcccactttatttttattgttattattagctgttaatgacaaattcttgagaattgtcgggccattcttctcatctaaagaaaaaaaaaaggtcacatagttcatacaaaattttatttttattttaatttaaataaataataatgtttctaaaataaaataaaataaa

SEQ ID NO: 205417 - DNA, 1002 bp, Cannabis indica
gtatttaaatgccatattaatttagtcacacgtaattaaatattgttgcaacttataaaatcgcatttagttataaaatttatgctgtaactaaagtttatcatgactaagataggtttttttttttaatagcgattaattagcatgaaacaaattgatgatacaaaatggtttgattttcaggatatctttctaggtgggagtgaaacatcagctataactgtcgattgggctatgattgaaatgatgagaaatccaagagtgatgaaaaaggcacaagatgaggtgagaaaaatctttggaaagaaagggttagtaaatattgaaacatcaataaatgagatgaaatacttaaaatccattgttaaagaaactctaaggttacatcctccagctcctttattacttccaagggaaaatagagaaaaaggttgcattattaatggttatgaaataccaatgaaaaccaaagttataataaatgtttgggcgattggaagagatcaaaaatattggattgaacctgagaatttcatgccagaaagatttgtcgattgctctgtagattttaagggcaacaatttcgagtttctcccatttggcggtggaaggagaatatgtccaggcatgtcatatggtatcatcaatgttgagtttattcttgcattgttgttatactactttgattggaaattgcctaatgaaatgaaatatgaagatttggacatgaaggagttgtttggcagtgtagttagtagaaaagataatttgtacttggttccaaccacttatgtgccattataatataatctgtttagttcaattaatatatattaaattttattgaaattttatttaaaggttagaagttattattacttgtattttgaataaaggaaatattaatagatagtacatgtatattagtttattgggtgaactttattttgaatcccatattttaaaattgttgttcggattaactgttttattaaatgacaa

SEQ ID NO: 205418 - DNA, 1410 bp, Cannabis indica
tttcttcttttaggtttcaaaattgattagctaccacacacacattattattattatttttattctaattatattcaaacaattaactttcttcattatcctttcctttcctataattatattctaattattttgttttgtttatttttataaattgagaaattataataactaaaaagagtgaaaatgtgtgaaaatatttatatgaaattaaatgtggtggagaattaatatatattaaattaatagatgtaaatatgtatgtgtgttgcattaataataataagtagttgggtgaccattaccaaaccacaaaatccatgtgatatctaactcatttcaatatttgacattatgtaaataaatgtgtgtatatatatgtatatataataaggtacatttcacataatgatatacatgactttaaatttataccacacaattaaatatgttgttgtcccataaaaatttaaaaaaaaaaaatatacaatttgtaataaaaaaattaatatttttacaattttttaaattttatttacatattttttatgtatttttatgttacatttttgttcttttcctggtaattttttgttatttgtatattatttttttatgttgttttgatgttatttcttgttacttttatgtggtttttttttttttgtatttttataaaataccataaaatttaaacgcaaaaatataaaattttacaaaaattagtgttttatgtaattatctcttaaaaatatcaatggttaaaattaattacatatcatactattattatagcgtataattcaagagttttgttacacaatggtgcctaatatatactttacgcaagactggctagtagactaaggtagatcaaggtcggccctaggctcaggtggactaagcgcgtgcttagaatccacccatcttaggggcctcaataaaaaaactatattttaaaaaaatatacatattttttaataagtttttaaaaatactatttattcatataataagggtccactttattttttttccttaagcctatttcaactcagagcagatcctgttagagattaagctcgtactttggccaaataattaatacttcttctctaattacatggtgtctcaaacttttaatcccttagcttttcattcaaataaattttaccatttcatcaaattatataccatataaaaaatatttggatagggatcccaaaaaattattttactttaggctctaaataacttaagattagtcctgactgtagttaatagttttctatataaattattaaattaaaatatataaaatttaatattgaattacaccaacaaacaatagtaatatcatttttgtggtgttggtatgaattactatgtttcataatttaataatttttt

SEQ ID NO: 205419 - DNA, 1166 bp, Cannabis indica
gttccccagaacaaaatgctcatcaaaattcaaactaaagcaaaaatcatgaaaggaaatgctacttaaatttccaaaattatctgggttttccactaagtttaaaagggaaaaaaagaaaagggttttctttaagaaaaccaaccaaaaaggaaaatgcaaactagctgaaaaaattgttgataatttaactgaaatcccatctgggtatctctaaaatttgatgaatttgaagaaaaatgaagtgaaacattggccaaagaagaaaagtgaagaagggtcaagatcggtttttgaactaaccaatggagcttgaactcgaaaacccctttgagcattagaagaccttacaccacttcggtccatctgatgaattttatatcacaagttcatagaaagaacacaccaagaaaaaaagaaaagaaaagaaaagactcaaaatcaaacaagctcgagtctcagctcagatcgagagcttgttcttcaaaacttcaaacttcaaaaatgaaaaataaatttctctccttttttctttttcttttatcttttcttttttcctcttcaaatgcaaacaaagatcacaaaaagtaaagctttttcttttttcttcctaagttagaagaatgagaacaaaacaccaacaaaaacattaacagcaaaccaaacccaaagaggagagagagagagagagatatctcttccttctttctttctctctctagctcaagagtacagctggacccataagccttcaccaacttctgattttctaagtgggtttagattgaataactacaaagattaattttttatgaaattaacatattgtaatttgattgtaactaaaataaagtttgcatttttatttattttctctttgtgaaaattttgtgtatgaattaaaaactacttaaagtctcaccttctcaccagaagacaaaagagctttaagggaaagtcttattgccattaatgggtcaacccatttcgacagagagagaaaggagagagagtcaaatgacacaaaccacattgaatcttgtttctctaataatatcattttttttatcataacaacaaaaattaatttaataataataagaactatagtaatgctaagctaatactatgtgtattataacaagttaagttaaagattccttttt

SEQ ID NO: 205420 - DNA, 568 bp, Cannabis indica
tatggttctccttatattgattctaaagttcttacttggaccctcctaaatcgtttatatgacactgctcctcttttgccttggctggttattggtgattttaatgactatttatctataaatgatcgtaattccacttcttctcctccctcccatgctatgcatcattttcataattttctgcatactcaaaacatgatccctctttctcactcgggaaataagttcacttggcgccatggtacaatttttgagcgtcttgactggtgcactatttcctcctcttggaacagccttttccctcacgcttccctcactcatttggggttttatggatctgaccatcgagccttaaaactccaatttaaggacactgcttccaagcatcacaaaccttctcgatttcacctggaaaattttcttattaatgacccttcttttcctactctggtccatgattcctggtgccttccttcctcgtcatctccttcccctttactcattttcttaataagcaatccatctcactctccaatattaaaagatggcaatcctctcagccttccct

SEQ ID NO: 205421 - DNA, 1129 bp, Cannabis indica
acaaccctggatagctggacagtggctgatccgtccacaagcaactttcagattggcttgtcttcatagtttccttctggtgagggtgctttttcttactcttcttctagctcaggattatcttttgagctgtttgcctcttttctcgtgcattcaaccgcaaaatctaccaaggcttgcccttttactactgtgtggggttggttagttatttcatattatcccaactatattgcccacttgagtagccatctaaatgcatcaggctttaccagaacttggcgtaaaggttggtcgatgtacactcgagctggatgagcttggaagtagggtcttaacttccttatggctaggagcagacaataatttaacttttcaatcagagggtaccagctttcagcctcaattagtcgtttgttgatatattagattggatgttgaacattgttctgttctcttatcagcacgacacttacagcgtaatcggtgatcgcatggtagatccctaattcttctttgtctagaggctttgagtgtatggggggttctacaagttgctgcataattcttaaaaagcattctcatattcctctgtctattcaaatttcttgttatctcgaaaaatattgaagaaagggaaatttgtctcttaattttgaaatgaatatgcttggtgcaacaatcacacaaagtagttcctaaacaatataggactgttcttaaaacatttatcatcaagttttcttcacaaaataaaaaagtcctacaaattaataaaaatagattgaaaatcaaataaatgtcacctaatttattatatatttttcttttatataaatatttattcaaccatcatatatacaaataataatgataattttataacaaataaaagcaaagattaatatttatttatataaaatatcaccaaatttattttgtgctctccattatacaaacttataaatagatttaatcaaccattatacatggaaaaaaaattaaataaataatcttgtgataaataaaagtaaaactttagacttatttatgcatcctaaacaatgtaatgtgagattgtttctaaaatatttattttcaaaaataaacctcacagattagtgaaaat

SEQ ID NO: 205422 - DNA, 714 bp, Cannabis indica
gacttgcatgaatatgaactttagaattaaaataaaactaagctgtgttaattaagcttttatgtatatatgttaggttaatattatttgtaatgtagttatacttaattatattttaaatttttcttttaattatttatatttttagttatataattaattctttttatattattcaataaataatatttttttataaaaaaaaatatataatttaagcactattcataaaaaatataataatatttaaaattagttattcattataattttagtttaattataataactttaattttataatattatttttaaaatatcaatgtttaaatatatatatatgaattggataacaaaaaaaaataaataaaagatcacttaggtccgtgagaacgaaaattacaaatggagagaacagctggatgtacttaattaattccaagattattcccttcggtttttatatatgattggtggatagtttatattatatagtgatagtccagagaacgtgctcaagtcaatctttttcttttttgttgatacaaacagccaaattcttttaatatatatgtccaacttttttgtttctttctgtggtgggtctaattctatatattactatatatatatatgagtcctttttacgatataattcagttaatatttaattagtatataagtttgatatacataataataattaaaaaaaat

SEQ ID NO: 205423 - DNA, 1771 bp, Cannabis indica
ctgagaacacccaatccaaaagctgaattccattcatggttgggagtttattccatttcctgttacgattctccaaaatagcccacatgactttaattgcctcttcgaattcacttttgtccagccgattctgtaatgacattaaaatgtcaaacatggatccatctctcacagattcacacttcttataccaaggaatgagtttccacaccactttagttttagcacaactccacaatacatgagttaaagtttcagcattgtttccacatgactcacatatcggatttacatgcatacctctatagagtagatttgttttagctggtagccagttgtgacaaattctccagctgaacaatttcatccgagggggtagctgcatactccatatcatcttccaccatttgtggattccttccatgttataacacctagttggatgtagatttatttcccttccaactcgatatccacttttgaccatgtattggccatttggagtataaggccaactcaatgaatcctcaatatacatgtcaatcgggattccttgaatccaaggaacatcatccttatgaaaatgctgtgtgacctttcccatatgccactgcccttctgttgtgatgaagttatggagctttgtatggggttcaactccagggttttgagtgagcatagccccagacggccggggtaccatttttcctcccaaatctgaatgtctcttccatttccaaccctccaacgagccccttccttcaaaatcttccttccccaacaaatttcgtgccaaatacaagaagagcccgatggacagccagcctccatgaaggacatagtaggataataactattcttcaaaactcgagctaataaggagtgaggattttggataagcctccacccttgttttgccaataacgcttggttgaattcagttaggctccgaaacccaagacctccttcttccttaggcttgcaaagtttatcccaagacccccaatgaagtttcttgttttccttggtgtcccccaccaaaagttggctgccaaagtgtaaaggtttttgatgagcttcttgggaagacggaagcagctcattatataacttggaatggcttgcacaatagcctttataaggatttcccagcctgcttgggaaaacatcgaagccttccaccctttgagtttattccaaactttatccttgatgacatcaaagacctcctttttccttcttcccacaaagctaggcaaccccagatacttagcatgattagacacaaggcacactcccaacctattagcaagaacatggccctgagctgatgtgatccttttccccatacaaacttcagacttttcaagattaatttgttgccccaagagtcttgagtatctttgcaaaataagcttcatggtgtcacatccattctcctttgcattgaggaacacaaagctatcatccgcaaagaataagtgagaaactttgaccctatctcttccaaattgcaccccatttatgtgaccagccctctctgcttcatgaataaggcaagataatccctccgagcatagtaaaaagagataaggggagagagagtcaccttggcgaagaccccgggttggttgaataagcccgtgcttctcaccattgataagaactgagaaggacacagttgttacgcacctcatgattttttcaatccatttctcctcatacccaagacccctcatcatggtgactaagaagttccactcaactctat

SEQ ID NO: 205424 - DNA, 812 bp, Cannabis indica
aaatttgaggtttgaccttacaacaagagccttagatgaagaaaattaaagcacaaaacatgtcgatttaataataaacagttgtcataaataaaataagtgatgtaaagttactagaaacagcactactagtcctgctttacgagatttttaacaagcaaaaatttctttggcatttactcgagcacatattacattatacataacacccttaccagtgatgtatctatatcgatgataatcataatacactgataaaaggcatgggttcccaataccataatgacagatttacctatctgcaatggcattatcattgtcattttcactacttcgattacttcacgaagaacatcaatgaagatacattttatggagtaggcaaaagaacagaattgggaaacgatacagacccattattgggagcaccgtgtatgttgagaattgaagtcaccaagttgtaaatctgaacattttcgaaagatggaatcttcttccctcttggaaaccgaggaccatggccaacaaatatggttctcatggaaaatatagcattgtcataaccatgagctccaccacactctttctcgttggttctcttttgttctaccttaaacccttcatcgagtaatccaattataggtggaattcgatcactagcaacataatgaagcctactgggaagctcctccttaagataaactcttaaatgctcaccattccccaccctcctagatttcaacccttcattcatttcttgaccacatcagctggatcaacgccttgaggtggacgaattgcaagtaatggag

SEQ ID NO: 205425 - DNA, 933 bp, Cannabis indica
gtgactaaaattaaattagtagttacctgtatttaaatactatacgttagtacaacttgtatctaaatactatattttaataacaacttgtatataaaattaatttattggcagctgtatcatttatggatttttgtggtgttggttctgctactgatattgctggtttggttgctggcgtggccaaaagggtaggtgattcaagtggggtgtgtcctcttgggctgaattgtgttggtagctgtgggaggttcggtttggctggtggagggcctcgagatgctagggtaggggtgatgcagacaattactgttggtgtgggtgaggggggggtggagacgggaggtggtatgtcagtagattcatccataatggggatttttctctctgtctacagacgtggcgattacagtaggtcggggctttgcgaggtttggtggggtaattagggatggtaatggggtggtgtgggcggcttgggctattgggtgtgtgggtaatttttgagttgatgttggagagcttttggctcttcatgagtgtccaatttggagtttattatttctaaggcggaatcaaaatcattgtgtgtctgtaattgggtgaattccccaagtagtaacattgctcttttttttttttttttttgaataaagtagtaacattgcttttaagtctattattgttgaaattatttttctgttaactgttgttggaggtggtttgtgtcaggccattttacgtgttgcgaatggcatggtccatgcactagctaagtctgttactaatttgttaggagttaagttgtggattgatgggtgtccaatttggggtttattatttctaaggcaaaatcaaattcattgtgtgtctgtaattgggtgaattctccaagtaataacattgccgagccattttacgtgttgcgaatgg

SEQ ID NO: 205426 - DNA, 1001 bp, Cannabis indica
attttttttttcaagtcttatgaacctaaaaagatcttaaaaggaaaaagaggttgagagaacttttgatgtcgggcaacgaaaaacggtcctgacaaatatatgatgtgtgctcaataaaatgtaaaagaatattatttgttaaaaaaaatagtatgacaaaaatattataattatgttttaaatttacgtacttaattgtttaattaatattgtattgaagatgagttaaataaaataaattaaaaatccaatcattgtgtacgtcatatatagttttgttccaatttgtgggaatagatagaacaccaattaaccgaaaccgaataggcaatctcccaaactcatgtgatatattctgatcaacacactctttcataaactctacatattgtccttatataaatattgtcctgatcaactcatatatatatatttaaaaaataaatatatgtgtatattttagttagttataaatatatttgtaatttaataaaatcatgtatatattttgagaaattttttggttgggagtatcaattttgattttgtcgttgagtctttttttttttttgtgtgtgtattgaaaggttataaattaaatttttatacgattaaatatgatgggaattatttcacaaaaacatacaaataaaaaaaattacaaaaataacgtttcacggaattttaaatatgtttacgattttttttattttatttactagaaaatatggtctttttatattgtaattttattaattttttgttactatgtatgttatttttttgtttgttattttgtatgttattttcatattacttttatgtagttttcttgttgattttatgttattttcgttgttattttttagtaaaaccgtaaaaatagtaaaaaaaattctttaacgtaaaaatgtaaatattttacaaatggtgccttatgtaattattcctatttatattagccatcttgattgtttttgtattttttttgttaataa

SEQ ID NO: 205427 - DNA, 879 bp, Cannabis indica
ttatattttttgctaatttacattcgtactaattactaatataatttttcatttaaagagtcataatgtcaaccgatatagcttcttatcacgggggagacggtgatggttttgatccaccggatcctaatagggtaccctcaacttgcaaggcagctccaccgcccaaaagaaaaggtcgtggtgttgctagtaacatactattaaaggctcgtaggctggcaaatcagggaccattgccacttacgcttgatccagcaatgagaaaagttgttagcttggagaaccaaacttttgtccaccagttgggagttgaagttagtacattactgctagggaactacttagaatttgctgatatacctcaacattttaaggaacaagttgtgcagagaatgaaggtaaacaattgatagtcgaactaatttttatttataaataatcagtcaattaatcaataatttctttaagtgtagttatattatgatatagatggtcacagagaacatgaaaagtcatgaggactctatatcatgagatgggaaaatatattcagaaagaaaaaacattaggcatacttactttcaaaaatattacgaagacaaccatgataatctaggtggctatcaatgctaagcctgagtatgtaacaaaagagcattggaaatagattattgatttgtttttgaaccctaaatttatagagcgttccaatcaaaataagaaaaacagaaaataaataaagtacacctcaactcaaggtacaaaatcaacgacaactcaacgtcatgaattttattaattcatttaataaaattataatttttaaaatatctaacactaatatcaatacagaaggagccaaataaatatgtcttc
